(19) United States
(12) Patent Application Publication
(10) Pub. No.: US 2024/0263153 A1
(43) Pub. Date: Aug. 8, 2024

(54) INTEGRASE COMPOSITIONS AND METHODS

(71) Applicant: Flagship Pioneering Innovations Vi, LLC, Cambridge, MA (US)

(72) Inventors: Jacob Rosenblum Rubens, Cambridge, MA (US); Robert James Citorik, Somerville, MA (US); Yanfang Fu, Arlington, MA (US); Cecilia Giovanna Silvia Cotta-Ramusino, Cambridge, MA (US); Zi Jun Wang, Arlington, MA (US); William Edward Salomon, West Roxbury, MA (US)

(21) Appl. No.: 18/563,127

(22) PCT Filed: May 25, 2022
(86) PCT No.: PCT/US2022/030921

§ 371 Date: Nov. 21, 2023

Related U.S. Application Data
(63) Continuation-in-part of application No. PCT/US22/71018, filed on Mar. 8, 2022.
(60) Provisional application No. 63/193,559, filed on May 26, 2021.

(51) Int. Cl. C12N 9/12; C12N 15/11; C12N 15/90

(52) U.S. Cl. CPC C12N 9/1241; C12N 15/11; C12N 15/907

(57) ABSTRACT

Methods and compositions for modulating a target genome are disclosed. For instance, the disclosure provides site-specific recombinases (e.g., serine recombinases, e.g., serine integrases) capable of directing insertion of an insert DNA, or portion thereof, into a desired site in a target genome.

### CROSS-REFERENCE TO RELATED APPLICATIONS

[0001] This application claims the benefit of U.S. Provisional Application No. 63/193,559, filed May 26, 2021 and International Application PCT/US2022/071018, filed Mar. 8, 2022. The contents of the aforementioned application are hereby incorporated by reference in their entirety.

### SEQUENCE LISTING

[0002] The instant application contains a Sequence Listing which has been submitted electronically in ASCII format and is hereby incorporated by reference in its entirety. Said ASCII copy, created on May 25, 2021, is named V2065-701900_SL.txt and is 72,008,034 bytes in size.

### SUMMARY OF THE INVENTION

[0003] This disclosure relates to novel compositions, systems and methods for altering a genome at one or more locations in a host cell, tissue or subject, in vivo or in vitro. In particular, the invention features compositions, systems and methods for the introduction of exogenous genetic elements into a target cell genome using a recombinase polypeptide (e.g., a serine recombinase, e.g., as described herein). In some embodiments, a recombinase as described herein is an integrase. In some embodiments, a serine recombinase as described herein is a serine integrase.

### ENUMERATED EMBODIMENTS

[0004] 1. A system for modifying DNA comprising:
[0005] a) a recombinase polypeptide comprising an amino acid sequence of any of SEQ ID NOs: 1-11,432, or an amino acid sequence having at least 70%, 75%, 80%, 85%, 90%, 95%, 96%, 97%, 98%, or 99% identity thereto, or a nucleic acid encoding the recombinase polypeptide; and
[0006] b) a double-stranded insert DNA comprising:
   [0007] (i) a DNA recognition sequence that binds to the recombinase polypeptide of (a),
      [0008] wherein optionally said DNA recognition sequence comprises a sequence having 30-70 or 40-60 contiguous nucleotides of any of SEQ ID NOs: 13,001-24,432 or SEQ ID NOs: 26,001-37,432, or a nucleotide sequence having at least 70%, 75%, 80%, 85%, 90%, 95%, 96%, 97%, 98%, or 99% identity thereto, or having no more than 1, 2, 3, 4, 5, 6, 7, 8, 9, 10, 11, 12, 13, 14, 15, 16, 17, 18, 19, or 20 sequence alterations (e.g., substitutions, insertions, or deletions) relative thereto; and
   [0009] (ii) a heterologous object sequence.

[0010] 2. A system for modifying DNA comprising:
[0011] a) a recombinase polypeptide comprising an amino acid sequence of any of SEQ ID NOs: 1-11,432, or an amino acid sequence having at least 70%, 75%, 80%, 85%, 90%, 95%, 96%, 97%, 98%, or 99% identity thereto, or a nucleic acid encoding the recombinase polypeptide; and
[0012] b) an insert DNA (e.g., a double-stranded insert DNA) comprising:
   [0013] (i) a DNA recognition sequence that binds to the recombinase polypeptide of (a),
      [0014] wherein optionally said DNA recognition sequence comprises a first parapalindromic sequence and a second parapalindromic sequence, wherein each parapalindromic sequence is about 15-35 or 20-30 nucleotides, and the first and second parapalindromic sequences together comprise a parapalindromic region occurring within a nucleotide sequence according to any of SEQ ID NOs: 13,001-24,432 or SEQ ID NOs: 26,001-37,432, or a nucleotide sequence having at least 70%, 75%, 80%, 85%, 90%, 95%, 96%, 97%, 98%, or 99% identity to said parapalindromic region, or having no more than 1, 2, 3, 4, 5, 6, 7, 8, 9, 10, 11, 12, 13, 14, 15, 16, 17, 18, 19, or 20 sequence alterations (e.g., substitutions, insertions, or deletions) relative thereto, and
      [0015] said DNA recognition sequence further comprises a core sequence of about 2-20 nucleotides wherein the core sequence is situated between the first and second parapalindromic sequences, and
   [0016] (ii) a heterologous object sequence.

[0017] 3. The system of either of the preceding embodiments, wherein:
[0018] the recombinase polypeptide comprises an amino acid sequence of SEQ ID NO: n, wherein n is chosen from any of 1-11,432, or an amino acid sequence having at least 70%, 75%, 80%, 85%, 90%, 95%, 96%, 97%, 98%, or 99% identity thereto; and
[0019] the DNA recognition sequence comprises a sequence having 30-70 or 40-60 contiguous nucleotides of SEQ ID NO: (n+13,000), or a nucleotide sequence having at least 70%, 75%, 80%, 85%, 90%, 95%, 96%, 97%, 98%, or 99% identity thereto, or having no more than 1, 2, 3, 4, 5, 6, 7, 8, 9, 10, 11, 12, 13, 14, 15, 16, 17, 18, 19, or 20 sequence alterations (e.g., substitutions, insertions, or deletions) relative thereto.

[0020] 4. The system of any of the preceding embodiments, wherein:
[0021] the recombinase polypeptide comprises an amino acid sequence of SEQ ID NO: n, wherein n is chosen from any of 1-11,432, or an amino acid sequence having at least 70%, 75%, 80%, 85%, 90%, 95%, 96%, 97%, 98%, or 99% identity thereto; and
[0022] the DNA recognition sequence comprises a sequence having a first parapalindromic sequence and a second parapalindromic sequence, wherein each parapalindromic sequence is about 15-35 or 20-30 nucleotides, and the first and second parapalindromic sequences together comprise a parapalindromic region occurring within a nucleotide sequence according to SEQ ID NO: (n+13,000), or a nucleotide sequence having at least 70%, 75%, 80%, 85%, 90%, 95%, 96%, 97%, 98%, or 99% identity to said parapalindromic region, or having no more than 1, 2, 3, 4, 5, 6, 7, 8, 9, 10, 11, 12, 13, 14, 15, 16, 17, 18, 19, or 20 sequence alterations (e.g., substitutions, insertions, or deletions) relative thereto.

[0023] 5. The system of any of the preceding embodiments, wherein:
[0024] the recombinase polypeptide comprises the amino acid sequence in the sequence listing designated as Integrase By, wherein y is chosen from any of 2-11,258, or an amino acid sequence having at least 70%, 75%, 80%, 85%, 90%, 95%, 96%, 97%, 98%, or 99% identity thereto; and
[0025] the DNA recognition sequence comprises a sequence having 30-70 or 40-60 contiguous nucleotides of the sequence in the sequence listing designated as LeftRegion for integrase By), or a nucleotide sequence having at least 70%, 75%, 80%, 85%, 90%, 95%, 96%, 97%, 98%, or 99% identity thereto, or having no more than 1, 2, 3, 4, 5, 6, 7, 8, 9, 10, 11, 12, 13, 14, 15, 16, 17, 18, 19, or 20 sequence alterations (e.g., substitutions, insertions, or deletions) relative thereto.

[0026] 6. The system of any of the preceding embodiments, wherein:
[0027] the recombinase polypeptide comprises the amino acid sequence in the sequence listing designated as Integrase By, wherein y is chosen from any of 2-11,258, or an amino acid sequence having at least 70%, 75%, 80%, 85%, 90%, 95%, 96%, 97%, 98%, or 99% identity thereto; and
[0028] the DNA recognition sequence comprises a sequence having a first parapalindromic sequence and a second parapalindromic sequence, wherein each parapalindromic sequence is about 15-35 or 20-30 nucleotides, and the first and second parapalindromic sequences together comprise a parapalindromic region occurring within a nucleotide sequence of the sequence in the sequence listing designated as LeftRegion for integrase By, or a nucleotide sequence having at least 70%, 75%, 80%, 85%, 90%, 95%, 96%, 97%, 98%, or 99% identity to said parapalindromic region, or having no more than 1, 2, 3, 4, 5, 6, 7, 8, 9, 10, 11, 12, 13, 14, 15, 16, 17, 18, 19, or 20 sequence alterations (e.g., substitutions, insertions, or deletions) relative thereto.

[0029] 7. The system of any of the preceding embodiments, wherein:
[0030] the recombinase polypeptide comprises the amino acid sequence in the sequence listing designated as Integrase Cy, wherein y is chosen from any of 1-175, or an amino acid sequence having at least 70%, 75%, 80%, 85%, 90%, 95%, 96%, 97%, 98%, or 99% identity thereto; and
[0031] the DNA recognition sequence comprises a sequence having 30-70 or 40-60 contiguous nucleotides of the sequence in the sequence listing designated as LeftRegion for integrase Cy), or a nucleotide sequence having at least 70%, 75%, 80%, 85%, 90%, 95%, 96%, 97%, 98%, or 99% identity thereto, or having no more than 1, 2, 3, 4, 5, 6, 7, 8, 9, 10, 11, 12, 13, 14, 15, 16, 17, 18, 19, or 20 sequence alterations (e.g., substitutions, insertions, or deletions) relative thereto.

[0032] 8. The system of any of the preceding embodiments, wherein:
[0033] the recombinase polypeptide comprises the amino acid sequence in the sequence listing designated as Integrase Cy, wherein y is chosen from any of 1-175, or an amino acid sequence having at least 70%, 75%, 80%, 85%, 90%, 95%, 96%, 97%, 98%, or 99% identity thereto; and
[0034] the DNA recognition sequence comprises a sequence having a first parapalindromic sequence and a second parapalindromic sequence, wherein each parapalindromic sequence is about 15-35 or 20-30 nucleotides, and the first and second parapalindromic sequences together comprise a parapalindromic region occurring within a nucleotide sequence of the sequence in the sequence listing designated as LeftRegion for integrase Cy, or a nucleotide sequence having at least 70%, 75%, 80%, 85%, 90%, 95%, 96%, 97%, 98%, or 99% identity to said parapalindromic region, or having no more than 1, 2, 3, 4, 5, 6, 7, 8, 9, 10, 11, 12, 13, 14, 15, 16, 17, 18, 19, or 20 sequence alterations (e.g., substitutions, insertions, or deletions) relative thereto.

[0035] 9. The system of any of the preceding embodiments, wherein:
[0036] the recombinase polypeptide comprises an amino acid sequence of SEQ ID NO: n, wherein n is chosen from any of 1-11,432, or an amino acid sequence having at least 70%, 75%, 80%, 85%, 90%, 95%, 96%, 97%, 98%, or 99% identity thereto; and
[0037] the DNA recognition sequence comprises a sequence having 30-70 or 40-60 contiguous nucleotides of SEQ ID NO: (n+26,000), or a nucleotide sequence having at least 70%, 75%, 80%, 85%, 90%, 95%, 96%, 97%, 98%, or 99% identity thereto, or having no more than 1, 2, 3, 4, 5, 6, 7, 8, 9, 10, 11, 12, 13, 14, 15, 16, 17, 18, 19, or 20 sequence alterations (e.g., substitutions, insertions, or deletions) relative thereto.

[0038] 10. The system of any of the preceding embodiments, wherein:
[0039] the recombinase polypeptide comprises an amino acid sequence of SEQ ID NO: n, wherein n is chosen from any of 1-11,432, or an amino acid sequence having at least 70%, 75%, 80%, 85%, 90%, 95%, 96%, 97%, 98%, or 99% identity thereto; and
[0040] the DNA recognition sequence comprises a sequence having a first parapalindromic sequence and a second parapalindromic sequence, wherein each parapalindromic sequence is about 15-35 or 20-30 nucleotides, and the first and second parapalindromic sequences together comprise a parapalindromic region occurring within a nucleotide sequence according to SEQ ID NO: (n+26,000), or a nucleotide sequence having at least 70%, 75%, 80%, 85%, 90%, 95%, 96%, 97%, 98%, or 99% identity to said parapalindromic region, or having no more than 1, 2, 3, 4, 5, 6, 7, 8, 9, 10, 11, 12, 13, 14, 15, 16, 17, 18, 19, or 20 sequence alterations (e.g., substitutions, insertions, or deletions) relative thereto.

[0041] 11. The system of any of the preceding embodiments, wherein:
[0042] the recombinase polypeptide comprises the amino acid sequence in the sequence listing designated as Integrase By, wherein y is chosen from any of 2-11,258, or an amino acid sequence having at least 70%, 75%, 80%, 85%, 90%, 95%, 96%, 97%, 98%, or 99% identity thereto; and
[0043] the DNA recognition sequence comprises a sequence having 30-70 or 40-60 contiguous nucleotides of the sequence in the sequence listing designated as RightRegion for integrase By), or a nucleotide sequence having at least 70%, 75%, 80%, 85%, 90%, 95%, 96%, 97%, 98%, or 99% identity thereto, or having no more than 1, 2, 3, 4, 5, 6, 7, 8, 9, 10, 11, 12, 13, 14, 15, 16, 17, 18, 19, or 20 sequence alterations (e.g., substitutions, insertions, or deletions) relative thereto.

[0044] 12. The system of any of the preceding embodiments, wherein:
[0045] the recombinase polypeptide comprises the amino acid sequence in the sequence listing designated as Integrase By, wherein y is chosen from any of 2-11,258, or an amino acid sequence having at least 70%, 75%, 80%, 85%, 90%, 95%, 96%, 97%, 98%, or 99% identity thereto; and
[0046] the DNA recognition sequence comprises a sequence having a first parapalindromic sequence and a second parapalindromic sequence, wherein each parapalindromic sequence is about 15-35 or 20-30 nucleotides, and the first and second parapalindromic sequences together comprise a parapalindromic region occurring within a nucleotide sequence of the sequence in the sequence listing designated as RightRegion for integrase By, or a nucleotide sequence having at least 70%, 75%, 80%, 85%, 90%, 95%, 96%, 97%, 98%, or 99% identity to said parapalindromic region, or having no more than 1, 2, 3, 4, 5, 6, 7, 8, 9, 10, 11, 12, 13, 14, 15, 16, 17, 18, 19, or 20 sequence alterations (e.g., substitutions, insertions, or deletions) relative thereto.

[0047] 13. The system of any of the preceding embodiments, wherein:
[0048] the recombinase polypeptide comprises the amino acid sequence in the sequence listing designated as Integrase Cy, wherein y is chosen from any of 1-175, or an amino acid sequence having at least 70%, 75%, 80%, 85%, 90%, 95%, 96%, 97%, 98%, or 99% identity thereto; and
[0049] the DNA recognition sequence comprises a sequence having 30-70 or 40-60 contiguous nucleotides of the sequence in the sequence listing designated as RightRegion for integrase Cy), or a nucleotide sequence having at least 70%, 75%, 80%, 85%, 90%, 95%, 96%, 97%, 98%, or 99% identity thereto, or having no more than 1, 2, 3, 4, 5, 6, 7, 8, 9, 10, 11, 12, 13, 14, 15, 16, 17, 18, 19, or 20 sequence alterations (e.g., substitutions, insertions, or deletions) relative thereto.

[0050] 14. The system of any of the preceding embodiments, wherein:
[0051] the recombinase polypeptide comprises the amino acid sequence in the sequence listing designated as Integrase Cy, wherein y is chosen from any of 1-175, or an amino acid sequence having at least 70%, 75%, 80%, 85%, 90%, 95%, 96%, 97%, 98%, or 99% identity thereto; and
[0052] the DNA recognition sequence comprises a sequence having a first parapalindromic sequence and a second parapalindromic sequence, wherein each parapalindromic sequence is about 15-35 or 20-30 nucleotides, and the first and second parapalindromic sequences together comprise a parapalindromic region occurring within a nucleotide sequence of the sequence in the sequence listing designated as RightRegion for integrase Cy, or a nucleotide sequence having at least 70%, 75%, 80%, 85%, 90%, 95%, 96%, 97%, 98%, or 99% identity to said parapalindromic region, or having no more than 1, 2, 3, 4, 5, 6, 7, 8, 9, 10, 11, 12, 13, 14, 15, 16, 17, 18, 19, or 20 sequence alterations (e.g., substitutions, insertions, or deletions) relative thereto.

[0053] 15. The system of any of the preceding embodiments, wherein the recombinase polypeptide comprises an amino acid sequence having at least 70% sequence identity to an amino acid sequence of any of SEQ ID NOs: 1-12,677 (e.g., SEQ ID NOs: 1-11,432).

[0054] 16. The system of any of the preceding embodiments, wherein the recombinase polypeptide comprises an amino acid sequence having at least 75% sequence identity to an amino acid sequence of any of SEQ ID NOs: 1-12,677 (e.g., SEQ ID NOs: 1-11,432).

[0055] 17. The system of any of the preceding embodiments, wherein the recombinase polypeptide comprises an amino acid sequence having at least 80% sequence identity to an amino acid sequence of any of SEQ ID NOs: 1-12,677 (e.g., SEQ ID NOs: 1-11,432).

[0056] 18. The system of any of the preceding embodiments, wherein the recombinase polypeptide comprises an amino acid sequence having at least 85% sequence identity to an amino acid sequence of any of SEQ ID NOs: 1-12,677 (e.g., SEQ ID NOs: 1-11,432).

[0057] 19. The system of any of the preceding embodiments, wherein the recombinase polypeptide comprises an amino acid sequence having at least 90% sequence identity to an amino acid sequence of any of SEQ ID NOs: 1-12,677 (e.g., SEQ ID NOs: 1-11,432).

[0058] 20. The system of any of the preceding embodiments, wherein the recombinase polypeptide comprises an amino acid sequence having at least 95% sequence identity to an amino acid sequence of any of SEQ ID NOs: 1-12,677 (e.g., SEQ ID NOs: 1-11,432).

[0059] 21. The system of any of the preceding embodiments, wherein the recombinase polypeptide comprises an amino acid sequence having at least 96% sequence identity to an amino acid sequence of any of SEQ ID NOs: 1-12,677 (e.g., SEQ ID NOs: 1-11,432).

[0060] 22. The system of any of the preceding embodiments, wherein the recombinase polypeptide comprises an amino acid sequence having at least 97% sequence identity to an amino acid sequence of any of SEQ ID NOs: 1-12,677 (e.g., SEQ ID NOs: 1-11,432).

[0061] 23. The system of any of the preceding embodiments, wherein the recombinase polypeptide comprises an amino acid sequence having at least 98% sequence identity to an amino acid sequence of any of SEQ ID NOs: 1-12,677 (e.g., SEQ ID NOs: 1-11,432).

[0062] 24. The system of any of the preceding embodiments, wherein the recombinase polypeptide comprises an amino acid sequence having at least 99% sequence identity to an amino acid sequence of any of SEQ ID NOs: 1-12,677 (e.g., SEQ ID NOs: 1-11,432).

[0063] 25. The system of any of the preceding embodiments, wherein the recombinase polypeptide comprises an amino acid sequence having 100% sequence identity to an amino acid sequence of any of SEQ ID NOs: 1-12,677 (e.g., SEQ ID NOs: 1-11,432).

[0064] 26. The system of any of the preceding embodiments, wherein the first and second parapalindromic sequences are human.

[0065] 27. The system of any of embodiments 1-26, wherein (a) and (b) are in separate containers.

[0066] 28. The system of any of embodiments 1-26, wherein (a) and (b) are admixed.

[0067] 29. The system of any of embodiments 1-28, wherein (b) comprises a linear double-stranded DNA.

[0068] 30. The system of any of embodiments 1-28, wherein (b) comprises a circular double-stranded DNA.

[0069] 31. The system of embodiment 29, wherein (b) comprises:
[0070] (iii) a second DNA recognition sequence that binds to the recombinase polypeptide of (a),
[0071] said second DNA recognition sequence having a third parapalindromic sequence and a fourth parapalindromic sequence, wherein each parapalindromic sequence is about 15-35 or 20-30 nucleotides, and the third and fourth parapalindromic sequences together comprise a parapalindromic region occurring within a nucleotide sequence of any of SEQ ID NOs: 13,001-25,677 (e.g., SEQ ID NOs: 13,001-24,432) or SEQ ID NOs: 26,001-38,677 (e.g., SEQ ID NOs: 26,001-37,432), or a nucleotide sequence having at least 70%, 75%, 80%, 85%, 90%, 95%, 96%, 97%, 98%, or 99% identity to said parapalindromic region, or having no more than 1, 2, 3, 4, 5, 6, 7, 8, 9, 10, 11, 12, 13, 14, 15, 16, 17, 18, 19, or 20 sequence alterations (e.g., substitutions, insertions, or deletions) relative thereto, and
[0072] said second DNA recognition sequence further comprises a core sequence of about 2-20 nucleotides wherein the core sequence is situated between the third and fourth parapalindromic sequences.

[0073] 32. The system of embodiment 31, wherein the first DNA recognition sequence has the same sequence as the second DNA recognition sequence.

[0074] 33. The system of embodiment 31, wherein the first DNA recognition sequence does not have the same sequence as the second DNA recognition sequence (e.g., wherein the second DNA recognition sequence comprises at least one substitution, deletion, or insertion relative to the first DNA recognition sequence).

[0075] 34. The system of embodiment 31, wherein the first DNA recognition sequence has at least 70%, 75%, 80%, 85%, 90%, 95%, 96%, 97%, 98%, or 99% identity to the second DNA recognition sequence.

[0076] 35. The system of any of embodiments 31-34, wherein the heterologous object sequence is situated between the first DNA recognition sequence and the second DNA recognition sequence.

[0077] 36. A system comprising a first circular RNA encoding the polypeptide of a Gene Writing system; and
[0078] a second circular RNA comprising a template nucleic acid of a Gene Writing system.

[0079] 37. A system for modifying DNA comprising:
[0080] (a) a polypeptide or a nucleic acid encoding a polypeptide, wherein the polypeptide comprises (i) a reverse transcriptase domain and (ii) an endonuclease domain; and
[0081] (b) a template nucleic acid comprising (i) a sequence that binds the polypeptide, (ii) a heterologous object sequence, and (iii) a ribozyme that is heterologous to (a)(i), (a)(ii), (b)(i), or a combination thereof.

[0082] 38. The system of embodiment 37, wherein the ribozyme is heterologous to (bi).

[0083] 39. The system of embodiment 37 or 38, wherein the template nucleic acid comprises (iv) a second ribozyme, e.g., that is endogenous to (a)(i), (a)(ii), (b)(i), or a combination thereof, e.g., wherein the second ribozyme is endogenous to (b)(i).

[0084] 40. The system of embodiment 37 or 38, wherein the heterologous ribozyme replaced a ribozyme endogenous to (a)(i), (a)(ii), (b)(i), or a combination thereof, e.g., wherein the second ribozyme is endogenous to (b)(i).

[0085] 41. The system of any of embodiments 36-40, further comprising an mRNA encoding the polypeptide of a Gene Writing system.

[0086] 42. The system of any of embodiments 36-41, further comprising a DNA encoding the polypeptide of a Gene Writing system.

[0087] 43. The system of any of embodiments 36-42, further comprising a DNA comprising the insert DNA of a Gene Writing system.

[0088] 44. The system of any of embodiments 36-43, further comprising a DNA comprising the insert DNA and polypeptide of a Gene Writing system.

[0089] 45. A cell (e.g., a eukaryotic cell, e.g., a mammalian cell, e.g., human cell; or a prokaryotic cell) comprising: a recombinase polypeptide comprising an amino acid sequence of any of SEQ ID NOs: 1-11,432, or an amino acid sequence having at least 70%, 75%, 80%, 85%, 90%, 95%, 96%, 97%, 98%, or 99% identity thereto, or a nucleic acid encoding the recombinase polypeptide.

[0090] 46. A cell comprising the system of any of embodiments 1-44.

[0091] 47. The cell of embodiment 45 or 46, which further comprises an insert DNA comprising:
[0092] (i) a DNA recognition sequence that binds to the recombinase polypeptide,
[0093] said DNA recognition sequence having a first parapalindromic sequence and a second parapalindromic sequence, wherein each parapalindromic sequence is about 15-35 or 20-30 nucleotides, and the first and second parapalindromic sequences together comprise a parapalindromic region occurring within a nucleotide sequence of any of SEQ ID NOs: 13,001-25,677 (e.g., SEQ ID NOs: 13,001-24,432) or SEQ ID NOs: 26,001-38,677 (e.g., SEQ ID NOs: 26,001-37,432), or a nucleotide sequence having at least 70%, 75%, 80%, 85%, 90%, 95%, 96%, 97%, 98%, or 99% identity to said parapalindromic region, or having no more than 1, 2, 3, 4, 5, 6, 7, 8, 9, 10, 11, 12, 13, 14, 15, 16, 17, 18, 19, or 20 sequence alterations (e.g., substitutions, insertions, or deletions) relative thereto, and
[0094] said DNA recognition sequence further comprises a core sequence of about 2-20 nucleotides wherein the core sequence is situated between the first and second parapalindromic sequences; and
[0095] (ii) optionally, a heterologous object sequence.

[0096] 48. The cell of embodiment 45 or 46, which further comprises an insert DNA comprising:
[0097] (i) a DNA recognition sequence that binds to the recombinase polypeptide of (a), wherein optionally the DNA recognition sequence comprises about 30-70 or 40-60 nucleotides of sequence occurring within a nucleotide sequence of any of SEQ ID NOs: 13,001-25,677 (e.g., SEQ ID NOs: 13,001-24,432) or SEQ ID NOs: 26,001-38,677 (e.g., SEQ ID NOs: 26,001-37,432), or a nucleotide sequence having at least 70%, 75%, 80%, 85%, 90%, 95%, 96%, 97%, 98%, or 99% identity to said parapalindromic region, or having no more than 1, 2, 3, 4, 5, 6, 7, 8, 9, 10, 11, 12, 13, 14, 15, 16, 17, 18, 19, or 20 sequence alterations (e.g., substitutions, insertions, or deletions) relative thereto; and
[0098] (ii) optionally, a heterologous object sequence.

[0099] 49. A cell (e.g., eukaryotic cell, e.g., mammalian cell, e.g., human cell; or a prokaryotic cell) comprising:
[0100] (i) a DNA recognition sequence, said DNA recognition sequence having a first parapalindromic sequence and a second parapalindromic sequence, wherein each parapalindromic sequence is about 15-35 or 20-30 nucleotides, and the first and second parapalindromic sequences together comprise a parapalindromic region occurring within a nucleotide sequence of any of SEQ ID NOs: 13,001-24,432 or SEQ ID NOs: 26,001-37,432, or a nucleotide sequence having at least 70%, 75%, 80%, 85%, 90%, 95%, 96%, 97%, 98%, or 99% identity to said parapalindromic region, or having no more than 1, 2, 3, 4, 5, 6, 7, 8, 9, 10, 11, 12, 13, 14, 15, 16, 17, 18, 19, or 20 sequence alterations (e.g., substitutions, insertions, or deletions) relative thereto, and
[0101] said DNA recognition sequence further comprises a core sequence of about 2-20 nucleotides wherein the core sequence is situated between the first and second parapalindromic sequences; and
[0102] (ii) a heterologous object sequence.

[0103] 50. A cell (e.g., eukaryotic cell, e.g., mammalian cell, e.g., human cell; or a prokaryotic cell) comprising on a chromosome:
[0104] (i) a first parapalindromic sequence of about 15-35 or 20-30 nucleotides, the first parapalindromic sequence occurring within a nucleotide sequence of any of SEQ ID NOs: 13,001-24,432 or SEQ ID NOs: 26,001-37,432, or a nucleotide sequence having at least 70%, 75%, 80%, 85%, 90%, 95%, 96%, 97%, 98%, or 99% identity to said parapalindromic sequence, or having no more than 1, 2, 3, 4, 5, 6, 7, 8, 9, 10, 11, 12, 13, 14, 15, 16, 17, 18, 19, or 20 sequence alterations (e.g., substitutions, insertions, or deletions) relative thereto,
[0105] (ii) a second parapalindromic sequence of about 15-35 or 20-30 nucleotides, the second parapalindromic sequence occurring within a nucleotide sequence of any of SEQ ID NOs: 13,001-24,432 or SEQ ID NOs: 26,001-37,432, or a nucleotide sequence having at least 70%, 75%, 80%, 85%, 90%, 95%, 96%, 97%, 98%, or 99% identity to said parapalindromic sequence, or having no more than 1, 2, 3, 4, 5, 6, 7, 8, 9, 10, 11, 12, 13, 14, 15, 16, 17, 18, 19, or 20 sequence alterations (e.g., substitutions, insertions, or deletions) relative thereto, and
[0106] (iii) a heterologous object sequence situated between (i) and (ii).

[0107] 51. The cell of embodiment 49 or 50, wherein the DNA recognition sequence and heterologous object sequence are both situated on an extra-chromosomal nucleic acid. 52. The cell of any of embodiments 49-51, wherein the DNA recognition sequence is within 1, 2, 3, 4, 5, 6, 7, 8, 9, 10, 15, 20, 25, 30, 40, 50, 60, 70, 80, 90, or 100 nucleotides of the heterologous object sequence.

[0108] 53. The cell of either of embodiments 51 or 52, wherein the extra-chromosomal nucleic acid comprises:
[0109] (iii) a second DNA recognition sequence, said second DNA recognition sequence having a third parapalindromic sequence and a fourth parapalindromic sequence, wherein each parapalindromic sequence is about 15-35 or 20-30 nucleotides, and the third and fourth parapalindromic sequences together comprise a parapalindromic region occurring within a nucleotide sequence of any of SEQ ID NOs: 13,001-25,677 (e.g., SEQ ID NOs: 13,001-24,432) or SEQ ID NOs: 26,001-38,677 (e.g., SEQ ID NOs: 26,001-37,432), or a nucleotide sequence having at least 70%, 75%, 80%, 85%, 90%, 95%, 96%, 97%, 98%, or 99% identity to said parapalindromic region, or having no more than 1, 2, 3, 4, 5, 6, 7, 8, 9, 10, 11, 12, 13, 14, 15, 16, 17, 18, 19, or 20 sequence alterations (e.g., substitutions, insertions, or deletions) relative thereto, and
[0110] said second DNA recognition sequence further comprises a core sequence of about 2-20 nucleotides wherein the core sequence is situated between the third and fourth parapalindromic sequences.

[0111] 54. The cell of embodiment 53, wherein the first DNA recognition sequence has the same sequence as the second DNA recognition sequence.

[0112] 55. The cell of embodiment 53, wherein the first DNA recognition sequence does not have the same sequence as the second DNA recognition sequence (e.g., wherein the second DNA recognition sequence comprises at least one substitution, deletion, or insertion relative to the first DNA recognition sequence).

[0113] 56. The cell of embodiment 53, wherein the first DNA recognition sequence has at least 70%, 75%, 80%, 85%, 90%, 95%, 96%, 97%, 98%, or 99% identity to the second DNA recognition sequence.

[0114] 57. The cell of any of embodiments 53-56, wherein the extra-chromosomal nucleic acid is linear.

[0115] 58. The cell of any of embodiments 53-57, wherein the cell comprises:
[0116] (iv) a third DNA recognition sequence, said third DNA recognition sequence having a fifth parapalindromic sequence and a sixth parapalindromic sequence, wherein each parapalindromic sequence is about 15-35 or 20-30 nucleotides, and the fifth and sixth parapalindromic sequences together comprise a parapalindromic region occurring within a nucleotide sequence of any of SEQ ID NOs: 13,001-25,677 (e.g., SEQ ID NOs: 13,001-24,432) or SEQ ID NOs: 26,001-38,677 (e.g., SEQ ID NOs: 26,001-37,432), or a nucleotide sequence having at least 70%, 75%, 80%, 85%, 90%, 95%, 96%, 97%, 98%, or 99% identity to said parapalindromic region, or having no more than 1, 2, 3, 4, 5, 6, 7, 8, 9, 10, 11, 12, 13, 14, 15, 16, 17, 18, 19, or 20 sequence alterations (e.g., substitutions, insertions, or deletions) relative thereto, and
[0117] said third DNA recognition sequence further comprises a core sequence of about 2-20 nucleotides wherein the core sequence is situated between the fifth and sixth parapalindromic sequences,
[0118] wherein the third DNA recognition sequence is on a chromosome.

[0119] 59. The cell of embodiment 58, wherein the third DNA recognition sequence does not have the same sequence as the first DNA recognition sequence, the second DNA recognition sequence, or both of the first and second DNA recognition sequences (e.g., wherein the third DNA recognition sequence comprises at least one substitution, deletion, or insertion relative to the first and/or second DNA recognition sequences).

[0120] 60. The cell of embodiment 59, wherein the third DNA recognition sequence has at least 70%, 75%, 80%, 85%, 90%, 95%, 96%, 97%, 98%, or 99% identity to the first DNA recognition sequence.

[0121] 61. The cell of either of embodiments 59 or 60, wherein the third DNA recognition sequence has at least 70%, 75%, 80%, 85%, 90%, 95%, 96%, 97%, 98%, or 99% identity to the second DNA recognition sequence.

[0122] 62. The cell of any of embodiments 58-61, wherein the cell comprises:
[0123] (v) a fourth DNA recognition sequence, said fourth DNA recognition sequence having a seventh parapalindromic sequence and an eighth parapalindromic sequence, wherein each parapalindromic sequence is about 15-35 or 20-30 nucleotides, and the seventh and eighth parapalindromic sequences together comprise a parapalindromic region occurring within a nucleotide sequence of any of SEQ ID NOs: 13,001-25,677 (e.g., SEQ ID NOs: 13,001-24,432) or SEQ ID NOs: 26,001-38,677 (e.g., SEQ ID NOs: 26,001-37,432), or a nucleotide sequence having at least 70%, 75%, 80%, 85%, 90%, 95%, 96%, 97%, 98%, or 99% identity thereto, or having no more than 1, 2, 3, 4, 5, 6, 7, 8, 9, 10, 11, 12, 13, 14, 15, 16, 17, 18, 19, or 20 sequence alterations (e.g., substitutions, insertions, or deletions) relative to said parapalindromic region, and
[0124] said fourth DNA recognition sequence further comprises a core sequence of about 2-20 nucleotides wherein the core sequence is situated between the seventh and eighth parapalindromic sequences,
[0125] wherein the fourth DNA recognition sequence is on the same chromosome as the third DNA recognition sequence.

[0126] 63. The cell of embodiment 62, wherein the fourth DNA recognition sequence does not have the same sequence as the first DNA recognition sequence, the second DNA recognition sequence, or both of the first and second DNA recognition sequences (e.g., wherein the fourth DNA recognition sequence comprises at least one substitution, deletion, or insertion relative to the first and/or second DNA recognition sequences).

[0127] 64. The cell of embodiment 62, wherein the fourth DNA recognition sequence has at least 70%, 75%, 80%, 85%, 90%, 95%, 96%, 97%, 98%, or 99% identity to the first DNA recognition sequence.

[0128] 65. The cell of either of embodiments 62 or 64, wherein the fourth DNA recognition sequence has at least 70%, 75%, 80%, 85%, 90%, 95%, 96%, 97%, 98%, or 99% identity to the second DNA recognition sequence.

[0129] 66. The cell of embodiment 62-65, wherein the fourth DNA recognition sequence has the same sequence as the third DNA recognition sequence.

[0130] 67. The cell of embodiment 66, wherein the fourth DNA recognition sequence does not have the same sequence as the fourth DNA recognition sequence (e.g., wherein the fourth DNA recognition sequence comprises at least one substitution, deletion, or insertion relative to the third DNA recognition sequence).

[0131] 68. The cell of embodiment 66 or 67, wherein the fourth DNA recognition sequence has at least 70%, 75%, 80%, 85%, 90%, 95%, 96%, 97%, 98%, or 99% identity to the third DNA recognition sequence.

[0132] 69. The cell of any of embodiments 62-68, wherein the third DNA recognition sequence and fourth DNA recognition sequence are within 5, 10, 20, 30, 40, 50, 60, 70, 80, 90, 100, 200, 300, 400, 500, 600, 700, 800, or 900 bases of each other, or within 1, 2, 3, 4, 5, 6, 7, 8, 9, or 10 kilobases of each other on the chromosome.

[0133] 70. The cell of any of embodiments 46-69, wherein the DNA recognition sequence is in a chromosome and the heterologous object sequence is on an extra-chromosomal nucleic acid.

[0134] 71. The cell of any of embodiments 45-70, wherein the cell is a eukaryotic cell.

[0135] 72. The cell of embodiment 71, wherein the cell is a mammalian cell.

[0136] 73. The cell of embodiment 72, wherein the cell is a human cell.

[0137] 75. The cell of any of embodiments 45-70, wherein the cell is a prokaryotic cell (e.g., a bacterial cell).

[0138] 76. The cell (e.g., isolated cell) of any of embodiments 16-70, wherein the cell is an animal cell (e.g., a mammalian cell) or a plant cell.

[0139] 77. The cell of embodiment 76, wherein the mammalian cell is a human cell.

[0140] 78. The cell of embodiment 76, wherein the animal cell is a bovine cell, horse cell, pig cell, goat cell, sheep cell, chicken cell, or turkey cell.

[0141] 79. The cell of embodiment 76, wherein the plant cell is a corn cell, soy cell, wheat cell, or rice cell.

[0142] 80. A method of modifying the genome of a eukaryotic cell (e.g., mammalian cell, e.g., human cell) comprising contacting the cell with:
[0143] a) a recombinase polypeptide comprising an amino acid sequence of any of SEQ ID NOs: 1-11,432, or a sequence having at least 70%, 75%, 80%, 85%, 90%, 95%, 96%, 97%, 98%, or 99% identity thereto, or a nucleic acid encoding the recombinase polypeptide; and
[0144] b) an insert DNA comprising:
[0145] (i) a DNA recognition sequence that binds to the recombinase polypeptide of (a),
[0146] said DNA recognition sequence having a first parapalindromic sequence and a second parapalindromic sequence, wherein each parapalindromic sequence is about 15-35 or 20-30 nucleotides, and the first and second parapalindromic sequences together comprise a parapalindromic region occurring within a nucleotide sequence of any of SEQ ID NOs: 13,001-24,432 or SEQ ID NOs: 26,001-37,432, or a nucleotide sequence having at least 70%, 75%, 80%, 85%, 90%, 95%, 96%, 97%, 98%, or 99% identity to said parapalindromic region, or having no more than 1, 2, 3, 4, 5, 6, 7, 8, 9, 10, 11, 12, 13, 14, 15, 16, 17, 18, 19, or 20 sequence alterations (e.g., substitutions, insertions, or deletions) relative thereto, and
   [0147] said DNA recognition sequence further comprises a core sequence of about 2-20 nucleotides wherein the core sequence is situated between the first and second parapalindromic sequences, and
[0148] (ii) a heterologous object sequence,
[0149] thereby modifying the genome of the eukaryotic cell.

[0150] 81. A method of modifying the genome of a eukaryotic cell (e.g., mammalian cell, e.g., human cell) comprising contacting the cell with:
[0151] a) a recombinase polypeptide comprising an amino acid sequence of any of SEQ ID NOs: 1-11,432, or a sequence having at least 70%, 75%, 80%, 85%, 90%, 95%, 96%, 97%, 98%, or 99% identity thereto, or a nucleic acid encoding the recombinase polypeptide; and
[0152] b) an insert DNA comprising:
[0153] (i) a DNA recognition sequence that binds to the recombinase polypeptide of (a), wherein optionally the DNA recognition sequence comprises about 30-70 or 40-60 nucleotides of sequence occurring within a nucleotide sequence of any of SEQ ID NOs: 13,001-24,432 or SEQ ID NOs: 26,001-37,432, or a nucleotide sequence having at least 70%, 75%, 80%, 85%, 90%, 95%, 96%, 97%, 98%, or 99% identity to said parapalindromic region, or having no more than 1, 2, 3, 4, 5, 6, 7, 8, 9, 10, 11, 12, 13, 14, 15, 16, 17, 18, 19, or 20 sequence alterations (e.g., substitutions, insertions, or deletions) relative thereto; and
[0154] said DNA recognition sequence further comprises a core sequence of about 2-20 nucleotides wherein the core sequence is situated between the first and second parapalindromic sequences, and
[0155] (ii) a heterologous object sequence,
[0156] thereby modifying the genome of the eukaryotic cell.

[0157] 82. A method of inserting a heterologous object sequence into the genome of a eukaryotic cell (e.g., mammalian cell, e.g., human cell) comprising contacting the cell with:
[0158] a) a recombinase polypeptide comprising an amino acid sequence of any of SEQ ID NOs: 1-11,432, or a sequence having at least 70%, 75%, 80%, 85%, 90%, 95%, 96%, 97%, 98%, or 99% identity thereto, or a nucleic acid encoding the polypeptide; and
[0159] b) an insert DNA comprising:
[0160] (i) a DNA recognition sequence that binds to the recombinase polypeptide of (a),
[0161] said DNA recognition sequence having a first parapalindromic sequence and a second parapalindromic sequence, wherein each parapalindromic sequence is about 15-35 or 20-30 nucleotides, and the first and second parapalindromic sequences together comprise a parapalindromic region occurring within a nucleotide sequence of any of SEQ ID NOs: 13,001-24,432 or SEQ ID NOs: 26,001-37,432, or a nucleotide sequence having at least 70%, 75%, 80%, 85%, 90%, 95%, 96%, 97%, 98%, or 99% identity to said parapalindromic region, or having no more than 1, 2, 3, 4, 5, 6, 7, 8, 9, 10, 11, 12, 13, 14, 15, 16, 17, 18, 19, or 20 sequence alterations (e.g., substitutions, insertions, or deletions) relative thereto, and
   [0162] said DNA recognition sequence further comprises a core sequence of about 2-20 nucleotides wherein the core sequence is situated between the first and second parapalindromic sequences, and
[0163] (ii) a heterologous object sequence,
[0164] thereby inserting the heterologous object sequence into the genome of the eukaryotic cell, e.g., at a frequency of at least about 0.1% (e.g., at least about 0.1%, 0.5%, 1%, 5%, 10%, 20%, 30%, 40%, 50%, 60%, 70%, 80%, 85%, 90%, 95%, 96%, 97%, 98%, 99%, or 100% of a population of the eukaryotic cell, e.g., as measured in an assay of Example 5.

[0165] 83. A method of inserting a heterologous object sequence into the genome of a eukaryotic cell (e.g., mammalian cell, e.g., human cell) comprising contacting the cell with:
[0166] a) a recombinase polypeptide comprising an amino acid sequence of any of SEQ ID NOs: 1-11,432, or a sequence having at least 70%, 75%, 80%, 85%, 90%, 95%, 96%, 97%, 98%, or 99% identity thereto, or a nucleic acid encoding the polypeptide; and
[0167] b) an insert DNA comprising:
   [0168] (i) a DNA recognition sequence that binds to the recombinase polypeptide of (a), wherein optionally the DNA recognition sequence comprises about 30-70 or 40-60 nucleotides of sequence occurring within a nucleotide sequence of any of SEQ ID NOs: 13,001-24,432 or SEQ ID NOs: 26,001-37,432, or a nucleotide sequence having at least 70%, 75%, 80%, 85%, 90%, 95%, 96%, 97%, 98%, or 99% identity thereto, or having no more than 1, 2, 3, 4, 5, 6, 7, 8, 9, 10, 11, 12, 13, 14, 15, 16, 17, 18, 19, or 20 sequence alterations (e.g., substitutions, insertions, or deletions) relative thereto; and
   [0169] (ii) a heterologous object sequence,
[0170] thereby inserting the heterologous object sequence into the genome of the eukaryotic cell, e.g., at a frequency of at least about 0.1% (e.g., at least about 0.1%, 0.5%, 1%, 5%, 10%, 20%, 30%, 40%, 50%, 60%, 70%, 80%, 85%, 90%, 95%, 96%, 97%, 98%, 99%, or 100% of a population of the eukaryotic cell, e.g., as measured in an assay of Example 5.

[0171] 84. The method of any of embodiments 80-83, wherein (a) and (b) are administered separately or together.

[0172] 85. The method of any of embodiments 80-83, wherein (a) is administered prior to, concurrently with, or after administration of (b).

[0173] 86. The method of any of embodiments 80-85, wherein (a) comprises the nucleic acid encoding the polypeptide.

[0174] 87. The method of embodiment 86, wherein the nucleic acid of (a) and the insert DNA of (b) are situated on the same nucleic acid molecule, e.g., are situated on the same vector.

[0175] 88. The method of embodiment 86, wherein the nucleic acid of (a) and the insert DNA of (b) are situated on separate nucleic acid molecules.

[0176] 89. The method of any of embodiments 80-88, wherein the cell has only one endogenous DNA recognition sequence that is compatible with the DNA recognition sequence of the insert DNA.

[0177] 90. The method of any of embodiments 80-88, wherein the cell has two or more endogenous DNA recognition sequences that are compatible with the DNA recognition sequence of the insert DNA.

[0178] 91. The method of any of embodiments 80-90, wherein the insert DNA of (b) comprises a second DNA recognition sequence that binds to the recombinase polypeptide of (a),
[0179] said second DNA recognition sequence having a third parapalindromic sequence and a fourth parapalindromic sequence, wherein each parapalindromic sequence is about 15-35 or 20-30 nucleotides, and the third and fourth parapalindromic sequences together comprise a parapalindromic region occurring within a nucleotide sequence any of SEQ ID NOs: 13,001-25,677 (e.g., SEQ ID NOs: 13,001-24,432) or SEQ ID NOs: 26,001-38,677 (e.g., SEQ ID NOs: 26,001-37,432), or a nucleotide sequence having at least 70%, 75%, 80%, 85%, 90%, 95%, 96%, 97%, 98%, or 99% identity to said parapalindromic region, or having no more than 1, 2, 3, 4, 5, 6, 7, 8, 9, 10, 11, 12, 13, 14, 15, 16, 17, 18, 19, or 20 sequence alterations (e.g., substitutions, insertions, or deletions) relative thereto, and
[0180] said second DNA recognition sequence further comprises a core sequence of about 2-20 nucleotides wherein the core sequence is situated between the third and fourth parapalindromic sequences.

[0181] 92. The method of embodiment 91, wherein the first DNA recognition sequence has the same sequence as the second DNA recognition sequence.

[0182] 93. The method of embodiment 91, wherein the first DNA recognition sequence does not have the same sequence as the second DNA recognition sequence (e.g., wherein the second DNA recognition sequence comprises at least one substitution, deletion, or insertion relative to the first DNA recognition sequence).

[0183] 94. The method of embodiment 93, wherein the first DNA recognition sequence has at least 70%, 75%, 80%, 85%, 90%, 95%, 96%, 97%, 98%, or 99% identity to the second DNA recognition sequence.

[0184] 95. The method of any of embodiments 91-94, the heterologous object sequence is situated between the first DNA recognition sequence and the second DNA recognition sequence.

[0185] 96. The method of any of the preceding embodiments, wherein the recombinase polypeptide comprises an integrase, e.g., having at least 70%, 75%, 80%, 85%, 90%, 95%, 96%, 97%, 98%, 99%, or 100% sequence identity to an amino acid sequence of any of SEQ ID NOs: 1-12,677 (e.g., SEQ ID NOs: 1-11,432), e.g., of an integrase as listed in Table 13.

[0186] 97. The method of embodiment 96, wherein the recombinase polypeptide comprises an integrase as listed in Table 13 and the DNA recognition sequence comprises a recognition sequence comprising a nucleotide sequence of any of SEQ ID NOs: 13,001-25,677 (e.g., SEQ ID NOs: 13,001-24,432) or SEQ ID NOs: 26,001-38,677 (e.g., SEQ ID NOs: 26,001-37,432), or a nucleotide sequence having at least 70%, 75%, 80%, 85%, 90%, 95%, 96%, 97%, 98%, or 99% identity thereto.

[0187] 98. The method of embodiment 96 or 97, wherein the recombinase polypeptide comprises the amino acid sequence of Integrase A101, optionally wherein the DNA recognition sequence comprises a corresponding recognition sequence therefor.

[0188] 99. The method of embodiment 96 or 97, wherein the recombinase polypeptide comprises the amino acid sequence of Integrase A78, optionally wherein the DNA recognition sequence comprises a corresponding recognition sequence therefor.

[0189] 100. The method of embodiment 96 or 97, wherein the recombinase polypeptide comprises the amino acid sequence of Integrase A79, optionally wherein the DNA recognition sequence comprises a corresponding recognition sequence therefor.

[0190] 101. The method of embodiment 96 or 97, wherein the recombinase polypeptide comprises the amino acid sequence of Integrase A30, optionally wherein the DNA recognition sequence comprises a corresponding recognition sequence therefor.

[0191] 102. The method of embodiment 96 or 97, wherein the recombinase polypeptide comprises the amino acid sequence of Integrase A3, optionally wherein the DNA recognition sequence comprises a corresponding recognition sequence.

[0192] 103. The method of embodiment 96 or 97, wherein the recombinase polypeptide comprises the amino acid sequence of Integrase A38, optionally wherein the DNA recognition sequence comprises a corresponding recognition sequence therefor.

[0193] 104. The method of embodiment 96 or 97, wherein the recombinase polypeptide comprises the amino acid sequence of Integrase A95, optionally wherein the DNA recognition sequence comprises a corresponding recognition sequence therefor.

[0194] 105. The method of embodiment 96 or 97, wherein the recombinase polypeptide comprises the amino acid sequence of Integrase A51, optionally wherein the DNA recognition sequence comprises a corresponding recognition sequence therefor.

[0195] 106. The method of embodiment 96 or 97, wherein the recombinase polypeptide comprises the amino acid sequence of Integrase A18, optionally wherein the DNA recognition sequence comprises a corresponding recognition sequence therefor.

[0196] 107. An isolated recombinase polypeptide comprising an amino acid sequence of any of SEQ ID NOs: 1-11,432, or a sequence having at least 70%, 75%, 80%, 85%, 90%, 95%, 96%, 97%, 98%, or 99% identity thereto.

[0197] 108. The isolated recombinase polypeptide of embodiment 107, which comprises at least one insertion, deletion, or substitution relative to a recombinase sequence of any of SEQ ID NOs: 1-11,432.

[0198] 109. The isolated recombinase polypeptide of embodiment 108, wherein the isolated recombinase polypeptide binds a eukaryotic (e.g., mammalian, e.g., human) genomic locus (e.g., a parapalindromic region occurring within a nucleotide sequence of any of SEQ ID NOs: 1-12,677 (e.g., SEQ ID NOs: 1-11,432), or a nucleotide sequence having at least 70%, 75%, 80%, 85%, 90%, 95%, 96%, 97%, 98%, or 99% identity to said parapalindromic region, or having no more than 1, 2, 3, 4, 5, 6, 7, 8, 9, 10, 11, 12, 13, 14, 15, 16, 17, 18, 19, or 20 sequence alterations (e.g., substitutions, insertions, or deletions) relative thereto.

[0199] 110. The isolated recombinase polypeptide of either of embodiments 107 or 108, wherein the isolated recombinase polypeptide binds a parapalindromic region occurring within a nucleotide sequence of any of SEQ ID NOs: 1-12,677 (e.g., SEQ ID NOs: 1-11,432), or a nucleotide sequence having at least 70%, 75%, 80%, 85%, 90%, 95%, 96%, 97%, 98%, or 99% identity to said parapalindromic region, or having no more than 1, 2, 3, 4, 5, 6, 7, 8, 9, 10, 11, 12, 13, 14, 15, 16, 17, 18, 19, or 20 sequence alterations (e.g., substitutions, insertions, or deletions) relative thereto.

[0200] 111. The isolated recombinase polypeptide of any of embodiments 108-110, wherein the isolated recombinase polypeptide has at least a 2-, 3-, 4-, or 5-fold increase in affinity for the genomic locus, relative to the corresponding unmodified amino acid sequence of any of SEQ ID NOs: 1-12,677 (e.g., SEQ ID NOs: 1-11,432).

[0201] 112. An isolated nucleic acid encoding a recombinase polypeptide comprising an amino acid sequence of any of SEQ ID NOs: 1-11,432, or an amino acid sequence having at least 70%, 75%, 80%, 85%, 90%, 95%, 96%, 97%, 98%, or 99% identity thereto.

[0202] 113. The isolated nucleic acid of embodiment 112, which encodes a recombinase polypeptide comprising at least one insertion, deletion, or substitution relative to a recombinase sequence of any of SEQ ID NOs: 1-11,432.

[0203] 114. The isolated nucleic acid sequence of embodiment 112 or 113, wherein the codons of the amino acid sequence are altered (e.g., optimized) for expression in a mammalian cell, e.g., a human cell.

[0204] 115. The isolated nucleic acid of any of embodiments 112-114, which further comprises a heterologous promoter (e.g., a mammalian promoter, e.g., a tissue-specific promoter), microRNA (e.g., a tissue-specific restrictive miRNA), polyadenylation signal, or a heterologous payload.

[0205] 116. An isolated nucleic acid (e.g., DNA) comprising:
[0206] (i) a DNA recognition sequence, said DNA recognition sequence having a first parapalindromic sequence and a second parapalindromic sequence, wherein each parapalindromic sequence is about 15-35 or 20-30 nucleotides, and the first and second parapalindromic sequences together comprise a parapalindromic region occurring within a nucleotide sequence of any of SEQ ID NOs: 13,001-24,432 or SEQ ID NOs: 26,001-37,432, or a nucleotide sequence having at least 70%, 75%, 80%, 85%, 90%, 95%, 96%, 97%, 98%, or 99% identity to said parapalindromic region, or having no more than 1, 2, 3, 4, 5, 6, 7, 8, 9, 10, 11, 12, 13, 14, 15, 16, 17, 18, 19, or 20 sequence alterations (e.g., substitutions, insertions, or deletions) relative thereto, and
[0207] said DNA recognition sequence further comprises a core sequence of about 2-20 nucleotides wherein the core sequence is situated between the first and second parapalindromic sequences, and
[0208] (ii) a heterologous object sequence.

[0209] 117. An isolated nucleic acid (e.g., DNA) comprising:
[0210] (i) a DNA recognition sequence that binds to the recombinase polypeptide of (a), wherein optionally the DNA recognition sequence comprises about 30-70 or 40-60 nucleotides of sequence occurring within a nucleotide sequence of any of SEQ ID NOs: 13,001-24,432 or SEQ ID NOs: 26,001-37,432, or a nucleotide sequence having at least 70%, 75%, 80%, 85%, 90%, 95%, 96%, 97%, 98%, or 99% identity thereto, or having no more than 1, 2, 3, 4, 5, 6, 7, 8, 9, 10, 11, 12, 13, 14, 15, 16, 17, 18, 19, or 20 sequence alterations (e.g., substitutions, insertions, or deletions) relative to said parapalindromic region; and
[0211] (ii) optionally, a heterologous object sequence.

[0212] 118. The isolated nucleic acid of either of embodiments 116 or 117, which binds to a recombinase polypeptide of any of SEQ ID NOs: 1-12,677 (e.g., SEQ ID NOs: 1-11,432).

[0213] 119. The isolated nucleic acid of any of embodiments 116-118, wherein the DNA recognition sequence (e.g., one or more parapalindromic sequences) comprises at least one insertion, deletion, or substitution relative to a recognition sequence (or portion thereof) occurring in a sequence of any of SEQ ID NOs: 1-12,677 (e.g., SEQ ID NOs: 1-11,432).

[0214] 120. The isolated nucleic acid of embodiment 119, wherein the DNA recognition sequence (e.g., parapalindromic region) has at least a 2-, 3-, 4-, or 5-fold increase in affinity for the recombinase polypeptide relative to the corresponding unmodified DNA recognition sequence (e.g., parapalindromic region).

[0215] 121. The isolated nucleic acid of either of embodiments 119 or 120, wherein the recombinase polypeptide has at least a 2-, 3-, 4-, or 5-fold increase in recombinase activity at the DNA recognition sequence (e.g., parapalindromic region) relative to the corresponding unmodified DNA recognition sequence (e.g., parapalindromic region).

[0216] 122. A method of making a recombinase polypeptide, the method comprising:
[0217] a) providing a nucleic acid encoding a recombinase polypeptide comprising an amino acid sequence of any of SEQ ID NOs: 1-11,432, or a sequence having at least 70%, 75%, 80%, 85%, 90%, 95%, 96%, 97%, 98%, or 99% identity thereto, and
[0218] b) introducing the nucleic acid into a cell (e.g., a eukaryotic cell or a prokaryotic cell, e.g., as described herein) under conditions that allow for production of the recombinase polypeptide,
[0219] thereby making the recombinase polypeptide.

[0220] 123. A method of making a recombinase polypeptide, the method comprising:
[0221] a) providing a cell (e.g., a prokaryotic or eukaryotic cell) comprising a nucleic acid encoding a recombinase polypeptide comprising an amino acid sequence of any of SEQ ID NOs: 1-11,432, or a sequence having at least 70%, 75%, 80%, 85%, 90%, 95%, 96%, 97%, 98%, or 99% identity thereto, and
[0222] b) incubating the cell under conditions that allow for production of the recombinase polypeptide,
[0223] thereby making the recombinase polypeptide.

[0224] 124. A method of making an insert DNA that comprises a DNA recognition sequence and a heterologous sequence, comprising:
[0225] a) providing a nucleic acid comprising:
   [0226] (i) a DNA recognition sequence that binds to a recombinase polypeptide comprising an amino acid sequence of any of SEQ ID NOs: 1-11,432, or a sequence having at least 70%, 75%, 80%, 85%, 90%, 95%, 96%, 97%, 98%, or 99% identity thereto, said DNA recognition sequence having a first parapalindromic sequence and a second parapalindromic sequence, wherein each parapalindromic sequence is about 15-35 or 20-30 nucleotides, and the first and second parapalindromic sequences together comprise a parapalindromic region occurring within a nucleotide sequence of any of SEQ ID NOs: 13,001-24,432 or SEQ ID NOs: 26,001-37,432, or a nucleotide sequence having at least 70%, 75%, 80%, 85%, 90%, 95%, 96%, 97%, 98%, or 99% identity to said parapalindromic region, or having no more than 1, 2, 3, 4, 5, 6, 7, 8, 9, 10, 11, 12, 13, 14, 15, 16, 17, 18, 19, or 20 sequence alterations (e.g., substitutions, insertions, or deletions) relative thereto, and
      [0227] said DNA recognition sequence further comprises a core sequence of about 2-20 nucleotides wherein the core sequence is situated between the first and second parapalindromic sequences, and
   [0228] (ii) a heterologous object sequence, and
[0229] b) introducing the nucleic acid into a cell (e.g., a eukaryotic cell or a prokaryotic cell, e.g., as described herein) under conditions that allow for replication of the nucleic acid,
[0230] thereby making the insert DNA.

[0231] 125. The method of embodiment 124, wherein the nucleic acid comprises:
[0232] (iii) a second DNA recognition sequence that binds to the recombinase polypeptide,
[0233] said second DNA recognition sequence having a third parapalindromic sequence and a fourth parapalindromic sequence, wherein each parapalindromic sequence is about 15-35 or 20-30 nucleotides, and the third and fourth parapalindromic sequences together comprise a parapalindromic region occurring within a nucleotide sequence of any of SEQ ID NOs: 1-12,677 (e.g., SEQ ID NOs: 1-11,432), or a nucleotide sequence having at least 70%, 75%, 80%, 85%, 90%, 95%, 96%, 97%, 98%, or 99% identity to said parapalindromic region, or having no more than 1, 2, 3, 4, 5, 6, 7, 8, 9, 10, 11, 12, 13, 14, 15, 16, 17, 18, 19, or 20 sequence alterations (e.g., substitutions, insertions, or deletions) relative thereto, and
[0234] said second DNA recognition sequence further comprises a core sequence of about 2-20 nucleotides wherein the core sequence is situated between the third and fourth parapalindromic sequences.

[0235] 126. The method of embodiment 125, wherein the first DNA recognition sequence has the same sequence as the second DNA recognition sequence.

[0236] 127. The method of embodiment 125, wherein the first DNA recognition sequence does not have the same sequence as the second DNA recognition sequence (e.g., wherein the second DNA recognition sequence comprises at least one substitution, deletion, or insertion relative to the first DNA recognition sequence).

[0237] 128. The method of embodiment 127, wherein the first DNA recognition sequence has at least 70%, 75%, 80%, 85%, 90%, 95%, 96%, 97%, 98%, or 99% identity to the second DNA recognition sequence.

[0238] 129. The method of any of embodiments 125-128, the heterologous object sequence is situated between the first DNA recognition sequence and the second DNA recognition sequence.

[0239] 130. The method of any of embodiments 124-129, wherein providing comprises using a cloning technique (e.g., restriction digestion and/or ligation), using a recombination technique, or acquiring the nucleic acid (e.g., from a third party provider).

[0240] 131. The system, cell, method, isolated recombinase polypeptide, or isolated nucleic acid of any of the preceding embodiments, wherein the recombinase polypeptide comprises at least one insertion, deletion, or substitution relative to the amino acid sequence of any of SEQ ID NOs: 1-12,677 (e.g., SEQ ID NOs: 1-11,432).

[0241] 132. The system, cell, method, isolated recombinase polypeptide, or isolated nucleic acid of any of the preceding embodiments, wherein the recombinase polypeptide comprises a truncation at the N-terminus, C-terminus, or both of the N- and C-termini relative to the amino acid sequence of any of SEQ ID NOs: 1-12,677 (e.g., SEQ ID NOs: 1-11,432).

[0242] 133. The system, cell, method, isolated recombinase polypeptide, or isolated nucleic acid of any of the preceding embodiments, wherein the recombinase polypeptide comprises a nuclear localization sequence, e.g., an endogenous nuclear localization sequence or a heterologous nuclear localization sequence.

[0243] 134. The system, cell, method, isolated recombinase polypeptide, or isolated nucleic acid of any of the preceding embodiments, wherein the heterologous object sequence is inserted into the genome of the cell at an efficiency of at least about 0.1% (e.g., at least about 0.1%, 0.5%, 1%, 5%, 10%, 20%, 30%, 40%, 50%, 60%, 70%, 80%, 85%, 90%, 95%, 96%, 97%, 98%, 99%, or 100%) of a population of the cell, e.g., as measured in an assay of Example 5.

[0244] 135. The system, cell, method, isolated recombinase polypeptide, or isolated nucleic acid of any of the preceding embodiments, wherein the heterologous object sequence is inserted into a site within the genome of the cell (e.g., a site comprising a sequence occurring within a nucleotide sequence of SEQ ID NO: (n+13,000) or a sequence of SEQ ID NO: (n+26,000), wherein n is chosen from any of 1-12,677 (e.g., any of 1-11,432) (e.g., a sequence of any of SEQ ID NOs: 13,001-25,677 (e.g., SEQ ID NOs: 13,001-24,432) or SEQ ID NOs: 26,001-38,677 (e.g., SEQ ID NOs: 26,001-37,432)), or a nucleotide sequence having at least 70%, 75%, 80%, 85%, 90%, 95%, 96%, 97%, 98%, or 99% identity thereto, or having no more than 1, 2, 3, 4, 5, 6, 7, 8, 9, 10, 11, 12, 13, 14, 15, 16, 17, 18, 19, or 20 sequence alterations (e.g., substitutions, insertions, or deletions) relative thereto; and/or a recombinase comprising a corresponding amino acid sequence of SEQ ID NO: n) in at least about 1%, (e.g., at least about 1%, 5%, 10%, 15%, 20%, 25%, 30%, 40%, 50%, 60%, 70%, 80%, 85%, 90%, 95%, 96%, 97%, 98%, 99%, 99.9%, or 100%) of insertion events, e.g., as measured by an assay of Example 4.

[0245] 136. The system, cell, method, isolated recombinase polypeptide, or isolated nucleic acid of any of the preceding embodiments, wherein, in a population of the cells (e.g., contacted with the system), the heterologous object sequence is inserted into between 1-10, e.g., 1-9, 1-8, 1-7, 1-6, 1-5, 1-4, 1-3, 2-10, 2-5, 2-4, 3-10, 3-5, or 5-10 sites within the genome of the cell (e.g., a site comprising a sequence occurring within a nucleotide sequence of SEQ ID NO: (n+13,000) or a sequence of SEQ ID NO: (n+26,000) wherein n is chosen from any of 1-12,677 (e.g., any of 1-11,432), (e.g., a sequence of any of SEQ ID NOs: 13,001-25,677 (e.g., SEQ ID NOs: 13,001-24,432) or SEQ ID NOs: 26,001-38,677 (e.g., SEQ ID NOs: 26,001-37,432), or a nucleotide sequence having at least 70%, 75%, 80%, 85%, 90%, 95%, 96%, 97%, 98%, or 99% identity thereto, or having no more than 1, 2, 3, 4, 5, 6, 7, 8, 9, 10, 11, 12, 13, 14, 15, 16, 17, 18, 19, or 20 sequence alterations (e.g., substitutions, insertions, or deletions) relative thereto; and/or a recombinase comprising a corresponding amino acid sequence of SEQ ID NO: n), in at least 1%, 5%, 10%, 15%, 20%, 25%, 30%, 40%, 50%, 60%, 70%, 80%, 85%, 90%, 95%, 96%, 97%, 98%, 99%, 99.9%, or 100%) of the cells in the population, e.g., as measured by an assay of Example 5.

[0246] 137. The system, cell, method, isolated recombinase polypeptide, or isolated nucleic acid of any of the preceding embodiments, wherein, in a population of cells contacted with the system, the heterologous object sequence is inserted into exactly one site within the genome of the cell (e.g., a site comprising a sequence occurring within a nucleotide sequence of SEQ ID NO: (n+13,000) or a sequence of SEQ ID NO: (n+26,000), wherein n is chosen from any of 1-12,677 (e.g., any of 1-11,432) (e.g., a sequence of any of SEQ ID NOs: 13,001-25,677 (e.g., SEQ ID NOs: 13,001-24,432) or SEQ ID NOs: 26,001-38,677 (e.g., SEQ ID NOs: 26,001-37,432)), or a nucleotide sequence having at least 70%, 75%, 80%, 85%, 90%, 95%, 96%, 97%, 98%, or 99% identity thereto, or having no more than 1, 2, 3, 4, 5, 6, 7, 8, 9, 10, 11, 12, 13, 14, 15, 16, 17, 18, 19, or 20 sequence alterations (e.g., substitutions, insertions, or deletions) relative thereto; and/or a recombinase comprising a corresponding amino acid sequence of SEQ ID NO: n), in at least 1%, 5%, 10%, 15%, 20%, 25%, 30%, 40%, 50%, 60%, 70%, 80%, 85%, 90%, 95%, 96%, 97%, 98%, 99%, 99.9%, or 100%) of the cells in the population, e.g., as measured by an assay of Example 4.

[0247] 138. The system, cell, method, isolated recombinase polypeptide, or isolated nucleic acid of any of the preceding embodiments, wherein the heterologous object sequence is inserted into between 1-10, e.g., 1-9, 1-8, 1-7, 1-6, 1-5, 1-4, 1-3, 2-10, 2-5, 2-4, 3-10, 3-5, or 5-10 sites within the genome of the cell (e.g., a site comprising a sequence occurring within a nucleotide sequence of SEQ ID NO: (n+13,000) or a sequence of SEQ ID NO: (n+26,000), wherein n is chosen from any of 1-12,677 (e.g., any of 1-11,432) (e.g., a sequence of any of SEQ ID NOs: 13,001-25,677 (e.g., SEQ ID NOs: 13,001-24,432) or SEQ ID NOs: 26,001-38,677 (e.g., SEQ ID NOs: 26,001-37,432)), or a nucleotide sequence having at least 70%, 75%, 80%, 85%, 90%, 95%, 96%, 97%, 98%, or 99% identity thereto, or having no more than 1, 2, 3, 4, 5, 6, 7, 8, 9, 10, 11, 12, 13, 14, 15, 16, 17, 18, 19, or 20 sequence alterations (e.g., substitutions, insertions, or deletions) relative thereto; and/or a recombinase comprising a corresponding amino acid sequence of SEQ ID NO: n), e.g., as measured by an assay of Example 4.

[0248] 139. The system, cell, method, isolated recombinase polypeptide, or isolated nucleic acid of any of the preceding embodiments, wherein the recombinase polypeptide is bound to the insert DNA.

[0249] 140. The system, cell, method, isolated recombinase polypeptide, or isolated nucleic acid of any of the preceding embodiments, wherein the recombinase polypeptide is provided by providing a nucleic acid encoding the recombinase polypeptide.

[0250] 141. The system, cell, method, isolated recombinase polypeptide, or isolated nucleic acid of any of the preceding embodiments, which results in an insert frequency of the heterologous object sequence into the genome of at least about 0.1% (e.g., at least about 0.1%, 0.5%, 1%, 5%, 10%, 20%, 30%, 40%, 50%, 60%, 70%, 80%, 85%, 90%, 95%, 96%, 97%, 98%, 99%, or 100%) of a population of the cells, e.g., as measured in an assay of Example 5.

[0251] 142. The system, cell, method, isolated recombinase polypeptide, or isolated nucleic acid of any of the preceding embodiments, which results in an insert frequency of the heterologous object sequence into the genome of at least about 0.1% (e.g., at least about 0.1%, 0.5%, 1%, 5%, 10%, 20%, 30%, 40%, 50%, 60%, 70%, 80%, 85%, 90%, 95%, 96%, 97%, 98%, 99%, or 100%) of a population of the cells, e.g., as measured in an assay of Example 13.

[0252] 143. The system, cell, method, isolated recombinase polypeptide, or isolated nucleic acid of any of the preceding embodiments, which results in an insert frequency of the heterologous object sequence into the genome of at least about 0.1% (e.g., at least about 0.1%, 0.5%, 1%, 5%, 10%, 20%, 30%, 40%, 50%, 60%, 70%, 80%, 85%, 90%, 95%, 96%, 97%, 98%, 99%, or 100%) of a population of the cells, e.g., as measured in an assay of Example 7.

[0253] 144. The system, cell, method, isolated recombinase polypeptide, or isolated nucleic acid of any of the preceding embodiments, wherein the first parapalindromic sequence comprises a first sequence of 15-35 or 20-30 nucleotides, e.g., 13, 14, 15, 16, 17, 18, 19, or 2015, 16, 17, 18, 19, 20, 21, 22, 23, 24, 25, 26, 27, 28, 29, 30, 31, 32 33, 34, or 35 nucleotides, occurring in a sequence of any of SEQ ID NOs: 13,001-25,677 (e.g., SEQ ID NOs: 13,001-24,432) or SEQ ID NOs: 26,001-38,677 (e.g., SEQ ID NOs: 26,001-37,432), or a sequence having no more than 1, 2, 3, 4, 5, 6, 7, 8, 9, 10, 11, 12, 13, 14, 15, 16, 17, 18, 19, or 20 substitutions, insertions, or deletions relative thereto.

[0254] 145. The system, cell, method, isolated recombinase polypeptide, or isolated nucleic acid of embodiment 144, wherein the second parapalindromic sequence comprises a second sequence of 15-35 or 20-30 nucleotides, e.g., 15, 16, 17, 18, 19, 20, 21, 22, 23, 24, 25, 26, 27, 28, 29, 30, 31, 32 33, 34, or 35 nucleotides, occurring in a sequence of any of SEQ ID NOs: 13,001-25,677 (e.g., SEQ ID NOs: 13,001-24,432) or SEQ ID NOs: 26,001-38,677 (e.g., SEQ ID NOs: 26,001-37,432) or a sequence having no more than 1, 2, 3, 4, 5, 6, 7, 8, 9, 10, 11, 12, 13, 14, 15, 16, 17, 18, 19, or 20 substitutions, insertions, or deletions relative thereto.

[0255] 146. The system, cell, method, isolated recombinase polypeptide, or isolated nucleic acid of any of the preceding embodiments, wherein the insert DNA further comprises a core sequence comprising the about 2-20, e.g., 2-16, nucleotides situated between the first and second parapalindromic sequences of any of SEQ ID NOs: 13,001-25,677 (e.g., SEQ ID NOs: 13,001-24,432) or SEQ ID NOs: 26,001-38,677 (e.g., SEQ ID NOs: 26,001-37,432), or a sequence having no more than 1, 2, 3, 4, 5, 6, 7, 8, 9, 10, 11, 12, 13, 14, 15, 16, 17, 18, 19, or 20 substitutions, insertions, or deletions relative thereto.

[0256] 147. The system, cell, method, isolated recombinase polypeptide, or isolated nucleic acid of any of the preceding embodiments, wherein the first and second parapalindromic sequences comprise a perfectly palindromic sequence.

[0257] 148. The system, cell, method, isolated recombinase polypeptide, or isolated nucleic acid of any of the preceding embodiments, wherein the first and/or second parapalindromic sequence comprises 1, 2, 3, 4, 5, 6, 7, 8, 9, 10, 11, 12, 13, 14, 15, 16, 17, 18, 19, or 20 non-palindromic positions.

[0258] 149. The system, cell, method, isolated recombinase polypeptide, or isolated nucleic acid of any of the preceding embodiments, wherein the first and second parapalindromic sequences are the same length.

[0259] 150. The system, cell, method, isolated recombinase polypeptide, or isolated nucleic acid of any of the preceding embodiments, wherein the core sequence is about 2-20 nucleotides (e.g., 2-16 nucleotides) in length.

[0260] 151. The system, cell, method, isolated recombinase polypeptide, or isolated nucleic acid of any of the preceding embodiments, wherein the core sequence, e.g., the core dinucleotide, is capable of hybridizing to a corresponding sequence, e.g., dinucleotide, in the human genome, or the reverse complement thereof.

[0261] 152. The system, cell, method, isolated recombinase polypeptide, or isolated nucleic acid of any of the preceding embodiments, wherein the core sequence has at least 10%, 20%, 30%, 40%, 50%, 60%, 70%, 80%, or 90% identity to a corresponding sequence in the human genome.

[0262] 153. The system, cell, method, isolated recombinase polypeptide, or isolated nucleic acid of any of the preceding embodiments, wherein the core sequence has no more than 1, 2, 3, 4, 5, 6, 7, 8, 9, 10, 11, 12, 13, 14, or 15 mismatches to a corresponding sequence in the human genome.

[0263] 154. The system, cell, method, isolated recombinase polypeptide, or isolated nucleic acid of any of the preceding embodiments, wherein the core sequence (e.g., core dinucleotide), when cleaved by the recombinase, forms a sticky end that is capable of hybridizing to a corresponding sequence in the human genome.

[0264] 155. The system, cell, method, isolated recombinase polypeptide, or isolated nucleic acid of any of the preceding embodiments, wherein the heterologous object sequence comprises a eukaryotic gene, e.g., a mammalian gene, e.g., human gene, e.g., a blood factor (e.g., genome factor I, II, V, VII, X, XI, XII or XIII) or enzyme, e.g., lysosomal enzyme, or synthetic human gene (e.g. a chimeric antigen receptor).

[0265] 156. The system, cell, method, isolated recombinase polypeptide, or isolated nucleic acid of any of the preceding embodiments, wherein the insert DNA comprises a heterologous object sequence and a DNA recognition sequence.

[0266] 157. The system, cell, method, isolated recombinase polypeptide, or isolated nucleic acid of any of the preceding embodiments, wherein the insert DNA comprises a nucleic acid sequence encoding the recombinase polypeptide.

[0267] 158. The system, cell, method, isolated recombinase polypeptide, or isolated nucleic acid of any of the preceding embodiments, wherein the insert DNA and a nucleic acid encoding the recombinase polypeptide are present in separate nucleic acid molecules.

[0268] 159. The system, cell, method, isolated recombinase polypeptide, or isolated nucleic acid of any of embodiments 1-157, wherein the insert DNA and a nucleic acid encoding the recombinase polypeptide are present in the same nucleic acid molecule.

[0269] 160. The system, cell, method, isolated recombinase polypeptide, or isolated nucleic acid of any of the preceding embodiments, wherein the insert DNA further comprises:
[0270] (a) an open reading frame, e.g., a sequence encoding a polypeptide, e.g., an enzyme (e.g., a lysosomal enzyme), a blood factor, an exon.
[0271] (b) a non-coding and/or regulatory sequence, e.g., a sequence that binds a transcriptional modulator, e.g., a promoter (e.g., a heterologous promoter), an enhancer, an insulator.
[0272] (c) a splice acceptor site;
[0273] (d) a polyA site;
[0274] (e) an epigenetic modification site; or
[0275] (f) a gene expression unit.

[0276] 161. The system, cell, method, isolated recombinase polypeptide, or isolated nucleic acid of any of the preceding embodiments, wherein the insert DNA comprises a plasmid, viral vector (e.g., lentiviral vector or episomal viral vector), or other self-replicating vector.

[0277] 162. The system, cell, method, isolated recombinase polypeptide, or isolated nucleic acid of any of the preceding embodiments, wherein the cell does not comprise an endogenous human gene comprised by the heterologous object sequence, or does not comprise a protein encoded by said gene.

[0278] 163. The system, cell, method, isolated recombinase polypeptide, or isolated nucleic acid of any of the preceding embodiments, wherein the cell is from an organism that does not comprise an endogenous human gene comprised by the heterologous object sequence, or does not comprise a protein encoded by said gene.

[0279] 164. The system, cell, method, isolated recombinase polypeptide, or isolated nucleic acid of any of the preceding embodiments, wherein the cell comprises an endogenous human DNA recognition sequence.

[0280] 165. The system, cell, method, isolated recombinase polypeptide, or isolated nucleic acid of embodiment 164, wherein the endogenous human DNA recognition sequence is operably linked to, e.g., is situated in a site within the human genome having at least 1, 2, 3, 4, 5, 6, 7, 8 or 9 of the following criteria:
[0281] (i) is located >300 kb from a cancer-related gene;
[0282] (ii) is >300 kb from a miRNA/other functional small RNA;
[0283] (iii) is >50 kb from a 5′ gene end;
[0284] (iv) is >50 kb from a replication origin;
[0285] (v) is >50 kb away from any ultraconserved element;
[0286] (vi) has low transcriptional activity (i.e. no mRNA+/−25 kb); (vii) is not in copy number variable region;
[0287] (viii) is in open chromatin; and/or
[0288] (ix) is unique, e.g., with 1 copy in the human genome.

[0289] 166. The system, cell, method, isolated recombinase polypeptide, or isolated nucleic acid of either of embodiments 164 or 165, wherein the cell comprises a second endogenous human DNA recognition sequence.

[0290] 167. The system, cell, method, isolated recombinase polypeptide, or isolated nucleic acid of embodiment 166, wherein the second endogenous human DNA recognition sequence is operably linked to, e.g., is situated in a site within the human genome having at least 1, 2, 3, 4, 5, 6, 7, 8 or 9 of the following criteria:
[0291] (i) is located >300 kb from a cancer-related gene;
[0292] (ii) is >300 kb from a miRNA/other functional small RNA;
[0293] (iii) is >50 kb from a 5′ gene end;
[0294] (iv) is >50 kb from a replication origin;
[0295] (v) is >50 kb away from any ultraconserved element;
[0296] (vi) has low transcriptional activity (i.e. no mRNA+/−25 kb); (vii) is not in copy number variable region;
[0297] (viii) is in open chromatin; and/or
[0298] (ix) is unique, e.g., with 1 copy in the human genome.

[0299] 168. The system, cell, method, isolated recombinase polypeptide, or isolated nucleic acid of any of the preceding embodiments, wherein the cell is an animal cell, e.g., a mammalian cell, e.g., a human cell.

[0300] 169. The system, cell, method, isolated recombinase polypeptide, or isolated nucleic acid of any of the preceding embodiments, wherein the cell is a plant cell.

[0301] 170. The system, cell, method, isolated recombinase polypeptide, or isolated nucleic acid of any of the preceding embodiments, wherein the cell is not genetically modified.

[0302] 171. The system, cell, method, isolated recombinase polypeptide, or isolated nucleic acid of any of the preceding embodiments, wherein the cell does not comprise an attB or attP site.

[0303] 172. The system, cell, method, isolated recombinase polypeptide, or isolated nucleic acid of any of the preceding embodiments, wherein the cell (e.g., prior to contacting with the system) comprises a pseudo-recognition sequence.

[0304] 173. The system, cell, method, isolated recombinase polypeptide, or isolated nucleic acid of any of the preceding embodiments, wherein the cell (e.g., prior to contacting with the system) comprises exactly one pseudo-recognition sequence.

[0305] 174. The system, cell, method, isolated recombinase polypeptide, or isolated nucleic acid of any of the preceding embodiments, wherein the recombinase polypeptide comprises an amino acid sequence corresponding to a single amino acid sequence of any of SEQ ID NOs: 1-12,677 (e.g., SEQ ID NOs: 1-11,432).

[0306] 175. The system, cell, method, isolated recombinase polypeptide, or isolated nucleic acid of any of the preceding embodiments, wherein the recombinase polypeptide comprises all or a portion of a plurality of amino acid sequences of any of SEQ ID NOs: 1-12,677 (e.g., SEQ ID NOs: 1-11,432).

[0307] 176. The system, cell, method, isolated recombinase polypeptide, or isolated nucleic acid of embodiment 175, wherein the recombinase polypeptide comprises a first amino acid sequence from a portion of a first recombinase polypeptide sequence of any of SEQ ID NOs: 1-12,677 (e.g., SEQ ID NOs: 1-11,432) and a second amino acid sequence from a portion of a second, different recombinase polypeptide sequence of any of SEQ ID NOs: 1-12,677 (e.g., SEQ ID NOs: 1-11,432).

[0308] 177. The system, cell, method, isolated recombinase polypeptide, or isolated nucleic acid of embodiment 176, wherein the first amino acid sequence corresponds to a domain of the first recombinase polypeptide (e.g., an N-terminal catalytic domain, a recombinase domain, a zinc ribbon domain, or a C-terminal DNA binding domain).

[0309] 178. The system, cell, method, isolated recombinase polypeptide, or isolated nucleic acid of either of embodiments 176 or 177, wherein the second amino acid sequence corresponds to a domain of the second recombinase polypeptide (e.g., an N-terminal catalytic domain, a recombinase domain, a zinc ribbon domain, or a C-terminal DNA binding domain), e.g., a different domain than the domain of the first amino acid sequence.

[0310] 179. The system, cell, method, isolated recombinase polypeptide, or isolated nucleic acid of any of the preceding embodiments, wherein one or more of the core sequences of the insert DNA comprises a core dinucleotide that has been altered to match a core dinucleotide of a target recognition sequence in genomic DNA (and optionally to not match at least one core dinucleotide of a non-target recognition sequence in the genomic DNA).

[0311] 180. The system, cell, method, isolated recombinase polypeptide, or isolated nucleic acid of any of the preceding embodiments, wherein one or more of the core sequences of the insert DNA comprises a core dinucleotide that has been altered to match a core dinucleotide of a recognition sequence occurring within a nucleotide sequence of any of SEQ ID NOs: 13,001-25,677 (e.g., SEQ ID NOs: 13,001-24,432) or SEQ ID NOs: 26,001-38,677 (e.g., SEQ ID NOs: 26,001-37,432) (and optionally to not match at least one core dinucleotide of a non-target recognition sequence occurring within a nucleotide sequence of any of SEQ ID NOs: 13,001-25,677 (e.g., SEQ ID NOs: 13,001-24,432) or SEQ ID NOs: 26,001-38,677 (e.g., SEQ ID NOs: 26,001-37,432)).

[0312] 181. The system or method of any of the preceding embodiments, wherein the nucleic acid encoding the recombinase polypeptide is in a viral vector, e.g., an AAV vector.

[0313] 182. The system or method of any of the preceding embodiments, wherein the double-stranded insert DNA is in a viral vector, e.g., an AAV vector.

[0314] 183. The system or method of any of the preceding embodiments, wherein the nucleic acid encoding the recombinase polypeptide is an mRNA, wherein optionally the mRNA is in an LNP.

[0315] 184. The system or method of any of the preceding embodiments, wherein the double-stranded insert DNA is not in a viral vector, e.g., wherein the double-stranded insert DNA is naked DNA or DNA in a transfection reagent.

[0316] 185. The system or method of any of the preceding embodiments, wherein:
[0317] the nucleic acid encoding the recombinase polypeptide is in a first viral vector, e.g., a first AAV vector, and
[0318] the insert DNA is in a second viral vector, e.g., a second AAV vector.

[0319] 186. The system or method of any of the preceding embodiments, wherein:
[0320] the nucleic acid encoding the recombinase polypeptide is an mRNA, wherein optionally the mRNA is in an LNP, and
[0321] the insert DNA is in a viral vector, e.g., an AAV vector.

[0322] 187. The system or method of any of the preceding embodiments, wherein:
[0323] the nucleic acid encoding the recombinase polypeptide is an mRNA, and
[0324] the double-stranded insert DNA is not in a viral vector, e.g., wherein the double-stranded insert DNA is naked DNA or DNA in a transfection reagent.

[0325] 188. The system or method of any of the preceding embodiments, wherein the insert DNA has a length of at least 1 kb, 2 kb, 3 kb, 4 kb, 5 kb, 6 kb, 7 kb, 8 kb, 9 kb, 10 kb, 20 kb, 30 kb, 40 kb, 50 kb, 60 kb, 70 kb, 80 kb, 90 kb, 100 kb, 110 kb, 120 kb, 130 kb, 140 kb, or 150 kb.

[0326] 189. The system or method of any of the preceding embodiments, wherein the insert DNA does not comprise an antibiotic resistance gene or any other bacterial genes or parts.

[0327] 190. The system, kit, polypeptide, or reaction mixture of any of the preceding embodiments, wherein the system comprises one or more circular RNA molecules (circRNAs).

[0328] 191. The system, kit, polypeptide, or reaction mixture of embodiment 190, wherein the circRNA encodes the Gene Writer polypeptide.

[0329] 192. The system, kit, polypeptide, or reaction mixture of any of embodiments 190-191, wherein circRNA is delivered to a host cell.

[0330] 193. The system, kit, polypeptide, or reaction mixture of any of the preceding embodiments, wherein the circRNA is capable of being linearized, e.g., in a host cell, e.g., in the nucleus of the host cell.

[0331] 194. The system, kit, polypeptide, or reaction mixture of any of the preceding embodiments, wherein the circRNA comprises a cleavage site.

[0332] 195. The system, kit, polypeptide, or reaction mixture of any embodiment 194, wherein the circRNA further comprises a second cleavage site.

[0333] 196. The system, kit, polypeptide, or reaction mixture of embodiment 194 or 195, wherein the cleavage site can be cleaved by a ribozyme, e.g., a ribozyme comprised in the circRNA (e.g., by autocleavage).

[0334] 197. The system, kit, polypeptide, or reaction mixture of any of the preceding embodiments, wherein the circRNA comprises a ribozyme sequence.

[0335] 198. The system, kit, polypeptide, or reaction mixture of embodiment 197, wherein the ribozyme sequence is capable of autocleavage, e.g., in a host cell, e.g., in the nucleus of the host cell.

[0336] 199. The system, kit, polypeptide, or reaction mixture of any of embodiments 197-198, wherein the ribozyme is an inducible ribozyme.

[0337] 200. The system, kit, polypeptide, or reaction mixture of any of embodiments 197-199 wherein the ribozyme is a protein-responsive ribozyme, e.g., a ribozyme responsive to a nuclear protein, e.g., a genome-interacting protein, e.g., an epigenetic modifier, e.g., EZH2.

[0338] 201. The system, kit, polypeptide, or reaction mixture of any of embodiments 197-200, wherein the ribozyme is a nucleic acid-responsive ribozyme.

[0339] 202. The system, kit, polypeptide, or reaction mixture of embodiment 201, wherein the catalytic activity (e.g., autocatalytic activity) of the ribozyme is activated in the presence of a target nucleic acid molecule (e.g., an RNA molecule, e.g., an mRNA, miRNA, ncRNA, lncRNA, tRNA, snRNA, or mtRNA).

[0340] 203. The system, kit, polypeptide, or reaction mixture of any of embodiments 197-200, wherein the ribozyme is responsive to a target protein (e.g., an MS2 coat protein).

[0341] 204. The system, kit, polypeptide, or reaction mixture of embodiment 202, wherein the target protein localized to the cytoplasm or localized to the nucleus (e.g., an epigenetic modifier or a transcription factor).

[0342] 205. The system, kit, polypeptide, or reaction mixture of any of embodiments 197-201, wherein the ribozyme comprises the ribozyme sequence of a B2 or ALU retrotransposon, or a nucleic acid sequence having at least 85%, 90%, 95%, 96%, 97%, 98%, or 99% sequence identity thereto.

[0343] 206. The system, kit, polypeptide, or reaction mixture of any of embodiments 197-201, wherein the ribozyme comprises the sequence of a tobacco ringspot virus hammerhead ribozyme, or a nucleic acid sequence having at least 85%, 90%, 95%, 96%, 97%, 98%, or 99% sequence identity thereto.

[0344] 207. The system, kit, polypeptide, or reaction mixture of any of embodiments 197-201, wherein the ribozyme comprises the sequence of a hepatitis delta virus (HDV) ribozyme, or a nucleic acid sequence having at least 85%, 90%, 95%, 96%, 97%, 98%, or 99% sequence identity thereto.

[0345] 208. The system, kit, polypeptide, or reaction mixture of any of embodiments 197-207, wherein the ribozyme is activated by a moiety expressed in a target cell or target tissue.

[0346] 209. The system, kit, polypeptide, or reaction mixture of any of embodiments 197-208, wherein the ribozyme is activated by a moiety expressed in a target subcellular compartment (e.g., a nucleus, nucleolus, cytoplasm, or mitochondria).

[0347] 210. The system, kit, polypeptide, or reaction mixture of any of the preceding embodiments, wherein the ribozyme is comprised in a circular RNA or a linear RNA.

[0348] 211. The system, kit, polypeptide, or reaction mixture of any of the preceding embodiments, wherein the system, polypeptide, and/or DNA encoding the same, is formulated as a lipid nanoparticle (LNP).

[0349] 212. The system, kit, polypeptide, or reaction mixture of embodiment 211, wherein the lipid nanoparticle (or a formulation comprising a plurality of the lipid nanoparticles) lacks reactive impurities (e.g., aldehydes), or comprises less than a preselected level of reactive impurities (e.g., aldehydes).

[0350] 213. The system, kit, polypeptide, or reaction mixture of embodiment 211, wherein the lipid nanoparticle (or a formulation comprising a plurality of the lipid nanoparticles) lacks aldehydes, or comprises less than a preselected level of aldehydes.

[0351] 214. The system, kit, polypeptide, or reaction mixture of embodiment 211 or 213, wherein the lipid nanoparticle is comprised in a formulation comprising a plurality of the lipid nanoparticles.

[0352] 215. The system, kit, polypeptide, or reaction mixture of embodiment 214, wherein the lipid nanoparticle formulation is produced using one or more lipid reagents comprising less than 5%, 4%, 3%, 2%, 1%, 0.9%, 0.8%, 0.7%, 0.6%, 0.5%, 0.4%, 0.3%, 0.2%, or 0.1% total reactive impurity (e.g., aldehyde) content.

[0353] 216. The system, kit, polypeptide, or reaction mixture of embodiment 215, wherein the lipid nanoparticle formulation is produced using one or more lipid reagents comprising less than 3% total reactive impurity (e.g., aldehyde) content.

[0354] 217. The system, kit, polypeptide, or reaction mixture of any of embodiments 214-216, wherein the lipid nanoparticle formulation is produced using one or more lipid reagents comprising less than 5%, 4%, 3%, 2%, 1%, 0.9%, 0.8%, 0.7%, 0.6%, 0.5%, 0.4%, 0.3%, 0.2%, or 0.1% of any single reactive impurity (e.g., aldehyde) species.

[0355] 218. The system, kit, polypeptide, or reaction mixture of embodiment 217, wherein the lipid nanoparticle formulation is produced using one or more lipid reagent comprising less than 0.3% of any single reactive impurity (e.g., aldehyde) species.

[0356] 219. The system, kit, polypeptide, or reaction mixture of embodiment 217, wherein the lipid nanoparticle formulation is produced using one or more lipid reagents comprising less than 0.1% of any single reactive impurity (e.g., aldehyde) species.

[0357] 220. The system, kit, polypeptide, or reaction mixture of any of embodiments 214-219, wherein the lipid nanoparticle formulation comprises less than 5%, 4%, 3%, 2%, 1%, 0.9%, 0.8%, 0.7%, 0.6%, 0.5%, 0.4%, 0.3%, 0.2%, or 0.1% total reactive impurity (e.g., aldehyde) content.

[0358] 221. The system, kit, polypeptide, or reaction mixture of embodiment 220, wherein the lipid nanoparticle formulation comprises less than 3% total reactive impurity (e.g., aldehyde) content.

[0359] 222. The system, kit, polypeptide, or reaction mixture of any of embodiments 214-221, wherein the lipid nanoparticle formulation comprises less than 5%, 4%, 3%, 2%, 1%, 0.9%, 0.8%, 0.7%, 0.6%, 0.5%, 0.4%, 0.3%, 0.2%, or 0.1% of any single reactive impurity (e.g., aldehyde) species.

[0360] 223. The system, kit, polypeptide, or reaction mixture of embodiment 222, wherein the lipid nanoparticle formulation comprises less than 0.3% of any single reactive impurity (e.g., aldehyde) species.

[0361] 224. The system, kit, polypeptide, or reaction mixture of embodiment 222, wherein the lipid nanoparticle formulation comprises less than 0.1% of any single reactive impurity (e.g., aldehyde) species.

[0362] 225. The system, kit, polypeptide, or reaction mixture of any of embodiments 211-224, wherein one or more, or optionally all, of the lipid reagents used for a lipid nanoparticle as described herein or a formulation thereof comprise less than 5%, 4%, 3%, 2%, 1%, 0.9%, 0.8%, 0.7%, 0.6%, 0.5%, 0.4%, 0.3%, 0.2%, or 0.1% total reactive impurity (e.g., aldehyde) content.

[0363] 226. The system, kit, polypeptide, or reaction mixture of embodiment 225, wherein one or more, or optionally all, of the lipid reagents used for a lipid nanoparticle as described herein or a formulation thereof comprise less than 3% total reactive impurity (e.g., aldehyde) content.

[0364] 227. The system, kit, polypeptide, or reaction mixture of any of embodiments 211-226, wherein one or more, or optionally all, of the lipid reagents used for a lipid nanoparticle as described herein or a formulation thereof comprise less than 5%, 4%, 3%, 2%, 1%, 0.9%, 0.8%, 0.7%, 0.6%, 0.5%, 0.4%, 0.3%, 0.2%, or 0.1% of any single reactive impurity (e.g., aldehyde) species.

[0365] 228. The system, kit, polypeptide, or reaction mixture of embodiment 227, wherein one or more, or optionally all, of the lipid reagents used for a lipid nanoparticle as described herein or a formulation thereof comprise less than 0.3% of any single reactive impurity (e.g., aldehyde) species.

[0366] 229. The system, kit, polypeptide, or reaction mixture of embodiment 227, wherein one or more, or optionally all, of the lipid reagents used for a lipid nanoparticle as described herein or a formulation thereof comprise less than 0.1% of any single reactive impurity (e.g., aldehyde) species.

[0367] 230. The system, kit, polypeptide, or reaction mixture of any of embodiments 211-229, wherein the total aldehyde content and/or quantity of any single reactive impurity (e.g., aldehyde) species is determined by liquid chromatography (LC), e.g., coupled with tandem mass spectrometry (MS/MS), e.g., as described herein.

[0368] 231. The system, kit, polypeptide, or reaction mixture of any of embodiments 211-229, wherein the total aldehyde content and/or quantity of reactive impurity (e.g., aldehyde) species is determined by detecting one or more chemical modifications of a nucleic acid molecule (e.g., as described herein) associated with the presence of reactive impurities (e.g., aldehydes), e.g., in the lipid reagents.

[0369] 232. The system, kit, polypeptide, or reaction mixture of any of embodiments 211-229, wherein the total aldehyde content and/or quantity of aldehyde species is determined by detecting one or more chemical modifications of a nucleotide or nucleoside (e.g., a ribonucleotide or ribonucleoside, e.g., comprised in or isolated from a nucleic acid molecule, e.g., as described herein) associated with the presence of reactive impurities (e.g., aldehydes), e.g., in the lipid reagents, e.g., as described herein.

[0370] 233. The system, kit, polypeptide, or reaction mixture of embodiment 232, wherein the chemical modifications of a nucleic acid molecule, nucleotide, or nucleoside are detected by determining the presence of one or more modified nucleotides or nucleosides, e.g., using LC-MS/MS analysis, e.g., as described herein.

[0371] 234. A lipid nanoparticle (LNP) comprising the system, polypeptide (or RNA encoding the same), nucleic acid molecule, or DNA encoding the system or polypeptide, of any preceding embodiment.

[0372] 235. A system comprising a first lipid nanoparticle comprising the polypeptide (or DNA or RNA encoding the same) of a Gene Writing system (e.g., as described herein); and a second lipid nanoparticle comprising a nucleic acid molecule of a Gene Writing System (e.g., as described herein).

[0373] 236. The system, kit, polypeptide, or reaction mixture of any preceding embodiment, wherein the system, nucleic acid molecule, polypeptide, and/or DNA encoding the same, is formulated as a lipid nanoparticle (LNP).

[0374] 237. The system, kit, polypeptide, or reaction mixture of any preceding embodiment, wherein the serine recombinase comprises at least one active site signature of a serine recombinase, e.g., cd00338, cd03767, cd03768, cd03769, or cd03770.

[0375] 238. The system, kit, polypeptide, or reaction mixture of any preceding embodiment, wherein the serine recombinase comprises a domain identified from a publicly available database (e.g., InterPro, UniProt, or the conserved domain database (as described by Lu et al. Nucleic Acids Res 48, D265-268 (2020); incorporated by reference herein in its entirety)), e.g., as described herein.

[0376] 239. The system, kit, polypeptide, or reaction mixture of any preceding embodiment, wherein the serine recombinase comprises a domain identified by scanning open reading frames or all-frame translations of nucleic acid sequences for serine recombinase domains (e.g., as described herein), e.g., using a prediction tool, e.g., InterProScan, e.g., as described herein.

[0377] 240. The system, kit, polypeptide, cell (e.g., cell made by a method herein), method, or reaction mixture of any preceding embodiment, wherein the heterologous object sequence is in (e.g., is inserted into) a target site in the genome of the cell, wherein optionally the target site comprises, in order, (i) a first parapalindromic sequence (e.g., an attL site), (ii) a heterologous object sequence, and (iii) a second parapalindromic sequence (e.g., an attR site).

[0378] 241. The system, kit, polypeptide, cell, method, or reaction mixture embodiment 240, wherein the cell (e.g., the cell made by a method herein) comprises an insertion or deletion between (i) the first parapalindromic sequence, and (ii) the heterologous object sequence, or wherein the cell comprises an insertion or deletion between (ii) the heterologous object sequence and (iii) the second parapalindromic sequence.

[0379] 242. The system, kit, polypeptide, cell, method, or reaction mixture of embodiment 241, wherein the insertion or deletion comprises less than 20 nucleotides or base pairs, e.g., less than 20, 19, 18, 17, 16, 15, 14, 13, 12, 11, 10, 9, 8, 7, 6, 5, 4, 3, 2, or less than 1 nucleotides or base pairs of the nucleic acid sequence of the target site.

[0380] 243. The system, kit, polypeptide, cell, method, or reaction mixture of embodiment 241, wherein the insertion comprises less than 20 nucleotides or base pairs, e.g., less than 20, 19, 18, 17, 16, 15, 14, 13, 12, 11, 10, 9, 8, 7, 6, 5, 4, 3, 2, or less than 1 nucleotides or base pairs.

[0381] 244. The system, kit, polypeptide, cell, method, or reaction mixture of embodiment 241, wherein the deletion comprises less than 20 nucleotides or base pairs, e.g., less than 20, 19, 18, 17, 16, 15, 14, 13, 12, 11, 10, 9, 8, 7, 6, 5, 4, 3, 2, or less than 1 nucleotides or base pairs of the prior sequence of the target site.

[0382] 245. The system, kit, polypeptide, cell, method, or reaction mixture of any of embodiments 240-244, wherein a core region, (e.g., a central dinucleotide) of a recognition sequence at a target site (e.g., an attB, attP, or pseudosite thereof, e.g., as listed in Table 2) comprises about 95%, 96%, 97%, 98%, 99%, or 100% identity to a core region (e.g., a central dinucleotide) of a recognition sequence (e.g., an attP or attB site, e.g., as listed in Table 2, on the insert DNA).

[0383] 246. The system, kit, polypeptide, cell, method, or reaction mixture of embodiment 245, wherein the number of insertions or deletions in the target site is lower than the number of insertions or deletions in an otherwise similar cell wherein the percent identity is lower.

[0384] 247. The system, kit, polypeptide, cell, method, or reaction mixture of embodiment 246, wherein the number of insertion or deletion events is at least 1.1, 1.2, 1.3, 1.4, 1.5, 1.6, 1.7, 1.8, 1.9, 2.0, 3.0, 4.0, 5.0, 10, 20, 30, 40, 50, 60, 70, 80, 90, or at least 100-fold lower.

[0385] 248. The system, kit, polypeptide, cell, method, or reaction mixture of any of embodiments 240-247, wherein the target site does not comprise a plurality of insertions (e.g., head-to-tail or head-to-head duplications).

[0386] 249. The system, kit, polypeptide, cell, method, or reaction mixture of any of embodiments 240-248, wherein the target site comprises less than 100, 75, 50, 45, 40, 35, 30, 25, 20, 15, 14, 13, 12, 11, 10, 9, 8, 7, 6, 5, 4, 3, or 2 copies of the heterologous object sequence or a fragment thereof.

[0387] 250. The system, kit, polypeptide, cell, method, or reaction mixture of any of embodiments 240-249, wherein the target site comprises a single copy of the heterologous object sequence or a fragment thereof.

[0388] 251. The system, kit, polypeptide, cell, method, or reaction mixture of any of embodiments 240-250, wherein (e.g., in a population of cells), target sites showing more than one copy of the heterologous object sequence or fragment thereof are less than 95%, 90%, 80%, 70%, 60%, 50%, 40%, 30%, 20%, 10%, 9%, 8%, 7%, 6%, 4%, 4%, 3%, 2%, or 1% of target sites comprising at least one copy of the heterologous object sequence or fragment thereof.

[0389] 252. The system, kit, polypeptide, cell, method, or reaction mixture of any of embodiments 240-251, wherein (e.g., in a population of cells), target sites showing more than 2 copies of the heterologous object sequence or fragment thereof are less than 95%, 90%, 80%, 70%, 60%, 50%, 40%, 30%, 20%, 10%, 9%, 8%, 7%, 6%, 4%, 4%, 3%, 2%, or 1% of target sites comprising at least one copy of the heterologous object sequence or fragment thereof.

[0390] 253. The system, kit, polypeptide, cell, method, or reaction mixture of any of embodiments 240-252, wherein (e.g., in a population of cells), target sites showing more than 3 copies of the heterologous object sequence or fragment thereof are less than 95%, 90%, 80%, 70%, 60%, 50%, 40%, 30%, 20%, 10%, 9%, 8%, 7%, 6%, 4%, 4%, 3%, 2%, or 1% of target sites comprising at least one copy of the heterologous object sequence or fragment thereof.

[0391] 254. The system, kit, polypeptide, cell, method, or reaction mixture of any of embodiments 240-253, wherein the target site comprises one or more ITRs (e.g., AAV ITRs), e.g., 1, 2, 3, 4, or more ITRs, e.g., wherein one or more ITR is situated between (i) the first parapalindromic sequence, and (iii) the second parapalindromic sequence.

[0392] 255. The system, kit, polypeptide, cell, method, or reaction mixture of embodiment 253, wherein (e.g., in a population of cells), target sites comprising an ITR (e.g., an AAV ITR) between (i) the first parapalindromic sequence, and (iii) the second parapalindromic sequence are at least 1%, 5%, 10%, 20%, 30%, 40%, 50%, 60%, 70%, 80%, or 90% of target sites comprising at least one copy of the heterologous object sequence or fragment thereof.

[0393] 256. The system, kit, polypeptide, cell, method, or reaction mixture of embodiment 253 or 255, wherein the insert site comprises one or more copies of the heterologous object sequence or fragment thereof.

[0394] 257. The system, kit, polypeptide, cell, method, or reaction mixture of any of embodiments 240-256, wherein the target site comprises, in order, (i) the first parapalindromic sequence, and (ii) the heterologous object sequence.

[0395] 258. The system, kit, polypeptide, cell, method, or reaction mixture of embodiment 257, wherein the target site does not comprise (iii) a second parapalindromic sequence.

[0396] 259. The system, kit, polypeptide, cell, method, or reaction mixture of any of embodiments 240-257, wherein the target site comprises (iii) the second parapalindromic sequence, wherein (ii) is situated between (i) and (iii).

[0397] 260. The system, kit, polypeptide, cell, method, or reaction mixture of any of embodiments 240-259, wherein (e.g., in a population of cells), target sites that comprise both of (i) the first parapalindromic sequence and (iii) the third parapalindromic sequence comprise a higher percentage of complete heterologous object sequences (e.g., at least 0.1×, 0.2×, 0.3×, 0.4×, 0.5×, 0.6×, 0.7×, 0.8×, 0.9×, 1.0×, 1.5×, 2.0×, 3×, 4×, 5×, 6×, 7×, 8×, 9×, 10×, or more percent complete heterologous object sequences), as compared to the percentage of target sites that comprise one or fewer parapalindromic sequences (e.g., attL or attP sequences).

[0398] 261. The system, kit, polypeptide, cell, method, or reaction mixture of any of the preceding embodiments, wherein the insert DNA comprises:
[0399] (i) a first insulator;
[0400] (ii) the DNA recognition sequence; and
[0401] (iii) the heterologous object sequence.

[0402] 262. A template nucleic acid molecule comprising:
[0403] (i) a first insulator;
[0404] (ii) a DNA recognition sequence that is specifically bound by a recombinase polypeptide (e.g., a tyrosine recombinase polypeptide or a serine recombinase polypeptide); and
[0405] (iii) a heterologous object sequence.

[0406] 263. The template nucleic acid, system, kit, polypeptide, cell, method, or reaction mixture of embodiment 261 or 262, wherein (ii) is positioned between (i) and (iii).

[0407] 264. The template nucleic acid, system, kit, polypeptide, cell, method, or reaction mixture of embodiment 261 or 262, wherein (i) is positioned between (ii) and (iii).

[0408] 265. The template nucleic acid, system, kit, polypeptide, cell, method, or reaction mixture of embodiment 261-264, which further comprises (iv) a second insulator.

[0409] 266. The template nucleic acid, system, kit, polypeptide, cell, method, or reaction mixture of embodiment A4, wherein (i)-(iv) are positioned in the following order: (i), (ii), (iv), (iii).

[0410] 267. The template nucleic acid, system, kit, polypeptide, cell, method, or reaction mixture of any of the preceding embodiments, wherein the distance between the first insulator and the DNA recognition sequence is less than 2500, 2000, 1500, 1000, 750, 500, 400, 300, 200, 150, 100, 90, 80, 70, 60, 50, 40, 30, 20, 15, 10, 9, 8, 7, 6, 5, 4, 3, 2, or 1 nucleotides (e.g., is 0 nucleotides).

[0411] 268. The template nucleic acid, system, kit, polypeptide, cell, method, or reaction mixture of the preceding embodiments, wherein the distance between the DNA recognition sequence and the second insulator is less than 2500, 2000, 1500, 1000, 750, 500, 400, 300, 200, 150, 100, 90, 80, 70, 60, 50, 40, 30, 20, 15, 10, 9, 8, 7, 6, 5, 4, 3, 2, or 1 nucleotides (e.g., is 0 nucleotides).

[0412] 269. The template nucleic acid, system, kit, polypeptide, cell, method, or reaction mixture of any of the preceding embodiments, wherein the distance between the first insulator and the second insulator is less than 1000, 900, 800, 700, 600, 500, 400, 300, 200, 150, 100, 90, 80, 70, 60, or 50 nucleotides.

[0413] 270. The template nucleic acid, system, kit, polypeptide, cell, method, or reaction mixture of any of the preceding embodiments, wherein when the template nucleic acid molecule or insert DNA is integrated into a target DNA molecule (e.g., genomic DNA, e.g., a chromosome or mitochondrial DNA), the nucleic acid sequence between the first insulator and the second insulator is insulated from one or more of:
[0414] a) heterochromatin formation;
[0415] b) epigenetic regulation (e.g., from both of epigenetic regulation and transcriptional regulation);
[0416] c) transcriptional regulation;
[0417] d) histone deacetylation (e.g., from both of histone deacetylation and histone methylation);
[0418] e) histone methylation;
[0419] f) histone deacetylation; and
[0420] g) DNA methylation, e.g., promoter DNA methylation.

[0421] 271. The template nucleic acid, system, kit, polypeptide, cell, method, or reaction mixture of any of the preceding embodiments, wherein when the template nucleic acid molecule or insert DNA is integrated into a target DNA molecule (e.g., genomic DNA, e.g., a chromosome or mitochondrial DNA), the rate of heterochromatin formation of the nucleic acid sequence between the first insulator and the second insulator is reduced by at least about 5%, 10%, 15%, 20%, 25%, 30%, 40%, 50%, 60%, 70%, 75%, 80%, 85%, 90%, 95%, 96%, 97%, 98%, 99%, or 100% compared to an otherwise similar template nucleic acid or insert DNA that lacks the first and second insulators.

[0422] 272. The template nucleic acid, system, kit, polypeptide, cell, method, or reaction mixture of any of the preceding embodiments, wherein when the template nucleic acid molecule or insert DNA is integrated into a target DNA molecule (e.g., genomic DNA, e.g., a chromosome or mitochondrial DNA), there is a difference (e.g., an increase or reduction) by at least about 5%, 10%, 15%, 20%, 25%, 30%, 40%, 50%, 60%, 70%, 75%, 80%, 85%, 90%, 95%, 96%, 97%, 98%, 99%, or 100% in the nucleic acid sequence on one side of the first insulator compared to the nucleic acid sequence on the other side of the first insulator, of one or more of:
[0423] a) heterochromatin formation;
[0424] b) epigenetic regulation (e.g., from both of epigenetic regulation and transcriptional regulation);
[0425] c) transcriptional regulation;
[0426] d) histone deacetylation (e.g., from both of histone deacetylation and histone methylation);
[0427] e) histone methylation;
[0428] f) histone deacetylation; and
[0429] g) DNA methylation, e.g., promoter DNA methylation.

[0430] 273. The template nucleic acid, system, kit, polypeptide, cell, method, or reaction mixture of any of the preceding embodiments, wherein when the template nucleic acid molecule or insert DNA is integrated into a target DNA molecule (e.g., genomic DNA, e.g., a chromosome or mitochondrial DNA), there is a difference (e.g., an increase or reduction) by at least about 5%, 10%, 15%, 20%, 25%, 30%, 40%, 50%, 60%, 70%, 75%, 80%, 85%, 90%, 95%, 96%, 97%, 98%, 99%, or 100% in the nucleic acid sequence between the first and second insulators, compared to an otherwise similar nucleic acid sequence that is situated in the same site in the target DNA molecule and lacks the first and second insulator, of one or more of:
[0431] a) heterochromatin formation;
[0432] b) epigenetic regulation (e.g., from both of epigenetic regulation and transcriptional regulation);
[0433] c) transcriptional regulation;
[0434] d) histone deacetylation (e.g., from both of histone deacetylation and histone methylation);
[0435] e) histone methylation;
[0436] f) histone deacetylation; and
[0437] g) DNA methylation, e.g., promoter DNA methylation.

[0438] 274. The template nucleic acid, system, kit, polypeptide, cell, method, or reaction mixture of any of the preceding embodiments, wherein when the template nucleic acid molecule or insert DNA is integrated into a target DNA molecule (e.g., genomic DNA, e.g., a chromosome or mitochondrial DNA), the level of heterochromatin formation in a predetermined time frame of the nucleic acid sequence between the first insulator and the second insulator is reduced by at least about 5%, 10%, 15%, 20%, 25%, 30%, 40%, 50%, 60%, 70%, 75%, 80%, 85%, 90%, 95%, 96%, 97%, 98%, 99%, or 100% compared to an otherwise similar template nucleic acid that lacks the first and second insulators, wherein optionally the predetermined time frame is 7, 10, 14, 21, 28, or 60 days.

[0439] 275. The template nucleic acid, system, kit, polypeptide, cell, method, or reaction mixture of any of the preceding embodiments, wherein when the template nucleic acid molecule or insert DNA is integrated into a target DNA molecule (e.g., genomic DNA, e.g., a chromosome or mitochondrial DNA), the level of expression of a gene comprised in the heterologous object sequence is reduced by no more than 0.1%, 1%, 2%, 3%, 4%, 5%, 6%, 7%, 8%, 9%, 10%, 20%, 30%, 40%, 50%, or 75% compared to an otherwise similar template nucleic acid that lacks the first and second insulators.

[0440] 276. The template nucleic acid, system, kit, polypeptide, cell, method, or reaction mixture of any of the preceding embodiments, wherein the first and/or second insulator is specifically bound by CTCF (CCCTC-binding factor), CTF (CAAT-binding transcription factor 1), USF1 (Upstream Stimulatory Factor 1), USF2 (Upstream Stimulatory Factor 2), PARP-1 (Poly(ADP-ribose) Polymerase-1), or VEZF1 (Vascular Endothelial Zinc Finger 1).

[0441] 277. The template nucleic acid, system, kit, polypeptide, cell, method, or reaction mixture of any of the preceding embodiments, wherein the first and/or second insulator comprises the nucleic acid sequence of an insulator selected from any one of chicken β-globin 5′HS4 (cHS4) element, a Scaffold or Matrix Attachment Region (S/MAR) (e.g., MAR X_S29), a Stabilising Anti Repressor (STAR) element (e.g., STAR40), a D4Z4 insulator, A Ubiquitous Chromatin Opening Element (UCOE element) (e.g., aHNRPA2B1-CBX3 locus (A2UCOE), 3′UCOE, or SRF-UCOE), or a nucleic acid sequence having at least 75%, 80%, 85%, 90%, 95%, 96%, 97%, 98%, or 99% identity thereto.

[0442] 278. The template nucleic acid, system, kit, polypeptide, cell, method, or reaction mixture of any of the preceding embodiments, wherein one or both of the first and second insulator is a barrier insulator.

[0443] 279. The template nucleic acid, system, kit, polypeptide, cell, method, or reaction mixture of any of the preceding embodiments, wherein one or both of the first and second insulator is an enhancer-blocking insulator.

[0444] 280. The template nucleic acid, system, kit, polypeptide, cell, method, or reaction mixture of any of the preceding embodiments, wherein one or both of the first and second insulator is a passive boundary element.

[0445] 281. The template nucleic acid, system, kit, polypeptide, cell, method, or reaction mixture of any of the preceding embodiments, wherein one or both of the first and second insulator is an active chromatin remodeling element.

[0446] 282. The template nucleic acid, system, kit, polypeptide, cell, method, or reaction mixture of any of the preceding embodiments, wherein the first and/or second insulator comprises an insulator sequence identified according to the method described in Liu et al. (2015, Nature Biotechnol. 33(2): 198-203; incorporated herein by reference).

[0447] 283. The template nucleic acid, system, kit, polypeptide, cell, method, or reaction mixture of any of the preceding embodiments, wherein the first insulator and the second insulator share the same orientation.

[0448] 284. The template nucleic acid, system, kit, polypeptide, cell, method, or reaction mixture of any of the preceding embodiments, wherein the first insulator and the second insulator have opposite orientations.

[0449] 285. The template nucleic acid, system, kit, polypeptide, cell, method, or reaction mixture of any of the preceding embodiments, wherein the first insulator and the second insulator have the same nucleic acid sequence.

[0450] 286. The template nucleic acid, system, kit, polypeptide, cell, method, or reaction mixture of any of the preceding embodiments, wherein the first insulator and the second insulator have different nucleic acid sequences.

[0451] 287. The template nucleic acid, system, kit, polypeptide, cell, method, or reaction mixture of any of the preceding embodiments, wherein the template nucleic acid molecule is DNA.

[0452] 288. The template nucleic acid, system, kit, polypeptide, cell, method, or reaction mixture of any of the preceding embodiments, wherein the template nucleic acid molecule is RNA.

[0453] 289. The template nucleic acid, system, kit, polypeptide, cell, method, or reaction mixture of any of the preceding embodiments, wherein the template nucleic acid molecule or insert DNA is circular (e.g., circular and double stranded).

[0454] 290. The template nucleic acid, system, kit, polypeptide, cell, method, or reaction mixture of any of the preceding embodiments, wherein the template nucleic acid molecule or insert DNA is linear.

[0455] 291. The template nucleic acid, system, kit, polypeptide, cell, method, or reaction mixture of any of the preceding embodiments, wherein the template nucleic acid molecule or insert DNA comprises doggybone DNA (dbDNA) or closed-ended DNA (ceDNA).

[0456] 292. The template nucleic acid, system, kit, polypeptide, cell, method, or reaction mixture of any of the preceding embodiments, wherein the template nucleic acid molecule or insert DNA comprises exactly one DNA recognition sequence.

[0457] 293. The template nucleic acid, system, kit, polypeptide, cell, method, or reaction mixture of any of the preceding embodiments, wherein the template nucleic acid molecule or insert DNA comprises exactly two insulators.

[0458] 294. The template nucleic acid, system, kit, polypeptide, cell, method, or reaction mixture of any of the preceding embodiments, wherein the template nucleic acid molecule or insert DNA further comprises a promoter.

[0459] 295. The template nucleic acid, system, kit, polypeptide, cell, method, or reaction mixture of any of the preceding embodiments, wherein the template nucleic acid molecule or insert DNA comprises exactly one promoter.

[0460] 296. The template nucleic acid, system, kit, polypeptide, cell, method, or reaction mixture of any of the preceding embodiments, wherein the template nucleic acid molecule or insert DNA comprises exactly one heterologous object sequence.

[0461] 297. The template nucleic acid, system, kit, polypeptide, cell, method, or reaction mixture of any of the preceding embodiments, wherein the template nucleic acid molecule or insert DNA further comprises an enhancer.

[0462] 298. The template nucleic acid, system, kit, polypeptide, cell, method, or reaction mixture of any of the preceding embodiments, wherein the template nucleic acid molecule or insert DNA further comprises a long terminal repeat (LTR), e.g., from a retrovirus or a lentivirus (e.g., HIV).

[0463] 299. The template nucleic acid, system, kit, polypeptide, cell, method, or reaction mixture of any of the preceding embodiments, wherein the template nucleic acid molecule or insert DNA comprises one or both of a 5′ long terminal repeat (5′ LTR) and a 3′ long terminal repeat (3′ LTR).

[0464] 300. The template nucleic acid, system, kit, polypeptide, cell, method, or reaction mixture of embodiment 299, wherein the 3′ UTR comprises a deletion of its U3 sequence.

[0465] 301. The template nucleic acid, system, kit, polypeptide, cell, method, or reaction mixture of embodiment 299 or 300, wherein the first insulator is positioned in an LTR, e.g., in the 3′ LTR or the 5′ LTR.

[0466] 302. The template nucleic acid, system, kit, polypeptide, cell, method, or reaction mixture of any of embodiments 299-F1301c, wherein the first insulator is positioned in the 3′ UTR, e.g., at the position of the deletion of the U3 sequence.

[0467] 303. The template nucleic acid, system, kit, polypeptide, cell, method, or reaction mixture of any of embodiments 299-301, wherein the first insulator is positioned in the 3′ UTR, and upon reverse transcription the first insulator sequence is present in both the 3′ UTR and 5′ UTR sequences of the resulting DNA.

[0468] 304. The template nucleic acid, system, kit, polypeptide, cell, method, or reaction mixture of any of the preceding embodiments, wherein the template nucleic acid molecule or insert DNA further comprises an inverted terminal repeat (ITR), e.g., from an adeno-associated virus.

[0469] 305. The template nucleic acid, system, kit, polypeptide, cell, method, or reaction mixture of any of embodiments 298-304, wherein the LTR or ITR is positioned between the heterologous object sequence and the first insulator.

[0470] 306. The template nucleic acid, system, kit, polypeptide, cell, method, or reaction mixture of any of embodiments 298-304, wherein the LTR or ITR is positioned between the heterologous object sequence and the second insulator.

[0471] 307. The template nucleic acid, system, kit, polypeptide, cell, method, or reaction mixture of any of embodiments 298-306, wherein the LTR or ITR is not positioned between the first insulator and the DNA recognition sequence.

[0472] 308. The template nucleic acid, system, kit, polypeptide, cell, method, or reaction mixture of any of embodiments 298-307, wherein the LTR or ITR is not positioned between the second insulator and the DNA recognition sequence.

[0473] 309. The template nucleic acid, system, kit, polypeptide, cell, method, or reaction mixture of any of embodiments 298-304, wherein the first insulator is positioned between the heterologous object sequence and the first LTR or ITR

[0474] 310. The template nucleic acid, system, kit, polypeptide, cell, method, or reaction mixture of any of embodiments 298-309, wherein the second insulator is positioned between the heterologous object sequence and the second LTR or ITR

[0475] 311. The template nucleic acid, system, kit, polypeptide, cell, method, or reaction mixture of any of embodiments 298-310, wherein the first and second insulators are positioned between the heterologous object sequence and the LTRs or ITRs.

[0476] 312. The template nucleic acid, system, kit, polypeptide, cell, method, or reaction mixture of any of the preceding embodiments, wherein the DNA recognition sequence is specifically bound by a serine recombinase (e.g., serine integrase) polypeptide that comprises an amino acid sequence of any of SEQ ID NOs: 1-12,677 (e.g., SEQ ID NOs: 1-11,432), or an amino acid sequence having at least 70%, 75%, 80%, 85%, 90%, 95%, 96%, 97%, 98%, or 99% identity thereto.

[0477] 313. The template nucleic acid, system, kit, polypeptide, cell, method, or reaction mixture of any of the preceding embodiments, wherein the DNA recognition sequence comprises a nucleic acid sequence of any of SEQ ID NOs: 13,001-25,677 (e.g., SEQ ID NOs: 13,001-24,432) or SEQ ID NOs: 26,001-38,677 (e.g., SEQ ID NOs: 26,001-37,432), or a nucleotide sequence having at least 70%, 75%, 80%, 85%, 90%, 95%, 96%, 97%, 98%, or 99% identity thereto, or having no more than 1, 2, 3, 4, 5, 6, 7, 8, 9, 10, 11, 12, 13, 14, 15, 16, 17, 18, 19, or 20 sequence alterations (e.g., substitutions, insertions, or deletions) relative thereto.

[0478] 314. The template nucleic acid, system, kit, polypeptide, cell, method, or reaction mixture of any of the preceding embodiments, wherein the serine integrase polypeptide comprises an amino acid sequence of any of SEQ ID NOs: 1-12,677 (e.g., SEQ ID NOs: 1-11,432), or an amino acid sequence having at least 70%, 75%, 80%, 85%, 90%, 95%, 96%, 97%, 98%, or 99% identity thereto.

[0479] 315. The template nucleic acid, system, kit, polypeptide, cell, method, or reaction mixture of any of the preceding embodiments, wherein the serine integrase polypeptide is a viral serine integrase polypeptide or a plasmid serine integrase.

[0480] 316. The template nucleic acid, system, kit, polypeptide, cell, method, or reaction mixture of any of the preceding embodiments, wherein the DNA recognition sequence comprises a first parapalindromic sequence and a second parapalindromic sequence, and a core sequence situated between the first and second parapalindromic sequences.

[0481] 317. The template nucleic acid, system, kit, polypeptide, cell, method, or reaction mixture of any of the preceding embodiments, wherein each parapalindromic sequence is about 15-35 or 20-30 nucleotides in length.

[0482] 318. The template nucleic acid, system, kit, polypeptide, cell, method, or reaction mixture of any of the preceding embodiments, wherein the first and second parapalindromic sequences together comprise a parapalindromic region occurring within a nucleotide sequence of any of SEQ ID NOs: 13,001-25,677 (e.g., SEQ ID NOs: 13,001-24,432) or SEQ ID NOs: 26,001-38,677 (e.g., SEQ ID NOs: 26,001-37,432), or a nucleotide sequence having at least 70%, 75%, 80%, 85%, 90%, 95%, 96%, 97%, 98%, or 99% identity to said parapalindromic region, or having no more than 1, 2, 3, 4, 5, 6, 7, 8, 9, 10, 11, 12, 13, 14, 15, 16, 17, 18, 19, or 20 sequence alterations (e.g., substitutions, insertions, or deletions) relative thereto.

[0483] 319. The template nucleic acid, system, kit, polypeptide, cell, method, or reaction mixture of any of the preceding embodiments, wherein the core sequence has a length of about 2-20 nucleotides.

[0484] 320. The template nucleic acid, system, kit, polypeptide, cell, method, or reaction mixture of any of the preceding embodiments, wherein the heterologous object sequence comprises a sequence encoding an effector (e.g., a therapeutic effector).

[0485] 321. The template nucleic acid, system, kit, polypeptide, cell, method, or reaction mixture of any of the preceding embodiments, wherein the effector is a polypeptide (e.g., a protein).

[0486] 322. The template nucleic acid, system, kit, polypeptide, cell, method, or reaction mixture of any of the preceding embodiments, wherein the effector is a nucleic acid (e.g., a non-coding RNA, e.g., an siRNA or miRNA).

[0487] 323. The template nucleic acid, system, kit, polypeptide, cell, method, or reaction mixture of any of the preceding embodiments, wherein the DNA recognition sequence is within 20, 25, 30, 40, 50, 60, 70, 80, 90, 100, 125, 150, 175, 200, 225, 250, 300, 350, 400, 450, or 500 nucleotides of the heterologous object sequence.

[0488] 324. The template nucleic acid, system, kit, polypeptide, cell, method, or reaction mixture of any of the preceding embodiments, wherein the serine integrase polypeptide is capable of integrating the heterologous object sequence, the first insulator, and the second insulator into a target DNA molecule (e.g., a genomic DNA, e.g., a chromosome or mitochondrial DNA), e.g., at a specific target site.

[0489] 325. The template nucleic acid, system, kit, polypeptide, cell, method, or reaction mixture of embodiment 324, wherein the heterologous object sequence is integrated into the target DNA molecule at an efficiency of at least about 0.1% (e.g., at least about 0.1%, 0.5%, 1%, 5%, 10%, 20%, 30%, 40%, 50%, 60%, 70%, 80%, 85%, 90%, 95%, 96%, 97%, 98%, 99%, or 100%) of a population of the cell, e.g., as measured in an assay of Example 5.

[0490] 326. The template nucleic acid, system, kit, polypeptide, cell, method, or reaction mixture of any of the preceding embodiments, wherein the DNA recognition sequence is capable of being recombined by the serine integrase polypeptide with a cognate DNA recognition sequence in a naturally occurring human genome.

[0491] 327. The template nucleic acid, system, kit, polypeptide, cell, method, or reaction mixture of embodiment 326, wherein the cognate DNA recognition sequence is in a safe harbor site or a Natural Harbor™ site (e.g., as described in WO2020/047124, which is herein incorporated by reference in its entirety, including all description of Natural Harbor™ sites, including Table 4 therein).

[0492] 328. The template nucleic acid, system, kit, polypeptide, cell, method, or reaction mixture of embodiment 326 or 327, wherein the cognate DNA recognition sequence is in a gene associated with a disease, or is within 1 kb, 2 kb, 3 kb, 4 kb, 5 kb, or 10 kb of a gene associated with a disease.

[0493] 329. The template nucleic acid, system, kit, polypeptide, cell, method, or reaction mixture of any of embodiments 326-328, wherein the cognate DNA recognition sequence comprises a nucleic acid sequence as listed of any of SEQ ID NOs: 13,001-25,677 (e.g., SEQ ID NOs: 13,001-24,432) or SEQ ID NOs: 26,001-38,677 (e.g., SEQ ID NOs: 26,001-37,432), or a nucleotide sequence having at least 70%, 75%, 80%, 85%, 90%, 95%, 96%, 97%, 98%, or 99% identity thereto, or having no more than 1, 2, 3, 4, 5, 6, 7, 8, 9, 10, 11, 12, 13, 14, 15, 16, 17, 18, 19, or 20 sequence alterations (e.g., substitutions, insertions, or deletions) relative thereto.

[0494] 330. A system comprising:
[0495] (a) the template nucleic acid molecule or insert DNA of any of the preceding embodiments; and
[0496] (b) serine integrase polypeptide that specifically binds to the DNA recognition sequence.

[0497] 331. The system of embodiment 330, wherein the system further comprises:
[0498] (c) a lentiviral structural polypeptide (e.g., a gag polypeptide, e.g., from HIV);
[0499] (d) a lentiviral polymerase (e.g., a viral reverse transcriptase, e.g., a pol polypeptide, e.g., from HIV); and
[0500] (d) an envelope protein (e.g., an env polypeptide, e.g., from HIV)

[0501] 332. The system of embodiment 330, wherein the system further comprises:
[0502] (c) a viral structural polypeptide (e.g., a cap polypeptide, e.g., from an adeno-associated virus (AAV)); and/or
[0503] (d) a viral polymerase (e.g., a rep polypeptide, e.g., from an AAV).

[0504] 333. A cell (e.g., a human cell) comprising the template nucleic acid molecule or insert DNA of any of the preceding embodiments.

[0505] 334. The cell of embodiment 333, wherein the template nucleic acid molecule or insert DNA is extrachromosomal.

[0506] 335. The cell of embodiment 333, wherein the template nucleic acid molecule or insert DNA is integrated into a chromosome.

[0507] 336. A cell (e.g., a human cell) comprising (e.g., in a chromosome), in order:
[0508] a) a first recombinase transfer sequence;
[0509] b) a first insulator;
[0510] c) a heterologous object sequence;
[0511] d) a second insulator; and
[0512] e) a second recombinase transfer sequence.

[0513] 337. The cell of embodiment 336, which further comprises a first ITR, e.g., between the heterologous object sequence and the second insulator.

[0514] 338. The cell of embodiment 337, which further comprises a second ITR, e.g., between the first ITR and the second insulator.

[0515] 339. The cell of embodiment 336, which further comprises a first LTR, e.g., between the heterologous object sequence and the second insulator.

[0516] 340. The cell of embodiment 339, which further comprises a second LTR, e.g., between the first LTR and the second insulator.

[0517] 341. A cell (e.g., a human cell) comprising the system of any of embodiments 330-332.

[0518] 342. The cell of any of embodiments 340-341, wherein the cell comprises, in its genome, a cognate DNA recognition sequence, e.g., wherein the serine integrase polypeptide is capable of recombining the DNA recognition sequence of the template nucleic acid molecule or insert DNA with the cognate DNA recognition sequence of the cell.

[0519] 343. The cell of embodiment 342, wherein the cognate DNA recognition sequence is identical in sequence to the DNA recognition sequence of the template nucleic acid, or differs by no more than 1, 2, 3, 4, 5, 6, 7, 8, 9, or 10 sequence alterations, or has at least 70%, 75%, 80%, 85%, 90%, 95%, 96%, 97%, 98%, or 99% identity thereto.

[0520] 344. The cell of any of embodiments 340-343, wherein the cognate DNA recognition sequence is in a safe harbor site or a Natural Harbor™ site (e.g., as described in WO2020/047124, which is herein incorporated by reference in its entirety, including all description of Natural Harbor™ sites, including Table 4 therein).

[0521] 345. The cell of any of embodiments 340-344, wherein the cognate DNA recognition sequence is in a gene associated with a disease, or is within 1 kb, 2 kb, 3 kb, 4 kb, 5 kb, or 10 kb of a gene associated with a disease.

[0522] 346. The cell of any of embodiments 340-345, wherein the cognate DNA recognition sequence comprises a nucleic acid sequence as listed in the sequence listing.

[0523] 347. A method of modifying the genome of a cell (e.g., a eukaryotic cell, e.g., a mammalian cell, e.g., human cell) comprising introducing into the cell:
[0524] (i) the template nucleic acid molecule or insert DNA of embodiments 262-329 and a recombinase polypeptide (e.g., serine integrase polypeptide), or
[0525] (ii) the system of any of embodiments 330-333;
[0526] thereby modifying the genome of the cell.

[0527] 348. The method of embodiment 347, wherein introducing the recombinase polypeptide, e.g., serine integrase polypeptide into the cell comprises contacting the cell with a nucleic acid encoding the serine integrase polypeptide under conditions that allow for translation of the serine integrase polypeptide.

[0528] 349. The template nucleic acid, system, kit, polypeptide, cell, method, or reaction mixture of any of the preceding embodiments, wherein an RNA of the system (e.g., template RNA, the RNA encoding the polypeptide of (a), or an RNA expressed from a heterologous object sequence integrated into a target DNA) comprises a microRNA binding site, e.g., in a 3′ UTR.

[0529] 350. The template nucleic acid, system, kit, polypeptide, cell, method, or reaction mixture of embodiment 349, wherein the microRNA binding site is recognized by a miRNA that is present in a non-target cell type, but that is not present (or is present at a reduced level relative to the non-target cell) in a target cell type.

[0530] 351. The template nucleic acid, system, kit, polypeptide, cell, method, or reaction mixture of embodiment 349 or 350, wherein the miRNA is miR-142, and/or wherein the non-target cell is a Kupffer cell or a blood cell, e.g., an immune cell.

[0531] 352. The template nucleic acid, system, kit, polypeptide, cell, method, or reaction mixture of embodiment 349 or 350, wherein the miRNA is miR-182 or miR-183, and/or wherein the non-target cell is a dorsal root ganglion neuron.

[0532] 353. The template nucleic acid, system, kit, polypeptide, cell, method, or reaction mixture of any of embodiments 349-352, wherein the system comprises a first miRNA binding site that is recognized by a first miRNA (e.g., miR-142) and the system further comprises a second miRNA binding site that is recognized by a second miRNA (e.g., miR-182 or miR-183), wherein the first miRNA binding site and the second miRNA binding site are situated on the same RNA or on different RNAs of the system.

[0533] 354. The template nucleic acid, system, kit, polypeptide, cell, method, or reaction mixture of any of embodiments 349-353, wherein the template RNA comprises at least 2, 3, or 4 miRNA binding sites, e.g., wherein the miRNA binding sites are recognized by the same or different miRNAs.

[0534] 355. The template nucleic acid, system, kit, polypeptide, cell, method, or reaction mixture of any of embodiments 349-354, wherein the RNA encoding the polypeptide of (a) comprises at least 2, 3, or 4 miRNA binding sites, e.g., wherein the miRNA binding sites are recognized by the same or different miRNAs.

[0535] 356. The template nucleic acid, system, kit, polypeptide, cell, method, or reaction mixture of any of embodiments 349-355, wherein the RNA expressed from a heterologous object sequence integrated into a target DNA comprises at least 2, 3, or 4 miRNA binding sites, e.g., wherein the miRNA binding sites are recognized by the same or different miRNAs.

[0536] 357. The template nucleic acid, system, kit, polypeptide, cell, method, or reaction mixture of any of the preceding embodiments, wherein the system, polypeptide, and/or DNA encoding the same, is formulated as a lipid nanoparticle (LNP).

[0537] 358. The template nucleic acid, system, kit, polypeptide, cell, method, or reaction mixture of embodiment 357, wherein the lipid nanoparticle (or a formulation comprising a plurality of the lipid nanoparticles) lacks reactive impurities (e.g., aldehydes), or comprises less than a preselected level of reactive impurities (e.g., aldehydes).

[0538] 359. The template nucleic acid, system, kit, polypeptide, cell, method, or reaction mixture of embodiment 357, wherein the lipid nanoparticle (or a formulation comprising a plurality of the lipid nanoparticles) lacks aldehydes, or comprises less than a preselected level of aldehydes.

[0539] 360. The template nucleic acid, system, kit, polypeptide, cell, method, or reaction mixture of embodiment 357 or 359, wherein the lipid nanoparticle is comprised in a formulation comprising a plurality of the lipid nanoparticles.

[0540] 361. The template nucleic acid, system, kit, polypeptide, cell, method, or reaction mixture of embodiment 360, wherein the lipid nanoparticle formulation is produced using one or more lipid reagents comprising less than 5%, 4%, 3%, 2%, 1%, 0.9%, 0.8%, 0.7%, 0.6%, 0.5%, 0.4%, 0.3%, 0.2%, or 0.1% total reactive impurity (e.g., aldehyde) content.

[0541] 362. The template nucleic acid, system, kit, polypeptide, cell, method, or reaction mixture of embodiment 361, wherein the lipid nanoparticle formulation is produced using one or more lipid reagents comprising less than 3% total reactive impurity (e.g., aldehyde) content.

[0542] 363. The template nucleic acid, system, kit, polypeptide, cell, method, or reaction mixture of any of embodiments 360-362, wherein the lipid nanoparticle formulation is produced using one or more lipid reagents comprising less than 5%, 4%, 3%, 2%, 1%, 0.9%, 0.8%, 0.7%, 0.6%, 0.5%, 0.4%, 0.3%, 0.2%, or 0.1% of any single reactive impurity (e.g., aldehyde) species.

[0543] 364. The template nucleic acid, system, kit, polypeptide, cell, method, or reaction mixture of embodiment 363, wherein the lipid nanoparticle formulation is produced using one or more lipid reagent comprising less than 0.3% of any single reactive impurity (e.g., aldehyde) species.

[0544] 365. The template nucleic acid, system, kit, polypeptide, cell, method, or reaction mixture of embodiment 363, wherein the lipid nanoparticle formulation is produced using one or more lipid reagents comprising less than 0.1% of any single reactive impurity (e.g., aldehyde) species.

[0545] 366. The template nucleic acid, system, kit, polypeptide, cell, method, or reaction mixture of any of embodiments 360-M3658, wherein the lipid nanoparticle formulation comprises less than 5%, 4%, 3%, 2%, 1%, 0.9%, 0.8%, 0.7%, 0.6%, 0.5%, 0.4%, 0.3%, 0.2%, or 0.1% total reactive impurity (e.g., aldehyde) content.

[0546] 367. The template nucleic acid, system, kit, polypeptide, cell, method, or reaction mixture of embodiment 366, wherein the lipid nanoparticle formulation comprises less than 3% total reactive impurity (e.g., aldehyde) content.

[0547] 368. The template nucleic 367, system, kit, polypeptide, cell, method, or reaction mixture of any of embodiments 360-367, wherein the lipid nanoparticle formulation comprises less than 5%, 4%, 3%, 2%, 1%, 0.9%, 0.8%, 0.7%, 0.6%, 0.5%, 0.4%, 0.3%, 0.2%, or 0.1% of any single reactive impurity (e.g., aldehyde) species.

[0548] 369. The template nucleic acid, system, kit, polypeptide, cell, method, or reaction mixture of embodiment 368, wherein the lipid nanoparticle formulation comprises less than 0.3% of any single reactive impurity (e.g., aldehyde) species.

[0549] 370. The template nucleic acid, system, kit, polypeptide, cell, method, or reaction mixture of embodiment 368, wherein the lipid nanoparticle formulation comprises less than 0.1% of any single reactive impurity (e.g., aldehyde) species.

[0550] 371. The template nucleic acid, system, kit, polypeptide, cell, method, or reaction mixture of any of embodiments 357-370, wherein one or more, or optionally all, of the lipid reagents used for a lipid nanoparticle as described herein or a formulation thereof comprise less than 5%, 4%, 3%, 2%, 1%, 0.9%, 0.8%, 0.7%, 0.6%, 0.5%, 0.4%, 0.3%, 0.2%, or 0.1% total reactive impurity (e.g., aldehyde) content.

[0551] 372. The template nucleic acid, system, kit, polypeptide, cell, method, or reaction mixture of embodiment 371, wherein one or more, or optionally all, of the lipid reagents used for a lipid nanoparticle as described herein or a formulation thereof comprise less than 3% total reactive impurity (e.g., aldehyde) content.

[0552] 373. The template nucleic acid, system, kit, polypeptide, cell, method, or reaction mixture of any of embodiments 357-372, wherein one or more, or optionally all, of the lipid reagents used for a lipid nanoparticle as described herein or a formulation thereof comprise less than 5%, 4%, 3%, 2%, 1%, 0.9%, 0.8%, 0.7%, 0.6%, 0.5%, 0.4%, 0.3%, 0.2%, or 0.1% of any single reactive impurity (e.g., aldehyde) species.

[0553] 374. The template nucleic acid, system, kit, polypeptide, cell, method, or reaction mixture of embodiment 373, wherein one or more, or optionally all, of the lipid reagents used for a lipid nanoparticle as described herein or a formulation thereof comprise less than 0.3% of any single reactive impurity (e.g., aldehyde) species.

[0554] 375. The template nucleic acid, system, kit, polypeptide, cell, method, or reaction mixture of embodiment 373, wherein one or more, or optionally all, of the lipid reagents used for a lipid nanoparticle as described herein or a formulation thereof comprise less than 0.1% of any single reactive impurity (e.g., aldehyde) species.

[0555] 376. The template nucleic acid, system, kit, polypeptide, cell, method, or reaction mixture of any of embodiments 357-375, wherein the total aldehyde content and/or quantity of any single reactive impurity (e.g., aldehyde) species is determined by liquid chromatography (LC), e.g., coupled with tandem mass spectrometry (MS/MS), e.g., as described herein.

[0556] 377. The template nucleic acid, system, kit, polypeptide, cell, method, or reaction mixture of any of embodiments 357-375, wherein the total aldehyde content and/or quantity of reactive impurity (e.g., aldehyde) species is determined by detecting one or more chemical modifications of a nucleic acid molecule (e.g., as described herein) associated with the presence of reactive impurities (e.g., aldehydes), e.g., in the lipid reagents.

[0557] 378. The template nucleic acid, system, kit, polypeptide, cell, method, or reaction mixture of any of embodiments 357-375, wherein the total aldehyde content and/or quantity of aldehyde species is determined by detecting one or more chemical modifications of a nucleotide or nucleoside (e.g., a ribonucleotide or ribonucleoside, e.g., comprised in or isolated from a nucleic acid molecule, e.g., as described herein) associated with the presence of reactive impurities (e.g., aldehydes), e.g., in the lipid reagents, e.g., as described herein.

[0558] 379. The template nucleic acid, system, kit, polypeptide, cell, method, or reaction mixture of embodiment 378, wherein the chemical modifications of a nucleic acid molecule, nucleotide, or nucleoside are detected by determining the presence of one or more modified nucleotides or nucleosides, e.g., using LC-MS/MS analysis, e.g., as described herein.

[0559] 380. A lipid nanoparticle (LNP) comprising the system, polypeptide (or RNA encoding the same), nucleic acid molecule, or DNA encoding the system or polypeptide, of any preceding embodiment.

[0560] 381. A system comprising a first lipid nanoparticle comprising the polypeptide (or DNA or RNA encoding the same) of a Gene Writing system (e.g., as described herein); and a second lipid nanoparticle comprising a nucleic acid molecule of a Gene Writing System (e.g., as described herein).

[0561] 382. The template nucleic acid, system, kit, polypeptide, cell, method, or reaction mixture of any preceding embodiment, wherein the system, nucleic acid molecule, polypeptide, and/or DNA encoding the same, is formulated as a lipid nanoparticle (LNP).

[0562] 383. The LNP of embodiment 381 or 382, comprising a cationic lipid.

[0563] 384. The LNP of any of embodiments 381-383, wherein the cationic lipid has a structure according to:

[chemical structure]

[0564] 385. The LNP of any of embodiments 381-384, further comprising one or more neutral lipid, e.g., DSPC, DPPC, DMPC, DOPC, POPC, DOPE, SM, a steroid, e.g., cholesterol, and/or one or more polymer conjugated lipid, e.g., a pegylated lipid, e.g., PEG-DAG, PEG-PE, PEG-S-DAG, PEG-cer or a PEG dialkyoxypropylcarbamate.

[0565] 386. The template nucleic acid, system, kit, polypeptide, cell, method, or reaction mixture of any of the preceding embodiments, wherein the system comprises one or more circular RNA molecules (circRNAs).

[0566] 387. The template nucleic acid, system, kit, polypeptide, cell, method, or reaction mixture of embodiment 386, wherein the circRNA encodes the Gene Writer polypeptide.

[0567] 388. The template nucleic acid, system, kit, polypeptide, cell, method, or reaction mixture of any of embodiments 386-387, wherein circRNA is delivered to a host cell.

[0568] 389. The template nucleic acid, system, kit, polypeptide, cell, method, or reaction mixture of any of the preceding embodiments, wherein the circRNA is capable of being linearized, e.g., in a host cell, e.g., in the nucleus of the host cell.

[0569] 390. The template nucleic acid, system, kit, polypeptide, cell, method, or reaction mixture of any of the preceding embodiments, wherein the circRNA comprises a cleavage site.

[0570] 391. The template nucleic acid, system, kit, polypeptide, cell, method, or reaction mixture of any embodiment 390, wherein the circRNA further comprises a second cleavage site.

[0571] 392. The template nucleic acid, system, kit, polypeptide, cell, method, or reaction mixture of embodiment R4A or R4A1, wherein the cleavage site can be cleaved by a ribozyme, e.g., a ribozyme comprised in the circRNA (e.g., by autocleavage).

[0572] 393. The template nucleic acid, system, kit, polypeptide, cell, method, or reaction mixture of any of the preceding embodiments, wherein the circRNA comprises a ribozyme sequence.

[0573] 394. The template nucleic acid, system, kit, polypeptide, cell, method, or reaction mixture of embodiment 393, wherein the ribozyme sequence is capable of autocleavage, e.g., in a host cell, e.g., in the nucleus of the host cell.

[0574] 395. The template nucleic acid, system, kit, polypeptide, cell, method, or reaction mixture of any of embodiments 393-394, wherein the ribozyme is an inducible ribozyme.

[0575] 396. The template nucleic acid, system, kit, polypeptide, cell, method, or reaction mixture of any of embodiments 393-395 wherein the ribozyme is a protein-responsive ribozyme, e.g., a ribozyme responsive to a nuclear protein, e.g., a genome-interacting protein, e.g., an epigenetic modifier, e.g., EZH2.

[0576] 397. The template nucleic acid, system, kit, polypeptide, cell, method, or reaction mixture of any of embodiments 393-396, wherein the ribozyme is a nucleic acid-responsive ribozyme.

[0577] 398. The template nucleic acid, system, kit, polypeptide, cell, method, or reaction mixture of embodiment 397, wherein the catalytic activity (e.g., autocatalytic activity) of the ribozyme is activated in the presence of a target nucleic acid molecule (e.g., an RNA molecule, e.g., an mRNA, miRNA, ncRNA, lncRNA, tRNA, snRNA, or mtRNA).

[0578] 399. The template nucleic acid, system, kit, polypeptide, cell, method, or reaction mixture of any of embodiments 393-296, wherein the ribozyme is responsive to a target protein (e.g., an MS2 coat protein).

[0579] 400. The template nucleic acid, system, kit, polypeptide, cell, method, or reaction mixture of embodiment 298, wherein the target protein localized to the cytoplasm or localized to the nucleus (e.g., an epigenetic modifier or a transcription factor).

[0580] 401. The template nucleic acid, system, kit, polypeptide, cell, method, or reaction mixture of any of embodiments 393-397, wherein the ribozyme comprises the ribozyme sequence of a B2 or ALU retrotransposon, or a nucleic acid sequence having at least 85%, 90%, 95%, 96%, 97%, 98%, or 99% sequence identity thereto.

[0581] 402. The template nucleic acid, system, kit, polypeptide, cell, method, or reaction mixture of any of embodiments 393-397, wherein the ribozyme comprises the sequence of a tobacco ringspot virus hammerhead ribozyme, or a nucleic acid sequence having at least 85%, 90%, 95%, 96%, 97%, 98%, or 99% sequence identity thereto.

[0582] 403. The template nucleic acid, system, kit, polypeptide, cell, method, or reaction mixture of any of embodiments 393-397, wherein the ribozyme comprises the sequence of a hepatitis delta virus (HDV) ribozyme, or a nucleic acid sequence having at least 85%, 90%, 95%, 96%, 97%, 98%, or 99% sequence identity thereto.

[0583] 404. The template nucleic acid, system, kit, polypeptide, cell, method, or reaction mixture of any of embodiments 393-403, wherein the ribozyme is activated by a moiety expressed in a target cell or target tissue.

[0584] 405. The template nucleic acid, system, kit, polypeptide, cell, method, or reaction mixture of any of embodiments 393-404, wherein the ribozyme is activated by a moiety expressed in a target subcellular compartment (e.g., a nucleus, nucleolus, cytoplasm, or mitochondria).

[0585] 406. The template nucleic acid, system, kit, polypeptide, cell, method, or reaction mixture of any of the preceding embodiments, wherein the ribozyme is comprised in a circular RNA or a linear RNA.

[0586] 407. The template nucleic acid, system, kit, polypeptide, cell, method, or reaction mixture of any of the preceding embodiments, wherein the template RNA, e.g., the 5′ UTR, comprises a ribozyme which cleaves the template RNA (e.g., in the 5′ UTR).

[0587] 408. The template nucleic acid, system, kit, polypeptide, cell, method, or reaction mixture of any of the preceding embodiments, wherein the template RNA comprises a ribozyme that is heterologous to (a)(i), (a)(ii), (b)(i), or a combination thereof.
[0588] 409. The template nucleic acid, system, kit, polypeptide, cell, method, or reaction mixture of any of the preceding embodiments, wherein the heterologous ribozyme is capable of cleaving RNA comprising the ribozyme, e.g., 5′ of the ribozyme, 3′ of the ribozyme, or within the ribozyme.

[0589] The disclosure contemplates all combinations of any one or more of the foregoing aspects and/or embodiments, as well as combinations with any one or more of the embodiments set forth in the detailed description and examples.

### Definitions

[0590] About, approximately: “About” or “approximately” as the terms are used herein applied to one or more values of interest, refer to a value that is similar to a stated reference value. In certain embodiments, the term “approximately” or “about” refers to a range of values that fall within 15%, 14%, 13%, 12%, 11%, 10%, 9%, 8%, 7%, 6%, 5%, 4%, 3%, 2%, 1%, or less in either direction (greater than or less than) of the stated reference value unless otherwise stated or otherwise evident from the context (except where such number would exceed 100% of a possible value).

[0591] Domain: The term “domain” as used herein refers to a structure of a biomolecule that contributes to a specified function of the biomolecule. A domain may comprise a contiguous region (e.g., a contiguous sequence) or distinct, non-contiguous regions (e.g., non-contiguous sequences) of a biomolecule. Examples of protein domains include, but are not limited to, a nuclear localization sequence, a recombinase domain, a DNA recognition domain (e.g., that binds to or is capable of binding to a recognition site, e.g. as described herein), a recombinase N-terminal domain (also called the catalytic domain), a C-terminal zinc ribbon domain, and domains listed in Table 1. In some embodiments the zinc ribbon domain further comprises a coiled-coiled motif. In some embodiments the recombinase domain and the zinc ribbon domain are collectively referred to as the C-terminal domain. In some embodiments the N-terminal domain is linked to the C-terminal domain by an αE linker or helix. In some embodiments the N-terminal domain is between 50 and 250 amino acids, or 100-200 amino acids, or 130-170 amino acids, e.g., about 150 amino acids. In some embodiments the C-terminal domain is 200-800 amino acids, or 300-500 amino acids. In some embodiments the recombinase domain is between 50 and 150 amino acids. In some embodiments the zinc ribbon domain is between 30 and 100 amino acids; an example of a domain of a nucleic acid is a regulatory domain, such as a transcription factor binding domain, a recognition sequence, an arm of a recognition sequence (e.g. a 5′ or 3′ arm), a core sequence, or an object sequence (e.g., a heterologous object sequence). In some embodiments, a recombinase polypeptide comprises one or more domains (e.g., a recombinase domain, or a DNA recognition domain) of a polypeptide of any of SEQ ID NOs: 1-12,677 (e.g., SEQ ID NOs: 1-11,432), or a fragment or variant thereof. In some embodiments, a domain has a single enzymatic activity. In some embodiments, a domain has two or more enzymatic activities.

[0592] Exogenous: As used herein, the term exogenous, when used with reference to a biomolecule (such as a nucleic acid sequence or polypeptide) means that the biomolecule was introduced into a host genome, cell or organism by the hand of man. For example, a nucleic acid that is as added into an existing genome, cell, tissue or subject using recombinant DNA techniques or other methods is exogenous to the existing nucleic acid sequence, cell, tissue or subject.

[0593] Genomic safe harbor site (GSH site): A genomic safe harbor site is a site in a host genome that is able to accommodate the integration of new genetic material, e.g., such that the inserted genetic element does not cause significant alterations of the host genome posing a risk to the host cell or organism. A GSH site generally meets 1, 2, 3, 4, 5, 6, 7, 8 or 9 of the following criteria: (i) is located >300 kb from a cancer-related gene; (ii) is >300 kb from a miRNA/other functional small RNA; (iii) is >50 kb from a 5′ gene end; (iv) is >50 kb from a replication origin; (v) is >50 kb away from any ultraconserved element; (vi) has low transcriptional activity (i.e. no mRNA+/−25 kb); (vii) is not in a copy number variable region; (viii) is in open chromatin; and/or (ix) is unique, with 1 copy in the human genome. Examples of GSH sites in the human genome that meet some or all of these criteria include (i) the adeno-associated virus site 1 (AAVS1), a naturally occurring site of integration of AAV virus on chromosome 19; (ii) the chemokine (C-C motif) receptor 5 (CCR5) gene, a chemokine receptor gene known as an HIV-1 coreceptor; (iii) the human ortholog of the mouse Rosa26 locus; (iv) the rDNA locus. Additional GSH sites are known and described, e.g., in Pellenz et al. epub Aug. 20, 2018 (https://doi.org/10.1101/396390).

[0594] Heterologous: The term heterologous, when used to describe a first element in reference to a second element means that the first element and second element do not exist in nature disposed as described. For example, a heterologous polypeptide, nucleic acid molecule, construct or sequence refers to (a) a polypeptide, nucleic acid molecule or portion of a polypeptide or nucleic acid molecule sequence that is not native to a cell in which it is expressed, (b) a polypeptide or nucleic acid molecule or portion of a polypeptide or nucleic acid molecule that has been altered or mutated relative to its native state, or (c) a polypeptide or nucleic acid molecule with an altered expression as compared to the native expression levels under similar conditions. For example, a heterologous regulatory sequence (e.g., promoter, enhancer) may be used to regulate expression of a gene or a nucleic acid molecule in a way that is different than the gene or a nucleic acid molecule is normally expressed in nature. In certain embodiments, a heterologous nucleic acid molecule may exist in a native host cell genome, but may have an altered expression level or have a different sequence or both. In other embodiments, heterologous nucleic acid molecules may not be endogenous to a host cell or host genome but instead may have been introduced into a host cell by transformation (e.g., transfection, electroporation), wherein the added molecule may integrate into the host genome or can exist as extra-chromosomal genetic material either transiently (e.g., mRNA) or semi-stably for more than one generation (e.g., episomal viral vector, plasmid or other self-replicating vector).

[0595] Insulator: The term “insulator,” as used herein, refers to a cis-acting DNA sequence that functions as one or both of an enhancer-blocker or a heterochromatin barrier, or to a corresponding RNA sequence that, when reverse transcribed, produces the cis-acting DNA sequence. In some embodiments, an insulator is specifically bound by an insulator protein, which can bring the insulator into physical proximity with another insulator bound by an insulator protein (e.g., the same insulator protein). Generally, when a pair of insulators present on the same nucleic acid molecule are brought into proximity by insulator proteins, the insulators alter the activity and/or structure of the nucleic acid sequence between the two insulators. In some instances, the insulators reduce or block the formation of heterochromatin in the nucleic acid sequence between the insulators. In some instances, the insulators (e.g., by reducing or blocking heterochromatin formation) maintain or increase transcriptional activity of a heterologous object sequence positioned between the insulators. In some instances, the insulators reduce or block the pro-transcriptional activity of an enhancer positioned between the insulators. In some instances, the term “insulator” can refer to a DNA sequence that can function as an insulator (e.g., when paired with another insulator) or an RNA sequence that, when reverse transcribed, can form a DNA sequence that can function as an insulator. As used herein, the term “insulator protein” refers to a protein that specifically binds to an insulator sequence, e.g., a protein selected from CTCF (CCCTC-binding factor), CTF (CAAT-binding transcription factor 1), USF1 (Upstream Stimulatory Factor 1), USF2 (Upstream Stimulatory Factor 2), PARP-1 (Poly(ADP-ribose) Polymerase-1), and VEZF1 (Vascular Endothelial Zinc Finger 1), or a polypeptide having at least 75%, 80%, 85%, 90%, 95%, 96%, 97%, 98%, or 99% sequence identity thereto.

[0596] Mutation or Mutated: The term “mutated” when applied to nucleic acid sequences means that nucleotides in a nucleic acid sequence may be inserted, deleted or changed compared to a reference (e.g., native) nucleic acid sequence. A single alteration may be made at a locus (a point mutation) or multiple nucleotides may be inserted, deleted or changed at a single locus. In addition, one or more alterations may be made at any number of loci within a nucleic acid sequence. A nucleic acid sequence may be mutated by any suitable method.

[0597] Nucleic acid molecule: Nucleic acid molecule refers to both RNA and DNA molecules including, without limitation, cDNA, genomic DNA and mRNA, and also includes synthetic nucleic acid molecules, such as those that are chemically synthesized or recombinantly produced, such as DNA templates, as described herein. The nucleic acid molecule can be double-stranded or single-stranded, circular or linear. If single-stranded, the nucleic acid molecule can be the sense strand or the antisense strand. Unless otherwise indicated, and as an example for all sequences described herein under the general format “SEQ ID NO:,” “nucleic acid comprising SEQ ID NO:1” refers to a nucleic acid, at least a portion which has either (i) the sequence of SEQ ID NO:1, or (ii) a sequence complimentary to SEQ ID NO:1. The choice between the two is dictated by the context in which SEQ ID NO:1 is used. For instance, if the nucleic acid is used as a probe, the choice between the two is dictated by the requirement that the probe be complimentary to the desired target. Nucleic acid sequences of the present disclosure may be modified chemically or biochemically or may contain non-natural or derivatized nucleotide bases, as will be readily appreciated by those of skill in the art. Such modifications include, for example, labels, methylation, substitution of one or more naturally occurring nucleotides with an analog, inter-nucleotide modifications such as uncharged linkages (for example, methyl phosphonates, phosphotriesters, phosphoramidates, carbamates, etc.), charged linkages (for example, phosphorothioates, phosphorodithioates, etc.), pendant moieties, (for example, polypeptides), intercalators (for example, acridine, psoralen, etc.), chelators, alkylators, and modified linkages (for example, alpha anomeric nucleic acids, etc.). Also included are synthetic molecules that mimic polynucleotides in their ability to bind to a designated sequence via hydrogen bonding and other chemical interactions. Such molecules are known in the art and include, for example, those in which peptide linkages substitute for phosphate linkages in the backbone of a molecule. Other modifications can include, for example, analogs in which the ribose ring contains a bridging moiety or other structure such as modifications found in “locked” nucleic acids.

[0598] Gene expression unit: a gene expression unit is a nucleic acid sequence comprising at least one regulatory nucleic acid sequence operably linked to at least one effector sequence. A first nucleic acid sequence is operably linked with a second nucleic acid sequence when the first nucleic acid sequence is placed in a functional relationship with the second nucleic acid sequence. For instance, a promoter or enhancer is operably linked to a coding sequence if the promoter or enhancer affects the transcription or expression of the coding sequence. Operably linked DNA sequences may be contiguous or non-contiguous. Where necessary to join two protein-coding regions, operably linked sequences may be in the same reading frame.

[0599] Host: The terms host genome or host cell, as used herein, refer to a cell and/or its genome into which protein and/or genetic material has been introduced. It should be understood that such terms are intended to refer not only to the particular subject cell and/or genome, but to the progeny of such a cell and/or the genome of the progeny of such a cell. Because certain modifications may occur in succeeding generations due to either mutation or environmental influences, such progeny may not, in fact, be identical to the parent cell, but are still included within the scope of the term “host cell” as used herein. A host genome or host cell may be an isolated cell or cell line grown in culture, or genomic material isolated from such a cell or cell line, or may be a host cell or host genome which composing living tissue or an organism. In some instances, a host cell may be an animal cell or a plant cell, e.g., as described herein. In certain instances, a host cell may be a bovine cell, horse cell, pig cell, goat cell, sheep cell, chicken cell, or turkey cell. In certain instances, a host cell may be a corn cell, soy cell, wheat cell, or rice cell.

[0600] Recombinase polypeptide: As used herein, a recombinase polypeptide refers to a polypeptide having the functional capacity to catalyze a recombination reaction of a nucleic acid molecule (e.g., a DNA molecule). A recombination reaction may include, for example, one or more nucleic acid strand breaks (e.g., a double-strand break), followed by joining of two nucleic acid strand ends (e.g., sticky ends). In some instances, the recombination reaction comprises insertion of an insert nucleic acid, e.g., into a target site, e.g., in a genome or a construct. In some instances, the recombination reaction comprises flipping or reversing of a nucleic acid, e.g., in a genome or a construct. In some instances, the recombination reaction comprises removing a nucleic acid, e.g., from a genome or a construct. In some instances, a recombinase polypeptide comprises one or more structural elements of a naturally occurring recombinase (e.g., a serine recombinase, e.g., PhiC31 recombinase or Gin recombinase). In certain instances, a recombinase polypeptide comprises an amino acid sequence having at least 70%, 75%, 80%, 85%, 90%, 95%, 96%, 97%, 98%, 99%, or 100% sequence identity to a recombinase described herein (e.g., any of SEQ ID NOs: 1-12,677 (e.g., SEQ ID NOs: 1-11,432)). In some embodiments, a recombinase polypeptide comprises a serine recombinase, e.g., a serine integrase. In some embodiments, a serine recombinase, e.g., a serine integrase, comprises one or more (e.g., all) of a recombinase domain, a catalytic domain, or a zinc ribbon domain. In some embodiments, a serine recombinase, e.g., a serine integrase, comprises a domain listed in Table 1 (e.g., either in addition to or in replacement of one or more of a recombinase domain, a catalytic domain, or a zinc ribbon domain). In some instances, a recombinase polypeptide has one or more functional features of a naturally occurring recombinase (e.g., a serine recombinase, e.g., PhiC31 recombinase or Gin recombinase). In some embodiments, a recombinase polypeptide is 350-900 amino acids, or 425-700 amino acids. In some instances, a recombinase polypeptide recognizes (e.g., binds to) a recognition sequence in a nucleic acid molecule (e.g., a recognition sequence of any of SEQ ID NOs: 13,001-25,677 (e.g., SEQ ID NOs: 13,001-24,432) or SEQ ID NOs: 26,001-38,677 (e.g., SEQ ID NOs: 26,001-37,432), or a sequence having at least 70%, 75%, 80%, 85%, 90%, 95%, 96%, 97%, 98%, or 99% identity thereto). In some embodiments, the recombinase may facilitate recombination between a first recognition sequence (e.g. attB or pseudo-attB) and a second genomic recognition sequence (e.g. attP or pseudo attP). In some embodiments, one or more recognition sequences comprise an attP half site (e.g., attPL or attPR) sequence or an attB half site (e.g., attBL or attBR) sequence as listed in Table 26. In some embodiments, a recombinase polypeptide is not active as an isolated monomer. In some embodiments, a recombinase polypeptide catalyzes a recombination reaction in concert with one or more other recombinase polypeptides (e.g., two or four recombinase polypeptides per recombination reaction). In some embodiments, a recombinase polypeptide is active as a dimer. In some embodiments, a recombinase assembles as a dimer at the recognition sequence. In some embodiments, a recombinase polypeptide is active as a tetramer. In some embodiments, a recombinase assembles as a tetramer at the recognition sequence. In some embodiments, a recombinase polypeptide is a recombinant (e.g., a non-naturally occurring) recombinase polypeptide. In some embodiments, a recombinant recombinase polypeptide comprises amino acid sequences derived from a plurality of recombinase polypeptides (e.g., a recombinant recombinase polypeptide comprises a first domain from a first recombinase polypeptide and a second domain from a second recombinase polypeptide).

[0601] DNA recognition sequence: A DNA recognition sequence generally refers to a DNA sequence that is recognized (e.g., capable of being bound by) a recombinase polypeptide, e.g., as described herein. The term “DNA recognition sequence” also encompasses an RNA sequence that can be reverse transcribed to yield the DNA sequence that is recognized (e.g., capable of being bound by) by the recombinase polypeptide. The recognition sequences are, in some instances, generically referred to as attB and attP. Recognition sequences can be native or altered relative to a native sequence. In some instances, a recombinase polypeptide recognizes a DNA recognition sequence (e.g., in a template DNA, e.g., as described herein) and a cognate recognition sequence (e.g., a cognate DNA recognition sequence, e.g., in a target nucleic acid, e.g., a genomic DNA, e.g., a chromosome of mitochondrial DNA), and optionally induces recombination specifically between the DNA recognition sequence and the cognate recognition sequence. In some instances, the cognate recognition sequence occurs naturally in the genomic DNA (i.e., the cognate recognition sequence is present in the genomic DNA without previous manipulation by, e.g., genetic engineering techniques). The DNA recognition sequence may vary in length, but typically ranges from about 20 to about 200 nt, from about 30 to 90 nt, more usually from 30 to 70 nucleotides. DNA recognition sequences are typically arranged as follows: AttB comprises a first DNA sequence attB5′, a core region, and a second DNA sequence attB3′, in the relative order from 5′ to 3′ attB5′-core region-attB3′. AttP comprises a first DNA sequence attP5′, a core region, and a second DNA sequence attP3′, in the relative order from 5′ to 3′ attP5′-core region-attP3′. In some embodiments, the attB5′ and attB3′ are parapalindromic (e.g., one sequence is a palindrome relative to the other sequence or has at least 20%, 30%, 40%, 50%, 60%, 70%, 75%, 80%, 85%, 90%, 95%, 96%, 97%, 98%, or 99% sequence identity to a palindrome relative to the other sequence). In some embodiments, the attP5′ and attP3′ recognition sequences are parapalindromic (e.g., one sequence is a palindrome relative to the other sequence or has at least 20%, 30%, 40%, 50%, 60%, 70%, 75%, 80%, 85%, 90%, 95%, 96%, 97%, 98%, or 99% sequence identity to a palindrome relative to the other sequence). In some embodiments the attB5′ and attB3′ recognition sequences are parapalindromic to each other and the attP5′ and attP3′ recognition sequences are parapalindromic to each other. In some embodiments, the attB5′ and attB3′, and the attP5′ and attP3′ sequences are similar but not necessarily the same number of nucleotides. Because attB and attP are different sequences, recombination will result in a stretch of nucleic acids (called attL or attR for left and right) that is neither an attB sequence or an attP sequence. Without wishing to be bound by theory, the dissimilarities between attL/attR and attB/attP probably make attL and attR sites less unrecognizable as a recombination site to the relevant recombinase enzyme, thus reducing the possibility that the enzyme will catalyze a second recombination reaction that would reverse the first. DNA recognition sequences are typically bound by a recombinase dimer. In some embodiments, one or more of the αE helix, the recombinase domain, the linker domain, and/or the zinc ribbon domain of the recombinase polypeptide contact the recognition sequence. In some instances, a recognition sequence comprises a nucleic acid sequence occurring within a sequence of any of SEQ ID NOs: 13,001-25,677 (e.g., SEQ ID NOs: 13,001-24,432) or SEQ ID NOs: 26,001-38,677 (e.g., SEQ ID NOs: 26,001-37,432), e.g., a 20-200 nt sequence within a sequence of any of SEQ ID NOs: 13,001-25,677 (e.g., SEQ ID NOs: 13,001-24,432) or SEQ ID NOs: 26,001-38,677 (e.g., SEQ ID NOs: 26,001-37,432), e.g., a 30-70 nt sequence within a sequence of any of SEQ ID NOs: 13,001-25,677 (e.g., SEQ ID NOs: 13,001-24,432) or SEQ ID NOs: 26,001-38,677 (e.g., SEQ ID NOs: 26,001-37,432), or a sequence having at least 50%, 60%, 70%, 75%, 80%, 85%, 90%, 95%, 96%, 97%, 98%, or 99% identity thereto. In some instances, a recognition sequence comprises a nucleic acid sequence occurring within an attP (e.g., attPL or attPR) sequence listed in Table 26. In some instances, a recognition sequence comprises a nucleic acid sequence occurring within an attB (e.g., attBL or attBR) sequence listed in Table 26. In some embodiments, one or more recognition sequences comprise two attP half site (e.g., an attPL and an attPR) sequences or two attB half site (e.g., an attBL and an attBR) sequences as listed in Table 26. In some embodiments, a DNA recognition sequence is also referred to as an attachment site. In some instances, recombination of a DNA recognition sequence with a cognate DNA recognition sequence (e.g., by a recombinase polypeptide) results in formation of a sequence in the resultant DNA molecule (i.e., the DNA molecule formed by integration of the template DNA, or a portion thereof, into the target DNA molecule) that is different from the prior DNA recognition sequence or cognate DNA recognition sequence. The sequence in the resultant DNA molecule formed by this recombination is generally referred to herein as a “recombinase transfer sequence.” In some instances, a recombinase transfer sequence comprises an attL site. In some instances, a recombinase transfer sequence comprises an attR site.

[0602] Recombinase transfer sequence: “Recombinase transfer sequence” as used herein refers to a sequence constructed from portions of two DNA recognition sequences. In some embodiments, the sequence 5′ of the core sequence, e.g., the attB5′ or attP5′, of the recombinase transfer sequence matches a cognate recognition sequence (e.g., in the human genome) and the sequence 3′ of the core sequence, e.g., the attB3′ or attP3′, of the recombinase transfer sequence matches a DNA recognition sequence (e.g., in the template DNA). In some embodiments, the sequence 5′ of the core sequence, e.g., the attB5′ or attP5′, of the recombinase transfer sequence matches a DNA recognition sequence and the sequence 3′ of the core sequence, e.g., the attB3′ or attP3′, of the recombinase transfer sequence matches the cognate recognition sequence. In some embodiments, the sequence 5′ of the core sequence, e.g., the attB5′ or attP5′, of the recombinase transfer sequence matches a cognate recognition sequence and the sequence 3′ of the core sequence, e.g., the attB3′ or attP3′, of the recombinase transfer sequence matches a DNA recognition sequence. In some embodiments, the recombinase transfer sequence may be comprised of the region 5′ of the core sequence from a wild-type attB site and the region 3′ of the core sequence from a DNA attP recognition sequence, or vice versa. Other combinations of such recombinase transfer sequence will be evident to those having ordinary skill in the art, in view of the teachings of the present specification. In some embodiments, a recombinase described herein catalyzes recombination between a DNA recognition sequence and a cognate recognition sequence to yield a recombinase transfer sequence. In some embodiments, a recombinase described herein acts preferentially on a DNA recognition sequence relative to a recombinase transfer sequence.

[0603] Core sequence: A core sequence, as used herein, refers to a nucleic acid sequence positioned between two arms of a recognition sequences, e.g., between a pair of parapalindromic sequences. In some embodiments, a core sequence is positioned between a attB5′ and an attB3′, or between an attP5′ and an attP3′. In some instances, a core sequence can be cleaved by a recombinase polypeptide (e.g., a recombinase polypeptide that recognizes a recognition sequence comprising the two parapalindromic sequences), e.g., to form sticky ends, e.g. a 3′ overhang. In some embodiments, the core sequence of the attB and attP are identical. In some embodiments, the core sequence of the attB and attP are not identical, e.g., have less than 99, 95, 90, 80, 70, 60, 50, 40, 30, or 20% identity. In some embodiments, the core sequence is about 2-20 nucleotides, e.g., 2-16 nucleotides, e.g., about 4 nucleotides in length or about 2 nucleotides in length (e.g., exactly 2 nucleotides in length). In some embodiments, a core sequence comprises a core dinucleotide corresponding to two adjacent nucleotides wherein a recombinase recognizing the nearby parapalindromic sequences may cut the DNA on one side of the core dinucleotide, e.g., forming sticky ends. In some embodiments, the core dinucleotide of the core sequence of an attB and/or attP site are identical, e.g., cleavage of the attP and/or attB sites form compatible sticky ends. In some embodiments, a core sequence comprises a nucleic acid sequence occurring within a nucleotide sequence of any of SEQ ID NOs: 13,001-25,677 (e.g., SEQ ID NOs: 13,001-24,432) or SEQ ID NOs: 26,001-38,677 (e.g., SEQ ID NOs: 26,001-37,432). In some embodiments, a core sequence comprises a nucleic acid sequence not originating within a nucleotide sequence of any of SEQ ID NOs: 13,001-25,677 (e.g., SEQ ID NOs: 13,001-24,432) or SEQ ID NOs: 26,001-38,677 (e.g., SEQ ID NOs: 26,001-37,432). In some embodiments, one or more recognition sequences comprise two attP half site (e.g., an attPL and an attPR) sequences as listed in Table 26, further comprising a core sequence according to any of the embodiments herein. In some embodiments, one or more recognition sequences comprise two attB half site (e.g., an attBL and an attBR) sequences as listed in Table 26, further comprising a core sequence according to any of the embodiments herein.

[0604] Object sequence: As used herein, the term object sequence refers to a nucleic acid segment that can be desirably inserted into a target nucleic acid molecule, e.g., by a recombinase polypeptide, e.g., as described herein. In some embodiments, a template RNA or template DNA comprises a DNA recognition sequence and an object sequence that is heterologous to the DNA recognition sequence and/or the remainder of the template RNA or template DNA, generally referred to herein as a “heterologous object sequence.” An object sequence may, in some instances, be heterologous relative to the nucleic acid molecule into which it is inserted (e.g., a target DNA molecule, e.g., as described herein). In some instances, an object sequence comprises a nucleic acid sequence encoding a gene (e.g., a eukaryotic gene, e.g., a mammalian gene, e.g., a human gene) or other cargo of interest (e.g., a sequence encoding a functional RNA, e.g., an siRNA or miRNA), e.g., as described herein. In certain instances, the gene encodes a polypeptide (e.g., a blood factor or enzyme). In some instances, an object sequence comprises one or more of a nucleic acid sequence encoding a selectable marker (e.g., an auxotrophic marker or an antibiotic marker), and/or a nucleic acid control element (e.g., a promoter, enhancer, silencer, or insulator).

[0605] Parapalindromic: As used herein, the term “parapalindromic” refers to a property of a pair of nucleic acid sequences, wherein one of the nucleic acid sequences is either a palindrome relative to the other nucleic acid sequence, or has at least 20% (e.g., at least 20%, 30%, 35%, 40%, 45%, 50%, 55%, 60%, 65%, 70%, 75%, 80%, 85%, 90%, 95%, 96%, 97%, 98%, 99%, or 100%), e.g., at least 50%, sequence identity to a palindrome relative to the other nucleic acid sequence, or has no more than 1, 2, 3, 4, 5, 6, 7, 8, 9, 10, 11, 12, 13, 14, 15, 16, 17, 18, 19, or 20 sequence mismatches relative to the other nucleic acid sequence. “Parapalindromic sequences,” as used herein, refer to at least one of a pair of nucleic acid sequences that are parapalindromic relative to each other. A “parapalindromic region,” as used herein, refers to a nucleic acid sequence, or the portions thereof, that comprise two parapalindromic sequences. In some instances, a parapalindromic region comprises two parapalindromic sequences flanking a nucleic acid segment, e.g., comprising a core sequence.

### BRIEF DESCRIPTION OF THE DRAWINGS

[0606] FIG. 1A: Activity of 10 exemplary serine integrases in human cells. HEK293T cells were transfected with an integrase expression plasmid and a template plasmid harboring a 520 bp attP containing region followed by an EGFP reporter driven by CMV promoter. Shown are the percentage of EGFP-positive cells observed by flow cytometry at 21 days post-transfection.

[0607] FIG. 1B: Strategies to assess integration, stability, and expression of different AAV donor formats. A single attB* or attP* donor utilizes formation of double-stranded circularized DNA following AAV transduction into the cell nucleus. This configuration also includes ITR sequences post-integration. A dual attB-attB* or attP-attP* donor does not require formation of double-stranded circularized DNA following AAV transduction. The readout for integration stability and expression uses droplet digital PCR (ddPCR) and flow cytometry (FLOW).

[0608] FIG. 2: AAV constructs illustration. First line shows: ITR, stuffer (500), attP*, P_{EF1a}, EGFP, WPRE, hGHpA, ITR; AAV2 serotype. Second line shows: ITR, stuffer (500), attP, P_{EF1a}, EGFP, WPRE, hGHpA, attP*, stuffer (500), ITR; AAV2 serotype. Third line shows: ITR, stuffer (500), attB*, P_{EF1a}, EGFP, WPRE, hGHpA, ITR; AAV2 serotype. Fourth line shows: ITR, stuffer (500), attB, P_{EF1a}, EGFP, WPRE, hGHpA, attB*, stuffer (500), ITR; AAV2 serotype. Fifth line shows: ITR, P_{EF1a}, hcoBXB1, WPRE, hGHpA, ITR; AAV2 serotype. Sixth line shows: ITR, P_{EF1a}, mcoBXB1, WPRE, hGHpA, ITR; AAV6 serotype.

[0609] FIGS. 3A and 3B: Dual AAV delivery of serine integrase and template DNA to mammalian cells. (A) Schematic representation of experiment. BXB1 serine recombinase and template DNA are co-delivered as separate AAV viral vectors into BXB landing pad cell lines. (B) Droplet digital PCR (ddPCR) assay to assess integration (% CNV/landing pad) of BXB1 serine recombinase and transgene into attP-attP* landing pad cell line 3 days and 7 days post-transduction. Black dots (to the right of each pair of gray dots) indicate template only samples and fall at 0% on the y-axis. Gray dots (to the left of each pair of black dots) indicate template+BXB1 integrase and fall between 1-6% on the y-axis.

[0610] FIGS. 4A and 4B: mRNA delivery of BXB1 integrase and AAV delivery of template DNA to mammalian cells. (A) Schematic representation of experiment. mRNA delivery of BXB1 serine recombinase and AAV delivery of template DNA into BXB1 landing pad cell lines. (B) Droplet digital PCR (ddPCR) assay to assess integration (% CNV/landing pad) of BXB1 serine recombinase and transgene into attP-attP* landing pad cell line 3 days post mRNA transfection/AAV transduction. Black dots (to the right of each pair of gray dots) indicate template only samples and fall at 0% on the y-axis. Gray dots (to the left of each pair of black dots) indicate template+BXB1 integrase and fall at greater than 0% on the y-axis.

[0611] FIGS. 5A and 5B: General structure of recombinase recognition sites and presence of recognition sites in LeftRegion and RightRegion sequences disclosed herein. (A) General features of a recognition sequence. Serine recombinases as defined herein generally comprise a central dinucleotide, a core sequence, and flanking arms that may be parapalindromic in nature. Depicted here are the attP and attB recognition sequences for Bxb1 recombinase (e.g., SEQ ID NO: 11,636). These sequences share the central dinucleotide, indicated in bold, which is important for successful recombination between the two sites. The arms of the recognition sites, indicated by black box outlines, may share palindromic sequences to a varying degree, thus being referred to as “parapalindromic” herein. Nucleotides that are palindromic with respect to the opposite arm are indicated by underlined text. Additionally, recognition sequences share a core that is common between the attP and attB site, indicated here by gray shading. The core sequence comprises the central dinucleotide at a minimum, but may include additional sequence. (B) The LeftRegion or RightRegion (comprising a sequence of any of SEQ ID NOs: 13,001-25,677 and any of SEQ ID NOs: 26,001-38,677, respectively, e.g., SEQ ID NOs: 24,636 and 37,636, respectively) comprises the attP site for a cognate recombinase. The sequence listing comprises exemplary recognition sites for exemplary recombinases described herein. As an example, the attP site for a recombinase of SEQ ID NO: n, wherein n is chosen from 1-12,677 (e.g., from 1-11,432), is found in SEQ ID NO: (n+13,000) (e.g., a LeftRegion) or SEQ ID NO: (n+26,000) (e.g., a RightRegion). Shown here, the attP site for Bxb1 integrase (SEQ ID NO: 11,636) can be found in the corresponding SEQ ID NO: 24,636 (LeftRegion) and SEQ ID NO: 37,636 (RightRegion). The attP site of Bxb1 is shown as underlined and bolded text in the LeftRegion sequence.

[0612] FIG. 6 is a schematic representation of the lentivirus-attP vectors with or without insulators. The lentivirus vectors shown contain a self-inactivating 3′LTR, a psi sequence (Ψ) allows for efficient incorporation of the vector RNA genome into particles, a Rev responsive element (RRE), a central polypurine tract (cPPT), the expression of EGFP transgene driven by human EF1a promoter, as well as the Woodchuck Hepatitis Virus Post-Transcriptional Response Element (WPRE). Vector A is the control lentivirus vector. Vector B is the same as vector A except that a DNA recognition site (labeled attP) flanked by universal primer regions U1 and U2 is placed upstream of the transgene. Vector C is the same as vector B except the attP site is flanked by insulators.

[0613] FIG. 7 is a schematic diagram illustrating insulators flanking a recognition sequence, which result in the insulation of the integrated sequence after recombination. The left panel shows a circular template DNA comprising, from left to right, a first insulator, a DNA recognition sequence, a second insulator, and a heterologous object sequence comprising a promoter and a gene. The right panel shows the template DNA after integration into a host genome, resulting in a sequence comprising, from left to right: host DNA, first recombinase transfer sequence, first insulator, heterologous object sequence comprising a promoter and a gene, second insulator, and second recombinase transfer sequence.

[0614] FIGS. 8A and 8B describe luciferase activity assay for primary cells. LNPs formulated as according to Example 9 were analyzed for delivery of cargo to primary human (A) and mouse (B) hepatocytes, as according to Example 10. The luciferase assay revealed dose-responsive luciferase activity from cell lysates, indicating successful delivery of RNA to the cells and expression of Firefly luciferase from the mRNA cargo.

[0615] FIG. 9 shows LNP-mediated delivery of RNA cargo to the murine liver. Firefly luciferase mRNA-containing LNPs were formulated and delivered to mice by iv, and liver samples were harvested and assayed for luciferase activity at 6, 24, and 48 hours post administration. Reporter activity by the various formulations followed the ranking LIPIDV005>LIPIDV004>LIPIDV003. RNA expression was transient and enzyme levels returned near vehicle background by 48 hours, post-administration.

### DETAILED DESCRIPTION

[0616] This disclosure relates to compositions, systems and methods for targeting, editing, modifying or manipulating a DNA sequence (e.g., inserting a heterologous object DNA sequence into a target site of a mammalian genome) at one or more locations in a DNA sequence in a cell, tissue or subject, e.g., in vivo or in vitro. The object DNA sequence may include, e.g., a coding sequence, a regulatory sequence, a gene expression unit.

[0617] In some embodiments, a serine recombinase as described herein is a large serine recombinase (e.g., a serine recombinase having an amino acid sequence consisting of at least 400 amino acids). In some embodiments, the serine recombinase is at least 400, 450, 500, 550, or 600 amino acids in length. In some embodiments a serine recombinase as described herein is a unidirectional serine recombinase. In some embodiments, a serine recombinase as described herein is a small serine recombinase (e.g., a serine recombinase having an amino acid sequence consisting of less than 400 amino acids). In some embodiments a serine recombinase as described herein is a bidirectional serine recombinase.

[0618] A Gene Writer system as described herein may, in some instances, comprise a template nucleic acid molecule comprising an insulator, a DNA recognition sequence that is specifically bound by a recombinase polypeptide (e.g., a tyrosine recombinase polypeptide or a serine recombinase (e.g., a serine integrase) polypeptide), and a heterologous object sequence. The template nucleic acid molecule may, in some instances, comprise a plurality of insulators (e.g., two insulators). In some instances, the template nucleic acid molecule comprises a first insulator and a second insulator, with the DNA recognition sequence positioned between the first and second insulator. In some instances, recombination of the template nucleic acid molecule with a target DNA (e.g., a genomic DNA, e.g., a chromosome or a mitochondrial genome, e.g., comprising a cognate DNA recognition sequence) by a recombinase polypeptide results in integration of the heterologous object sequence into the target DNA, with the first and second insulators flanking the integrated heterologous object sequence.

### Gene-Writer™ Genome Editors

[0619] The present invention provides recombinase polypeptides (e.g., serine recombinase polypeptides, e.g., any of SEQ ID NOs: 1-12,677 (e.g., SEQ ID NOs: 1-11,432)) that can be used to modify or manipulate a DNA sequence, e.g., by recombining two DNA sequences comprising cognate recognition sequences that can be bound by the recombinase polypeptide. A Gene Writer™ gene editor system may, in some embodiments, comprise: (A) a polypeptide or a nucleic acid encoding a polypeptide, wherein the polypeptide comprises (i) a domain that contains recombinase activity, and (ii) a domain that contains DNA binding functionality (e.g., a DNA recognition domain that, for example, binds to or is capable of binding to a recognition sequence, e.g., as described herein); and (B) an insert DNA comprising (i) a sequence that binds the polypeptide (e.g., a recognition sequence as described herein) and, optionally, (ii) an object sequence (e.g., a heterologous object sequence). In some embodiments, the domain that contains recombinase activity and the domain that contains DNA binding functionality is the same domain. For example, the Gene Writer genome editor protein may comprise a DNA-binding domain and a recombinase domain. In certain embodiments, the elements of the Gene Writer™ gene editor polypeptide can be derived from sequences of a recombinase polypeptide (e.g., a serine recombinase), e.g., as described herein, e.g., any of SEQ ID NOs: 1-12,677 (e.g., SEQ ID NOs: 1-11,432). In some embodiments the Gene Writer genome editor is combined with a second polypeptide. In some embodiments the second polypeptide is derived from a recombinase polypeptide (e.g., a serine recombinase), e.g., as described herein, e.g., any of SEQ ID NOs: 1-12,677 (e.g., SEQ ID NOs: 1-11,432).

[0620] In some embodiment, a Gene Writer comprises one or more components (e.g., nucleic acid molecules or polypeptides) as described in PCT Application No. PCT/US2020/061705 (incorporated by reference herein in its entirety).

### Recombinase Polypeptide Component of Gene Writer Gene Editor System

[0621] An exemplary family of recombinase polypeptides that can be used in the systems, cells, and methods described herein includes the serine recombinases. Generally, serine recombinases are enzymes that catalyze site-specific recombination between two recognition sequences. The two recognition sequences may be, e.g., on the same nucleic acid (e.g., DNA) molecule, or may be present in two separate nucleic acid (e.g., DNA) molecules. In some embodiments, a serine recombinase polypeptide comprises a recombinase N-terminal domain (also called the catalytic domain), a recombinase domain, and a C-terminal zinc ribbon domain. In some embodiments the zinc ribbon domain further comprises a coiled-coiled motif. In some embodiments the recombinase domain and the zinc ribbon domain are collectively referred to as the C-terminal domain. In some embodiments the N-terminal domain is between 50 and 250 amino acids, or 100-200 amino acids, or 130-170 amino acids. In some embodiments the C-terminal domain is 200-800 amino acids, or 300-500 amino acids. In some embodiments the recombinase domain is between 50 and 150 amino acids. In some embodiments the zinc ribbon domain is between 30 and 100 amino acids. In some embodiments the N-terminal domain is linked to the recombinase domain via a long helix (sometimes referred to as an aE helix or linker). In some embodiments the recombinase domain and zinc ribbon domain are connected via a short linker. Non-limiting examples of serine recombinases, as well as the recombinase polypeptides, any of SEQ ID NOs: 1-12,677 (e.g., SEQ ID NOs: 1-11,432).

[0622] In some embodiments, recombinant recombinases are constructed by swapping domains. In some embodiments, a recombinase N-terminal domain can be paired with a heterologous recombinase C-terminal domain. In some embodiments, a catalytic domain can be paired with a heterologous recombinase domain, zinc ribbon domain, αE helix, and/or short linker. In some embodiments, a C-terminal domain can comprise heterologous recombinase domains, zinc ribbon domains, αE helix, and/or short linkers. In some embodiments, DNA binding elements of the recombinase polypeptide are modified or replaced by heterologous DNA binding elements, such as zinc-finger domains, TAL domains, or Watson-crick based targeting domains, such as CRISPR/Cas systems.

[0623] Without wishing to be bound by theory, serine recombinases utilize short, specific DNA sequences (e.g., attP and attB), which are examples of recognition sequences. During the integration reaction, the recombinase binds to attP and attB as a dimer, mediates association of the sites to form a tetrameric synaptic complex, and catalyzes strand exchange to integrate DNA, forming new recognition sequences sites, attL and attR. The new recognition sites, attL and attR, comprises, for example, in order from 5′ to 3′: attB5′-core-attP3′, and attP5′-core-attB3′. Without wishing to be bound by theory, the reverse reaction, where the DNA is excised by site-specific recombination between attL and attR sequences, occurs at reduced frequency or does not occur in the absence of a recombination directionality factor (RDF). This results in stable integration with little or no detectable recombinase-mediated excision, i.e., recombination that is “unidirectional”.

[0624] While not wishing to be bound by descriptions of mechanisms, strand exchange catalyzed by recombinases typically occurs in two steps of (1) cleavage and (2) rejoining involving a covalent protein-DNA intermediate formed between the recombinase enzyme and the DNA strand(s). The recombinases act by binding to their DNA substrates as dimers and bring the sites together by protein-protein interactions to form a tetrameric synaptic complex. Activation of the nucleophilic serine in each of the four subunits results in DNA cleavage to give 2 nt 3′ overhangs and transient phosphoseryl bonds to the recessed 5′ ends. DNA strand exchange occurs by subunit rotation. The 3′ dinucleotide overhangs base pair with the recessed 5′ bases and the 3′ OH attacks the phosphoseryl bond in the reverse of the cleavage reaction to join the recombinant half sites. Further details of the structure, activity, and biology of serine recombinases are described in the following references which are incorporated by reference: Smith M C M. 2014. Phage-encoded serine integrases and other large serine recombinases. Microbiol Spectrum 3(4):MDNA3-0059-2014; Rutherford K and Van Duyne G D. 2014. The ins and outs of serine integrase site-specific recombination. Current Opinion in Structural Biology 24: 125-131; Van Duyne G D and Rutherford K. 2013. Large Serine Recombinase domain structure and attachment site binding. Critical Reviews in Biochemistry and Molecular Biology 48(5): 471-491.

[0625] A skilled artisan can determine the nucleic acid and corresponding polypeptide sequences of a recombinase polypeptide (e.g., serine recombinase) and domains thereof, e.g., by using routine sequence analysis tools as Basic Local Alignment Search Tool (BLAST) or CD-Search for conserved domain analysis. Other sequence analysis tools are known and can be found, e.g., at https://molbiol-tools.ca, for example, at https://molbiol-tools.ca/Motifs.htm. In some embodiments, a serine recombinase described herein includes at least one known active site signature of a serine recombinase, e.g., cd00338, cd03767, cd03768, cd03769, or cd03770. Proteins containing these domains can additionally be found by searching the domains on protein databases, such as InterPro (Mitchell et al. Nucleic Acids Res 47, D351-360 (2019)), UniProt (The UniProt Consortium Nucleic Acids Res 47, D506-515 (2019)), or the conserved domain database (Lu et al. Nucleic Acids Res 48, D265-268 (2020)), or by scanning open reading frames or all-frame translations of nucleic acid sequences for serine recombinase domains using prediction tools, for example InterProScan.

[0626] While the present disclosure provides many particular serine recombinase sequences, it is understood that methods described herein can be performed with other serine recombinases as well. For example, a composition or method described herein may involve a serine recombinase having an active site signature chosen from, e.g., cd00338, cd03767, cd03768, cd03769, or cd03770. In some embodiments, the serine recombinase has a length of above 400 amino acids (e.g., at least 400, 500, 600, 700, 800, 900, or 1000 amino acids). In some embodiments, a recombinase comprises 1, 2, 3, 4, 5, 6, 7, 8, 9, 10, 11, 12, 13, 14, 15, or more domains of any of SEQ ID NOs: 1-12,677 (e.g., SEQ ID NOs: 1-11,432). In some embodiments, a recombinase comprises 1, 2, 3, 4, 5, 6, 7, 8, 9, 10, 11, 12, 13, 14, 15, or more domains listed in Table 1. In some embodiments, a method for identifying a recombinase comprises determining whether a polypeptide comprises 1, 2, 3, 4, 5, 6, 7, 8, 9, 10, 11, 12, 13, 14, 15, or more domains of any of SEQ ID NOs: 1-12,677 (e.g., SEQ ID NOs: 1-11,432). In some embodiments, a method for identifying a recombinase comprises determining whether a polypeptide comprises 1, 2, 3, 4, 5, 6, 7, 8, 9, 10, 11, 12, 13, 14, 15, or more domains, e.g., as listed in SEQ ID NOs: 1-12,677 or in Table 1.

### Exemplary Recombinase Polypeptides

[0627] In some embodiments, a Gene Writer™ gene editor system comprises a recombinase polypeptide (e.g., a serine recombinase polypeptide), e.g., as described herein. Generally, a recombinase polypeptide (e.g., a serine recombinase polypeptide) specifically binds to a nucleic acid recognition sequence and catalyzes a recombination reaction at a site within the recognition sequence (e.g., a core sequence within the recognition sequence). In some embodiments, a recombinase polypeptide catalyzes recombination between a recognition sequence, or a portion thereof (e.g., a core sequence thereof) and another nucleic acid sequence (e.g., an insert DNA comprising a cognate recognition sequence and, optionally, an object sequence, e.g., a heterologous object sequence). For example, a recombinase polypeptide (e.g., a serine recombinase polypeptide) may catalyze a recombination reaction that results in insertion of an object sequence, or a portion thereof, into another nucleic acid molecule (e.g., a genomic DNA molecule, e.g., a chromosome or mitochondrial DNA).

[0628] SEQ ID NOs: 1-12,677 provide amino acid sequences of exemplary recombinase polypeptides, e.g., serine recombinases (e.g., serine integrases), or fragments thereof. SEQ ID NOs: 13,001-25,677 or SEQ ID NOs: 26,001-38,677 provide exemplary flanking nucleic acid sequences of the nucleic acid sequence encoding the exemplary serine recombinase in the organism of origin (LeftRegion and RightRegion); one or both of these flanking nucleic acid sequences comprise the native recognition sequence or the portions thereof (e.g., comprise an attP site or portions thereof) of the corresponding recombinase. The terms “LeftRegion” and “RightRegion” do not imply any particular placement or directionality. Without wishing to be bound by theory, a given set of LeftRegion and RightRegion sequences may be positioned on either end of a nucleic acid sequence of interest (e.g., a nucleic acid sequence encoding an exemplary serine recombinase, e.g., in a bacterial genome). For example, in some embodiments, the LeftRegion is located upstream (e.g., 5′) relative to the nucleic acid sequence of interest (e.g., a coding region in the nucleic acid sequence of interest). In some embodiments, the LeftRegion is located downstream (e.g., 3′) relative to the nucleic acid sequence of interest (e.g., a coding region in the nucleic acid sequence of interest). In some embodiments, the RightRegion is located upstream (e.g., 5′) relative to the nucleic acid sequence of interest (e.g., a coding region in the nucleic acid sequence of interest). In some embodiments, the RightRegion is located downstream (e.g., 3′) relative to the nucleic acid sequence of interest (e.g., a coding region in the nucleic acid sequence of interest). SEQ ID NOs: 1-11,432 comprise amino acid sequences that had not previously been identified as serine recombinases, and SEQ ID NOs: 13,001-24,432 or SEQ ID NOs: 26,001-37,432 comprise corresponding flanking nucleic acid sequences (and thereby DNA recognition sequences) of serine recombinases for which the DNA recognition sequences were previously unknown. Domains identified as present in the exemplary recombinase sequences are also identified based on InterPro analysis of the amino acid sequence (see corresponding descriptive field in the sequence listing). See, e.g., https://omictools.com/interpro-tool. A brief key to the domain nomenclature is provided in Table 1.

[0629] In some embodiments, a recombinase polypeptide described herein comprises one or more domains listed in Table 1. In some embodiments, a recombinase polypeptide described herein comprises one or more (e.g., 2, 3, 4, or all) of the domains listed in the corresponding descriptive field for that polypeptide sequence in the sequence listing. In some embodiments, a recombinase polypeptide described herein comprises one or more (e.g., 2, 3, 4, or all) of the domains listed in the corresponding descriptive field for any of SEQ ID NOs: 1-12,677.

[0630] Each of the native recognition sequences or portions thereof occurring in the flanking nucleic acid sequences any of SEQ ID NOs: 13,001-25,677 (e.g., SEQ ID NOs: 13,001-24,432) or SEQ ID NOs: 26,001-38,677 (e.g., SEQ ID NOs: 26,001-37,432) may comprise one, two, or three of: (i) a first parapalindromic sequence, (ii) a core sequence, and/or (iii) a second parapalindromic sequence, wherein the first and second parapalindromic sequences are parapalindromic relative to each other.

TABLE 1
Exemplary integrase domains

| domainID | Description |
|---|---|
| PF07508 | Recombinase, usually found with PF00239 |
| G3DSA:1.10.10.2600 | Putative LSR |
| SSF53041 | Resolvase like |
| PF13408 | Recombinase zinc ribbon |
| PS51737 | DNA-binding recombinase domain profile |
| cd00338 | Serine Recombinase family, catalytic domain; a DNA binding domain may be pres . . . |
| cd03770 | Serine Recombinase (SR) family, TndX-like transposase subfamily, catalytic do. |
| PF14287 | Domain of unknown function |
| PTHR30461:SF21 | Subfamily not named |
| cd03768 | Serine Recombinase (SR) family, Resolvase and Invertase subfamily, catalytic |
| PTHR30461:SF3 | SERINE RECOMBINASE PINE-RELATED |
| PF00239 | Resolvase, N-terminal |
| PS51736 | Resolvase/invertase-type recombinase catalytic domain profile |
| SM00857 | Resolvase, N terminal domain |
| G3DSA:3.40.50.1390 | Resolvase, N-terminal |
| PS00397 | Site-specific recombinases active site |
| PS00398 | Site-specific recombinases signature 2 |
| cd00569 | Helix-turn-helix domain of Hin and related proteins |
| PTHR30461 | DNA-INVERTASE FROM LAMBDOID PROPHAGE |
| G3DSA:1.10.10.60 | Homeodomain-like |
| SSF46689 | Homeodomain-like |
| PF02796 | Helix-turn-helix domain of resolvase |

TABLE 2
Exemplary recombinase recognition sites

| Integrase | Protein | | attB | | attP |
|---|---|---|---|---|---|
| A No. | Accession | attB | SEQ ID | attP | SEQ ID |
| 23 | YP_006907228.1 | GATCAGCTCCGCGGGCAAGACCTTTCTCCTTCACGGGGT | 38783 | TCCAGCCCAACAGTGTTAGTCTTTGCTCTTACCCAGT | 38730 |
| | | GGAAGGTC | | TGGGCGGGA | |
| 25 | NP_047974.1 | TGCGGGTGCCAGGGCGTGCCCTTGGGCTCCCCGGGCGC | 38678 | GTGCCCCAACTGGGGTAACCTTTGAGTTCTCTCAGTT | 38731 |
| | | GTACTCC | | GGGGG | |
| 27 | NP_813744.2 | CAGGTTTTTGACGAAAGTGATCCAGATGATCCAG | 38679 | GGTGCTGGGTTGTTGTCTCTGGACAGTGATCCATGG | 38732 |
| | | | | GAAACTACTCAGCACC | |
| 56 | AFU62167.1 | CATCAGGGCGGTCAGGCCGTAGATGTGGAAGAAACGG | 38680 | ATGTGGTCCTTTAGATCCACTGACGTGGGTCAGTGT | 38733 |
| | | CAGCACGGCGAGGACG | | CTCTAAAGGACTCGCG | |
| 81 | APC43293.1 | ATCTGGATGTGGGTGTCCATCTGCGGGCAGACGCCGCA | 38681 | AGTTGTGGCCATGTGTCCATCTGGGGGCAGATGGAG | 38734 |
| | | GTCGAAGCACGG | | ACGGGGTCACA | |
| 111 | NP_817623.1 | CGGTCTCCATCGGGATCTGCTGATCGAGCAGCATGCCG | 38682 | TAACCGCAAGTGTACATCCCTCGGCTGGCCGAGACA | 38735 |
| | | ACCA | | AGTACAGTTGCGACAG | |
| 165 | YP_003358736.1 | CGGTCTCCATCGGGATCTGCTGATCGAGCAGCATGCCG | 38683 | TAGTTTCCAATGTTACAGGAACTGCTGGCAGAATCC | 38736 |
| | | ACCA | | AACACATTGGAAGTCG | |
| 204 | NP_075302.1 | GGCTTGTCGACGACGGCGGTCTCCGTCGTCAGGATCAT | 38684 | GGTTTGTCTGGTCAACCACCGCGGTCTCAGTGGTGT | 38737 |
| | | | | ACGGTACAAACC | |
| 329 | AAK38018.1 | ATGCCAACACAATTAACATCTCAATCAAGGTAAATGCTT | 38685 | GAGTTTTTATTTCGTTTATTTCAATTAAGGTAACTAAA | 38738 |
| | | TTTGCTTTTTTTGC | | AAACTCCTTTTAAGG | |
| 414 | YP_006990167.1 | GCATGTTCCCCAAAGCGATACCACTTGAAGCAGTGGTAC | 38686 | TGTTCCCCAAAGCGATACCACTTGAAGCAGTGGTAC | 38739 |
| | | TGCTTGTGGGTACACTCTGCGGGTG | | TGCTTGTGGGTACA | |
| 436 | YP_009103095.1 | CAAAGGATCACTGAATCAAAAGTATTGCTCATCCACGCG | 38687 | ATTTTAGGTATATGATTTTGTTTATTAGTGTAAATAA | 38740 |
| | | AAA | | CACTATGTACCTAAAAT | |
| 450 | CAR95427.1 | GTAGATTTGTTTCCCCAGACGCACACGTGGAGTGTGTAA | 38688 | TATTAGTATAGAAGAAAGCTCTCAGCACACGTGGAG | 38741 |
| | | GTTTACTTGAGAAACGGAGTTAA | | TGTGTTGCTCTCTGCTCGTAAAGCCT | |
| 477 | NP_463492.1 | TTTCGGATCAAGCTATGAAGGACGCAAAGAGGGAACTA | 38689 | TTCCTCGTTTTCTCTCGTTGGAAGAAGAAGAAACGA | 38742 |
| | | AA | | GAAA | |
| 524 | AYN56706.1 | AAGTGTCCAAGCTGGCCCCCGATCCCAGTTTCAATAGTT | 38690 | TATAATTTCGTATATTAGATATAACCGGTTTCAATTG | 38743 |
| | | TGGGGAATCTTTGTAAGTGGTAA | | GAAATACCTAATATACGAAAAAAGG | |
| 1116 | WP_129137749.1 | CACCCATTGTGTTCACAGGAGATACAGCTTTATCTGTACT | 38691 | TGTAGTAAGTATCTTAATATACAGCTTTATCTGTTTTT | 38744 |
| | | GATATTAATGACATGCTG | | TAAGATACTTACTACTTT | |
| 1200 | YP_459991.1 | CGGAAGGTAGCGTCAACGATAGGTGTAACTGTCGTGTT | 38692 | CTAGTTTTAAAGTTGGTTATTAGTTACTGTGATATTT | 38745 |
| | | TGTAACGGTACTTCCAACAGCTGGCGCCGCCAC | | ATCACGGTACCCAATAACCAATGAAT | |
| 1203 | YP_006082695.1 | CTTCCAGCACATCACCCACATGGTCTGTGTCGGTGTGCG | 38693 | GGTATTGTATCAATTTCAGAACTCACACTTCGGTATG | 38746 |
| | | TCAGCACTAGACTATCAATCCTA | | CGTACTCAATTTGATACAATTACAA | |
| 1204 | YP_005549228.1 | TTTTTTCCGCCTGTCGTAACCGGATCTGTTGTAACGATTA | 38694 | CTTTTTTGTTGTACTTAAACAATAATGCTTGTAAGAAT | 38747 |
| | | TCGGAATGACCTTGATGCCGG | | TATTGATTGAGTACGACATAAACC | |
| 1205 | YP_189066.1 | ACTTCCAATTAACCCTTCACCAGCCCTATACCAAGTTCCT | 38695 | TTATATTTCGACTTAATTAAGTACAGTTCCACCTAGA | 38748 |
| | | GTCGCGCATCCTCCAGCTAAT | | GATAGACTAAATAAAGTATTATTA | |
| 1206 | YP_005679179.1 | ACTACTTAATATATCCATAAGAGAAATTTCATTTCCTTCT | 38696 | GTTAGGTGTATATCATACCTAACGCAATTCATTACAT | 38749 |
| | | TTGTCTACCCCTATAGGATCTT | | CACATATGTTATACACCTACTTTAA | |
| 1207 | YP_002804732.1 | ACGAAATAAAAGATTGTATAGATGCTGGTAGGAAACAT | 38697 | AAAAGAATCCAAATTATCGTACTTTAACATAGTGAAT | 38750 |
| | | GCCCTTGTCATTTAGCTGAAACAG | | ACTGTCCATCATGTATAAAAGTACG | |
| 1208 | YP_001089468.1 | TATTCTAAGTAATGTAGTTTTACCACATCCACTAGGTCCG | 38698 | TATATAATTATTTGGACTAACATATAGTATCCACTTG | 38751 |
| | | AGTAAACATAGAAATTCCCCT | | GCTATTATTAGTTAGTCCAAATAAATA | |
| 1209 | YP_001886479.1 | ATGGATTTTGCAGATTCCCAGATGCCCCTACAGAAAGAG | 38699 | GTTTATATGTTTACTAATAAGACGCTCTCAACCCATA | 38752 |
| | | GTACAAAACATTTATTGGAATTAATT | | AAGTCTTATTAGTAAACATATTTCAACT | |
| 1211 | YP_005759947.1 | GTTCGTGGTAACTATGGGTGGTACAGGTGCCACATTAGT | 38700 | TTTTTGTATGTTAGTTGTGTCACTGGGTAGACCTAAA | 38753 |
| | | TGTACCATTTATGTTTATGTGGTTAAC | | TAGTGACACAACTGCTATTAAAATTTAA | |
| 1212 | YP_004586821.1 | CAAGAAACGTTCCGTCTGTTTGTGTCAGCTGCGCGAAAT | 38701 | TTATAAACCTGTTTTAAAGTTAACTTTACATGCCTAAC | 38754 |
| | | TAATGACCGGATCGTTTGTTCC | | ATTAACTCTTATACAGGTTAAGGT | |
| 1213 | YP_353073.2 | GGAACTCCGCCGGGCCCATCTGGTCGAAGAAGATGAAG | 38702 | ATGGGGTCACAATACCAATCATGTTCAAGAATGTGA | 38755 |
| | | GGGCCCACCATCTGCCTCCGGGCC | | AGGGTATTTTACCCTTGTCGTTTCAG | |
| 1214 | BAG46462.1 | GATACGGATGTTCGTCGCCGGCACGCTGGTCACGCTCG | 38703 | AGTTGTCTGATAATATATTTTCGGACACGCTCGGCAA | 38756 |
| | | GCAATCCCAAGATCATGCTGTTCT | | CCCGAACGAGAGTCAAAATACATTT | |
| 1217 | SGE40566.1 | GAAGGTGTTGGTGCGGGGTTGGCCGTGGTCGAGGTGG | 38704 | GTAGTGTATCTCACAGGTCCACGGTTGGCCGTGGAC | 38757 |
| | | GGT | | TGCTGAAGAACATTCC | |
| 1218 | CBG73463.1 | GGACGGCGCAGAAGGGGAGTAGCTCTTCGCCGGACCG | 38705 | GCTCATGTATGTGTCTACGCGAGATTCTCGCCCGAG | 38758 |
| | | TCGACATACTGCTCAGCTCGTC | | AACTTCTGCAAGGCACTGCTCTTGGCT | |
| 1219 | YP_001376196.1 | GCATACATTGTTGTTGTTTTTCCAGATCCAGTTGGTCCTG | 38706 | CAATAACGGTTGTATTTGTAGAACTTGACCAGTTGTT | 38759 |
| | | TAAATATAAGCAATCCATGTGAGT | | TTAGTAACATAAATACAACTCCGAATA | |
| 1221 | CAC97653.1 | TAACTTTTTCGGATCGAGTTATGATGGACGTAAAGAGG | 38707 | GTTTAGTATCTCGTTATCTCTCGTTGGAGGGAGAAG | 38760 |
| | | GAACAAAGCATCTA | | AAACGGGATACCAAAA | |
| 1222 | CAD10281.2 | TTTCGGATCAAGCTATGAAGGACGCAAAGAGGGAACTA | 38708 | TTCCTCGTTTTCTCTCGTTGGACGGAAACGAATCGAG | 38761 |
| | | AA | | AAA | |
| 1223 | YP_004301563.1 | TTTCCACAGACAACTCACGTGGAGGTAGTCAC | 38709 | CAATGAAAAACTAGGCATGTAGAAGTTGTTTGT | 38762 |
| 1224 | YP_006538656.1 | TTCTGGACCATGATGCGCCACTTCCGAAATTTCAAAAAG | 38710 | GTATCTTGATGTACAACATTACTCTTTATTTTCAAATA | 38763 |
| | | ATCAGTGGTCAAACGGCTCATTA | | CAGAATAATGTTGCATATAATATT | |
| 1225 | YP_006685721.1 | CTGTAACTTTTTCGGATCAAGCTATGAGGGACGCAAAGA | 38711 | TTGTTTAGTCCCTCGTTTTCTCTCGTTGGACGGAGAC | 38764 |
| | | GGGAACTAAACACTTAATTGGTG | | GAATCGAGAAACTAAAATTATAAAT | |
| 1226 | YP_001384783.1 | TATTCAATTATGTGTCGTAATTTTTATCTATTGCGACGAA | 38712 | TATATACTTATAGATACTAAATATTTTTGTATTGCGTA | 38765 |
| | | AAAACACCATAAAATTCTAAC | | ACTTCTTCTACACCTGTAATATCT | |
| 1227 | YP_001392519.1 | AGAAATAGACCTTTCAACTGGACAAGGTGCTGATAAAA | 38713 | AAATATAACCTGTGTATTGAAACAAGGTGCTGATAA | 38766 |
| | | CTATGCAGCAAGTCTTAAGTAAA | | AACCCTTTCATAAACACAAGTAAATA | |
| 1228 | BAF67264.1 | TTTATATTGCGAAAAATAATTGGCGAACGAGGTAACTG | 38714 | GTGGTTGTTTTTGTTGGAAGTGTGTATCAGGTATCTG | 38767 |
| | | GATACCTCATCCGCCAATTAAAATTTG | | CATAGTTATTCCGAACTTCCAATTA | |
| 1229 | NP_470568.1 | TTATTGCAAGAAAAATGGGTTATAAGTACACATCAGGTT | 38715 | TTATATAAAATAGTGTTTTTGTAAAGTACACATCACC | 38768 |
| | | ATAGTAATATCGAAAAAGGAAGC | | ATATTTGACAAAAAACCTATAAATA | |
| 1230 | YP_706485.1 | ATCGCGCAGAACGGTGCGGTGATCAGTGAGTACGCACC | 38716 | CTATGTGGTGGTAATAGCGAGTAGGGGACTACTCGC | 38769 |
| | | GGGCACGACACCGGCGAAGCATCG | | TCCAGGTACATTAACACCATGGA | |
| 1231 | YP_002336631.1 | GTAATATGTTTGGATATGGGGAAGTGAATCAGTACAAC | 38717 | ATAATAGTGTATATGGTAGAGAATTAAACCAGTTTA | 38770 |
| | | CGCCACAGTACCCTCATGTCAGCC | | ATACTCCACCATGTACACGCAGTGAG | |
| 1232 | YP_001646422.1 | TTTGTAGCCATTAGGCGCATTAGGTTGACGCCATTAAGC | 38718 | CGTCACCTTGTTGGCGTAATTAGATTTACTCCAACAG | 38771 |
| | | CCTAAAGCATCATTCGTCGAAAC | | GGTGATGACAAAGCTAATGAATTTT | |
| 1233 | NP_268897.1 | GTTTGTAAAGGAGACTGATAATGGCATGTACAACTATAC | 38719 | ATGGATAAAAAAATACAGCGTTTTTCATGTACAACTA | 38772 |
| | | TCGTCGGTAAAAAGGCATCTTAT | | TACTAGTTGTAGTGCCTAAATAATGCTT | |
| 1234 | YP_005869510.1 | AATACTAATAATAGCTAGTACAATTAACATCTCTATCAAA | 38720 | CGCTTAATTGCGAGTTTTTATTTCGCTTATCTCAATTA | 38773 |
| | | GTAAAAGCTTTTAGCTCTTTCT | | AGGTAACTAAAAAACTCCTTTT | |
| 1235 | YP_002736920.1 | TCTGGTGTAGACGTTAAACGTCCAATCAAGATAACTTTA | 38721 | TATTTCTGTATTTTAGTCAAAGTAATTAAGATAAGTT | 38774 |
| | | TTATACATATTTTCTTCCTCCTA | | AGAGTTAGTAACAGTATTTTAACTT | |
| 1236 | YP_003445547.1 | TAGGAGGAAAAAATATGTATAATAAAGTTATCATGATTG | 38722 | GTTAATAATATGTATTTAAGTCTAACTTATCATGACA | 38775 |
| | | GGCGTTTGACGTCTACACCAGAAT | | AATTTGACTAAAATACAAAAAGGC | |
| 1238 | YP_002747001.1 | TTCCAAAGAGCGCCCAACGCGACCTGAAATTTGAATAA | 38723 | AAAAATTACAAAGTTTTCAACCCTTGATTTGAATTAG | 38776 |
| | | GACTGCTGCTTGTGTAAAGGCGATGATT | | CGGTCAAATAATTTGTAATTCGTTT | |
| 1239 | BAE05705.1 | CAATCATCAGATAACTATGGCGGCACGTGCATTAACCAC | 38724 | TTAATAAACTATGGAAGTATGTACAGTCTTGCAATGT | 38777 |
| | | GGTTGTATCCCGTCTAAAGTACTCGT | | TGAGTGAACAAACTTCCATAATAAAAT | |
| 1240 | YP_003472505.1 | AATCTGCAAACATGTATGGCGGTACATGTATCAACATTG | 38725 | ATTTTTGTACGGAAGTAGATACTATCTTTCAATATCC | 38778 |
| | | GTTGTATTCCTACAAAGACACTCAT | | ATGTTACTTAGTGCCATACAAAAA | |
| 1241 | BAF92844.1 | CGAAAATGTATGGAGGCACTTGTATCAATATAGGATGT | 38726 | TTTGTGCGGAACTACGAACAGTTCATTAATACGAAG | 38779 |
| | | ATACCTTCGAAGACACTT | | TGTACAAACTTCCATACAA | |
| 1242 | YP_003251752.1 | AGACGAGAAACGTTCCGTCCGTCTGGGTCAGTTGGGCA | 38727 | GTGTTATAAACCTGTGTGAGAGTTAAGTTTACATGCC | 38780 |
| | | AAGTTGATGACCGGGTCGTCCGTT | | TAACCTTAACTTTTACGCAGGTTCAGCTT | |
| 1244 | YP_003880342.1 | AGCACGCTGATAATCAGCAAGACCACCAACATTTCCACC | 38728 | GGAAAATATAAATAATTTTAGTAACCTACATCTCAAT | 38781 |
| | | AATGTAAAAGCTTTAACCTTAGC | | CAAGGATAGTAAAACTCTCACTCTT | |
| 1245 | BAF03598.1 | GAGCGCCGGATCAGGGAGTGGACGGCCTGGGAGCGCT | 38729 | CCCTAATACGCAAGTCGATAACTCTCCTGGGAGCGTT | 38782 |
| | | ACACGCTGTGGCTGCGGTCGGTGC | | GACAACTTGCGCACCCTGATCTG | |

[0631] In some embodiments, a sequence comprising the LeftRegion nucleic acid sequence of SEQ ID NO: 24,761 comprises the nucleic acid sequence:

(SEQ ID NO: 38,965)
TCAAAGGTTGATGTTACTGCTGATAATGTAGATATCATATTTAAATTCC
AACTCGCTTAATTGCGAGTTTTTATTTCGTTTATTTCAATTAAGGTAAC
TAAAAAACTCCTTTTAAGGAGTTTCTGTAATCAATTAATTTCTTCAATA
TATTTTATTTGGTCCCATAGTTCATCAGTTATCTCATGCATAGAAGGTT
TTTGTTTTGTTTGTATTAGATATCCTTTCTCCTTAAGCATGTTAACTAC
TTTCTTTAGTTTCTG .

[0632] In some embodiments, a sequence comprising the LeftRegion nucleic acid sequence of SEQ ID NO: 24,956 comprises the nucleic acid sequence:

(SEQ ID NO: 38,966)
TTAATTAAAAAAATAGACGTATGGAACGATAATAAAATTAAGATCCACT
GGAATATTTAATTTTTTAGGCGCTTTACGCCTTTTTTCGTATATTAGGT
ATTTCCAATTGAAACCGGTTATATCTAATATACGAAATTATACAACAAA
AAGCCCCAGTGACCATTGCATAATCTGCAACAACCACTAGGGCTAAATT
TTTATTGACGTTGTGAGTAAACAACTGAATTGAGTTGCTGTTGGTTAAC
ACCATTGGCAATATC.

[0633] In some embodiments, a recombinase recognition site (e.g., as described herein) comprises an attB sequence. In some embodiments, a recombinase recognition site (e.g., as described herein) comprises an attP sequence. In some embodiments, a recombinase recognition site (e.g., as described herein) comprises an attB sequence and an attP sequence. In embodiments, the attB sequence is selected from a sequence listed in Table 2. In embodiments, the attP sequence is selected from a sequence listed in Table 2. In some embodiments, a recombinase recognition site (e.g., as described herein) comprises an attB sequence and an attP sequence, wherein the attB and attP sequences each comprise a sequence as listed in a single row of Table 2.

[0634] In some embodiments, a DNA recognition sequence (e.g., as described herein) comprises an attB sequence. In some embodiments, a DNA recognition sequence (e.g., as described herein) comprises an attP sequence. In some embodiments, a DNA recognition sequence (e.g., as described herein) comprises an attB sequence and an attP sequence. In embodiments, the attB sequence is selected from a sequence listed in Table 2. In embodiments, the attP sequence is selected from a sequence listed in Table 2. In some embodiments, a DNA recognition sequence (e.g., as described herein) comprises an attB sequence and an attP sequence, wherein the attB and attP sequences each comprise a sequence as listed in a single row of Table 2.

[0635] In some embodiments, a recombinase polypeptide (e.g., comprised in a system or cell as described herein) comprises an amino acid sequence of any of SEQ ID NOs: 1-12,677 (e.g., SEQ ID NOs: 1-11,432), or an amino acid sequence having at least 70%, 75%, 80%, 85%, 90%, 95%, 96%, 97%, 98%, 99%, or 100% sequence identity thereto. In some embodiments, a recombinase polypeptide (e.g., comprised in a system or cell as described herein), or a portion thereof, has at least 70%, 75%, 80%, 85%, 90%, 95%, 96%, 97%, 98%, 99%, or 100% sequence identity to the amino acid sequence of a recombinase domain, a DNA recognition domain (e.g., that binds to or is capable of binding to a recognition site, e.g. as described herein), a recombinase N-terminal domain (also called the catalytic domain), a zinc ribbon domain, the coiled coil motif of a zinc ribbon domain, or a C-terminal domain (e.g., the recombinase domain and the zinc ribbon domain) of a recombinase polypeptide of any of SEQ ID NOs: 1-12,677 (e.g., any of SEQ ID NOs: 1-11,432). In some embodiments, a recombinase polypeptide (e.g., comprised in a system or cell as described herein) has one or more of the DNA binding activity and/or the recombinase activity of a recombinase polypeptide comprising an amino acid sequence of any of SEQ ID NOs: 1-12,677 (e.g., any of SEQ ID NOs: 1-11,432), or an amino acid sequence having at least 70%, 75%, 80%, 85%, 90%, 95%, 96%, 97%, 98%, 99%, or 100% sequence identity thereto.

[0636] In some embodiments, an insert DNA (e.g., comprised in a system or cell as described herein) comprises a nucleic acid recognition sequence occurring within a nucleotide sequence of any of SEQ ID NOs: 13,001-25,677 or SEQ ID NOs: 26,001-38,677 (e.g., any of SEQ ID NOs: 13,001-24,432 or SEQ ID NOs: 26,001-37,432), or a nucleic acid sequence having at least 70%, 75%, 80%, 85%, 90%, 95%, 96%, 97%, 98%, or 99% identity thereto, or having no more than 1, 2, 3, 4, 5, 6, 7, 8, 9, 10, 11, 12, 13, 14, 15, 16, 17, 18, 19, or 20 sequence alterations (e.g., substitutions, insertions, or deletions) relative thereto. In some embodiments, an insert DNA (e.g., comprised in a system or cell as described herein) comprises one or more (e.g., both) parapalindromic sequences occurring within a nucleotide sequence of any of SEQ ID NOs: 13,001-25,677 or SEQ ID NOs: 26,001-38,677 (e.g., any of SEQ ID NOs: 13,001-24,432 or SEQ ID NOs: 26,001-37,432), or a nucleic acid sequence having at least 70%, 75%, 80%, 85%, 90%, 95%, 96%, 97%, 98%, or 99% identity to said parapalindromic sequence, or having no more than 1, 2, 3, 4, 5, 6, 7, 8, 9, 10, 11, 12, 13, 14, 15, 16, 17, 18, 19, or 20 sequence alterations (e.g., substitutions, insertions, or deletions) relative thereto. In some embodiments, an insert DNA (e.g., comprised in a system or cell as described herein) comprises a spacer (e.g., a core sequence) of a nucleic acid recognition sequence occurring within a nucleotide sequence of any of SEQ ID NOs: 13,001-25,677 or SEQ ID NOs: 26,001-38,677 (e.g., any of SEQ ID NOs: 13,001-24,432 or SEQ ID NOs: 26,001-37,432), or a nucleic acid sequence having at least 70%, 75%, 80%, 85%, 90%, 95%, 96%, 97%, 98%, or 99% identity thereto, or having no more than 1, 2, 3, 4, 5, 6, 7, 8, 9, 10, 11, 12, 13, 14, 15, 16, 17, 18, 19, or 20 sequence alterations (e.g., substitutions, insertions, or deletions) relative thereto. In certain embodiments, the insert DNA further comprises a heterologous object sequence.

[0637] In some embodiments, an insert DNA (e.g., comprised in a system or cell as described herein) comprises a nucleic acid recognition sequence occurring within a nucleotide sequence of any of SEQ ID NOs: 13,001-25,677 or SEQ ID NOs: 26,001-38,677 (e.g., any of SEQ ID NOs: 13,001-24,432 or SEQ ID NOs: 26,001-37,432), or a nucleic acid sequence having at least 70%, 75%, 80%, 85%, 90%, 95%, 96%, 97%, 98%, or 99% identity thereto, or having no more than 1, 2, 3, 4, 5, 6, 7, 8, 9, 10, 11, 12, 13, 14, 15, 16, 17, 18, 19, or 20 sequence alterations (e.g., substitutions, insertions, or deletions) relative thereto, that is the cognate to a pseudo-recognition sequence (e.g., a human recognition sequence).

[0638] In some embodiments, an insert DNA or recombinase polypeptide used in a composition or method described herein directs insertion of a heterologous object sequence into a position having a safe harbor score of at least 3, 4, 5, 6, 7, or 8.

[0639] In certain embodiments, recombination between the insert DNA and the human DNA recognition sequence results in the formation of an integrated nucleic acid molecule comprising two recognition sequences flanking the integrated sequence (e.g., the heterologous object sequence). Without wishing to be bound by theory, serine recombinases facilitate recombination between recognition sequences comprising attB and attP sites and by recombination form recognition sequences comprising attL and attR sites, e.g., flanking the integrated sequence. While a serine recombinase may recognize, e.g., bind, to an attL or attR site, the serine recombinase will not appreciably (e.g., will not) facilitate recombination using the attL or attR sites (e.g., in the absence of an additional factor). The attL and attR sites comprise recombined portions of the attP and attB sites from which they were created. In certain embodiments, one or both of the two post-recombination recognition sequences of the integrated nucleic acid molecule comprises 1, 2, 3, 4, 5, 6, 7, 8, 9, 10, 11, 12, 13, 14, 15, 16, 17, 18, 19, 20, 21, 22, 23, 24, 25, 26, 27, 28, 29, 30, 31, 32, 33, 34, 35, or more mismatches as compared to one or more of (e.g., one, two, or all three of): (i) the native recognition sequence, (ii) the recognition sequence on the insert DNA, and/or (iii) a pseudo-recognition sequence (e.g., a human DNA recognition sequence). In embodiments, one or both of the two post-recombination recognition sequences of the integrated nucleic acid molecule comprises 1, 2, 3, 4, 5, 6, 7, 8, 9, 10, 11, 12, 13, 14, 15, 16, 17, 18, 19, 20, 21, 22, 23, 24, 25, 26, 27, 28, 29, 30, 31, 32, 33, 34, 35, or more mismatches as compared to the native recognition sequence. In some embodiments the mismatches are present in the core sequence. It is contemplated that, in some embodiments, these differences between the recognition sequence(s) of the integrated nucleic acid molecule and the native recognition sequence, the insert DNA recognition sequence, and/or the human DNA recognition sequence result in reduced binding affinity between the recombinase polypeptide and the recognition sequences of the integrated nucleic acid molecule and/or reduced (e.g., eliminated) recombinase activity of the recombinase polypeptide on the recognition sequences of the integrated nucleic acid molecule, compared to the binding and/or activity of the recombinase to the recognition sequence(s) the native recognition sequence, the insert DNA recognition sequence, and/or the human DNA recognition sequence.

[0640] In some embodiments, a pseudo-recognition sequence (e.g., a human DNA recognition sequence) is located in or near (e.g., within 1, 2, 3, 4, 5, 10, 15, 20, 30, 40, 50, 75, 100, 150, 200, 300, 400, 500, 600, 700, 800, 900, 1000, 2000, 3000, 4000, 5000, or 10,000 nucleotides of) a genomic safe harbor site. In some embodiments, the pseudo-recognition sequence (e.g., human recognition sequence) is located at a position in the genome that meets 1, 2, 3, 4, 5, 6, 7, 8 or 9 of the following criteria: (i) is located >300 kb from a cancer-related gene; (ii) is >300 kb from a miRNA/other functional small RNA; (iii) is >50 kb from a 5′ gene end; (iv) is >50 kb from a replication origin; (v) is >50 kb away from any ultraconserved element; (vi) has low transcriptional activity (i.e. no mRNA+/−25 kb); (vii) is not in a copy number variable region; (viii) is in open chromatin; and/or (ix) is unique, with 1 copy in the human genome.

[0641] In embodiments, a cell or system as described herein comprises one or more of (e.g., 1, 2, or 3 of): (i) a recombinase polypeptide comprising an amino acid sequence of SEQ ID NO: n (where n is chosen from 1-12,677 (e.g., 1-11,342)), or an amino acid sequence having at least 70%, 75%, 80%, 85%, 90%, 95%, 96%, 97%, 98%, 99%, or 100% sequence identity thereto; (ii) an insert DNA comprising a DNA recognition sequence occurring within a nucleotide sequence corresponding to a) a LeftRegion comprising a nucleotide sequence according to SEQ ID NO: (n+13,000), b) a RightRegion comprising a nucleotide sequence according to SEQ ID NO: (n+26,000), or both a) and b), or a nucleic acid sequence having at least 70%, 75%, 80%, 85%, 90%, 95%, 96%, 97%, 98%, or 99% identity thereto, or having no more than 1, 2, 3, 4, 5, 6, 7, 8, 9, 10, 11, 12, 13, 14, 15, 16, 17, 18, 19, or 20 sequence alterations (e.g., substitutions, insertions, or deletions) relative thereto, optionally wherein the insert DNA further comprises an object sequence (e.g., a heterologous object sequence); and/or (iii) a genome comprising a pseudo-recognition sequence (e.g., a human recognition sequence) sequence occurring corresponding to a) a LeftRegion comprising a nucleotide sequence according to SEQ ID NO: (n+13,000), b) a RightRegion comprising a nucleotide sequence according to SEQ ID NO: (n+26,000), or both a) and b), or a nucleic acid sequence having at least 70%, 75%, 80%, 85%, 90%, 95%, 96%, 97%, 98%, or 99% identity thereto, or having no more than 1, 2, 3, 4, 5, 6, 7, 8, 9, 10, 11, 12, 13, 14, 15, 16, 17, 18, 19, or 20 sequence alterations (e.g., substitutions, insertions, or deletions) relative thereto.

[0642] In some embodiments, a recombinase recognition site, e.g., an attB, attP, attL, or attR site, can be predicted by available software tools. In some embodiments, the recognition sites may be predictable by a phage prediction tool, e.g., PhiSpy (Akhter et al. Nucleic Acids Res 40(16):e126 (2012)) or PHASTER (Arndt et al. Nucleic Acids Res 44:W16-W21 (2016)), incorporated herein by reference. In some embodiments, the region proximal to an integrase coding sequence in its native context, e.g., in a bacteriophage genome, plasmid, or bacterial genome, e.g., any of SEQ ID NOs: 13,001-25,677 or SEQ ID NOs: 26,001-38,677 (e.g., any of SEQ ID NOs: 13,001-24,432 or SEQ ID NOs: 26,001-37,432), comprises the native attachment site of a recombinase enzyme. In some embodiments, a minimal attachment site can be discovered empirically by testing fragments of the integrase proximal sequence, e.g., any of SEQ ID NOs: 13,001-25,677 or SEQ ID NOs: 26,001-38,677 (e.g., any of SEQ ID NOs: 13,001-24,432 or SEQ ID NOs: 26,001-37,432), until the minimal sequence sufficient for a productive recombination reaction is discovered. In some embodiments, an integrase proximal sequence, e.g., any of SEQ ID NOs: 13,001-25,677 or SEQ ID NOs: 26,001-38,677 (e.g., any of SEQ ID NOs: 13,001-24,432 or SEQ ID NOs: 26,001-37,432), or a fragment thereof, is assayed to determine the importance of each nucleotide, e.g., is profiled in a library format as per the methods of Bessen et al. Nat Commun 10:1937 (2019), incorporated herein by reference in its entirety. In some embodiments, a recombinase or a recombinase recognition site is selected through an evolutionary process for altered protein-nucleic acid interaction properties, e.g., a recombinase used in a Gene Writer system is evolved as described in WO2017015545, incorporated herein by reference in its entirety. In some embodiments, a recombinase and/or a recombinase recognition site is discovered through prediction of the ends of an integrated element in a native host genome, e.g., an integrated bacteriophage or integrated plasmid, e.g., as described in Yang et al. Nat Methods 11(12):1261-1266 (2014), incorporated herein by reference in its entirety.

[0643] In some embodiments, an attL or attR site is present in the human genome and the template DNA comprises the cognate site, e.g., the template comprises an attR sequence if the genome comprises an attL sequence. In some embodiments, when attL/R recognition sites are used in a Gene Writing system, the system also comprises a recombination directionality factor (RDF) to enable recognition and recombination of these sites. In some embodiments, a Gene Writer polypeptide and a cognate RDF are provided as a fusion polypeptide. An exemplary recombinase-RDF fusion is described in Olorunniji et al. Nucleic Acids Res 45(14):8635-8645 (2017), which is incorporated herein by reference in its entirety.

[0644] In some embodiments, the protein component(s) of a Gene Writing™ system as described herein may be pre-associated with a template (e.g., a DNA template). For example, in some embodiments, the Gene Writer™ polypeptide may be first combined with the DNA template to form a deoxyribonucleoprotein (DNP) complex. In some embodiments, the DNP may be delivered to cells via, e.g., transfection, nucleofection, virus, vesicle, LNP, exosome, fusosome. In some embodiments, the template DNA may be first associated with a DNA-bending factor, e.g., HMGB1, in order to facilitate excision and transposition when subsequently contacted with the transposase component. Additional description of DNP delivery is found, for example, in Guha and Calos J Mol Biol (2020), which is herein incorporated by reference in its entirety.

[0645] In some embodiments, a polypeptide described herein comprises one or more (e.g., 2, 3, 4, 5) nuclear targeting sequences, for example a nuclear localization sequence (NLS). In some embodiments, the NLS is a bipartite NLS. In some embodiments, an NLS facilitates the import of a protein comprising an NLS into the cell nucleus. In some embodiments, the NLS is fused to the N-terminus of a Gene Writer described herein. In some embodiments, the NLS is fused to the C-terminus of the Gene Writer. In some embodiments, the NLS is fused to the N-terminus or the C-terminus of a Cas domain. In some embodiments, a linker sequence is disposed between the NLS and the neighboring domain of the Gene Writer.

[0646] In some embodiments, an NLS comprises the amino acid sequence MDSLLMNRRKFLYQFKNVRWAKGRRETYLC (SEQ ID NO: 38,967), PKKRKVEGADKRTADGSEFESPKKKRKV (SEQ ID NO: 38,968), RKSGKIAAIWKRPRKPKKKRKV (SEQ ID NO: 38,969), KRTADGSEFESPKKKRKV (SEQ ID NO: 38,970), KKTELQTTNAENKTKKL (SEQ ID NO: 38,971), KRGINDRNFWRGENGRKTR (SEQ ID NO: 38,972), KRPAATKKAGQAKKKK (SEQ ID NO: 38,973), or a functional fragment or variant thereof. Exemplary NLS sequences are also described in PCT/EP2000/011690, the contents of which are incorporated herein by reference for their disclosure of exemplary nuclear localization sequences.

[0647] In some embodiments, the NLS is a bipartite NLS. A bipartite NLS typically comprises two basic amino acid clusters separated by a spacer sequence (which may be, e.g., about 10 amino acids in length). A monopartite NLS typically lacks a spacer. An example of a bipartite NLS is the nucleoplasmin NLS, having the sequence KR[PAATKKAGQA]KKKK (SEQ ID NO: 38,974), wherein the spacer is bracketed. Another exemplary bipartite NLS has the sequence PKKKRKVEGADKRTADGSEFESPKKKRKV (SEQ ID NO: 38,975). Exemplary NLSs are described in International Application WO2020051561, which is herein incorporated by reference in its entirety, including for its disclosures regarding nuclear localization sequences.

### DNA Binding Domains

[0648] In some embodiments, a recombinase polypeptide (e.g., comprised in a system or cell as described herein), e.g., a tyrosine recombinase, comprises a DNA binding domain (e.g., a target binding domain or a template binding domain).

[0649] In some embodiments, a recombinase polypeptide described herein may be redirected to a defined target site in the human genome. In some embodiments, a recombinase described herein may be fused to a heterologous domain, e.g., a heterologous DNA binding domain. In some embodiments, a recombinase may be fused to a heterologous DNA binding domain, e.g., a DNA binding domain from a zinc finger, TAL, meganuclease, transcription factor, or sequence-guided DNA binding element. In some embodiments, a recombinase may be fused to a DNA binding domain from a sequence-guided DNA binding element, e.g., a CRISPR-associated (Cas) DNA binding element, e.g., a Cas9. In some embodiments, a DNA binding element fused to a recombinase domain may contain mutations inactivating other catalytic functions, e.g., mutations inactivating endonuclease activity, e.g., mutations creating an inactivated meganuclease or partially or completely inactivate Cas protein, e.g., mutations creating a nickase Cas9 or dead Cas9 (dCas9). As an example, Standage-Beier et al. CRISPR J2(4):209-222 (2019), describes the use of a dCas9 fused to the Tn3 resolvase (integrase Cas9, iCas9) that employs appropriate spacing of two monomeric fusion proteins at the target site for cooperative targeting for the sequence-specific integration of reporter systems into the genome of HEK293 cells. Additional examples of recombinase targeting by DNA binding domains include zinc finger fusions (zinc-finger recombinases, ZFRs (Gaj et al. Nucleic Acids Res 41(6):3937-3946 (2013)); RecZFs (Gersbach et al. Nucleic Acids Res 38(12):4198-4206 (2010))), TALE fusions (TALE recombinases, TALERs (Mercer et al. Nucleic Acids Res 40(21):11163-11172 (2012))), and dCas9 fusions (recombinase Cas9, recCas9 (Chaikind et al. Nucleic Acids Res 44(20):9758-9770 (2016)); integrase Cas9, iCas9 (Standage-Beier et al. CRISPR J 2(4):209-222 (2019))), all of which are incorporated herein by reference.

[0650] In some embodiments, a DNA binding domain comprises a Streptococcus pyogenes Cas9 (SpCas9) or a functional fragment or variant thereof. In some embodiments, the DNA binding domain comprises a modified SpCas9. In embodiments, the modified SpCas9 comprises a modification that alters protospacer-adjacent motif (PAM) specificity. In embodiments, the PAM has specificity for the nucleic acid sequence 5′-NGT-3′. In embodiments, the modified SpCas9 comprises one or more amino acid substitutions, e.g., at one or more of positions L1111, D1135, G1218, E1219, A1322, of R1335, e.g., selected from L1111R, Di135V, G1218R, E1219F, A1322R, R1335V. In embodiments, the modified SpCas9 comprises the amino acid substitution T1337R and one or more additional amino acid substitutions, e.g., selected from L1111, Di135L, S1136R, G1218S, E1219V, D1332A, D1332S, D1332T, D1332V, D1332L, D1332K, D1332R, R1335Q, T1337, T1337L, T1337Q, T1337L, T1337V, T1337F, T1337S, T1337N, T1337K, T1337H, T1337Q, and T1337M, or corresponding amino acid substitutions thereto. In embodiments, the modified SpCas9 comprises: (i) one or more amino acid substitutions selected from Di135L, S1136R, G1218S, E1219V, A1322R, R1335Q, and T1337; and (ii) one or more amino acid substitutions selected from L1111R, G1218R, E1219F, D1332A, D1332S, D1332T, D1332V, D1332L, D1332K, D1332R, T1337L, T1337I, T1337V, T1337F, T1337S, T1337N, T1337K, T1337R, T1337H, T1337Q, and T1337M, or corresponding amino acid substitutions thereto.

[0651] In some embodiments, the DNA binding domain comprises a Cas domain, e.g., a Cas9 domain. In embodiments, the DNA binding domain comprises a nuclease-active Cas domain, a Cas nickase (nCas) domain, or a nuclease-inactive Cas (dCas) domain. In embodiments, the DNA binding domain comprises a nuclease-active Cas9 domain, a Cas9 nickase (nCas9) domain, or a nuclease-inactive Cas9 (dCas9) domain. In some embodiments, the DNA binding domain comprises a Cas9 domain of Cas9 (e.g., dCas9 and nCas9), Cas12a/Cpf1, Cas12b/C2c1, Cas12c/C2c3, Cas12d/CasY, Cas12e/CasX, Cas12g, Cas12h, or Cas12i. In some embodiments, the DNA binding domain comprises a Cas9 (e.g., dCas9 and nCas9), Cas12a/Cpf1, Cas12b/C2c1, Cas12c/C2c3, Cas12d/CasY, Cas12e/CasX, Cas12g, Cas12h, or Cas12i. In some embodiments, the DNA binding domain comprises an S. pyogenes or an S. thermophilus Cas9, or a functional fragment thereof. In some embodiments, the DNA binding domain comprises a Cas9 sequence, e.g., as described in Chylinski, Rhun, and Charpentier (2013) RNA Biology 10:5, 726-737; incorporated herein by reference. In some embodiments, the DNA binding domain comprises the HNH nuclease subdomain and/or the RuvC1 subdomain of a Cas, e.g., Cas9, e.g., as described herein, or a variant thereof. In some embodiments, the DNA binding domain comprises Cas12a/Cpf1, Cas12b/C2c1, Cas12c/C2c3, Cas12d/CasY, Cas12e/CasX, Cas12g, Cas12h, or Cas12i. In some embodiments, the DNA binding domain comprises a Cas polypeptide (e.g., enzyme), or a functional fragment thereof. In embodiments, the Cas polypeptide (e.g., enzyme) is selected from Cas1, CasiB, Cas2, Cas3, Cas4, Cas5, Cas5d, Cas5t, Cas5h, Cas5a, Cas6, Cas7, Cas8, Cas8a, Cas8b, Cas8c, Cas9 (e.g., Csn1 or Csx12), Cas10, Cas10d, Cas12a/Cpf1, Cas12b/C2c1, Cas12c/C2c3, Cas12d/CasY, Cas12e/CasX, Cas12g, Cas12h, Cas12i, Csy1, Csy2, Csy3, Csy4, Cse1, Cse2, Cse3, Cse4, Cse5e, Csc1, Csc2, Csa5, Csn1, Csn2, Csm1, Csm2, Csm3, Csm4, Csm5, Csm6, Cmr1, Cmr3, Cmr4, Cmr5, Cmr6, Csb1, Csb2, Csb3, Csx17, Csx14, Csx10, Csx16, CsaX, Csx3, Csx1, Csx1S, Csx11, Csf1, Csf2, CsO, Csf4, Csd1, Csd2, Cst1, Cst2, Csh1, Csh2, Csa1, Csa2, Csa3, Csa4, Csa5, Type II Cas effector proteins, Type V Cas effector proteins, Type VI Cas effector proteins, CARF, DinG, Cpf1, Cas12b/C2c1, Cas12c/C2c3, Cas12b/C2c1, Cas12c/C2c3, SpCas9(K855A), eSpCas9(1.1), SpCas9-HF1, hyper accurate Cas9 variant (HypaCas9), homologues thereof, modified or engineered versions thereof, and/or functional fragments thereof. In embodiments, the Cas9 comprises one or more substitutions, e.g., selected from H840A, D10A, P475A, W476A, N477A, D1125A, W1126A, and D1127A. In embodiments, the Cas9 comprises one or more mutations at positions selected from: D10, G12, G17, E762, H840, N854, N863, H982, H983, A984, D986, and/or A987, e.g., one or more substitutions selected from D10A, G12A, G17A, E762A, H840A, N854A, N863A, H982A, H983A, A984A, and/or D986A. In some embodiments, the DNA binding domain comprises a Cas (e.g., Cas9) sequence from Corynebacterium ulcerans, Corynebacterium diphtheria, Spiroplasma syrphidicola, Prevotella intermedia, Spiroplasma taiwanense, Streptococcus iniae, Belliella baltica, Psychroflexus torquis, Streptococcus thermophilus, Listeria innocua, Campylobacter jejuni, Neisseria meningitidis, Streptococcus pyogenes, or Staphylococcus aureus, or a fragment or variant thereof.

[0652] In some embodiments, the DNA binding domain comprises a Cpf1 domain, e.g., comprising one or more substitutions, e.g., at position D917, E1006A, D1255 or any combination thereof, e.g., selected from D917A, E1006A, D1255A, D917A/E1006A, D917A/D1255A, E1006A/D1255A, and D917A/E1006A/D1255A.

[0653] In some embodiments, the DNA binding domain comprises spCas9, spCas9-VRQR, spCas9-VRER, xCas9 (sp), saCas9, saCas9-KKH, spCas9-MQKSER, spCas9-LRKIQK, or spCas9-LRVSQL.

[0654] In some embodiments, the DNA-binding domain comprises an amino acid sequence as listed in Table 3 below, or an amino acid sequence having at least 80%, 85%, 90%, 95%, 96%, 97%, 98%, or 99% sequence identity thereto. In some embodiments, the DNA-binding domain comprises an amino acid sequence that has no more than 1, 2, 3, 4, 5, 6, 7, 8, 9, 10, 11, 12, 13, 14, 15, 16, 17, 18, 19, 20, 21, 22, 23, 24, 25, 26, 27, 28, 29, 30, 31, 32, 33, 34, 35, 36, 37, 38, 39, 40, 41, 42, 43, 44, 45, 46, 47, 48, 49, or 50 differences (e.g., mutations) relative to any of the amino acid sequences described herein.

TABLE 3
Each of the Reference Sequences are incorporated by reference in their entirety.

| Name | Amino Acid Sequence or Reference Sequence |
|---|---|
| Streptococcus pyogenes Cas9 | |
| Exemplary Linker | SGSETPGTSESATPES (SEQ ID NO: 38956) |
| Exemplary Linker Motif | (SGGS)ₙ (SEQ ID NO: 38957) |
| Exemplary Linker Motif | (GGGS)ₙ (SEQ ID NO: 38958) |
| Exemplary Linker Motif | (GGGGS)ₙ (SEQ ID NO: 38959) |
| Exemplary Linker Motif | (G)ₙ |
| Exemplary Linker Motif | (EAAAK)ₙ (SEQ ID NO: 38960) |
| Exemplary Linker Motif | (GGS)ₙ |
| Exemplary Linker Motif | (XP)ₙ |
| Cas9 from Streptococcus | NCBI Reference Sequence: NC_002737.2 and Uniprot Reference |
| pyogenes | Sequence: Q99ZW2 |
| Cas9 from Corynebacterium | NCBI Refs: NC_015683.1, NC_017317.1 |
| ulcerans | |
| Cas9 from Corynebacterium | NCBI Refs: NC_016782.1, NC_016786.1 |
| diphtheria | |
| Cas9 from Spiroplasma | NCBI Ref: NC_021284.1 |
| syrphidicola | |
| Cas9 from Prevotella | NCBI Ref: NC_017861.1 |
| intermedia | |
| Cas9 from Spiroplasma | NCBI Ref: NC_021846.1 |
| taiwanense | |
| Cas9 from Streptococcus iniae | NCBI Ref: NC_021314.1 |
| Cas9 from Belliella baltica | NCBI Ref: NC_018010.1 |
| Cas9 from Psychroflexus | NCBI Ref: NC_018721.1 |
| torquisI | |
| Cas9 from Streptococcus | NCBI Ref: YP_820832.1 |
| thermophilus | |
| Cas9 from Listeria innocua | NCBI Ref: NP_472073.1 |
| Cas9 from Campylobacter | NCBI Ref: YP_002344900.1 |
| jejuni | |
| Cas9 from Neisseria | NCBI Ref: YP_002342100.1 |
| meningitidis | |
| dCas9 (D10A and H840A) | |
| Catalytically inactive Cas9 | |
| (dCas9) | |
| Cas9 nickase (nCas9) | |
| Catalytically active Cas9 | |
| CasY | ((ncbi.nlm.nih.gov/protein/APG80656.1) |
| | >APG80656.1 CRISPR-associated protein CasY [uncultured |
| | Parcubacteria group bacterium]) |
| CasX | uniprot.org/uniprot/F0NN87; uniprot.org/uniprot/F0NH53 |
| CasX | >tr\|F0NH53\|F0NH53_SULIR CRISPR associated protein, Casx OS = |
| | Sulfolobus islandicus (strain REY15A) GN = SiRe_0771 |
| | PE = 4 SV = 1 |
| Deltaproteobacteria CasX | |
| Cas12b/C2cl | ((uniprot.org/uniprot/TOD7A2#2) sp\|T0D7A2\|C2C1_ALIAG |
| | CRISPR-associated endonuclease C2c1 OS = Alicyclobacillus |
| | acidoterrestris (strain ATCC 49025/DSM 3922/CIP 106132/NCIMB |
| | 13137/GD3B) GN = c2c1 PE = 1 SV = 1) |
| BhCas12b (Bacillus hisashii) | NCBI Reference Sequence: WP_095142515 |
| BvCas12b (Bacillus sp. V3-13) | NCBI Reference Sequence: WP_101661451.1 |
| Wild-type Francisella novicida | |
| Cpf1 | |
| Francisella novicida Cpfl | |
| D917A | |
| Francisella novicida Cpf1 | |
| E1006A | |
| Francisella novicida Cpfl | |
| D1255A | |
| Francisella novicida Cpf1 | |
| D917A/E1006A | |
| Francisella novicida Cpf1 | |
| D917A/D1255A | |
| Francisella novicida Cpfl | |
| E1006A/D1255A | |
| Francisella novicida Cpfl | |
| D917A/E1006A | |
| SaCas9 | |
| SaCas9n | |
| PAM-binding SpCas9 | |
| PAM-binding SpCas9n | |
| PAM-binding SpEQR Cas9 | |
| PAM-binding SpVQR Cas9 | |
| PAM-binding SpVRER Cas9 | |
| PAM-binding SpVRQR Cas9 | |
| SpyMacCas9 | |

[0655] In some embodiments, the Cas polypeptide binds a gRNA that directs DNA binding. In some embodiments, the gRNA comprises, e.g., from 5′ to 3′ (1) a gRNA spacer; (2) a gRNA scaffold. In some embodiments:
[0656] (1) Is a Cas9 spacer of ˜18-22 nt, e.g., is 20 nt
[0657] (2) Is a gRNA scaffold comprising one or more hairpin loops, e.g., 1, 2, of 3 loops for associating the template with a nickase Cas9 domain. In some embodiments, the gRNA scaffold carries the sequence, from 5′ to 3′,

(SEQ ID NO: 38961)
GTTTTAGAGCTAGAAATAGCAAGTTAAAATAAGGCTAGTCCGTTATCAA
CTTGAAAAAGTGGGACCGAGTCGGTCC.

[0658] In some embodiments, a Gene Writing system described herein is used to make an edit in HEK293, K562, U2OS, or HeLa cells. In some embodiment, a Gene Writing system is used to make an edit in primary cells, e.g., primary cortical neurons from E18.5 mice.

[0659] In some embodiments, a system or method described herein involves a CRISPR DNA targeting enzyme or system described in US Pat. App. Pub. No. 20200063126, 20190002889, or 20190002875 (each of which is incorporated by reference herein in its entirety) or a functional fragment or variant thereof. For instance, in some embodiments, a GeneWriter polypeptide or Cas endonuclease described herein comprises a polypeptide sequence of any of the applications mentioned in this paragraph, and in some embodiments a guide RNA comprises a nucleic acid sequence of any of the applications mentioned in this paragraph.

[0660] In some embodiments, the DNA binding domain (e.g., a target binding domain or a template binding domain) comprises a meganuclease domain, or a functional fragment thereof. In some embodiments, the meganuclease domain possesses endonuclease activity, e.g., double-strand cleavage and/or nickase activity. In other embodiments, the meganuclease domain has reduced activity, e.g., lacks endonuclease activity, e.g., the meganuclease is catalytically inactive. In some embodiments, a catalytically inactive meganuclease is used as a DNA binding domain, e.g., as described in Fonfara et al. Nucleic Acids Res 40(2):847-860 (2012), incorporated herein by reference in its entirety. In embodiments, the DNA binding domain comprises one or more modifications relative to a wild-type DNA binding domain, e.g., a modification via directed evolution, e.g., phage-assisted continuous evolution (PACE).

### Inteins

[0661] In some embodiments, as described in more detail below, Intein-N may be fused to the N-terminal portion of a polypeptide (e.g., a Gene Writer polypeptide) described herein, e.g., at a first domain. In embodiments, intein-C may be fused to the C-terminal portion of the polypeptide described herein (e.g., at a second domain), e.g., for the joining of the N-terminal portion to the C-terminal portion, thereby joining the first and second domains. In some embodiments, the first and second domains are each independently chosen from a DNA binding domain and a catalytic domain, e.g., a recombinase domain. In some embodiments, a single domain is split using the intein strategy described herein, e.g., a DNA binding domain, e.g., a dCas9 domain.

[0662] In some embodiments, a system or method described herein involves an intein that is a self-splicing protein intron (e.g., peptide), e.g., which ligates flanking N-terminal and C-terminal exteins (e.g., fragments to be joined). An intein may, in some instances, comprise a fragment of a protein that is able to excise itself and join the remaining fragments (the exteins) with a peptide bond in a process known as protein splicing. Inteins are also referred to as “protein inons.” The process of an intein excising itself and joining the remaining portions of the protein is herein termed “protein splicing” or “intein-mediated protein splicing.” In some embodiments, an intein of a precursor protein (an intein containing protein prior to intein-mediated protein splicing) comes from two genes. Such intein is referred to herein as a split intein (e.g., split intein-N and split intein-C). For example, in cyanobacteria, DnaE, the catalytic subunit a of DNA polymerase III, is encoded by two separate genes, dnaE-n and dnaE-c. The intein encoded by the dnaE-n gene may be herein referred as “intein-N.” The intein encoded by the dnaE-c gene may be herein referred as “intein-C.”

[0663] Use of inteins for joining heterologous protein fragments is described, for example, in Wood et al., J. Biol. Chem. 289(21); 14512-9 (2014) (incorporated herein by reference in its entirety). For example, when fused to separate protein fragments, the inteins IntN and IntC may recognize each other, splice themselves out, and/or simultaneously ligate the flanking N- and C-terminal exteins of the protein fragments to which they were fused, thereby reconstituting a full-length protein from the two protein fragments.

[0664] In some embodiments, a synthetic intein based on the dnaE intein, the Cfa-N (e.g., split intein-N) and Cfa-C (e.g., split intein-C) intein pair, is used. Examples of such inteins have been described, e.g., in Stevens et al., J Am Chem Soc. 2016 Feb. 24; 138(7):2162-5 (incorporated herein by reference in its entirety). Non-limiting examples of intein pairs that may be used in accordance with the present disclosure include: Cfa DnaE intein, Ssp GyrB intein, Ssp DnaX intein, Ter DnaE3 intein, Ter ThyX intein, Rma DnaB intein and Cne Prp8 intein (e.g., as described in U.S. Pat. No. 8,394,604, incorporated herein by reference.

[0665] In some embodiments, Intein-N and intein-C may be fused to the N-terminal portion of the split Cas9 and the C-terminal portion of a split Cas9, respectively, for the joining of the N-terminal portion of the split Cas9 and the C-terminal portion of the split Cas9. For example, in some embodiments, an intein-N is fused to the C-terminus of the N-terminal portion of the split Cas9, i.e., to form a structure of N-[N-terminal portion of the split Cas9]-[intein-N]-C. In some embodiments, an intein-C is fused to the N-terminus of the C-terminal portion of the split Cas9, i.e., to form a structure of N-[intein-C]-[C-terminal portion of the split Cas9]-C. The mechanism of intein-mediated protein splicing for joining the proteins the inteins are fused to (e.g., split Cas9) is described in Shah et al., Chem Sci. 2014; 5( ):446-461, incorporated herein by reference. Methods for designing and using inteins are known in the art and described, for example by WO2020051561, WO2014004336, WO2017132580, US20150344549, and US20180127780, each of which is incorporated herein by reference in their entirety.

[0666] In some embodiments, a split refers to a division into two or more fragments. In some embodiments, a split Cas9 protein or split Cas9 comprises a Cas9 protein that is provided as an N-terminal fragment and a C-terminal fragment encoded by two separate nucleotide sequences. The polypeptides corresponding to the N-terminal portion and the C-terminal portion of the Cas9 protein may be spliced to form a reconstituted Cas9 protein. In embodiments, the Cas9 protein is divided into two fragments within a disordered region of the protein, e.g., as described in Nishimasu et al., Cell, Volume 156, Issue 5, pp. 935-949, 2014, or as described in Jiang et al. (2016) Science 351: 867-871 and PDB file: 5F9R (each of which is incorporated herein by reference in its entirety). A disordered region may be determined by one or more protein structure determination techniques known in the art, including, without limitation, X-ray crystallography, NMR spectroscopy, electron microscopy (e.g., cryoEM), and/or in silico protein modeling. In some embodiments, the protein is divided into two fragments at any C, T, A, or S, e.g., within a region of SpCas9 between amino acids A292-G364, F445-K483, or E565-T637, or at corresponding positions in any other Cas9, Cas9 variant (e.g., nCas9, dCas9), or other napDNAbp. In some embodiments, protein is divided into two fragments at SpCas9 T310, T313, A456, S469, or C574. In some embodiments, the process of dividing the protein into two fragments is referred to as splitting the protein.

[0667] In some embodiments, a protein fragment ranges from about 2-1000 amino acids (e.g., between 2-10, 10-50, 50-100, 100-200, 200-300, 300-400, 400-500, 500-600, 600-700, 700-800, 800-900, or 900-1000 amino acids) in length. In some embodiments, a protein fragment ranges from about 5-500 amino acids (e.g., between 5-10, 10-50, 50-100, 100-200, 200-300, 300-400, or 400-500 amino acids) in length. In some embodiments, a protein fragment ranges from about 20-200 amino acids (e.g., between 20-30, 30-40, 40-50, 50-100, or 100-200 amino acids) in length.

[0668] In some embodiments, a portion or fragment of a Gene Writer polypeptide, e.g., as described herein, is fused to an intein. The nuclease can be fused to the N-terminus or the C-terminus of the intein. In some embodiments, a portion or fragment of a fusion protein is fused to an intein and fused to an AAV capsid protein. The intein, nuclease and capsid protein can be fused together in any arrangement (e.g., nuclease-intein-capsid, intein-nuclease-capsid, capsid-intein-nuclease, etc.). In some embodiments, the N-terminus of an intein is fused to the C-terminus of a fusion protein and the C-terminus of the intein is fused to the N-terminus of an AAV capsid protein.

[0669] In some embodiments, a Gene Writer polypeptide (e.g., comprising a nickase Cas9 domain) is fused to intein-N and a polypeptide comprising a polymerase domain is fused to an intein-C.

[0670] Exemplary nucleotide and amino acid sequences of interns are provided below:

DnaE Intein-N DNA:
(SEQ ID NO: 38,976)
TGCCTGTCATACGAAACCGAGATACTGACAGTAGAATATGGCCTTCTGCCAATCGGG
AAGATTGTGGAGAAACGGATAGAATGCACAGTTTACTCTGTCGATAACAATGGTAA
CATTTATACTCAGCCAGTTGCCCAGTGGCACGACCGGGGAGAGCAGGAAGTATTCG
AATACTGTCTGGAGGATGGAAGTCTCATTAGGGCCACTAAGGACCACAAATTTATG
ACAGTCGATGGCCAGATGCTGCCTATAGACGAAATCTTTGAGCGAGAGTTGGACCTC
ATGCGAGTTGACAACCTTCCTAAT
DnaE Intein-N Protein:
(SEQ ID NO: 38,977)
CLSYETEILTVEYGLLPIGKIVEKRIECTVYSVDNNGNIYTQPVAQWHDRGEQEVFEYCL
EDGSLIRATKDHKFMTVDGQMLPIDEIFERELDLMRVDNLPN
DnaE Intein-C DNA:
(SEQ ID NO: 38,978)
ATGATCAAGATAGCTACAAGGAAGTATCTTGGCAAACAAAACGTTTATGATATTGG
AGTCGAAAGAGATCACAACTTTGCTCTGAAGAACGGATTCATAGCTTCTAAT
Intein-C:
(SEQ ID NO: 38,979)
MIKIATRKYLGKQNVYDIGVERDHNFALKNGFIASN
Cfa-N DNA:
(SEQ ID NO: 38,980)
TGCCTGTCTTATGATACCGAGATACTTACCGTTGAATATGGCTTCTTGCCTATTGGAA
AGATTGTCGAAGAGAGAATTGAATGCACAGTATATACTGTAGACAAGAATGGTTTC
GTTTACACACAGCCCATTGCTCAATGGCACAATCGCGGCGAACAAGAAGTATTTGA
GTACTGTCTCGAGGATGGAAGCATCATACGAGCAACTAAAGATCATAAATTCATGA
CCACTGACGGGCAGATGTTGCCAATAGATGAGATATTCGAGCGGGGCTTGGATCTC
AAACAAGTGGATGGATTG CCA
Cfa-N Protein:
(SEQ ID NO: 38,981)
CLSYDTEILTVEYGFLPIGKIVEERIECTVYTVDKNGFVYTQPIAQWHNRGEQEVFEYCL
EDGSIIRATKDHKFMTTDGQMLPIDEIFERGLDLKQVDGLP
Cfa-C DNA:
(SEQ ID NO: 38,982)
ATGAAGAGGACTGCCGATGGATCAGAGTTTGAATCTCCCAAGAAGAAGAGGAAAGT
AAAGATAATATCTCGAAAAAGTCTTGGTACCCAAAATGTCTATGATATTGGAGTGGA
GAAAGATCACAACTTCCTTCTCAAGAACGGTCTCGTAGCCAGCAAC
Cfa-C Protein:
(SEQ ID NO: 38,983)
MKRTADGSEFESPKKKRKVKIISRKSLGTQNVYDIGVEKDHNFLLKNGLVASN

### Genomic Safe Harbor Sites

[0671] In some embodiments, a Gene Writer targets a genomic safe harbor site (e.g., directs insertion of a heterologous object sequence into a position having a safe harbor score of at least 3, 4, 5, 6, 7, or 8). In some embodiments the genomic safe harbor site is a Natural Harbor™ site. In some embodiments, a Natural Harbor™ site is derived from the native target of a mobile genetic element, e.g., a recombinase, transposon, or retrovirus. The native targets of mobile elements may serve as ideal locations for genomic integration given their evolutionary selection. In some embodiments the Natural Harbor™ site is ribosomal DNA (rDNA). In some embodiments the Natural Harbor™ site is 5S rDNA, 18S rDNA, 5.8S rDNA, or 28S rDNA. In some embodiments the Natural Harbor™ site is the Mutsu site in 5S rDNA. In some embodiments the Natural Harbor™ site is the R2 site, the R5 site, the R6 site, the R4 site, the R1 site, the R9 site, or the RT site in 28S rDNA. In some embodiments the Natural Harbor™ site is the R8 site or the R7 site in 18S rDNA. In some embodiments the Natural Harbor™ site is DNA encoding transfer RNA (tRNA). In some embodiments the Natural Harbor™ site is DNA encoding tRNA-Asp or tRNA-Glu. In some embodiments the Natural Harbor™ site is DNA encoding spliceosomal RNA. In some embodiments the Natural Harbor™ site is DNA encoding small nuclear RNA (snRNA) such as U2 snRNA.

[0672] Thus, in some aspects, the present disclosure provides a method comprising comprises using a GeneWriter system described herein to insert a heterologous object sequence into a Natural Harbor™ site. In some embodiments, the Natural Harbor™ site is a site described in Table 4A below. In some embodiments, the heterologous object sequence is inserted within 20, 50, 100, 150, 200, 250, 500, or 1000 base pairs of the Natural Harbor™ site. In some embodiments, the heterologous object sequence is inserted within 0.1 kb, 0.25 kb, 0.5 kb, 0.75, kb, 1 kb, 2 kb, 3 kb, 4 kb, 5 kb, 7.5 kb, 10 kb, 15 kb, 20 kb, 25 kb, 50, 75 kb, or 100 kb of the Natural Harbor™ site. In some embodiments, the heterologous object sequence is inserted into a site having at least 70%, 75%, 80%, 85%, 90%, 95%, 96%, 97%, 98%, or 99% identity to a sequence shown in Table 4A. In some embodiments, the heterologous object sequence is inserted within 20, 50, 100, 150, 200, 250, 500, or 1000 base pairs, or within 0.1 kb, 0.25 kb, 0.5 kb, 0.75, kb, 1 kb, 2 kb, 3 kb, 4 kb, 5 kb, 7.5 kb, 10 kb, 15 kb, 20 kb, 25 kb, 50, 75 kb, or 100 kb, of a site having at least 70%, 75%, 80%, 85%, 90%, 95%, 96%, 97%, 98%, or 99% identity to a sequence shown in Table 4A. In some embodiments, the heterologous object sequence is inserted within a gene indicated in Column 5 of Table 4A, or within 20, 50, 100, 150, 200, 250, 500, or 1000 base pairs, or within 0.1 kb, 0.25 kb, 0.5 kb, 0.75, kb, 1 kb, 2 kb, 3 kb, 4 kb, 5 kb, 7.5 kb, 10 kb, 15 kb, 20 kb, 25 kb, 50, 75 kb, or 100 kb, of the gene.

TABLE 4A
Natural Harbor ™ sites. Column 1 indicates a retrotransposon that inserts into the Natural
Harbor ™ site. Column 2 indicates the gene at the Natural Harbor ™ site. Columns 3 and 4 show
exemplary human genome sequence 5′ and 3′ of the insertion site (for example, 250 bp).
Columns 5 and 6 list the example gene symbol and corresponding Gene ID.

| | | | | Example | |
|---|---|---|---|---|---|
| Target | Target | | | Gene | Example |
| Site | Gene | 5′ flanking sequence | 3′ flanking sequence | Symbol | Gene ID |
| R2 | 28S | CCGGTCCCCCCCGCC | GTAGCCAAATGCCTC | RNA28SN1 | 106632264 |
| | rDNA | GGGTCCGCCCCCGGG | GTCATCTAATTAGTG | | |
| | | GCCGCGGTTCCGCGC | ACGCGCATGAATGGA | | |
| | | GGCGCCTCGCCTCGG | TGAACGAGATTCCCA | | |
| | | CCGGCGCCTAGCAGC | CTGTCCCTACCTACTA | | |
| | | CGACTTAGAACTGGT | TCCAGCGAAACCACA | | |
| | | GCGGACCAGGGGAAT | GCCAAGGGAACGGGC | | |
| | | CCGACTGTTTAATTA | TTGGCGGAATCAGCG | | |
| | | AAACAAAGCATCGCG | GGGAAAGAAGACCCT | | |
| | | AAGGCCCGCGGCGGG | GTTGAGCTTGACTCT | | |
| | | TGTTGACGCGATGTG | AGTCTGGCACGGTGA | | |
| | | ATTTCTGCCCAGTGCT | AGAGACATGAGAGGT | | |
| | | CTGAATGTCAAAGTG | GTAGAATAAGTGGGA | | |
| | | AAGAAATTCAATGAA | GGCCCCCGGCGCCCC | | |
| | | GCGCGGGTAAACGGC | CCCGGTGTCCCCGCG | | |
| | | GGGAGTAACTATGAC | AGGGGCCCGGGGCGG | | |
| | | TCTCTTAAG (SEQ ID | GGTCCGCCG (SEQ ID | | |
| | | NO: 38,984) | NO: 38,985) | | |
| R4 | 28S | GCGGTTCCGCGCGGC | CGCATGAATGGATGA | RNA28SN1 | 106632264 |
| | rDNA | GCCTCGCCTCGGCCG | ACGAGATTCCCACTG | | |
| | | GCGCCTAGCAGCCGA | TCCCTACCTACTATCC | | |
| | | CTTAGAACTGGTGCG | AGCGAAACCACAGCC | | |
| | | GACCAGGGGAATCCG | AAGGGAACGGGCTTG | | |
| | | ACTGTTTAATTAAAA | GCGGAATCAGCGGGG | | |
| | | CAAAGCATCGCGAAG | AAAGAAGACCCTGTT | | |
| | | GCCCGCGGCGGGTGT | GAGCTTGACTCTAGT | | |
| | | TGACGCGATGTGATT | CTGGCACGGTGAAGA | | |
| | | TCTGCCCAGTGCTCTG | GACATGAGAGGTGTA | | |
| | | AATGTCAAAGTGAAG | GAATAAGTGGGAGGC | | |
| | | AAATTCAATGAAGCG | CCCCGGCGCCCCCCC | | |
| | | CGGGTAAACGGCGGG | GGTGTCCCCGCGAGG | | |
| | | AGTAACTATGACTCT | GGCCCGGGGCGGGGT | | |
| | | CTTAAGGTAGCCAAA | CCGCCGGCCCTGCGG | | |
| | | TGCCTCGTCATCTAAT | GCCGCCGGTGAAATA | | |
| | | TAGTGACG (SEQ ID | CCACTACTC (SEQ ID | | |
| | | NO: 38,986) | NO: 38,987) | | |
| R5 | 28S | TCCCCCCCGCCGGGT | CCAAATGCCTCGTCA | RNA28SN1 | 106632264 |
| | rDNA | CCGCCCCCGGGGCCG | TCTAATTAGTGACGC | | |
| | | CGGTTCCGCGCGGCG | GCATGAATGGATGAA | | |
| | | CCTCGCCTCGGCCGG | CGAGATTCCCACTGT | | |
| | | CGCCTAGCAGCCGAC | CCCTACCTACTATCCA | | |
| | | TTAGAACTGGTGCGG | GCGAAACCACAGCCA | | |
| | | ACCAGGGGAATCCGA | AGGGAACGGGCTTGG | | |
| | | CTGTTTAATTAAAAC | CGGAATCAGCGGGGA | | |
| | | AAAGCATCGCGAAGG | AAGAAGACCCTGTTG | | |
| | | CCCGCGGCGGGTGTT | AGCTTGACTCTAGTCT | | |
| | | GACGCGATGTGATTT | GGCACGGTGAAGAGA | | |
| | | CTGCCCAGTGCTCTG | CATGAGAGGTGTAGA | | |
| | | AATGTCAAAGTGAAG | ATAAGTGGGAGGCCC | | |
| | | AAATTCAATGAAGCG | CCGGCGCCCCCCCGG | | |
| | | CGGGTAAACGGCGGG | TGTCCCCGCGAGGGG | | |
| | | AGTAACTATGACTCT | CCCGGGGCGGGGTCC | | |
| | | CTTAAGGTAG (SEQ | GCCGGCCC (SEQ ID | | |
| | | ID NO: 38,988) | NO: 38,989) | | |
| R9 | 28S | CGGCGCGCTCGCCGG | TAGCTGGTTCCCTCCG | RNA28SN1 | 106632264 |
| | rDNA | CCGAGGTGGGATCCC | AAGTTTCCCTCAGGA | | |
| | | GAGGCCTCTCCAGTC | TAGCTGGCGCTCTCG | | |
| | | CGCCGAGGGCGCACC | CAGACCCGACGCACC | | |
| | | ACCGGCCCGTCTCGC | CCCGCCACGCAGTTT | | |
| | | CCGCCGCGCCGGGGA | TATCCGGTAAAGCGA | | |
| | | GGTGGAGCACGAGCG | ATGATTAGAGGTCTT | | |
| | | CACGTGTTAGGACCC | GGGGCCGAAACGATC | | |
| | | GAAAGATGGTGAACT | TCAACCTATTCTCAA | | |
| | | ATGCCTGGGCAGGGC | ACTTTAAATGGGTAA | | |
| | | GAAGCCAGAGGAAAC | GAAGCCCGGCTCGCT | | |
| | | TCTGGTGGAGGTCCG | GGCGTGGAGCCGGGC | | |
| | | TAGCGGTCCTGACGT | GTGGAATGCGAGTGC | | |
| | | GCAAATCGGTCGTCC | CTAGTGGGCCACTTTT | | |
| | | GACCTGGGTATAGGG | GGTAAGCAGAACTGG | | |
| | | GCGAAAGACTAATCG | CGCTGCGGGATGAAC | | |
| | | AACCATCTAG (SEQ | CGAACGCC (SEQ ID | | |
| | | ID NO: 38,990) | NO: 38,991) | | |
| R8 | 18S | GCATTCGTATTGCGC | TGAAACTTAAAGGAA | RNA18SN1 | 106631781 |
| | rDNA | CGCTAGAGGTGAAAT | TTGACGGAAGGGCAC | | |
| | | TCTTGGACCGGCGCA | CACCAGGAGTGGAGC | | |
| | | AGACGGACCAGAGCG | CTGCGGCTTAATTTG | | |
| | | AAAGCATTTGCCAAG | ACTCAACACGGGAAA | | |
| | | AATGTTTTCATTAATC | CCTCACCCGGCCCGG | | |
| | | AAGAACGAAAGTCGG | ACACGGACAGGATTG | | |
| | | AGGTTCGAAGACGAT | ACAGATTGATAGCTC | | |
| | | CAGATACCGTCGTAG | TTTCTCGATTCCGTGG | | |
| | | TTCCGACCATAAACG | GTGGTGGTGCATGGC | | |
| | | ATGCCGACCGGCGAT | CGTTCTTAGTTGGTGG | | |
| | | GCGGCGGCGTTATTC | AGCGATTTGTCTGGTT | | |
| | | CCATGACCCGCCGGG | AATTCCGATAACGAA | | |
| | | CAGCTTCCGGGAAAC | CGAGACTCTGGCATG | | |
| | | CAAAGTCTTTGGGTT | CTAACTAGTTACGCG | | |
| | | CCGGGGGGAGTATGG | ACCCCCGAGCGGTCG | | |
| | | TTGCAAAGC (SEQ ID | GCGTCCC (SEQ ID NO: | | |
| | | NO: 38,992) | 38,993) | | |
| R4- | tRNA- | | | TRD- | 100189207 |
| 2_SRa | Asp | | | GTC1-1 | |
| LIN25_ | tRNA- | | | TRE- | 100189384 |
| SM | Glu | | | CTC1-1 | |
| R1 | 28S | TAGCAGCCGACTTAG | ACCTACTATCCAGCG | RNA28SN1 | 106632264 |
| | rDNA | AACTGGTGCGGACCA | AAACCACAGCCAAGG | | |
| | | GGGGAATCCGACTGT | GAACGGGCTTGGCGG | | |
| | | TTAATTAAAACAAAG | AATCAGCGGGGAAAG | | |
| | | CATCGCGAAGGCCCG | AAGACCCTGTTGAGC | | |
| | | CGGCGGGTGTTGACG | TTGACTCTAGTCTGGC | | |
| | | CGATGTGATTTCTGCC | ACGGTGAAGAGACAT | | |
| | | CAGTGCTCTGAATGT | GAGAGGTGTAGAATA | | |
| | | CAAAGTGAAGAAATT | AGTGGGAGGCCCCCG | | |
| | | CAATGAAGCGCGGGT | GCGCCCCCCCGGTGT | | |
| | | AAACGGCGGGAGTAA | CCCCGCGAGGGGCCC | | |
| | | CTATGACTCTCTTAAG | GGGGCGGGGTCCGCC | | |
| | | GTAGCCAAATGCCTC | GGCCCTGCGGGCCGC | | |
| | | GTCATCTAATTAGTG | CGGTGAAATACCACT | | |
| | | ACGCGCATGAATGGA | ACTCTGATCGTTTTTT | | |
| | | TGAACGAGATTCCCA | CACTGACCCGGTGAG | | |
| | | CTGTCCCT (SEQ ID | GCGGGGGG (SEQ ID | | |
| | | NO: 38,994) | NO: 38,995) | | |
| R6 | 28S | CCCCCCGCCGGGTCC | AAATGCCTCGTCATC | RNA28SN1 | 106632264 |
| | rDNA | GCCCCCGGGGCCGCG | TAATTAGTGACGCGC | | |
| | | GTTCCGCGCGGCGCC | ATGAATGGATGAACG | | |
| | | TCGCCTCGGCCGGCG | AGATTCCCACTGTCC | | |
| | | CCTAGCAGCCGACTT | CTACCTACTATCCAG | | |
| | | AGAACTGGTGCGGAC | CGAAACCACAGCCAA | | |
| | | CAGGGGAATCCGACT | GGGAACGGGCTTGGC | | |
| | | GTTTAATTAAAACAA | GGAATCAGCGGGGAA | | |
| | | AGCATCGCGAAGGCC | AGAAGACCCTGTTGA | | |
| | | CGCGGCGGGTGTTGA | GCTTGACTCTAGTCTG | | |
| | | CGCGATGTGATTTCT | GCACGGTGAAGAGAC | | |
| | | GCCCAGTGCTCTGAA | ATGAGAGGTGTAGAA | | |
| | | TGTCAAAGTGAAGAA | TAAGTGGGAGGCCCC | | |
| | | ATTCAATGAAGCGCG | CGGCGCCCCCCCGGT | | |
| | | GGTAAACGGCGGGAG | GTCCCCGCGAGGGGC | | |
| | | TAACTATGACTCTCTT | CCGGGGCGGGGTCCG | | |
| | | AAGGTAGCC (SEQ ID | CCGGCCCTG (SEQ ID | | |
| | | NO: 38,996) | NO: 38,997) | | |
| R7 | 18S | GCGCAAGACGGACCA | GGAGCCTGCGGCTTA | RNA18SN1 | 106631781 |
| | rDNA | GAGCGAAAGCATTTG | ATTTGACTCAACACG | | |
| | | CCAAGAATGTTTTCA | GGAAACCTCACCCGG | | |
| | | TTAATCAAGAACGAA | CCCGGACACGGACAG | | |
| | | AGTCGGAGGTTCGAA | GATTGACAGATTGAT | | |
| | | GACGATCAGATACCG | AGCTCTTTCTCGATTC | | |
| | | TCGTAGTTCCGACCA | CGTGGGTGGTGGTGC | | |
| | | TAAACGATGCCGACC | ATGGCCGTTCTTAGTT | | |
| | | GGCGATGCGGCGGCG | GGTGGAGCGATTTGT | | |
| | | TTATTCCCATGACCCG | CTGGTTAATTCCGAT | | |
| | | CCGGGCAGCTTCCGG | AACGAACGAGACTCT | | |
| | | GAAACCAAAGTCTTT | GGCATGCTAACTAGT | | |
| | | GGGTTCCGGGGGGAG | TACGCGACCCCCGAG | | |
| | | TATGGTTGCAAAGCT | CGGTCGGCGTCCCCC | | |
| | | GAAACTTAAAGGAAT | AACTTCTTAGAGGGA | | |
| | | TGACGGAAGGGCACC | CAAGTGGCGTTCAGC | | |
| | | ACCAGGAGT (SEQ ID | CACCCGAG (SEQ ID | | |
| | | NO: 38,998) | NO: 38,999) | | |
| RT | 28S | GGCCGGGCGCGACCC | AACTGGCTTGTGGCG | RNA28SN1 | 106632264 |
| | rDNA | GCTCCGGGGACAGTG | GCCAAGCGTTCATAG | | |
| | | CCAGGTGGGGAGTTT | CGACGTCGCTTTTTGA | | |
| | | GACTGGGGCGGTACA | TCCTTCGATGTCGGCT | | |
| | | CCTGTCAAACGGTAA | CTTCCTATCATTGTGA | | |
| | | CGCAGGTGTCCTAAG | AGCAGAATTCACCAA | | |
| | | GCGAGCTCAGGGAGG | GCGTTGGATTGTTCA | | |
| | | ACAGAAACCTCCCGT | CCCACTAATAGGGAA | | |
| | | GGAGCAGAAGGGCA | CGTGAGCTGGGTTTA | | |
| | | AAAGCTCGCTTGATC | GACCGTCGTGAGACA | | |
| | | TTGATTTTCAGTACGA | GGTTAGTTTTACCCTA | | |
| | | ATACAGACCGTGAAA | CTGATGATGTGTTGTT | | |
| | | GCGGGGCCTCACGAT | GCCATGGTAATCCTG | | |
| | | CCTTCTGACCTTTTGG | CTCAGTACGAGAGGA | | |
| | | GTTTTAAGCAGGAGG | ACCGCAGGTTCAGAC | | |
| | | TGTCAGAAAAGTTAC | ATTTGGTGTATGTGCT | | |
| | | CACAGGGAT (SEQ ID | TGGC (SEQ ID NO: | | |
| | | NO: 39,000) | 39,001) | | |
| Mutsu | 5S rDNA | GTCTACGGCCATACC | TGAACGCGCCCGATC | RNA5S1 | 100169751 |
| | | ACCC (SEQ ID NO: | TCGTCTGATCTCGGA | | |
| | | 39,002) | AGCTAAGCAGGGTCG | | |
| | | | GGCCTGGTTAGTACT | | |
| | | | TGGATGGGAGACCGC | | |
| | | | CTGGGAATACCGGGT | | |
| | | | GCTGTAGGCTTT (SEQ | | |
| | | | ID NO: 39,003) | | |
| Utopia/ | U2 | ATCGCTTCTCGGCCTT | TCTGTTCTTATCAGTT | RNU2-1 | 6066 |
| Keno | snRNA | TTGGCTAAGATCAAG | TAATATCTGATACGT | | |
| | | TGTAGTA (SEQ ID NO: | CCTCTATCCGAGGAC | | |
| | | 39,004) | AATATATTAAATGGA | | |
| | | | TTTTTGGAGCAGGGA | | |
| | | | GATGGAATAGGAGCT | | |
| | | | TGCTCCGTCCACTCCA | | |
| | | | CGCATCGACCTGGTA | | |
| | | | TTGCAGTACCTCCAG | | |
| | | | GAACGGTGCACCC | | |
| | | | (SEQ ID NO: 39,005) | | |

### Additional Functional Characteristics for Gene Writers™

[0673] A Gene Writer as described herein may, in some instances, be characterized by one or more functional measurements or characteristics. In some embodiments, the DNA binding domain (e.g., target binding domain) has one or more of the functional characteristics described below. In some embodiments, the template binding domain has one or more of the functional characteristics described below. In some embodiments, the template (e.g., template DNA) has one or more of the functional characteristics described below. In some embodiments, the target site altered by the Gene Writer has one or more of the functional characteristics described below following alteration by the Gene Writer.

### Gene Writer Polypeptide

### DNA Binding Domain

[0674] In some embodiments, the DNA binding domain is capable of binding to a target sequence (e.g., a dsDNA target sequence) with greater affinity than a reference DNA binding domain. In some embodiments, the reference DNA binding domain is a DNA binding domain from phiC31 recombinase from the Streptomyces bacteriophage phiC31. In some embodiments, the DNA binding domain is capable of binding to a target sequence (e.g., a dsDNA target sequence) with an affinity between 100 pM-10 nM (e.g., between 100 pM-1 nM or 1 nM-10 nM).

[0675] In some embodiments, the affinity of a DNA binding domain for its target sequence (e.g., dsDNA target sequence) is measured in vitro, e.g., by thermophoresis, e.g., as described in Asmari et al. Methods 146:107-119 (2018) (incorporated by reference herein in its entirety).

[0676] In embodiments, the DNA binding domain is capable of binding to its target sequence (e.g., dsDNA target sequence), e.g, with an affinity between 100 pM-10 nM (e.g., between 100 pM-1 nM or 1 nM-10 nM) in the presence of a molar excess of scrambled sequence competitor dsDNA, e.g., of about 100-fold molar excess.

[0677] In some embodiments, the DNA binding domain is found associated with its target sequence (e.g., dsDNA target sequence) more frequently than any other sequence in the genome of a target cell, e.g., human target cell, e.g., as measured by ChIP-seq (e.g., in HEK293T cells), e.g., as described in He and Pu (2010) Curr. Protoc Mol Biol Chapter 21 (incorporated herein by reference in its entirety). In some embodiments, the DNA binding domain is found associated with its target sequence (e.g., dsDNA target sequence) at least about 5-fold or 10-fold, more frequently than any other sequence in the genome of a target cell, e.g., as measured by ChIP-seq (e.g., in HEK293T cells), e.g., as described in He and Pu (2010), supra.

### Template Binding Domain

[0678] In some embodiments, the template binding domain is capable of binding to a template DNA with greater affinity than a reference DNA binding domain. In some embodiments, the reference DNA binding domain is a DNA binding domain from phiC31 recombinase from the Streptomyces bacteriophage phiC31. In some embodiments, the template binding domain is capable of binding to a template DNA with an affinity between 100 pM-10 nM (e.g., between 100 pM-1 nM or 1 nM-10 nM). In some embodiments, the affinity of a DNA binding domain for its template DNA is measured in vitro, e.g., by thermophoresis, e.g., as described in Asmari et al. Methods 146:107-119 (2018) (incorporated by reference herein in its entirety). In some embodiments, the affinity of a DNA binding domain for its template DNA is measured in cells (e.g., by FRET or ChIP-Seq).

[0679] In some embodiments, the DNA binding domain is associated with the template DNA in vitro with at least 50% template DNA bound in the presence of 10 nM competitor DNA, e.g., as described in Yant et al. Mol Cell Biol 24(20):9239-9247 (2004) (incorporated by reference herein in its entirety). In some embodiments, the DNA binding domain is associated with the template DNA in cells (e.g., in HEK293T cells) at a frequency at least about 5-fold or 10-fold higher than with a scrambled DNA. In some embodiments, the frequency of association between the DNA binding domain and the template DNA or scrambled DNA is measured by ChIP-seq, e.g., as described in He and Pu (2010), supra.

### Target Site

[0680] In some embodiments, after Gene Writing, the target site surrounding the integrated sequence contains a limited number of insertions or deletions, for example, in less than about 50% or 10% of integration events, e.g., as determined by long-read amplicon sequencing of the target site, e.g., as described in Karst et al. Nature Methods 18:165-169 (2021) (incorporated by reference herein in its entirety). For example, indels have been observed after the integration of insert DNA into human genome pseudosites by phiC31 integrase, as described in Thyagarajan et al Mol Cell Biol 21(12):3926-3934 (2001), the teachings of which are incorporated herein by reference in its entirety. In some embodiments, a Gene Writing system of this invention may result in a genomic modification (e.g., an insertion or deletion) at the target site (e.g., the site of insert DNA integration, e.g., adjacent to the integration of the insert DNA) comprising less than 20 nt, e.g., less than 20, 19, 18, 17, 16, 15, 14, 13, 12, 11, 10, 9, 8, 7, 6, 5, 4, 3, 2, or less than 1 nt of DNA. In some embodiments, a Gene Writing system of this invention may result in an insertion at the target site (e.g., the site of insert DNA integration, e.g., adjacent to the integration of the insert DNA) comprising less than 20 nucleotides or base pairs, e.g., less than 20, 19, 18, 17, 16, 15, 14, 13, 12, 11, 10, 9, 8, 7, 6, 5, 4, 3, 2, or less than 1 nucleotides or base pairs of DNA. In some embodiments, a Gene Writing system of this invention may result in a deletion at the target site (e.g., the site of insert DNA integration, e.g., adjacent to the integration of the insert DNA) comprising less than 20 nucleotides or base pairs, e.g., less than 20, 19, 18, 17, 16, 15, 14, 13, 12, 11, 10, 9, 8, 7, 6, 5, 4, 3, 2, or less than 1 nucleotide or base pair of genomic DNA. In some embodiments, the fraction of insertion or deletion events is lower when a core region, e.g., a central dinucleotide, of a recognition sequence at a target site, e.g., an attB, attP, or pseudosite thereof, comprises 100% identity to a core region, e.g., a central dinucleotide, of a recognition sequence, e.g., an attP or attB site, on the insert DNA. In some embodiments, the fraction of unintended insertion or deletion events is lower, e.g., at least 1.1, 1.2, 1.3, 1.4, 1.5, 1.6, 1.7, 1.8, 1.9, 2.0, 3.0, 4.0, 5.0, 10, 20, 30, 40, 50, 60, 70, 80, 90, or at least 100-fold lower at targeted genomic sites when the central dinucleotide of the recognition sequence at the target site is identical to the central dinucleotide of the recognition sequence in the insert DNA.

[0681] In some embodiments, the target site does not show multiple insertion events, e.g., head-to-tail or head-to-head duplications, e.g., as determined by long-read amplicon sequencing of the target site, e.g., as described in Karst et al. (2021), supra, or by molecular combing (Example 27). In some embodiments, the target site shows less than 100 insert copies at the target site, e.g., 75 insert copies, 50 insert copies, 45 insert copies, 40 insert copies, 35 insert copies, 30 insert copies, 25 insert copies, 20 insert copies, 15 insert copies, 14 insert copies, 13 insert copies, 12 insert copies, 11 insert copies, 10 insert copies, 9 insert copies, 8 insert copies, 7 insert copies, 6 insert copies, 5 insert copies, 4 insert copies, 3 insert copies, 2 insert copies, or a single insert copy. In some embodiments, target sites showing more than one copy of the insert sequence are present in less than 95% of target sites containing inserts, e.g., in less than 90%, 80%, 70%, 60%, 50%, 40%, 30%, 20%, 10%, 9%, 8%, 7%, 6%, 4%, 4%, 3%, 2% or less than 1% of target sites containing inserts, e.g., as determined by long-read amplicon sequencing of the target site, e.g., as described in Karst et al. (2021), supra, or by molecular combing (Example 27). In some embodiments, target sites showing more than two copies of the insert sequence are present in less than 95% of target sites containing inserts, e.g., in less than 90%, 80%, 70%, 60%, 50%, 40%, 30%, 20%, 10%, 9%, 8%, 7%, 6%, 4%, 4%, 3%, 2% or less than 1% of target sites containing inserts, e.g., as determined by long-read amplicon sequencing of the target site, e.g., as described in Karst et al. (2021), supra, or by molecular combing (Example 27). In some embodiments, target sites showing more than three copies of the insert sequence are present in less than 95% of target sites containing inserts, e.g., in less than 90%, 80%, 70%, 60%, 50%, 40%, 30%, 20%, 10%, 9%, 8%, 7%, 6%, 4%, 4%, 3%, 2% or less than 1% of target sites containing inserts, e.g., as determined by long-read amplicon sequencing of the target site, e.g., as described in Karst et al. (2021), supra, or by molecular combing (Example 27). In some embodiments, the target site shows at least 1, 2, 3, 4, 5, 6, 7, 8, 9, 10 or more copies per target site. In some embodiments, target sites showing multiple copies of the insert sequence are present in 1%, 5%, 10%, 20%, 30%, 40%, 50% 60%, 70%, 80%, 90%, 95%, 99% or more of target sites containing inserts, e.g., as determined by long-read amplicon sequencing of the target site, e.g., as described in Karst et al. (2021), supra, or by molecular combing (Example 27). In some embodiments, the copies are concatemers, i.e., are concatemerized. In some embodiments, the target site contains an integrated sequence corresponding to the template DNA (e.g., an entire plasmid, minicircle, or viral vector genome). In some embodiments, the target site contains a completely integrated template molecule. In some embodiments, the target site contains components of the vector DNA, e.g., AAV ITRs. In some embodiments, the target site contains 0, 1, 2, 3, 4, 5, 6, 7, 8, 9, 10 or more ITRs after integration. In some embodiments, at least one ITR is present in at least 1% of target sites after integration, e.g., at least 1%, 5%, 10%, 15%, 20%, 25%, 50%, 60%, 70%, 80%, 90, 95%, 96%, 97%, 98%, or at least 99% of target sites after integration. In some embodiments, at least one ITR is present in less than 50% of target sites after integration, e.g., less than 50%, 40%, 30%, 20%, 10%, 9%, 8%, 7%, 6%, 4%, 4%, 3%, 2% or less than 1% of target sites after integration, e.g., as determined by long-read amplicon sequencing of the target site, e.g., as described in Karst et al. (2021), supra, or by molecular combing (Example 27). In some embodiments, the multiple copies are arranged in head-to-head, tail-to-tail, or head-to-tail arrangements, or a mixture thereof. In some embodiments, e.g., when a template DNA is first excised from a viral vector or plasmid by a first recombination event prior to integration, the target site does not contain insertions comprising DNA exogenous to the recognition site-flanked cassette, e.g., vector DNA, e.g., AAV ITRs, in more than about 50% of events, e.g., in more than about 50%, 40%, 30%, 20%, 10%, 9%, 8%, 7%, 6%, 4%, 4%, 3%, 2% or more than about 1% of events, e.g., as determined by long-read amplicon sequencing of the target site, e.g., as described in Karst et al. (2021), supra, or by molecular combing (Example 27). In some embodiments, the integrated DNA does not comprise any bacterial antibiotic resistance gene.

[0682] In some embodiments, the DNA integrated at a target site by a Gene Writing system described herein comprises terminal hybrid recognition sequences (e.g., a first and/or second parapalindromic sequence, e.g., as described herein), e.g., attL and attR sequences formed by recombination between a recognition site of the insert DNA, e.g., an attP or attB of the insert DNA, and a recognition site in the target DNA, e.g., an attP or attB site or pseudosite thereof. In some embodiments, the integrated DNA comprises one or more ITRs, e.g., 1, 2, 3, 4, or more ITRs, between the terminal hybrid recognition sequences, e.g., attL and attR sequences. In some embodiments, at least 1% of target sites with integrated DNA comprise ITRs between the terminal hybrid recognition sequences, e.g., attL and attR sequences, e.g. at least 1%, 5%, 10%, 20%, 30%, 40%, 50%, 60%, 70%, 80%, or at least 90% of integrated DNA. In some embodiments, the integrated DNA that comprises ITRs between terminal hybrid recognition sequences, e.g., attL and attR sequences, comprises a single copy of insert DNA, e.g., is a monomeric insertion. In some embodiments, a monomeric insertion comprises terminal hybrid recognition sequences, e.g., attL and attR sequences, and lacks any internal ITRs. In some embodiments, a monomeric insertion comprises terminal hybrid recognition sequences, e.g., attL and attR sequences, and a single internal ITR. In some embodiments, a monomeric insertion comprises terminal hybrid recognition sequences, e.g., attL and attR sequences, and multiple internal ITRs, e.g., two internal ITRs. In some embodiments, the integrated DNA that comprises ITRs between terminal hybrid recognition sequences, e.g., attL and attR sequences, comprises multiple copies of insert DNA, e.g., is a concatemeric insertion. In some embodiments, a concatemeric insertion comprises terminal hybrid recognition sequences, e.g., attL and attR sequences, and at least two, e.g., at least 2, 3, or 4 copies of the insert DNA. In some embodiments, insertions comprising terminal hybrid recognition sequences, e.g., attL and attR sequences, that comprise fewer copies of the insert DNA are present at a higher frequency as compared to those with more copies of the insert DNA (e.g., insertions with 1 copy are present at higher frequency than insertions with 2 copies, insertions with 2 copies are present at higher frequency than insertions with 3 copies, or insertions with 1 copy are present at higher frequency than insertions with 3 copies), show a higher frequency of occurrence, e.g., are 1.1, 1.2, 1.3, 1.4, 1.5, 2.0, 2.5, 3.0, 4.0, 5.0, 10, 20, 30, 40, 50, 60, 70, 80, 90, 100, or more times more frequent. In some embodiments, monomeric insertions are present more frequently than dimeric insertions, e.g, are at least 1.1, 1.2, 1.3, 1.4, 1.5, 2.0, 2.5, 3.0, 4.0, 5.0, 10, 20, 30, 40, 50, 60, 70, 80, 90, 100, or more times more frequent than dimeric insertions. In some embodiments, dimeric insertions are present more frequently than trimeric insertions, e.g, are at least 1.1, 1.2, 1.3, 1.4, 1.5, 2.0, 2.5, 3.0, 4.0, 5.0, 10, 20, 30, 40, 50, 60, 70, 80, 90, 100, or more times more frequent than trimeric insertions. In some embodiments, monomeric plus dimeric insertions are present more frequently than concatameric insertions (3 or more insertions), e.g, are at least 1.1, 1.2, 1.3, 1.4, 1.5, 2.0, 2.5, 3.0, 4.0, 5.0, 10, 20, 30, 40, 50, 60, 70, 80, 90, 100, or more times more frequent than concatameric insertions. In some embodiments, a concatemeric insertion comprises terminal hybrid recognition sequences, e.g., attL and attR sequences, and one or more internal recombinase recognition sequences, e.g., 1, 2, 3, 4, or more internal recognition sequences, e.g., attB or attP sequences. In some embodiments, a concatemeric insertion comprises terminal hybrid recognition sequences, e.g., attL and attR sequences, and one or more internal ITRs, e.g., 1, 2, 3, 4, 5, 6 or more internal ITRs. The copy number of insert DNA, recognition sequences, and ITRs, as well as the relative positioning of these components, as described herein, can be determined using molecular combing as described in Example 27 and in Kaykov et al Sci Rep 6:19636 (2016), incorporated herein by reference in its entirety.

[0683] In some embodiments, insertion events may occur in which the integrated DNA does not comprise terminal hybrid recognition sequences, e.g., attL and attR sequences. In some embodiments, integrated DNA may comprise one terminal recognition sequence, e.g., attL or attR sequence. In some embodiments, integrated DNA may not have any terminal hybrid recognition sequences, e.g., attL or attR, e.g., neither terminus of the integrated DNA comprises a hybrid recognition sequence, e.g., attL or attR sequence. In some embodiments, integrated DNA that does not comprise terminal hybrid recognition sequences, e.g., attL or attR sequences, comprises a fragment of an insert DNA (e.g., an incomplete insert DNA, e.g., an insert DNA with an incomplete promoter, gene, or heterologous object sequence). In some embodiments, integrated DNA that does not comprise terminal hybrid recognition sequences, e.g., attL or attR sequences, comprises an incomplete multiple insert DNA sequences, e.g., contains less than 1, more than 1 and less than 2, more than 2 and less than 3, more than 3 and less than 4, or another incomplete multiple number of copies of the complete insert DNA.

[0684] In some embodiments, following the use of a Gene Writing system, newly integrated DNA that comprises terminal hybrid recognition sequences, e.g., attL and attR sequences, is present at a higher frequency in a cell or population of cells, e.g., comprises more than 50%, more than 60%, more than 70%, more than 80%, more than 90%, more than 95%, more than 96%, more than 97%, more than 98%, more than 99%, more than 99.5%, or more than 99.9% of total insertion events, compared to newly integrated DNA that comprises one or fewer terminal hybrid recognition sequences, e.g., attL or attR sequences, as measured by an assay described herein, e.g., long-read sequencing or molecular combing. In some embodiments, following the use of a Gene Writing system, newly integrated DNA that comprises terminal hybrid recognition sequences, e.g., attL and attR sequences, comprises a lower average insert DNA copy number per insertion event, e.g., comprises at least 0.1, 0.2, 0.3, 0.4, 0.5, 0.6, 0.7, 0.8, 0.9, 1.0, 1.5, or 2.0 copies fewer per insertion event on average, as compared to the average insert DNA copy number of integration events that comprise one or fewer terminal hybrid recognition sequences, e.g., attL or attP sequences. In some embodiments, following the use of a Gene Writing system, newly integrated DNA that comprises terminal hybrid recognition sequences, e.g., attL and attR sequences, comprises a higher percentage of complete insert DNA sequences, e.g., comprises at least 0.1×, 0.2×, 0.3×, 0.4×, 0.5×, 0.6×, 0.7×, 0.8×, 0.9×, 1.0×, 1.5×, 2.0×, 3×, 4×, 5×, 6×, 7×, 8×, 9×, 10× or more percent complete insert DNA sequences, as compared to the percentage of insert DNA sequences that comprise one or fewer terminal hybrid recognition sequences, e.g., attL or attP sequences.

[0685] In some embodiments, a Gene Writer described herein is capable of site-specific editing of target DNA, e.g., insertion of template DNA into a target DNA. In some embodiments, a site-specific Gene Writer is capable of generating an edit, e.g., an insertion, that is present at the target site with a higher frequency than any other site in the genome. In some embodiments, a site-specific Gene Writer is capable of generating an edit, e.g., an insertion in a target site at a frequency of at least 2, 3, 4, 5, 10, 50, 100, or 1000-fold that of the frequency at all other sites in the human genome. In some embodiments, the location of integration sites is determined by unidirectional sequencing, e.g., as in Example 18. The incorporation of unique molecular identifiers (UMI) in the adapters or primers used in library preparation allows the quantification of discrete insertion events, which can be compared between on-target insertions and all other insertions to determine the preference for the defined target site. In some embodiments, an inverse PCR approach is used to determine the integration sites targeted by a particular Gene Writer, e.g., as in Example 28.

[0686] In some embodiments, a Gene Writing system is used to edit a target DNA sequence that is present at a single location in the human genome. In some embodiments, a Gene Writing system is used to edit a target DNA sequence that is present at a single location in the human genome on a single homologous chromosome, e.g., is haplotype-specific. In some embodiments, a Gene Writing system is used to edit a target DNA sequence that is present at a single location in the human genome on two homologous chromosomes. In some embodiments, a Gene Writing system is used to edit a target DNA sequence that is present in multiple locations in the genome, e.g., at least 2, 3, 4, 5, 10, 20, 50, 100, 200, 500, 1000, 5000, 10000, 100000, 200000, 500000, 1000000 (e.g., Alu elements) locations in the genome. In some embodiments, a Gene Writing system used herein performs integration at a single target sequence in the human genome, that may be present in one or more locations. In some embodiments, a Gene Writing system used herein performs integration at multiple sequences that are present at least once in the human genome, e.g., recognizes more than 1, e.g., more than 1, 2, 3, 4, 5, 10, 20, 50, or more than 100 sequences, or less than 100, e.g., less than 100, 90, 80, 70, 60, 50, 40, 30, 25, 20, 15, 10, or less than 5 sequences that are present at least once in the human genome. Thus, in some embodiments, a Gene Writer described herein may result in the integration of an insert DNA at at least 1, e.g., at least 1, 2, 3, 4, 5, 6, 7, 8, 9, or at least 10 copies per cell, or less than 10, e.g., less than 10, 9, 8, 7, 6, 5, 4, 3, or less than 2 copies per cell.

[0687] In some embodiments, a Gene Writer system is able to edit a genome without introducing undesirable mutations. In some embodiments, a Gene Writer system is able to edit a genome by inserting a template, e.g., template DNA, into the genome. In some embodiments, the resulting modification in the genome contains minimal mutations relative to the template DNA sequence. In some embodiments, the average error rate of genomic insertions relative to the template DNA is less than 10⁻⁴, 10⁻⁵, or 10⁻⁶ mutations per nucleotide. In some embodiments, the number of mutations relative to a template DNA that is introduced into a target cell averages less than 1, 2, 3, 4, 5, 10, 20, 30, 40, 50, 60, 70, 80, 90, or 100 nucleotides per genome. In some embodiments, the error rate of insertions in a target genome is determined by long-read amplicon sequencing across known target sites, e.g., as described in Karst et al. (2021), supra, and comparing to the template DNA sequence. In some embodiments, errors enumerated by this method include nucleotide substitutions relative to the template sequence. In some embodiments, errors enumerated by this method include nucleotide deletions relative to the template sequence. In some embodiments, errors enumerated by this method include nucleotide insertions relative to the template sequence. In some embodiments, errors enumerated by this method include a combination of one or more of nucleotide substitutions, deletions, or insertions relative to the template sequence.

[0688] Efficiency of integration events can be used as a measure of editing of target sites or target cells by a Gene Writer system. In some embodiments, a Gene Writer system described herein is capable of integrating a heterologous object sequence in a fraction of target sites or target cells. In some embodiments, a Gene Writer system is capable of editing at least 1%, 2%, 5%, 10%, 20%, 30%, 40%, 50%, 60%, 70%, 80%, 90%, 95%, 96%, 97%, 98%, 99%, 99.5%, 99.9% or 100% of target loci as measured by the detection of the edit when amplifying across the target and analyzing with long-read amplicon sequencing, e.g., as described in Karst et al. (2021), supra. In some embodiments, a Gene Writer system is capable of editing cells at an average copy number of at least 0.1, e.g., at least 0.1, 0.5, 1, 2, 3, 4, 5, 10, or 100 copies per genome as normalized to a reference gene, e.g., RPP30, across a population of cells, e.g., as determined by ddPCR with transgene-specific primer-probe sets, e.g., as according to the methods in Lin et al. Hum Gene Ther Methods 27(5):197-208 (2016).

[0689] In some embodiments, the copy number per cell is analyzed by single-cell ddPCR (sc-ddPCR), e.g., as according to the methods of Igarashi et al. Mol Ther Methods Clin Dev 6:8-16 (2017), incorporated herein by reference in its entirety. In some embodiments, at least 1%, e.g., at least 1%, 2%, 5%, 10%, 20%, 30%, 40%, 50%, 60%, 70%, 80%, 90%, 95%, 96%, 97%, 98%, 99%, 99.5%, 99.9% or 100%, of target cells are positive for integration as assessed by sc-ddPCR using transgene-specific primer-probe sets. In some embodiments, the average copy number is at least 0.1, e.g., at least 0.1, 0.5, 1, 2, 3, 4, 5, 10, or 100 copies per cell as measured by sc-ddPCR using transgene-specific primer-probe sets.

[0690] In some embodiments, the target site comprises a pair of nucleic acid sequences, wherein one of the nucleic acid sequences is either a palindrome relative to the other nucleic acid sequence, or has at least 20% (e.g., at least 20%, 25%, 30%, 35%, 40%, 45%, 50%, 55%, 60%, 65%, 70%, 75%, 80%, 85%, 90%, 95%, 96%, 97%, 98%, 99%, or 100%), e.g., at least 50%, sequence identity to a palindrome relative to the other nucleic acid sequence, or has no more than 1, 2, 3, 4, 5, 6, 7, 8, 9, 10, 11, 12, 13, 14, 15, 16, 17, 18, 19, or 20 sequence mismatches relative to the other nucleic acid sequence.

### Insert DNAs

[0691] In some embodiments, an insert DNA as described herein comprises a nucleic acid sequence that can be integrated into a target DNA molecule, e.g., by a recombinase polypeptide (e.g., a serine recombinase polypeptide), e.g., as described herein. The insert DNA typically is able to bind one or more recombinase polypeptides (e.g., a plurality of copies of a recombinase polypeptide) of the system. In some embodiments the insert DNA comprises a region that is capable of binding a recombinase polypeptide (e.g., a recognition sequence as described herein).

[0692] An insert DNA may, in some embodiments, comprise an object sequence for insertion into a target DNA. The object sequence may be coding or non-coding. In some embodiments, the object sequence may contain an open reading frame. In some embodiments the insert DNA comprises a Kozak sequence. In some embodiments the insert DNA comprises an internal ribosome entry site. In some embodiments the insert DNA comprises a self-cleaving peptide such as a T2A or P2A site. In some embodiments the insert DNA comprises a start codon. In some embodiments the insert DNA comprises a splice acceptor site. In some embodiments the insert DNA comprises a splice donor site. In some embodiments the insert DNA comprises a microRNA binding site, e.g., downstream of the stop codon. In some embodiments the insert DNA comprises a polyA tail, e.g., downstream of the stop codon of an open reading frame. In some embodiments the insert DNA comprises one or more exons. In some embodiments the insert DNA comprises one or more introns. In some embodiments the insert DNA comprises a eukaryotic transcriptional terminator. In some embodiments the insert DNA comprises an enhanced translation element or a translation enhancing element. In some embodiments the insert DNA comprises a microRNA sequence, a siRNA sequence, a guide RNA sequence, a piwi RNA sequence. In some embodiments the insert DNA comprises a gene expression unit composed of at least one regulatory region operably linked to an effector sequence. The effector sequence may be a sequence that is transcribed into RNA (e.g., a coding sequence or a non-coding sequence such as a sequence encoding a micro RNA). In some embodiments, the object sequence may contain a non-coding sequence. For example, the insert DNA may comprise a promoter or enhancer sequence. In some embodiments the insert DNA comprises a tissue specific promoter or enhancer, each of which may be unidirectional or bidirectional. In some embodiments the promoter is an RNA polymerase I promoter, RNA polymerase II promoter, or RNA polymerase III promoter. In some embodiments the promoter comprises a TATA element. In some embodiments the promoter comprises a B recognition element. In some embodiments the promoter has one or more binding sites for transcription factors.

[0693] In some embodiments the object sequence of the insert DNA is inserted into a target genome in an endogenous intron. In some embodiments the object sequence of the insert DNA is inserted into a target genome and thereby acts as a new exon. In some embodiments the insertion of the object sequence into the target genome results in replacement of a natural exon or the skipping of a natural exon. In some embodiments the object sequence of the insert DNA is inserted into the target genome in a genomic safe harbor site, such as AAVS1, CCR5, or ROSA26. In some embodiment the object sequence of the insert DNA is added to the genome in an intergenic or intragenic region. In some embodiments the object sequence of the insert DNA is added to the genome 5′ or 3′ within 0.1 kb, 0.25 kb, 0.5 kb, 0.75, kb, 1 kb, 2 kb, 3 kb, 4 kb, 5 kb, 7.5 kb, 10 kb, 15 kb, 20 kb, 25 kb, 50, 75 kb, or 100 kb of an endogenous active gene. In some embodiments the object sequence of the insert DNA is added to the genome 5′ or 3′ within 0.1 kb, 0.25 kb, 0.5 kb, 0.75, kb, 1 kb, 2 kb, 3 kb, 4 kb, 5 kb, 7.5 kb, 10 kb, 15 kb, 20 kb, 25 kb, 50, 75 kb, or 100 kb of an endogenous promoter or enhancer. In some embodiments the object sequence of the insert DNA can be, e.g., 50-50,000 base pairs (e.g., between 50-40,000 bp, between 500-30,000 bp between 500-20,000 bp, between 100-15,000 bp, between 500-10,000 bp, between 50-10,000 bp, between 50-5,000 bp. In some embodiments the object sequence of the insert DNA can be, e.g., 1-50 base pairs.

[0694] In certain embodiments, an insert DNA can be identified, designed, engineered and constructed to contain sequences altering or specifying the genome function of a target cell or target organism, for example by introducing a heterologous coding region into a genome; affecting or causing exon structure/alternative splicing; causing disruption of an endogenous gene; causing transcriptional activation of an endogenous gene; causing epigenetic regulation of an endogenous DNA; causing up- or down-regulation of operably liked genes, etc. In certain embodiments, an insert DNA can be engineered to contain sequences coding for exons and/or transgenes, provide for binding sites to transcription factor activators, repressors, enhancers, etc., and combinations of thereof. In other embodiments, the coding sequence can be further customized with splice acceptor sites, poly-A tails.

[0695] As an alternative to other methods of delivery described herein, in some embodiments, nucleic acid (e.g., encoding a recombinase, or a template nucleic acid, or both) delivered to cells is designed as minicircles, where plasmid backbone sequences not pertaining to Gene Writing™ are removed before administration to cells. Minicircles have been shown to result in higher transfection efficiencies and gene expression as compared to plasmids with backbones containing bacterial parts (e.g., bacterial origin of replication, antibiotic selection cassette) and have been used to improve the efficiency of transposition (Sharma et al. Mol Ther Nucleic Acids 2:E74 (2013)). In some embodiments, the DNA vector encoding the Gene Writer™ polypeptide is delivered as a minicircle. In some embodiments, the DNA vector containing the Gene Writer™ template is delivered as a minicircle. In some embodiments of such alternative means for delivering a nucleic acid, the bacterial parts are flanked by recombination sites, e.g., attP/attB, loxP, FRT sites. In some embodiments, the addition of a cognate recombinase results in intramolecular recombination and excision of the bacterial parts. In some embodiments, the recombinase sites are recognized by phiC31 recombinase. In some embodiments, the recombinase sites are recognized by Cre recombinase. In some embodiments, the recombinase sites are recognized by FLP recombinase. In some embodiments, minicircles are generated in a bacterial production strain, e.g., an E coli strain stably expressing inducible minicircle assembling enzymes, e.g., a producer strain as according to Kay et al. Nat Biotechnol 28(12):1287-1289 (2010). Minicircle DNA vector preparations and methods of production are described in U.S. Pat. No. 9,233,174, incorporated herein by reference in its entirety.

[0696] In addition to plasmid DNA, minicircles can be generated by excising the desired construct, e.g., recombinase expression cassette or therapeutic expression cassette, from a viral backbone, e.g., an AAV vector. Previously, it has been shown that excision and circularization of the donor sequence from a viral backbone may be important for transposase-mediated integration efficiency (Yant et al. Nat Biotechnol 20(10):999-1005 (2002)). In some embodiments, minicircles are first formulated and then delivered to target cells. In other embodiments, minicircles are formed from a DNA vector (e.g., plasmid DNA, rAAV, scAAV, ceDNA, doggybone DNA) intracellularly by co-delivery of a recombinase, resulting in excision and circularization of the recombinase recognition site-flanked nucleic acid, e.g., a nucleic acid encoding the Gene Writer™ polypeptide, or DNA template, or both. In some embodiments, the same recombinase is used for a first excision event (e.g., intramolecular recombination) and a second integration (e.g., target site integration) event. In some embodiments, the recombination site on an excised circular DNA (e.g., after a first recombination event, e.g., intramolecular recombination) is used as the template recognition site for a second recombination (e.g., target site integration) event.

[0697] In some embodiments, minicircle DNA as described herein is generated by a recombinase excision event and the Gene Writer functions to insert the minicircle DNA by a recombinase integration event. In some embodiments, the excision event and integration event are catalyzed by the same enzyme, e.g., by the same serine recombinase. In some embodiments, the cassette for excision from a vector is flanked by attL and attR sites and the excision event results in the generation of an attB or attP site that is used for integration at a cognate genomic attP or attB site. In some embodiments, the excision event involving attL and attR sites is catalyzed by the addition of a recombination directionality factor (RDF) that enables the Gene Writer recombinase polypeptide to perform the excision. In some embodiments, the Gene Writer recombinase polypeptide functions to catalyze an integration event in the absence of an RDF.

### Long Terminal Repeats (LTRs)

[0698] In some embodiments, a template nucleic acid described herein comprises an LTR, e.g., comprises two LTRs. The two LTRs may have identical sequences or may have sequence differences relative to one another. In some embodiments, the LTRs are lentiviral LTRs. In some embodiments, the LTRs are located at the two ends of the template nucleic acid.

[0699] In some embodiments, the LTR comprises one or more of (e.g., all of) U3, R, and U5. In some embodiments, the LTR is a wild-type LTR. In other embodiments, the LTR comprises one or more sequence difference (e.g., deletion or substitution) compared to a corresponding wild-type LTR. In some embodiments, the LTR comprises reduced (e.g., abrogated) promoter and/or enhancer activity compared to a corresponding wild-type LTR. In some embodiments, the LTR comprises a deletion of U3, e.g., in the U3 of the 3′ LTR of the viral genome, which corresponds to the 5′ LTR after one round of reverse transcription. In some embodiments, the LTR is a self-inactivating LTR, e.g., as described in Cesana et al. “Uncovering and Dissecting the Genotoxicity of Self-inactivating Lentiviral Vectors In Vivo” doi:10.1038/mt.2014.3, which is herein incorporated by reference in its entirety.

### Linkers

[0700] In some embodiments, domains of the compositions and systems described herein (e.g., the recombinase domain and/or DNA recognition domains of a recombinase polypeptide, e.g., as described herein) may be joined by a linker. A composition described herein comprising a linker element has the general form S1-L-S2, wherein S1 and S2 may be the same or different and represent two domain moieties (e.g., each a polypeptide or nucleic acid domain) associated with one another by the linker. In some embodiments, a linker may connect two polypeptides. In some embodiments, a linker may connect two nucleic acid molecules. In some embodiments, a linker may connect a polypeptide and a nucleic acid molecule. A linker may be a chemical bond, e.g., one or more covalent bonds or non-covalent bonds. A linker may be flexible, rigid, and/or cleavable. In some embodiments, the linker is a peptide linker. Generally, a peptide linker is at least 2, 3, 4, 5, 6, 7, 8, 9, 10 or more amino acids in length, e.g., 2-50 amino acids in length, 2-30 amino acids in length.

[0701] The most commonly used flexible linkers have sequences consisting primarily of stretches of Gly and Ser residues (“GS” linker). Flexible linkers may be useful for joining domains that require a certain degree of movement or interaction and may include small, non-polar (e.g. Gly) or polar (e.g. Ser or Thr) amino acids. Incorporation of Ser or Thr can also maintain the stability of the linker in aqueous solutions by forming hydrogen bonds with the water molecules, and therefore reduce unfavorable interactions between the linker and the other moieties. Examples of such linkers include those having the structure [GGS]^{≥1} or [GGGS]^{≥1}. Rigid linkers are useful to keep a fixed distance between domains and to maintain their independent functions. Rigid linkers may also be useful when a spatial separation of the domains is critical to preserve the stability or bioactivity of one or more components in the agent. Rigid linkers may have an alpha helix-structure or Pro-rich sequence, (XP)n, with X designating any amino acid, preferably Ala, Lys, or Glu. Cleavable linkers may release free functional domains in vivo. In some embodiments, linkers may be cleaved under specific conditions, such as the presence of reducing reagents or proteases. In vivo cleavable linkers may utilize the reversible nature of a disulfide bond. One example includes a thrombin-sensitive sequence (e.g., PRS) between the two Cys residues. In vitro thrombin treatment of CPRSC results in the cleavage of the thrombin-sensitive sequence, while the reversible disulfide linkage remains intact. Such linkers are known and described, e.g., in Chen et al. 2013. Fusion Protein Linkers: Property, Design and Functionality. Adv Drug Deliv Rev. 65(10): 1357-1369. In vivo cleavage of linkers in compositions described herein may also be carried out by proteases that are expressed in vivo under pathological conditions (e.g. cancer or inflammation), in specific cells or tissues, or constrained within certain cellular compartments. The specificity of many proteases offers slower cleavage of the linker in constrained compartments.

[0702] In some embodiments the amino acid linkers are (or are homologous to) the endogenous amino acids that exist between such domains in a native polypeptide. In some embodiments the endogenous amino acids that exist between such domains are substituted but the length is unchanged from the natural length. In some embodiments, additional amino acid residues are added to the naturally existing amino acid residues between domains.

[0703] In some embodiments, the amino acid linkers are designed computationally or screened to maximize protein function (Anad et al., FEBS Letters, 587:19, 2013).

### Additional Gene Writer Characteristics

[0704] In some embodiments, the Gene Writer system may result in complete writing without requiring endogenous host factors. In some embodiments, the system may result in complete writing without the need for DNA repair. In some embodiments, the system may result in complete writing without eliciting a DNA damage response.

[0705] In some embodiments, the system does not require DNA repair by the NHEJ pathway, homologous recombination repair pathway, base excision repair pathway, or any combination thereof. Participation by a DNA repair pathway can be assayed, for example, via the application of DNA repair pathway inhibitors or DNA repair pathway deficient cell lines. For example, when applying DNA repair pathway inhibitors, PrestoBlue cell viability assay can be performed first to determine the toxicity of the inhibitors and whether any normalization should be applied. SCR7 is an inhibitor for NHEJ, which can be applied at a series of dilutions during Gene Writer™ delivery. PARP protein is a nuclear enzyme that binds as homodimers to both single- and double-strand breaks. Thus, its inhibitors can be used in the test of relevant DNA repair pathways, including homologous recombination repair pathway and base excision repair pathway. The experiment procedure is the same with that of SCR7. Cell lines with deficient core proteins of nucleotide excision repair (NER) pathway can be used to test the effect of NER on Gene Writing™. After the delivery of the Gene Writer™ system into the cell, ddPCR can used to evaluate the insertion of a heterologous object sequence in the context of inhibition of DNA repair pathways. Sequencing analysis can also be performed to evaluate whether certain DNA repair pathways play a role. In some embodiments, Gene Writing™ into the genome is not decreased by the knockdown of a DNA repair pathway described herein. In some embodiments, Gene Writing™ into the genome is not decreased by more than 50% by the knockdown of the DNA repair pathway.

### Circular RNAs in Gene Writing Systems

[0706] It is contemplated that it may be useful to employ circular and/or linear RNA states during the formulation, delivery, or Gene Writing reaction within the target cell. Thus, in some embodiments of any of the aspects described herein, a Gene Writing system comprises one or more circular RNAs (circRNAs). In some embodiments of any of the aspects described herein, a Gene Writing system comprises one or more linear RNAs. In some embodiments, a nucleic acid as described herein (e.g., a nucleic acid molecule encoding a Gene Writer polypeptide, or both) is a circRNA. In some embodiments, a circular RNA molecule encodes the Gene Writer polypeptide. In some embodiments, the circRNA molecule encoding the Gene Writer polypeptide is delivered to a host cell. In some embodiments, a circular RNA molecule encodes a recombinase, e.g., as described herein. In some embodiments, the circRNA molecule encoding the recombinase is delivered to a host cell. In some embodiments, the circRNA molecule encoding the Gene Writer polypeptide is linearized (e.g., in the host cell) prior to translation.

[0707] Circular RNAs (circRNAs) have been found to occur naturally in cells and have been found to have diverse functions, including both non-coding and protein coding roles in human cells. It has been shown that a circRNA can be engineered by incorporating a self-splicing intron into an RNA molecule (or DNA encoding the RNA molecule) that results in circularization of the RNA, and that an engineered circRNA can have enhanced protein production and stability (Wesselhoeft et al. Nature Communications 2018). In some embodiments, the Gene Writer™ polypeptide is encoded as circRNA. In certain embodiments, the template nucleic acid is a DNA, such as a dsDNA or ssDNA.

[0708] In some embodiments, the circRNA comprises one or more ribozyme sequence. In some embodiments, the ribozyme sequence is activated for autocleavage, e.g., in a host cell, e.g., thereby resulting in linearization of the circRNA. In some embodiments, the ribozyme is activated when the concentration of magnesium reaches a sufficient level for cleavage, e.g., in a host cell. In some embodiments the circRNA is maintained in a low magnesium environment prior to delivery to the host cell. In some embodiments, the ribozyme is a protein-responsive ribozyme. In some embodiments, the ribozyme is a nucleic acid-responsive ribozyme.

[0709] In some embodiments, the circRNA is linearized in the nucleus of a target cell. In some embodiments, linearization of a circRNA in the nucleus of a cell involves components present in the nucleus of the cell, e.g., to activate a cleavage event. For example, the B2 and ALU retrotransposons contain self-cleaving ribozymes whose activity is enhanced by interaction with the Polycomb protein, EZH2 (Hernandez et al. PNAS 117(1):415-425 (2020)). Thus, in some embodiments, a ribozyme, e.g., a ribozyme from a B2 or ALU element, that is responsive to a nuclear element, e.g., a nuclear protein, e.g., a genome-interacting protein, e.g., an epigenetic modifier, e.g., EZH2, is incorporated into a circRNA, e.g., of a Gene Writing system. In some embodiments, nuclear localization of the circRNA results in an increase in autocatalytic activity of the ribozyme and linearization of the circRNA.

[0710] In some embodiments, an inducible ribozyme (e.g., in a circRNA as described herein) is created synthetically, for example, by utilizing a protein ligand-responsive aptamer design. A system for utilizing the satellite RNA of tobacco ringspot virus hammerhead ribozyme with an MS2 coat protein aptamer has been described (Kennedy et al. Nucleic Acids Res 42(19):12306-12321 (2014), incorporated herein by reference in its entirety) that results in activation of the ribozyme activity in the presence of the MS2 coat protein. In embodiments, such a system responds to protein ligand localized to the cytoplasm or the nucleus. In some embodiments the protein ligand is not MS2. Methods for generating RNA aptamers to target ligands have been described, for example, based on the systematic evolution of ligands by exponential enrichment (SELEX) (Tuerk and Gold, Science 249(4968):505-510 (1990); Ellington and Szostak, Nature 346(6287):818-822 (1990); the methods of each of which are incorporated herein by reference) and have, in some instances, been aided by in silico design (Bell et al. PNAS 117(15):8486-8493, the methods of which are incorporated herein by reference). Thus, in some embodiments, an aptamer for a target ligand is generated and incorporated into a synthetic ribozyme system, e.g., to trigger ribozyme-mediated cleavage and circRNA linearization, e.g., in the presence of the protein ligand. In some embodiments, circRNA linearization is triggered in the cytoplasm, e.g., using an aptamer that associates with a ligand in the cytoplasm. In some embodiments, circRNA linearization is triggered in the nucleus, e.g., using an aptamer that associates with a ligand in the nucleus. In embodiments, the ligand comprises an epigenetic modifier or a transcription factor. In some embodiments the ligand that triggers linearization is present at higher levels in on-target cells than off-target cells.

[0711] It is further contemplated that a nucleic acid-responsive ribozyme system can be employed for circRNA linearization. For example, biosensors that sense defined target nucleic acid molecules to trigger ribozyme activation are described, e.g., in Penchovsky (Biotechnology Advances 32(5):1015-1027 (2014), incorporated herein by reference). By these methods, a ribozyme naturally folds into an inactive state and is only activated in the presence of a defined target nucleic acid molecule (e.g., an RNA molecule). In some embodiments, a circRNA of a Gene Writing system comprises a nucleic acid-responsive ribozyme that is activated in the presence of a defined target nucleic acid, e.g., an RNA, e.g., an mRNA, miRNA, guide RNA, gRNA, sgRNA, ncRNA, lncRNA, tRNA, snRNA, or mtRNA. In some embodiments the nucleic acid that triggers linearization is present at higher levels in on-target cells than off-target cells.

[0712] In some embodiments of any of the aspects herein, a Gene Writing system incorporates one or more ribozymes with inducible specificity to a target tissue or target cell of interest, e.g., a ribozyme that is activated by a ligand or nucleic acid present at higher levels in a target tissue or target cell of interest. In some embodiments, the Gene Writing system incorporates a ribozyme with inducible specificity to a subcellular compartment, e.g., the nucleus, nucleolus, cytoplasm, or mitochondria. In some embodiments, the ribozyme that is activated by a ligand or nucleic acid present at higher levels in the target subcellular compartment. In some embodiments, an RNA component of a Gene Writing system is provided as circRNA, e.g., that is activated by linearization. In some embodiments, linearization of a circRNA encoding a Gene Writing polypeptide activates the molecule for translation. In some embodiments, a signal that activates a circRNA component of a Gene Writing system is present at higher levels in on-target cells or tissues, e.g., such that the system is specifically activated in these cells.

[0713] In some embodiments, an RNA component of a Gene Writing system is provided as a circRNA that is inactivated by linearization. In some embodiments, a circRNA encoding the Gene Writer polypeptide is inactivated by cleavage and degradation. In some embodiments, a circRNA encoding the Gene Writing polypeptide is inactivated by cleavage that separates a translation signal from the coding sequence of the polypeptide. In some embodiments, a signal that inactivates a circRNA component of a Gene Writing system is present at higher levels in off-target cells or tissues, such that the system is specifically inactivated in these cells.

### Evolved Variants of Gene Writers

[0714] In some embodiments, the invention provides evolved variants of Gene Writers. Evolved variants can, in some embodiments, be produced by mutagenizing a reference Gene Writer, or one of the fragments or domains comprised therein. In some embodiments, one or more of the domains (e.g., the catalytic domain or DNA binding domain (e.g., target binding domain or template binding domain), including, for example, sequence-guided DNA binding elements) is evolved. One or more of such evolved variant domains can, in some embodiments, be evolved alone or together with other domains. An evolved variant domain or domains may, in some embodiments, be combined with unevolved cognate component(s) or evolved variants of the cognate component(s), e.g., which may have been evolved in either a parallel or serial manner.

[0715] In some embodiments, the process of mutagenizing a reference Gene Writer, or fragment or domain thereof, comprises mutagenizing the reference Gene Writer or fragment or domain thereof. In embodiments, the mutagenesis comprises a continuous evolution method (e.g., PACE) or non-continuous evolution method (e.g., PANCE), e.g., as described herein. In some embodiments, the evolved Gene Writer, or a fragment or domain thereof (e.g., a DNA binding domain, e.g., a target binding domain or a template binding domain), comprises one or more amino acid variations introduced into its amino acid sequence relative to the amino acid sequence of the reference Gene Writer, or fragment or domain thereof. In embodiments, amino acid sequence variations may include one or more mutated residues (e.g., conservative substitutions, non-conservative substitutions, or a combination thereof) within the amino acid sequence of a reference Gene Writer, e.g., as a result of a change in the nucleotide sequence encoding the gene writer that results in, e.g., a change in the codon at any particular position in the coding sequence, the deletion of one or more amino acids (e.g., a truncated protein), the insertion of one or more amino acids, or any combination of the foregoing. The evolved variant Gene Writer may include variants in one or more components or domains of the Gene Writer (e.g., variants introduced into a catalytic domain, DNA binding domain, or combinations thereof).

[0716] In some aspects, the invention provides Gene Writers, systems, kits, and methods using or comprising an evolved variant of a Gene Writer, e.g., employs an evolved variant of a Gene Writer or a Gene Writer produced or produceable by PACE or PANCE. In embodiments, the unevolved reference Gene Writer is a Gene Writer as disclosed herein.

[0717] The term “phage-assisted continuous evolution (PACE),” as used herein, generally refers to continuous evolution that employs phage as viral vectors. Examples of PACE technology have been described, for example, in International PCT Application No. PCT/US 2009/056194, filed Sep. 8, 2009, published as WO 2010/028347 on Mar. 11, 2010; International PCT Application, PCT/US2011/066747, filed Dec. 22, 2011, published as WO 2012/088381 on Jun. 28, 2012; U.S. Pat. No. 9,023,594, issued May 5, 2015; U.S. Pat. No. 9,771,574, issued Sep. 26, 2017; U.S. Pat. No. 9,394,537, issued Jul. 19, 2016; International PCT Application, PCT/US2015/012022, filed Jan. 20, 2015, published as WO 2015/134121 on Sep. 11, 2015; U.S. Pat. No. 10,179,911, issued Jan. 15, 2019; and International PCT Application, PCT/US2016/027795, filed Apr. 15, 2016, published as WO 2016/168631 on Oct. 20, 2016, the entire contents of each of which are incorporated herein by reference.

[0718] The term “phage-assisted non-continuous evolution (PANCE),” as used herein, generally refers to non-continuous evolution that employs phage as viral vectors. Examples of PANCE technology have been described, for example, in Suzuki T. et al, Crystal structures reveal an elusive functional domain of pyrrolysyl-tRNA synthetase, Nat Chem Biol. 13(12): 1261-1266 (2017), incorporated herein by reference in its entirety. Briefly, PANCE is a technique for rapid in vivo directed evolution using serial flask transfers of evolving selection phage (SP), which contain a gene of interest to be evolved, across fresh host cells (e.g., E. coli cells). Genes inside the host cell may be held constant while genes contained in the SP continuously evolve. Following phage growth, an aliquot of infected cells may be used to transfect a subsequent flask containing host E coli. This process can be repeated and/or continued until the desired phenotype is evolved, e.g., for as many transfers as desired.

[0719] Methods of applying PACE and PANCE to Gene Writers may be readily appreciated by the skilled artisan by reference to, inter alia, the foregoing references. Additional exemplary methods for directing continuous evolution of genome-modifying proteins or systems, e.g., in a population of host cells, e.g., using phage particles, can be applied to generate evolved variants of Gene Writers, or fragments or subdomains thereof. Non-limiting examples of such methods are described in International PCT Application, PCT/US2009/056194, filed Sep. 8, 2009, published as WO 2010/028347 on Mar. 11, 2010; International PCT Application, PCT/US2011/066747, filed Dec. 22, 2011, published as WO 2012/088381 on Jun. 28, 2012; U.S. Pat. No. 9,023,594, issued May 5, 2015; U.S. Pat. No. 9,771,574, issued Sep. 26, 2017; U.S. Pat. No. 9,394,537, issued Jul. 19, 2016; International PCT Application, PCT/US2015/012022, filed Jan. 20, 2015, published as WO 2015/134121 on Sep. 11, 2015; U.S. Pat. No. 10,179,911, issued Jan. 15, 2019; International Application No. PCT/US2019/37216, filed Jun. 14, 2019, International Patent Publication WO 2019/023680, published Jan. 31, 2019, International PCT Application, PCT/US2016/027795, filed Apr. 15, 2016, published as WO 2016/168631 on Oct. 20, 2016, and International Patent Publication No. PCT/US2019/47996, filed Aug. 23, 2019, each of which is incorporated herein by reference in its entirety.

[0720] In some non-limiting illustrative embodiments, a method of evolution of a evolved variant Gene Writer, of a fragment or domain thereof, comprises: (a) contacting a population of host cells with a population of viral vectors comprising the gene of interest (the starting Gene Writer or fragment or domain thereof), wherein: (1) the host cell is amenable to infection by the viral vector; (2) the host cell expresses viral genes required for the generation of viral particles; (3) the expression of at least one viral gene required for the production of an infectious viral particle is dependent on a function of the gene of interest; and/or (4) the viral vector allows for expression of the protein in the host cell, and can be replicated and packaged into a viral particle by the host cell. In some embodiments, the method comprises (b) contacting the host cells with a mutagen, using host cells with mutations that elevate mutation rate (e.g., either by carrying a mutation plasmid or some genome modification—e.g., proofing-impaired DNA polymerase, SOS genes, such as UmuC, UmuD′, and/or RecA, which mutations, if plasmid-bound, may be under control of an inducible promoter), or a combination thereof. In some embodiments, the method comprises (c) incubating the population of host cells under conditions allowing for viral replication and the production of viral particles, wherein host cells are removed from the host cell population, and fresh, uninfected host cells are introduced into the population of host cells, thus replenishing the population of host cells and creating a flow of host cells. In some embodiments, the cells are incubated under conditions allowing for the gene of interest to acquire a mutation. In some embodiments, the method further comprises (d) isolating a mutated version of the viral vector, encoding an evolved gene product (e.g., an evolved variant Gene Writer, or fragment or domain thereof), from the population of host cells.

[0721] The skilled artisan will appreciate a variety of features employable within the above-described framework. For example, in some embodiments, the viral vector or the phage is a filamentous phage, for example, an M13 phage, e.g., an M13 selection phage. In certain embodiments, the gene required for the production of infectious viral particles is the M13 gene III (gIII). In embodiments, the phage may lack a functional gIII, but otherwise comprise gI, gII, gIV, gV, gVI, gVII, gVIII, gIX, and a gX. In some embodiments, the generation of infectious VSV particles involves the envelope protein VSV-G. Various embodiments can use different retroviral vectors, for example, Murine Leukemia Virus vectors, or Lentiviral vectors. In embodiments, the retroviral vectors can efficiently be packaged with VSV-G envelope protein, e.g., as a substitute for the native envelope protein of the virus.

[0722] In some embodiments, host cells are incubated according to a suitable number of viral life cycles, e.g., at least 10, at least 20, at least 30, at least 40, at least 50, at least 100, at least 200, at least 300, at least 400, at least, 500, at least 600, at least 700, at least 800, at least 900, at least 1000, at least 1250, at least 1500, at least 1750, at least 2000, at least 2500, at least 3000, at least 4000, at least 5000, at least 7500, at least 10000, or more consecutive viral life cycles, which in on illustrative and non-limiting examples of M13 phage is 10-20 minutes per virus life cycle. Similarly, conditions can be modulated to adjust the time a host cell remains in a population of host cells, e.g., about 10, about 11, about 12, about 13, about 14, about 15, about 16, about 17, about 18, about 19, about 20, about 21, about 22, about 23, about 24, about 25, about 30, about 35, about 40, about 45, about 50, about 55, about 60, about 70, about 80, about 90, about 100, about 120, about 150, or about 180 minutes. Host cell populations can be controlled in part by density of the host cells, or, in some embodiments, the host cell density in an inflow, e.g., 10³ cells/ml, about 10⁴ cells/ml, about 10⁵ cells/ml, about 5-10⁵ cells/ml, about 10⁶ cells/ml, about 5-10⁶ cells/ml, about 10⁷ cells/ml, about 5-10⁷ cells/ml, about 10⁸ cells/ml, about 5-10⁸ cells/ml, about 10⁹ cells/ml, about 5·10⁹ cells/ml, about 10¹⁰ cells/ml, or about 5·10¹⁰ cells/ml.

### Nucleic Acids

### Promoters

[0723] In some embodiments, one or more promoter or enhancer elements are operably linked to a nucleic acid encoding a Gene Writer polypeptide or a template nucleic acid, e.g., that controls expression of the heterologous object sequence. In certain embodiments, the one or more promoter or enhancer elements comprise cell-type or tissue specific elements. In some embodiments, the promoter or enhancer is the same or derived from the promoter or enhancer that naturally controls expression of the heterologous object sequence. For example, the ornithine transcarbomylase promoter and enhancer may be used to control expression of the ornithine transcarbomylase gene in a system or method provided by the invention for correcting ornithine transcarbomylase deficiencies. In some embodiments, the promoter is a promoter of Table 4B or a functional fragment or variant thereof.

[0724] Exemplary tissue specific promoters that are commercially available can be found, for example, at a uniform resource locator (e.g., https://www.invivogen.com/tissue-specific-promoters). In some embodiments, a promoter is a native promoter or a minimal promoter, e.g., which consists of a single fragment from the 5′ region of a given gene. In some embodiments, a native promoter comprises a core promoter and its natural 5′ UTR. In some embodiments, the 5′ UTR comprises an intron. In other embodiments, these include composite promoters, which combine promoter elements of different origins or were generated by assembling a distal enhancer with a minimal promoter of the same origin. In some embodiments, a tissue-specific expression-control sequence(s) comprises one or more of the sequences in Table 2 or Table 3 of PCT Publication No. WO2020014209 (incorporated herein by reference in its entirety).

[0725] Exemplary cell or tissue specific promoters are provided in the tables, below, and exemplary nucleic acid sequences encoding them are known in the art and can be readily accessed using a variety of resources, such as the NCBI database, including RefSeq, as well as the Eukaryotic Promoter Database (http://epd.epfl.ch/findex.php).

TABLE 4B
Exemplary cell or tissue-specific promoters

| Promoter | Target cells |
|---|---|
| B29 Promoter | B cells |
| CD14 Promoter | Monocytic Cells |
| CD43 Promoter | Leukocytes and platelets |
| CD45 Promoter | Hematopoeitic cells |
| CD68 promoter | macrophages |
| Desmin promoter | muscle cells |
| Elastase-1 promoter | pancreatic acinar cells |
| Endoglin promoter | endothelial cells |
| fibronectin promoter | differentiating cells, healing tissue |
| Flt-1 promoter | endothelial cells |
| GFAP promoter | Astrocytes |
| GPIIB promoter | megakaryocytes |
| ICAM-2 Promoter | Endothelial cells |
| INF-Beta promoter | Hematopoeitic cells |
| Mb promoter | muscle cells |
| Nphs1 promoter | podocytes |
| OG-2 promoter | Osteoblasts, Odonblasts |
| SP-B promoter | Lung |
| Syn1 promoter | Neurons |
| WASP promoter | Hematopoeitic cells |
| SV40/bAlb promoter | Liver |
| SV40/bAlb promoter | Liver |
| SV40/Cd3 promoter | Leukocytes and platelets |
| SV40/CD45 promoter | hematopoeitic cells |
| NSE/RU5′ promoter | Mature Neurons |

TABLE 4C
Additional exemplary cell or tissue-specific promoters

| Promoter | Gene Description | Gene Specificity |
|---|---|---|
| APOA2 | Apolipoprotein A-II | Hepatocytes (from hepatocyte |
| | | progenitors) |
| SERPINA1 | Serpin peptidase inhibitor, clade A | Hepatocytes |
| (hAAT) | (alpha-1 | (from definitive endoderm |
| | antiproteinase, antitrypsin), member 1 | stage) |
| | (also named alpha 1 anti-tryps in) | |
| CYP3A | Cytochrome P450, family 3, | Mature Hepatocytes |
| | subfamily A, polypeptide | |
| MIR122 | MicroRNA 122 | Hepatocytes |
| | | (from early stage embryonic |
| | | liver cells) |
| | | and endoderm |

Pancreatic specific promoters

| | | |
|---|---|---|
| INS | Insulin | Pancreatic beta cells |
| | | (from definitive endoderm stage) |
| IRS2 | Insulin receptor substrate 2 | Pancreatic beta cells |
| Pdx1 | Pancreatic and duodenal | Pancreas |
| | homeobox 1 | (from definitive endoderm stage) |
| Alx3 | Aristaless-like homeobox 3 | Pancreatic beta cells |
| | | (from definitive endoderm stage) |
| Ppy | Pancreatic polypeptide | PP pancreatic cells |
| | | (gamma cells) |

Cardiac specific promoters

| | | |
|---|---|---|
| Myh6 | Myosin, heavy chain 6, cardiac | Late differentiation marker of cardiac |
| (aMHC) | muscle, alpha | muscle cells (atrial specificity) |
| MYL2 | Myosin, light chain 2, regulatory, | Late differentiation marker of cardiac |
| (MLC-2v) | cardiac, slow | muscle cells (ventricular specificity) |
| ITNNl3 | Troponin I type 3 (cardiac) | Cardiomyocytes |
| (cTnl) | | (from immature state) |
| ITNNl3 | Troponin I type 3 (cardiac) | Cardiomyocytes |
| (cTnl) | | (from immature state) |
| NPPA | Natriuretic peptide precursor A (also | Atrial specificity in adult cells |
| (ANF) | named Atrial Natriuretic Factor) | |
| Slc8a1 | Solute carrier family 8 | Cardiomyocytes from early |
| (Ncx1) | (sodium/calcium exchanger), member | developmental stages |
| | 1 | |

CNS specific promoters

| | | |
|---|---|---|
| SYN1 | Synapsin I | Neurons |
| (hSyn) | | |
| GFAP | Glial fibrillary acidic protein | Astrocytes |
| INA | lnternexin neuronal intermediate | Neuroprogenitors |
| | filament protein, alpha (a-internexin) | |
| NES | Nestin | Neuroprogenitors and ectoderm |
| MOBP | Myelin-associated oligodendrocyte | Oligodendrocytes |
| | basic protein | |
| MBP | Myelin basic protein | Oligodendrocytes |
| TH | Tyrosine hydroxylase | Dopaminergic neurons |
| FOXA2 | Forkhead box A2 | Dopaminergic neurons (also used as a |
| (HNF3 | | marker of endoderm) |
| beta) | | |

Skin specific promoters

| | | |
|---|---|---|
| FLG | Filaggrin | Keratinocytes from granular layer |
| K14 | Keratin 14 | Keratinocytes from granular |
| | | and basal layers |
| TGM3 | Transglutaminase 3 | Keratinocytes from granular layer |

Immune cell specific promoters

| | | |
|---|---|---|
| ITGAM | Integrin, alpha M (complement | Monocytes, macrophages, granulocytes, |
| (CD11B) | component 3 receptor 3 subunit) | natural killer cells |

Urogential cell specific promoters

| | | |
|---|---|---|
| Pbsn | Probasin | Prostatic epithelium |
| Upk2 | Uroplakin 2 | Bladder |
| Sbp | Spermine binding protein | Prostate |
| Fer1l4 | Fer-1-like 4 | Bladder |

Endothelial cell specific promoters

| | | |
|---|---|---|
| ENG | Endoglin | Endothelial cells |

Pluripotent and embryonic cell specific promoters

| | | |
|---|---|---|
| Oct4 | POU class 5 homeobox 1 | Pluripotent cells |
| (POU5F1) | | (germ cells, ES cells, iPS cells) |
| NANOG | Nanog homeobox | Pluripotent cells |
| | | (ES cells, iPS cells) |
| Synthetic | Synthetic promoter based on a Oct-4 | Pluripotent cells (ES cells, iPS cells) |
| Oct4 | core enhancer element | |
| T | Brachyury | Mesoderm |
| brachyury | | |
| NES | Nestin | Neuroprogenitors and Ectoderm |
| SOX17 | SRY (sex determining region Y)-box | Endoderm |
| | 17 | |
| FOXA2 | Forkhead box A2 | Endoderm (also used as a marker of |
| (HNFJ | | dopaminergic neurons) |
| beta) | | |
| MIR122 | MicroRNA 122 | Endoderm and hepatocytes |
| | | (from early stage embryonic liver cells~ |

[0726] Depending on the host/vector system utilized, any of a number of suitable transcription and translation control elements, including constitutive and inducible promoters, transcription enhancer elements, transcription terminators, etc. may be used in the expression vector (see e.g., Bitter et al. (1987) Methods in Enzymology, 153:516-544; incorporated herein by reference in its entirety).

[0727] In some embodiments, a nucleic acid encoding a Gene Writer or template nucleic acid is operably linked to a control element, e.g., a transcriptional control element, such as a promoter. The transcriptional control element may, in some embodiment, be functional in either a eukaryotic cell, e.g., a mammalian cell; or a prokaryotic cell (e.g., bacterial or archaeal cell). In some embodiments, a nucleotide sequence encoding a polypeptide is operably linked to multiple control elements, e.g., that allow expression of the nucleotide sequence encoding the polypeptide in both prokaryotic and eukaryotic cells.

[0728] For illustration purposes, examples of spatially restricted promoters include, but are not limited to, neuron-specific promoters, adipocyte-specific promoters, cardiomyocyte-specific promoters, smooth muscle-specific promoters, photoreceptor-specific promoters, etc. Neuron-specific spatially restricted promoters include, but are not limited to, a neuron-specific enolase (NSE) promoter (see, e.g., EMBL HSENO2, X51956); an aromatic amino acid decarboxylase (AADC) promoter, a neurofilament promoter (see, e.g., GenBank HUMNFL, L04147); a synapsin promoter (see, e.g., GenBank HUMSYNIB, M55301); a thy-1 promoter (see, e.g., Chen et al. (1987) Cell 51:7-19; and Llewellyn, et al. (2010) Nat. Med. 16(10):1161-1166); a serotonin receptor promoter (see, e.g., GenBank S62283); a tyrosine hydroxylase promoter (TH) (see, e.g., Oh et al. (2009) Gene Ther 16:437; Sasaoka et al. (1992) Mol. Brain Res. 16:274; Boundy et al. (1998) J. Neurosci. 18:9989; and Kaneda et al. (1991) Neuron 6:583-594); a GnRH promoter (see, e.g., Radovick et al. (1991) Proc. Natl. Acad. Sci. USA 88:3402-3406); an L7 promoter (see, e.g., Oberdick et al. (1990) Science 248:223-226); a DNMT promoter (see, e.g., Bartge et al. (1988) Proc. Natl. Acad. Sci. USA 85:3648-3652); an enkephalin promoter (see, e.g., Comb et al. (1988) EMBO J. 17:3793-3805); a myelin basic protein (MBP) promoter; a Ca2+-calmodulin-dependent protein kinase II-alpha (CamKIIα) promoter (see, e.g., Mayford et al. (1996) Proc. Natl. Acad. Sci. USA 93:13250; and Casanova et al. (2001) Genesis 31:37); a CMV enhancer/platelet-derived growth factor-β promoter (see, e.g., Liu et al. (2004) Gene Therapy 11:52-60); and the like.

[0729] Adipocyte-specific spatially restricted promoters include, but are not limited to, the aP2 gene promoter/enhancer, e.g., a region from −5.4 kb to +21 bp of a human aP2 gene (see, e.g., Tozzo et al. (1997) Endocrinol. 138:1604; Ross et al. (1990) Proc. Natl. Acad. Sci. USA 87:9590; and Pavjani et al. (2005) Nat. Med. 11:797); a glucose transporter-4 (GLUT4) promoter (see, e.g., Knight et al. (2003) Proc. Natl. Acad. Sci. USA 100:14725); a fatty acid translocase (FAT/CD36) promoter (see, e.g., Kuriki et al. (2002) Biol. Pharm. Bull. 25:1476; and Sato et al. (2002) J. Biol. Chem. 277:15703); a stearoyl-CoA desaturase-1 (SCD1) promoter (Tabor et al. (1999) J. Biol. Chem. 274:20603); a leptin promoter (see, e.g., Mason et al. (1998) Endocrinol. 139:1013; and Chen et al. (1999) Biochem. Biophys. Res. Comm. 262:187); an adiponectin promoter (see, e.g., Kita et al. (2005) Biochem. Biophys. Res. Comm. 331:484; and Chakrabarti (2010) Endocrinol. 151:2408); an adipsin promoter (see, e.g., Platt et al. (1989) Proc. Natl. Acad. Sci. USA 86:7490); a resistin promoter (see, e.g., Seo et al. (2003) Molec. Endocrinol. 17:1522); and the like.

[0730] Cardiomyocyte-specific spatially restricted promoters include, but are not limited to, control sequences derived from the following genes: myosin light chain-2, α-myosin heavy chain, AE3, cardiac troponin C, cardiac actin, and the like. Franz et al. (1997) Cardiovasc. Res. 35:560-566; Robbins et al. (1995) Ann. N.Y. Acad. Sci. 752:492-505; Linn et al. (1995) Circ. Res. 76:584-591; Parmacek et al. (1994) Mol. Cell. Biol. 14:1870-1885; Hunter et al. (1993) Hypertension 22:608-617; and Sartorelli et al. (1992) Proc. Natl. Acad. Sci. USA 89:4047-4051.

[0731] Smooth muscle-specific spatially restricted promoters include, but are not limited to, an SM22α promoter (see, e.g., Akyurek et al. (2000) Mol. Med. 6:983; and U.S. Pat. No. 7,169,874); a smoothelin promoter (see, e.g., WO 2001/018048); an α-smooth muscle actin promoter; and the like. For example, a 0.4 kb region of the SM22α promoter, within which lie two CArG elements, has been shown to mediate vascular smooth muscle cell-specific expression (see, e.g., Kim, et al. (1997) Mol. Cell. Biol. 17, 2266-2278; Li, et al., (1996) J. Cell Biol. 132, 849-859; and Moessler, et al. (1996) Development 122, 2415-2425).

[0732] Photoreceptor-specific spatially restricted promoters include, but are not limited to, a rhodopsin promoter; a rhodopsin kinase promoter (Young et al. (2003) Ophthalmol. Vis. Sci. 44:4076); a beta phosphodiesterase gene promoter (Nicoud et al. (2007) J. Gene Med. 9:1015); a retinitis pigmentosa gene promoter (Nicoud et al. (2007) supra); an interphotoreceptor retinoid-binding protein (IRBP) gene enhancer (Nicoud et al. (2007) supra); an IRBP gene promoter (Yokoyama et al. (1992) Exp Eye Res. 55:225); and the like.

### Nonlimiting Exemplary Cell-Specific Promoters

[0733] Cell-specific promoters known in the art may be used to direct expression of a Gene Writer protein, e.g., as described herein. Nonlimiting exemplary mammalian cell-specific promoters have been characterized and used in mice expressing Cre recombinase in a cell-specific manner. Certain nonlimiting exemplary mammalian cell-specific promoters are listed in Table 1 of U.S. Pat. No. 9,845,481, incorporated herein by reference.

[0734] In some embodiments, the cell-specific promoter is a promoter that is active in plants. Many exemplary cell-specific plant promoters are known in the art. See, e.g., U.S. Pat. Nos. 5,097,025; 5,783,393; 5,880,330; 5,981,727; 7,557,264; 6,291,666; 7,132,526; and 7,323,622; and U.S. Publication Nos. 2010/0269226; 2007/0180580; 2005/0034192; and 2005/0086712, which are incorporated by reference herein in their entireties for any purpose.

[0735] In some embodiments, a vector as described herein comprises an expression cassette. The term “expression cassette”, as used herein, refers to a nucleic acid construct comprising nucleic acid elements sufficient for the expression of the nucleic acid molecule of the instant invention. Typically, an expression cassette comprises the nucleic acid molecule of the instant invention operatively linked to a promoter sequence. The term “operatively linked” refers to the association of two or more nucleic acid fragments on a single nucleic acid fragment so that the function of one is affected by the other. For example, a promoter is operatively linked with a coding sequence when it is capable of affecting the expression of that coding sequence (e.g., the coding sequence is under the transcriptional control of the promoter). Encoding sequences can be operatively linked to regulatory sequences in sense or antisense orientation. In certain embodiments, the promoter is a heterologous promoter. The term “heterologous promoter”, as used herein, refers to a promoter that is not found to be operatively linked to a given encoding sequence in nature. In certain embodiments, an expression cassette may comprise additional elements, for example, an intron, an enhancer, a polyadenylation site, a woodchuck response element (WRE), and/or other elements known to affect expression levels of the encoding sequence. A “promoter” typically controls the expression of a coding sequence or functional RNA. In certain embodiments, a promoter sequence comprises proximal and more distal upstream elements and can further comprise an enhancer element. An “enhancer” can typically stimulate promoter activity and may be an innate element of the promoter or a heterologous element inserted to enhance the level or tissue-specificity of a promoter. In certain embodiments, the promoter is derived in its entirety from a native gene. In certain embodiments, the promoter is composed of different elements derived from different naturally occurring promoters. In certain embodiments, the promoter comprises a synthetic nucleotide sequence. It will be understood by those skilled in the art that different promoters will direct the expression of a gene in different tissues or cell types, or at different stages of development, or in response to different environmental conditions or to the presence or the absence of a drug or transcriptional co-factor. Ubiquitous, cell-type-specific, tissue-specific, developmental stage-specific, and conditional promoters, for example, drug-responsive promoters (e.g., tetracycline-responsive promoters) are well known to those of skill in the art. Examples of promoter include, but are not limited to, the phosphoglycerate kinase (PKG) promoter, CAG (composite of the CMV enhancer the chicken beta actin promoter (CBA) and the rabbit beta globin intron), NSE (neuronal specific enolase), synapsin or NeuN promoters, the SV40 early promoter, mouse mammary tumor virus LTR promoter; adenovirus major late promoter (Ad MLP); a herpes simplex virus (HSV) promoter, a cytomegalovirus (CMV) promoter such as the CMV immediate early promoter region (CMVIE), SFFV promoter, rous sarcoma virus (RSV) promoter, synthetic promoters, hybrid promoters, and the like. Other promoters can be of human origin or from other species, including from mice. Common promoters include, e.g., the human cytomegalovirus (CMV) immediate early gene promoter, the SV40 early promoter, the Rous sarcoma virus long terminal repeat, [beta]-actin, rat insulin promoter, the phosphoglycerate kinase promoter, the human alpha-1 antitrypsin (hAAT) promoter, the transthyretin promoter, the TBG promoter and other liver-specific promoters, the desmin promoter and similar muscle-specific promoters, the EF1-alpha promoter, the CAG promoter and other constitutive promoters, hybrid promoters with multi-tissue specificity, promoters specific for neurons like synapsin and glyceraldehyde-3-phosphate dehydrogenase promoter, all of which are promoters well known and readily available to those of skill in the art, can be used to obtain high-level expression of the coding sequence of interest. In addition, sequences derived from non-viral genes, such as the murine metallothionein gene, will also find use herein. Such promoter sequences are commercially available from, e.g., Stratagene (San Diego, CA). Additional exemplary promoter sequences are described, for example, in WO2018213786A1 (incorporated by reference herein in its entirety).

[0736] In some embodiments, the apolipoprotein E enhancer (ApoE) or a functional fragment thereof is used, e.g., to drive expression in the liver. In some embodiments, two copies of the ApoE enhancer or a functional fragment thereof is used. In some embodiments, the ApoE enhancer or functional fragment thereof is used in combination with a promoter, e.g., the human alpha-1 antitrypsin (hAAT) promoter.

[0737] In some embodiments, the regulatory sequences impart tissue-specific gene expression capabilities. In some cases, the tissue-specific regulatory sequences bind tissue-specific transcription factors that induce transcription in a tissue specific manner. Various tissue-specific regulatory sequences (e.g., promoters, enhancers, etc.) are known in the art. Exemplary tissue-specific regulatory sequences include, but are not limited to, the following tissue-specific promoters: a liver-specific thyroxin binding globulin (TBG) promoter, a insulin promoter, a glucagon promoter, a somatostatin promoter, a pancreatic polypeptide (PPY) promoter, a synapsin-1 (Syn) promoter, a creatine kinase (MCK) promoter, a mammalian desmin (DES) promoter, a α-myosin heavy chain (a-MHC) promoter, or a cardiac Troponin T (cTnT) promoter. Other exemplary promoters include Beta-actin promoter, hepatitis B virus core promoter, Sandig et al., Gene Ther., 3:1002-9 (1996); alpha-fetoprotein (AFP) promoter, Arbuthnot et al., Hum. Gene Ther., 7:1503-14 (1996)), bone osteocalcin promoter (Stein et al., Mol. Biol. Rep., 24:185-96 (1997)); bone sialoprotein promoter (Chen et al., J. Bone Miner. Res., 11:654-64 (1996)), CD2 promoter (Hansal et al., J. Immunol., 161:1063-8 (1998); immunoglobulin heavy chain promoter; T cell receptor α-chain promoter, neuronal such as neuron-specific enolase (NSE) promoter (Andersen et al., Cell. Mol. Neurobiol., 13:503-15 (1993)), neurofilament light-chain gene promoter (Piccioli et al., Proc. Natl. Acad. Sci. USA, 88:5611-5 (1991)), and the neuron-specific vgf gene promoter (Piccioli et al., Neuron, 15:373-84 (1995)), and others. Additional exemplary promoter sequences are described, for example, in U.S. patent Ser. No. 10/300,146 (incorporated herein by reference in its entirety). In some embodiments, a tissue-specific regulatory element, e.g., a tissue-specific promoter, is selected from one known to be operably linked to a gene that is highly expressed in a given tissue, e.g., as measured by RNA-seq or protein expression data, or a combination thereof. Methods for analyzing tissue specificity by expression are taught in Fagerberg et al. Mol Cell Proteomics 13(2):397-406 (2014), which is incorporated herein by reference in its entirety.

[0738] In some embodiments, a vector described herein is a multicistronic expression construct. Multicistronic expression constructs include, for example, constructs harboring a first expression cassette, e.g. comprising a first promoter and a first encoding nucleic acid sequence, and a second expression cassette, e.g. comprising a second promoter and a second encoding nucleic acid sequence. Such multicistronic expression constructs may, in some instances, be particularly useful in the delivery of non-translated gene products, such as hairpin RNAs, together with a polypeptide, for example, a gene writer and gene writer template. In some embodiments, multicistronic expression constructs may exhibit reduced expression levels of one or more of the included transgenes, for example, because of promoter interference or the presence of incompatible nucleic acid elements in close proximity. If a multicistronic expression construct is part of a viral vector, the presence of a self-complementary nucleic acid sequence may, in some instances, interfere with the formation of structures necessary for viral reproduction or packaging.

[0739] In some embodiments, the sequence encodes an RNA with a hairpin. In some embodiments, the hairpin RNA is a guide RNA, a template RNA, shRNA, or a microRNA. In some embodiments, the first promoter is an RNA polymerase I promoter. In some embodiments, the first promoter is an RNA polymerase II promoter. In some embodiments, the second promoter is an RNA polymerase III promoter. In some embodiments, the second promoter is a U6 or H1 promoter. In some embodiments, the nucleic acid construct comprises the structure of AAV construct B1 or B2.

[0740] Without wishing to be bound by theory, multicistronic expression constructs may not achieve optimal expression levels as compared to expression systems containing only one cistron. One of the suggested causes of lower expression levels achieved with multicistronic expression constructs comprising two or more promoter elements is the phenomenon of promoter interference (see, e.g., Curtin J A, Dane A P, Swanson A, Alexander I E, Ginn S L. Bidirectional promoter interference between two widely used internal heterologous promoters in a late-generation lentiviral construct. Gene Ther. 2008 March; 15(5):384-90; and Martin-Duque P, Jezzard S, Kaftansis L, Vassaux G. Direct comparison of the insulating properties of two genetic elements in an adenoviral vector containing two different expression cassettes. Hum Gene Ther. 2004 October; 15(10):995-1002; both references incorporated herein by reference for disclosure of promoter interference phenomenon). In some embodiments, the problem of promoter interference may be overcome, e.g., by producing multicistronic expression constructs comprising only one promoter driving transcription of multiple encoding nucleic acid sequences separated by internal ribosomal entry sites, or by separating cistrons comprising their own promoter with transcriptional insulator elements. In some embodiments, single-promoter driven expression of multiple cistrons may result in uneven expression levels of the cistrons. In some embodiments, a promoter cannot efficiently be isolated and isolation elements may not be compatible with some gene transfer vectors, for example, some retroviral vectors.

### MicroRNAs

[0741] MicroRNAs (miRNAs) and other small interfering nucleic acids generally regulate gene expression via target RNA transcript cleavage/degradation or translational repression of the target messenger RNA (mRNA). miRNAs may, in some instances, be natively expressed, typically as final 19-25 non-translated RNA products. miRNAs generally exhibit their activity through sequence-specific interactions with the 3′ untranslated regions (UTR) of target mRNAs. These endogenously expressed miRNAs may form hairpin precursors that are subsequently processed into an miRNA duplex, and further into a mature single stranded miRNA molecule. This mature miRNA generally guides a multiprotein complex, miRISC, which identifies target 3′ UTR regions of target mRNAs based upon their complementarity to the mature miRNA. Useful transgene products may include, for example, miRNAs or miRNA binding sites that regulate the expression of a linked polypeptide. A non-limiting list of miRNA genes; the products of these genes and their homologues are useful as transgenes or as targets for small interfering nucleic acids (e.g., miRNA sponges, antisense oligonucleotides), e.g., in methods such as those listed in U.S. Ser. No. 10/300,146, 22:25-25:48, incorporated by reference. In some embodiments, one or more binding sites for one or more of the foregoing miRNAs are incorporated in a transgene, e.g., a transgene delivered by a rAAV vector, e.g., to inhibit the expression of the transgene in one or more tissues of an animal harboring the transgene. In some embodiments, a binding site may be selected to control the expression of a transgene in a tissue specific manner. For example, binding sites for the liver-specific miR-122 may be incorporated into a transgene to inhibit expression of that transgene in the liver. Additional exemplary miRNA sequences are described, for example, in U.S. patent Ser. No. 10/300,146 (incorporated herein by reference in its entirety). For liver-specific Gene Writing, however, overexpression of miR-122 may be utilized instead of using binding sites to effect miR-122-specific degradation. This miRNA is positively associated with hepatic differentiation and maturation, as well as enhanced expression of liver specific genes. Thus, in some embodiments, the coding sequence for miR-122 may be added to a component of a Gene Writing system to enhance a liver-directed therapy.

[0742] A miR inhibitor or miRNA inhibitor is generally an agent that blocks miRNA expression and/or processing. Examples of such agents include, but are not limited to, microRNA antagonists, microRNA specific antisense, microRNA sponges, and microRNA oligonucleotides (double-stranded, hairpin, short oligonucleotides) that inhibit miRNA interaction with a Drosha complex. MicroRNA inhibitors, e.g., miRNA sponges, can be expressed in cells from transgenes (e.g., as described in Ebert, M. S. Nature Methods, Epub Aug. 12, 2007; incorporated by reference herein in its entirety). In some embodiments, microRNA sponges, or other miR inhibitors, are used with the AAVs. microRNA sponges generally specifically inhibit miRNAs through a complementary heptameric seed sequence. In some embodiments, an entire family of miRNAs can be silenced using a single sponge sequence. Other methods for silencing miRNA function (derepression of miRNA targets) in cells will be apparent to one of ordinary skill in the art.

[0743] In some embodiments, a miRNA as described herein comprises a sequence listed in Table 4 of PCT Publication No. WO2020014209, incorporated herein by reference. Also incorporated herein by reference are the listing of exemplary miRNA sequences from WO2020014209.

[0744] In some embodiments, it is advantageous to silence one or more components of a Gene Writing system (e.g., mRNA encoding a Gene Writer polypeptide, a Gene Writer Template RNA, or a heterologous object sequence expressed from the genome after successful Gene Writing) in a portion of cells. In some embodiments, it is advantageous to restrict expression of a component of a Gene Writing system to select cell types within a tissue of interest.

[0745] For example, it is known that in a given tissue, e.g., liver, macrophages and immune cells, e.g., Kupffer cells in the liver, may engage in uptake of a delivery vehicle for one or more components of a Gene Writing system. In some embodiments, at least one binding site for at least one miRNA highly expressed in macrophages and immune cells, e.g., Kupffer cells, is included in at least one component of a Gene Writing system, e.g., nucleic acid encoding a Gene Writing polypeptide or a transgene. In some embodiments, a miRNA that targets the one or more binding sites is listed in a table referenced herein, e.g., miR-142, e.g., mature miRNA hsa-miR-142-5p or hsa-miR-142-3p.

[0746] In some embodiments, there may be a benefit to decreasing Gene Writer levels and/or Gene Writer activity in cells in which Gene Writer expression or overexpression of a transgene may have a toxic effect. For example, it has been shown that delivery of a transgene overexpression cassette to dorsal root ganglion neurons may result in toxicity of a gene therapy (see Hordeaux et al Sci Transl Med 12(569):eaba9188 (2020), incorporated herein by reference in its entirety). In some embodiments, at least one miRNA binding site may be incorporated into a nucleic acid component of a Gene Writing system to reduce expression of a system component in a neuron, e.g., a dorsal root ganglion neuron. In some embodiments, the at least one miRNA binding site incorporated into a nucleic acid component of a Gene Writing system to reduce expression of a system component in a neuron is a binding site of miR-182, e.g., mature miRNA hsa-miR-182-5p or hsa-miR-182-3p. In some embodiments, the at least one miRNA binding site incorporated into a nucleic acid component of a Gene Writing system to reduce expression of a system component in a neuron is a binding site of miR-183, e.g., mature miRNA hsa-miR-183-5p or hsa-miR-183-3p. In some embodiments, combinations of miRNA binding sites may be used to enhance the restriction of expression of one or more components of a Gene Writing system to a tissue or cell type of interest.

[0747] The table below provides exemplary miRNAs and corresponding expressing cells, e.g., a miRNA for which one can, in some embodiments, incorporate binding sites (complementary sequences) in the transgene or polypeptide nucleic acid, e.g., to decrease expression in that off-target cell.

TABLE 4D
Exemplary miRNA from off-target cells and tissues

| Silenced | miRNA | | |
|---|---|---|---|
| cell type | name | Mature miRNA | miRNA sequence |
| Kupffer cells | miR-142 | hsa-miR-142-5p | Cauaaaguagaaagcacuacu |
| | | | (SEQ ID NO: 39,006) |
| Kupffer cells | miR-142 | hsa-miR-142-3p | Uguaguguuuccuacuuuaugga |
| | | | (SEQ ID NO: 39,007) |
| Dorsal root | miR-182 | hsa-miR-182-5p | Uuuggcaaugguagaacucacac |
| ganglion neurons | | | u (SEQ ID NO: 39,008) |
| Dorsal root | miR-182 | hsa-miR-182-3p | Ugguucuagacuugccaacua |
| ganglion neurons | | | (SEQ ID NO: 39,009) |
| Dorsal root | miR-183 | hsa-miR-183-5p | Uauggcacugguagaauucacu |
| ganglion neurons | | | (SEQ ID NO: 39,010) |
| Dorsal root | miR-183 | hsa-miR-183-3p | Gugaauuaccgaagggccauaa |
| ganglion neurons | | | (SEQ ID NO: 39,011) |
| Hepatocytes | miR-122 | hsa-miR-122-5p | Uggagugugacaaugguguuug |
| | | | (SEQ ID NO: 39,012) |
| Hepatocytes | miR-122 | hsa-miR-122-3p | Aacgccauuaucacacuaaaua |
| | | | (SEQ ID NO: 39,013) |

### 5′ UTR and 3′ UTR

[0748] In certain embodiments, a nucleic acid comprising an open reading frame encoding a Gene Writer polypeptide (e.g., as described herein) comprises a 5′ UTR and/or a 3′ UTR. In embodiments, a 5′ UTR and 3′ UTR for protein expression, e.g., mRNA (or DNA encoding the RNA) for a Gene Writer polypeptide or heterologous object sequence, comprise optimized expression sequences. In some embodiments, the 5′ UTR comprises GGGAAAUAAGAGAGAAAAGAAGAGUAAGAAGAAAUAUAAGAGCCACC (SEQ ID NO: 39,014) and/or the 3′ UTR comprising UGAUAAUAGGCUGGAGCCUCGGUGGCCAUGCUUCUUGCCCCUUGGGCCUCCCCCC AGCCCCUCCUCCCCUUCCUGCACCCGUACCCCCGUGGUCUUUGAAUAAAGUCUGA (SEQ ID NO: 39,015), e.g., as described in Richner et al. Cell 168(6): P1114-1125 (2017), the sequences of which are incorporated herein by reference.

[0749] In some embodiments, an open reading frame of a Gene Writer system, e.g., an ORF of an mRNA (or DNA encoding an mRNA) encoding a Gene Writer polypeptide or one or more ORFs of an mRNA (or DNA encoding an mRNA) of a heterologous object sequence, is flanked by a 5′ and/or 3′ untranslated region (UTR) that enhances the expression thereof. In some embodiments, the 5′ UTR of an mRNA component (or transcript produced from a DNA component) of the system comprises the sequence 5′-GGGAAAUAAGAGAGAAAAGAAGAGUAAGAAGAAAUAUAAGAGCCACC-3′ (SEQ ID NO: 39,016). In some embodiments, the 3′ UTR of an mRNA component (or transcript produced from a DNA component) of the system comprises the sequence 5′-UGAUAAUAGGCUGGAGCCUCGGUGGCCAUGCUUCUUGCCCCUUGGGCCUCCCCCC AGCCCCUCCUCCCCUUCCUGCACCCGUACCCCCGUGGUCUUUGAAUAAAGUCUGA-3′ (SEQ ID NO: 39,017). This combination of 5′ UTR and 3′ UTR has been shown to result in desirable expression of an operably linked ORF by Richner et al. Cell 168(6): P1114-1125 (2017), the teachings and sequences of which are incorporated herein by reference. In some embodiments, a system described herein comprises a DNA encoding a transcript, wherein the DNA comprises the corresponding 5′ UTR and 3′ UTR sequences, with T substituting for U in the above-listed sequence). In some embodiments, a DNA vector used to produce an RNA component of the system further comprises a promoter upstream of the 5′ UTR for initiating in vitro transcription, e.g, a T7, T3, or SP6 promoter. The 5′ UTR above begins with GGG, which is a suitable start for optimizing transcription using T7 RNA polymerase. For tuning transcription levels and altering the transcription start site nucleotides to fit alternative 5′ UTRs, the teachings of Davidson et al. Pac Symp Biocomput 433-443 (2010) describe T7 promoter variants, and the methods of discovery thereof, that fulfill both of these traits.

### Viral Vectors and Components Thereof

[0750] Viruses are a useful source of delivery vehicles for the systems described herein, in addition to a source of relevant enzymes or domains as described herein, e.g., as sources of recombinases and DNA binding domains used herein, e.g., Cre recombinase, lambda integrase, or the DNA binding domains from AAV Rep proteins. Some enzymes may have multiple activities. In some embodiments, the virus used as a Gene Writer delivery system or a source of components thereof may be selected from a group as described by Baltimore Bacteriol Rev 35(3):235-241 (1971).

[0751] In some embodiments, the virus is selected from a Group I virus, e.g., is a DNA virus and packages dsDNA into virions. In some embodiments, the Group I virus is selected from, e.g., Adenoviruses, Herpesviruses, Poxviruses.

[0752] In some embodiments, the virus is selected from a Group II virus, e.g., is a DNA virus and packages ssDNA into virions. In some embodiments, the Group II virus is selected from, e.g., Parvoviruses. In some embodiments, the parvovirus is a dependoparvovirus, e.g., an adeno-associated virus (AAV).

[0753] In some embodiments, the virus is selected from a Group III virus, e.g., is an RNA virus and packages dsRNA into virions. In some embodiments, the Group III virus is selected from, e.g., Reoviruses. In some embodiments, one or both strands of the dsRNA contained in such virions is a coding molecule able to serve directly as mRNA upon transduction into a host cell, e.g., can be directly translated into protein upon transduction into a host cell without requiring any intervening nucleic acid replication or polymerization steps.

[0754] In some embodiments, the virus is selected from a Group IV virus, e.g., is an RNA virus and packages ssRNA(+) into virions. In some embodiments, the Group IV virus is selected from, e.g., Coronaviruses, Picornaviruses, Togaviruses. In some embodiments, the ssRNA(+) contained in such virions is a coding molecule able to serve directly as mRNA upon transduction into a host cell, e.g., can be directly translated into protein upon transduction into a host cell without requiring any intervening nucleic acid replication or polymerization steps.

[0755] In some embodiments, the virus is selected from a Group V virus, e.g., is an RNA virus and packages ssRNA(−) into virions. In some embodiments, the Group V virus is selected from, e.g., Orthomyxoviruses, Rhabdoviruses. In some embodiments, an RNA virus with an ssRNA(−) genome also carries an enzyme inside the virion that is transduced to host cells with the viral genome, e.g., an RNA-dependent RNA polymerase, capable of copying the ssRNA(−) into ssRNA(+) that can be translated directly by the host.

[0756] In some embodiments, the virus is selected from a Group VI virus, e.g., is a retrovirus and packages ssRNA(+) into virions. In some embodiments, the Group VI virus is selected from, e.g., Retroviruses. In some embodiments, the retrovirus is a lentivirus, e.g., HIV-1, HIV-2, SIV, BIV. In some embodiments, the retrovirus is a spumavirus, e.g., a foamy virus, e.g., HFV, SFV, BFV. In some embodiments, the ssRNA(+) contained in such virions is a coding molecule able to serve directly as mRNA upon transduction into a host cell, e.g., can be directly translated into protein upon transduction into a host cell without requiring any intervening nucleic acid replication or polymerization steps. In some embodiments, the ssRNA(+) is first reverse transcribed and copied to generate a dsDNA genome intermediate from which mRNA can be transcribed in the host cell. In some embodiments, an RNA virus with an ssRNA(+) genome also carries an enzyme inside the virion that is transduced to host cells with the viral genome, e.g., an RNA-dependent DNA polymerase, capable of copying the ssRNA(+) into dsDNA that can be transcribed into mRNA and translated by the host.

[0757] In some embodiments, the virus is selected from a Group VII virus, e.g., is a retrovirus and packages dsRNA into virions. In some embodiments, the Group VII virus is selected from, e.g., Hepadnaviruses. In some embodiments, one or both strands of the dsRNA contained in such virions is a coding molecule able to serve directly as mRNA upon transduction into a host cell, e.g., can be directly translated into protein upon transduction into a host cell without requiring any intervening nucleic acid replication or polymerization steps. In some embodiments, one or both strands of the dsRNA contained in such virions is first reverse transcribed and copied to generate a dsDNA genome intermediate from which mRNA can be transcribed in the host cell. In some embodiments, an RNA virus with a dsRNA genome also carries an enzyme inside the virion that is transduced to host cells with the viral genome, e.g., an RNA-dependent DNA polymerase, capable of copying the dsRNA into dsDNA that can be transcribed into mRNA and translated by the host.

[0758] In some embodiments, virions used to deliver nucleic acid in this invention may also carry enzymes involved in the process of Gene Writing. For example, a virion may contain a recombinase domain that is delivered into a host cell along with the nucleic acid. In some embodiments, a template nucleic acid may be associated with a Gene Writer polypeptide within a virion, such that both are co-delivered to a target cell upon transduction of the nucleic acid from the viral particle. In some embodiments, the nucleic acid in a virion may comprise DNA, e.g., linear ssDNA, linear dsDNA, circular ssDNA, circular dsDNA, minicircle DNA, dbDNA, ceDNA. In some embodiments, the nucleic acid in a virion may comprise RNA, e.g., linear ssRNA, linear dsRNA, circular ssRNA, circular dsRNA. In some embodiments, a viral genome may circularize upon transduction into a host cell, e.g., a linear ssRNA molecule may undergo a covalent linkage to form a circular ssRNA, a linear dsRNA molecule may undergo a covalent linkage to form a circular dsRNA or one or more circular ssRNA. In some embodiments, a viral genome may replicate by rolling circle replication in a host cell. In some embodiments, a viral genome may comprise a single nucleic acid molecule, e.g., comprise a non-segmented genome. In some embodiments, a viral genome may comprise two or more nucleic acid molecules, e.g., comprise a segmented genome. In some embodiments, a nucleic acid in a virion may be associated with one or proteins. In some embodiments, one or more proteins in a virion may be delivered to a host cell upon transduction. In some embodiments, a natural virus may be adapted for nucleic acid delivery by the addition of virion packaging signals to the target nucleic acid, wherein a host cell is used to package the target nucleic acid containing the packaging signals.

[0759] In some embodiments, a virion used as a delivery vehicle may comprise a commensal human virus. In some embodiments, a virion used as a delivery vehicle may comprise an anellovirus, the use of which is described in WO2018232017A1, which is incorporated herein by reference in its entirety.

Gene Writer Systems with Insulators

[0760] A Gene Writer system as described herein may include a template nucleic acid molecule comprising an insulator, a DNA recognition sequence that is specifically bound by a recombinase polypeptide (e.g., a tyrosine recombinase polypeptide or a serine recombinase (e.g., a serine integrase) polypeptide), and a heterologous object sequence. In some embodiments, the insulator is a DNA sequence that can form loop structures via recruitment of insulator proteins, which in turn cause two insulator sequences bound by the insulator proteins to be brought into close proximity with each other. In some instances, the nucleic acid sequence between a first insulator and a second insulator is insulated from one or more of:
[0761] a) heterochromatin formation;
[0762] b) epigenetic regulation (e.g., from both of epigenetic regulation and transcriptional regulation);
[0763] c) transcriptional regulation;
[0764] d) histone deacetylation (e.g., from both of histone deacetylation and histone methylation);
[0765] e) histone methylation;
[0766] f) histone deacetylation; and
[0767] g) DNA methylation, e.g., promoter DNA methylation.

[0768] In some instances, such insulators can act as barriers to heterochromatin entry into a region of a DNA molecule (e.g., a chromosome). For example, a pair of insulators flanking a region within a DNA molecule may reduce heterochromatin formation and/or presence within the sequence between the insulators, e.g., by at least about 25%, 50%, 75%, 80%, 85%, 90%, 95%, 96%, 97%, 98%, 99%, or 100%. In some instances, the insulators (e.g., by reducing or blocking heterochromatin formation) maintain or increase transcriptional activity of the heterologous object sequence positioned between the insulators. In some instances, transcriptional activity of the heterologous object sequence is maintained at approximately the same level (e.g., within about 75%-80%, 80%-85%, 85%-90%, 90%-95%, 95%-96%, 96%-97%, 97%-98%, 98%-99%, 99%-100%, 100%-110%, or 110%-125% of the level of transcription immediately after integration) over a period of time (e.g., a period of at least 1, 2, 3, 4, 5, 6, 7, 8, 9, 10, 20, 30, 40, 50, or 60 minutes, or a period of at least 1, 2, 3, 4, 5, 6, 7, 8, 9, 10, 11, 12, 14, 16, 18, 20, 22, or 24 hours, or a period of at least 1, 2, 3, 4, 5, 6, 7, 8, 9, 10, 20, 30, 40, 50, 60, 70, 80, 90, or 100 days, or more). In some instances, insulators can have enhancer blocking activity (i.e., reducing or eliminating the activity of an enhancer positioned between two insulator sequences). In some instances, transcriptional activity of a heterologous object sequence flanked by insulators is maintained at a level at least 1%, 2%, 3%, 4%, 5%, 10%, 15%, 20%, 25%, 30%, 40%, 50%, 60%, 70%, 80%, 90%, or 100% higher than the transcriptional activity in an otherwise similar heterologous object sequence not flanked by the insulators, at least 10, 20, 30, 40, 50, or 60 minutes, at least 1, 2, 3, 4, 5, 6, 7, 8, 9, 10, 11, 12, 14, 16, 18, 20, 22, or 24 hours, or at least 1, 2, 3, 4, 5, 6, 7, 8, 9, 10, 20, 30, 40, 50, 60, 70, 80, 90, or 100 days after integration. In some instances, enhancer-blocking insulators can reduce the transcription of a gene regulated by the enhancer by at least about 25%, 50%, 75%, 80%, 85%, 90%, 95%, 96%, 97%, 98%, 99%, or 100%.

[0769] In some embodiments, cells treated with a system or method described herein show a decrease in the loss of frequency of expression of the heterologous object sequence at day 28 and/or day 60 after the treatment, e.g., at least 1.1, 1.2, 1.3, 1.4, 1.5, 1.6, 1.7, 1.8, 1.9, 2.0, 2.5, 3, 4, 5, 6, 7, 8, 9, or at least 10-fold lower than cells treated with an otherwise similar template nucleic acid lacking the insulators. In some embodiments, cells treated with template nucleic acid comprising the described insulator configuration show a higher frequency of expression and/or a higher level of expression of the heterologous object sequence at day 28 and/or day 60 post-transduction, e.g., at least 1.1, 1.2, 1.3, 1.4, 1.5, 1.6, 1.7, 1.8, 1.9, 2.0, 2.5, 3, 4, 5, 6, 7, 8, 9, or at least 10-fold higher than cells treated with an otherwise similar template nucleic acid lacking the insulators. In some embodiments, cells treated with template nucleic acid comprising the described insulator configuration demonstrate a smaller increase in frequency of expression and/or level of expression of the heterologous object sequence after further treatment with TSA or 5-aza relative to no treatment with TSA or 5-aza, e.g., at least at least 1.1, 1.2, 1.3, 1.4, 1.5, 1.6, 1.7, 1.8, 1.9, 2.0, 2.5, 3, 4, 5, 6, 7, 8, 9, or at least 10-fold smaller increase than cells treated with an otherwise similar template nucleic acid lacking the insulators. In some embodiments, cells treated with template nucleic acid comprising the described insulator configuration demonstrate an increase in frequency of expression and/or level of expression of the heterologous object sequence after further treatment with TSA or 5-aza of less than 10, 9, 8, 7, 6, 5, 4, 3, 2.5, 2.0, 1.9, 1.8, 1.7, 1.6, 1.5, 1.4, 1.3, 1.2, or less than 1.1-fold increase as compared to no treatment with TSA or 5-aza.

[0770] In some embodiments, treatment of cells with a system or method described herein results in the formation of fewer IL-3 independent colonies, e.g., at least 1.1, 1.2, 1.3, 1.4, 1.5, 1.6, 1.7, 1.8, 1.9, 2.0, 2.5, 3, 4, 5, 6, 7, 8, 9, or at least 10-fold fewer colonies as compared to a an otherwise similar template nucleic acid lacking insulators. In some embodiments, the fraction of mice developing tumors when implanted with cells treated with template nucleic acid comprising an insulator configuration as described herein is lower, e.g., at least 20%, 40%, 60%, 80%, or 100% lower, than mice implanted with cells treated with an otherwise similar template nucleic acid lacking insulators. In some embodiments, the median latency of tumors derived from cells treated with a template nucleic acid comprising an insulator configuration as described herein is longer, e.g., at least 1.1, 1.2, 1.3, 1.4, 1.5, 1.6, 1.7, 1.8, 1.9, or at least 2-fold longer than those derived from cells treated with an otherwise similar template nucleic acid lacking insulators. In some embodiments, the 18-week survival rate of mice implanted with cells treated with template nucleic acid comprising an insulator configuration as described herein is higher, e.g., at least 1.1, 1.2, 1.3, 1.4, 1.5, 1.6, 1.7, 1.8, 1.9, or at least 2-fold higher than that of mice implanted with cells treated with an otherwise similar template nucleic acid lacking insulators.

[0771] In some embodiments, treatment of cells with a system or method described herein results in a change in expression that is lower, e.g., at least 1.1, 1.2, 1.3, 1.4, 1.5, 1.6, 1.7, 1.8, 1.9, 2.0, 2.5, 3, 4, 5, 6, 7, 8, 9, or at least 10-fold lower than the change in expression after integration using an otherwise similar template nucleic acid lacking insulators for at least one gene local to the site of integration. In some embodiments, integration using a template nucleic acid comprising an insulator configuration as described herein results in a less than 10, 9, 8, 7, 6, 5, 4, 3, 2.5, 2.0, 1.9, 1.8, 1.7, 1.6, 1.5, 1.4, 1.3, 1.2, or a less than 1.1-fold change in gene expression for at least one gene local to the site of integration compared to otherwise similar untreated cells. In some embodiments, integration using a template plasmid comprising an insulator configuration as described herein results in a less than 10, 9, 8, 7, 6, 5, 4, 3, 2.5, 2.0, 1.9, 1.8, 1.7, 1.6, 1.5, 1.4, 1.3, 1.2, or a less than 1.1-fold change in expression for at least 90%, e.g., at least 90%, 95%, 96%, 97%, 97%, 99%, 99.5% or at least 99.9% of global transcripts, compared to otherwise similar untreated cells.

[0772] In some instances, a template nucleic acid molecule as described herein comprises a first insulator and a second insulator, with the DNA recognition sequence positioned between the first and second insulator (e.g., as shown in FIGS. 6 and 7). In some instances, the heterologous object sequence is positioned outside of the region between the first and second insulator that comprises the DNA recognition sequence (e.g., as shown in FIGS. 6 and 7). The template nucleic acid molecule may, in some instances, be recombined with a target DNA (e.g., a genomic DNA, e.g., a chromosome or a mitochondrial genome) by a recombinase polypeptide (e.g., a tyrosine recombinase polypeptide or a serine recombinase (e.g., serine integrase) polypeptide), e.g., via recombination of the DNA recognition sequence with a cognate DNA recognition sequence comprised by the target DNA. In some instances, recombination results in integration of the heterologous object sequence into the target DNA, with the first and second insulators flanking the resultant integrated heterologous object sequence.

[0773] In some embodiments, the distance between the first insulator and the DNA recognition sequence is less than 2500, 2000, 1500, 1000, 750, 500, 400, 300, 200, 150, 100, 90, 80, 70, 60, 50, 40, 30, 20, 15, 10, 9, 8, 7, 6, 5, 4, 3, 2, or 1 nucleotides. In some embodiments, the distance between the DNA recognition sequence and the second insulator is less than 2500, 2000, 1500, 1000, 750, 500, 400, 300, 200, 150, 100, 90, 80, 70, 60, 50, 40, 30, 20, 15, 10, 9, 8, 7, 6, 5, 4, 3, 2, or 1 nucleotides. In some embodiments, the distance between the first insulator and the second insulator is less than 1000, 900, 800, 700, 600, 500, 400, 300, 200, 150, 100, 90, 80, 70, 60, or 50 nucleotides.

[0774] It is understood that in referring to nucleotide distances between elements in nucleotides, unless specified otherwise, distance refers to the number of nucleotides (of a single strand) or base pairs (in a double strand) that are between the elements but not part of the elements. As an example, if a first element occupies nucleotides 1-100, and a second element occupies nucleotides 102-200 of the same nucleic acid, the distance between the first element and the second element is 1 nucleotide.

[0775] In some embodiments, the insulator is a chicken β-globin 5′HS4 (cHS4) element, a Scaffold or Matrix Attachment Region (S/MAR) (e.g., MAR X_S29), a Stabilising Anti Repressor (STAR) element (e.g., STAR40), a D4Z4 insulator, A Ubiquitous Chromatin Opening Element (UCOE element) (e.g., aHNRPA2B1-CBX3 locus (A2UCOE), 3′UCOE, or SRF-UCOE), or a functional fragment or variant of any of the foregoing.

[0776] In some embodiments, the insulator comprises one or more (e.g., 2, 3, or 4) CAAT-box binding transcription factor binding site (CTF binding site), e.g., as described in Molecular therapy vol. 22 no. 4, 774-785 April 2014, incorporated herein by reference. In some embodiments, the insulator comprises one or more CCCTC-binding factor (also known as CTCF) binding site, e.g., as described in doi:10.1038/nbt.3062, incorporated herein by reference.

[0777] In some embodiments, the insulator protein that specifically bounds to one or more insulators (e.g., in a system as described herein) is selected from CTCF (CCCTC-binding factor), CTF (CAAT-binding transcription factor 1), USF 1 (Upstream Stimulatory Factor 1), USF2 (Upstream Stimulatory Factor 2), PARP-1 (Poly(ADP-ribose) Polymerase-1), and VEZF1 (Vascular Endothelial Zinc Finger 1), or a polypeptide having at least 75%, 80%, 85%, 90%, 95%, 96%, 97%, 98%, or 99% sequence identity thereto.

### Production of Compositions and Systems

[0778] As will be appreciated by one of skill, methods of designing and constructing nucleic acid constructs and proteins or polypeptides (such as the systems, constructs and polypeptides described herein) are routine in the art. Generally, recombinant methods may be used. See, in general, Smales & James (Eds.), Therapeutic Proteins: Methods and Protocols (Methods in Molecular Biology), Humana Press (2005); and Crommelin, Sindelar & Meibohm (Eds.), Pharmaceutical Biotechnology: Fundamentals and Applications, Springer (2013). Methods of designing, preparing, evaluating, purifying and manipulating nucleic acid compositions are described in Green and Sambrook (Eds.), Molecular Cloning. A Laboratory Manual(Fourth Edition), Cold Spring Harbor Laboratory Press (2012).

[0779] Exemplary methods for producing a therapeutic pharmaceutical protein or polypeptide described herein involve expression in mammalian cells, although recombinant proteins can also be produced using insect cells, yeast, bacteria, or other cells under control of appropriate promoters. Mammalian expression vectors may comprise non-transcribed elements such as an origin of replication, a suitable promoter, and other 5′ or 3′ flanking non-transcribed sequences, and 5′ or 3′ non-translated sequences such as necessary ribosome binding sites, a polyadenylation site, splice donor and acceptor sites, and termination sequences. DNA sequences derived from the SV40 viral genome, for example, SV40 origin, early promoter, splice, and polyadenylation sites may be used to provide other genetic elements required for expression of a heterologous DNA sequence. Appropriate cloning and expression vectors for use with bacterial, fungal, yeast, and mammalian cellular hosts are described in Green & Sambrook, Molecular Cloning: A Laboratory Manual (Fourth Edition), Cold Spring Harbor Laboratory Press (2012).

[0780] Various mammalian cell culture systems can be employed to express and manufacture recombinant protein. Examples of mammalian expression systems include CHO, COS, HEK293, HeLA, and BHK cell lines. Processes of host cell culture for production of protein therapeutics are described in Zhou and Kantardjieff (Eds.), Mammalian Cell Cultures for Biologics Manufacturing (Advances in Biochemical Engineering/Biotechnology), Springer (2014). Compositions described herein may include a vector, such as a viral vector, e.g., a lentiviral vector, encoding a recombinant protein. In some embodiments, a vector, e.g., a viral vector, may comprise a nucleic acid encoding a recombinant protein.

[0781] Purification of protein therapeutics is described in Franks, Protein Biotechnology: Isolation, Characterization, and Stabilization, Humana Press (2013); and in Cutler, Protein Purfication Protocols (Methods in Molecular Biology), Humana Press (2010).

[0782] The disclosure is directed, in part, to comparisons of nucleic acid and amino acid sequences with reference sequences or one another to determine % identity or a number of mismatches between said sequences. A person of skill in the art will understand that a number of methods and/or tools are available to make such determinations, including NCBI's BLAST and pairwise alignment tools that perform global sequence alignment of two input sequences (e.g., using the Needleman-Wunsch alignment algorithm) such as the European Bioinformatics Institute (EBI) and European Molecular Biology Laboratory (EMBL) EMBOSS Needle tool.

[0783] RNAs (e.g., a gRNA or an mRNA, e.g., an mRNA encoding a GeneWriter) may also be produced as described herein. In some embodiments, RNA segments may be produced by chemical synthesis. In some embodiments, RNA segments may be produced by in vitro transcription of a nucleic acid template, e.g., by providing an RNA polymerase to act on a cognate promoter of a DNA template to produce an RNA transcript. In some embodiments, in vitro transcription is performed using, e.g., a T7, T3, or SP6 RNA polymerase, or a derivative thereof, acting on a DNA, e.g., dsDNA, ssDNA, linear DNA, plasmid DNA, linear DNA amplicon, linearized plasmid DNA, e.g., encoding the RNA segment, e.g., under transcriptional control of a cognate promoter, e.g., a T7, T3, or SP6 promoter. In some embodiments, a combination of chemical synthesis and in vitro transcription is used to generate the RNA segments for assembly. In embodiments, the gRNA is produced by chemical synthesis and the heterologous object sequence segment is produced by in vitro transcription. Without wishing to be bound by theory, in vitro transcription may be better suited for the production of longer RNA molecules. In some embodiments, reaction temperature for in vitro transcription may be lowered, e.g., be less than 37° C. (e.g., between 0-10° C., 10-20° C., or 20-30° C.), to result in a higher proportion of full-length transcripts (see Krieg Nucleic Acids Res 18:6463 (1990), which is herein incorporated by reference in its entirety). In some embodiments, a protocol for improved synthesis of long transcripts is employed to synthesize a long RNA, e.g., an RNA greater than 5 kb, such as the use of e.g., T7 RiboMAX Express, which can generate 27 kb transcripts in vitro (Thiel et al. J Gen Virol 82(6):1273-1281 (2001)). In some embodiments, modifications to RNA molecules as described herein may be incorporated during synthesis of RNA segments (e.g., through the inclusion of modified nucleotides or alternative binding chemistries), following synthesis of RNA segments through chemical or enzymatic processes, following assembly of one or more RNA segments, or a combination thereof.

[0784] In some embodiments, an mRNA of the system (e.g., an mRNA encoding a Gene Writer polypeptide) is synthesized in vitro using T7 polymerase-mediated DNA-dependent RNA transcription from a linearized DNA template, where UTP is optionally substituted with 1-methylpseudoUTP. In some embodiments, the transcript incorporates 5′ and 3′ UTRs, e.g., GGGAAAUAAGAGAGAAAAGAAGAGUAAGAAGAAAUAUAAGAGCCACC (SEQ ID NO: 39,018) and UGAUAAUAGGCUGGAGCCUCGGUGGCCAUGCUUCUUGCCCCUUGGGCCUCCCCCC AGCCCCUCCUCCCCUUCCUGCACCCGUACCCCCGUGGUCUUUGAAUAAAGUCUGA (SEQ ID NO: 39,019), or functional fragments or variants thereof, and optionally includes a poly-A tail, which can be encoded in the DNA template or added enzymatically following transcription. In some embodiments, a donor methyl group, e.g., S-adenosylmethionine, is added to a methylated capped RNA with cap 0 structure to yield a cap 1 structure that increases mRNA translation efficiency (Richner et al. Cell 168(6): P1114-1125 (2017)).

[0785] In some embodiments, the transcript from a T7 promoter starts with a GGG motif. In some embodiments, a transcript from a T7 promoter does not start with a GGG motif. It has been shown that a GGG motif at the transcriptional start, despite providing superior yield, may lead to T7 RNAP synthesizing a ladder of poly(G) products as a result of slippage of the transcript on the three C residues in the template strand from +1 to +3 (Imburgio et al. Biochemistry 39(34):10419-10430 (2000). For tuning transcription levels and altering the transcription start site nucleotides to fit alternative 5′ UTRs, the teachings of Davidson et al. Pac Symp Biocomput 433-443 (2010) describe T7 promoter variants, and the methods of discovery thereof, that fulfill both of these traits.

[0786] In some embodiments, RNA segments may be connected to each other by covalent coupling. In some embodiments, an RNA ligase, e.g., T4 RNA ligase, may be used to connect two or more RNA segments to each other. When a reagent such as an RNA ligase is used, a 5′ terminus is typically linked to a 3′ terminus. In some embodiments, if two segments are connected, then there are two possible linear constructs that can be formed (i.e., (1) 5′-Segment 1-Segment 2-3′ and (2) 5′-Segment 2-Segment 1-3′). In some embodiments, intramolecular circularization can also occur. Both of these issues can be addressed, for example, by blocking one 5′ terminus or one 3′ terminus so that RNA ligase cannot ligate the terminus to another terminus. In embodiments, if a construct of 5′-Segment 1-Segment 2-3′ is desired, then placing a blocking group on either the 5′ end of Segment 1 or the 3′ end of Segment 2 may result in the formation of only the correct linear ligation product and/or prevent intramolecular circularization. Compositions and methods for the covalent connection of two nucleic acid (e.g., RNA) segments are disclosed, for example, in US20160102322A1 (incorporated herein by reference in its entirety), along with methods including the use of an RNA ligase to directionally ligate two single-stranded RNA segments to each other.

[0787] One example of an end blocker that may be used in conjunction with, for example, T4 RNA ligase, is a dideoxy terminator. T4 RNA ligase typically catalyzes the ATP-dependent ligation of phosphodiester bonds between 5′-phosphate and 3′-hydroxyl termini. In some embodiments, when T4 RNA ligase is used, suitable termini must be present on the termini being ligated. One means for blocking T4 RNA ligase on a terminus comprises failing to have the correct terminus format. Generally, termini of RNA segments with a 5-hydroxyl or a 3′-phosphate will not act as substrates for T4 RNA ligase.

[0788] Additional exemplary methods that may be used to connect RNA segments is by click chemistry (e.g., as described in U.S. Pat. Nos. 7,375,234 and 7,070,941, and US Patent Publication No. 2013/0046084, the entire disclosures of which are incorporated herein by reference). For example, one exemplary click chemistry reaction is between an alkyne group and an azide group (see FIG. 11 of US20160102322A1, which is incorporated herein by reference in its entirety). Any click reaction may potentially be used to link RNA segments (e.g., Cu-azide-alkyne, strain-promoted-azide-alkyne, staudinger ligation, tetrazine ligation, photo-induced tetrazole-alkene, thiol-ene, NHS esters, epoxides, isocyanates, and aldehyde-aminooxy). In some embodiments, ligation of RNA molecules using a click chemistry reaction is advantageous because click chemistry reactions are fast, modular, efficient, often do not produce toxic waste products, can be done with water as a solvent, and/or can be set up to be stereospecific.

[0789] In some embodiments, RNA segments may be connected using an Azide-Alkyne Huisgen Cycloaddition. reaction, which is typically a 1,3-dipolar cycloaddition between an azide and a terminal or internal alkyne to give a 1,2,3-triazole for the ligation of RNA segments. Without wishing to be bound by theory, one advantage of this ligation method may be that this reaction can initiated by the addition of required Cu(I) ions. Other exemplary mechanisms by which RNA segments may be connected include, without limitation, the use of halogens (F—, Br—, I—)/alkynes addition reactions, carbonyls/sulfhydryls/maleimide, and carboxyl/amine linkages. For example, one RNA molecule may be modified with thiol at 3′ (using disulfide amidite and universal support or disulfide modified support), and the other RNA molecule may be modified with acrydite at 5′ (using acrylic phosphoramidite), then the two RNA molecules can be connected by a Michael addition reaction. This strategy can also be applied to connecting multiple RNA molecules stepwise. Also provided are methods for linking more than two (e.g., three, four, five, six, etc.) RNA molecules to each other. Without wishing to be bound by theory, this may be useful when a desired RNA molecule is longer than about 40 nucleotides, e.g., such that chemical synthesis efficiency degrades, e.g., as noted in US20160102322A1 (incorporated herein by reference in its entirety).

[0790] By way of illustration, a tracrRNA is typically around 80 nucleotides in length. Such RNA molecules may be produced, for example, by processes such as in vitro transcription or chemical synthesis. In some embodiments, when chemical synthesis is used to produce such RNA molecules, they may be produced as a single synthesis product or by linking two or more synthesized RNA segments to each other. In embodiments, when three or more RNA segments are connected to each other, different methods may be used to link the individual segments together. Also, the RNA segments may be connected to each other in one pot (e.g., a container, vessel, well, tube, plate, or other receptacle), all at the same time, or in one pot at different times or in different pots at different times. In a non-limiting example, to assemble RNA Segments 1, 2 and 3 in numerical order, RNA Segments 1 and 2 may first be connected, 5′ to 3′, to each other. The reaction product may then be purified for reaction mixture components (e.g., by chromatography), then placed in a second pot, for connection of the 3′ terminus with the 5′ terminus of RNA Segment 3. The final reaction product may then be connected to the 5′ terminus of RNA Segment 3.

[0791] In another non-limiting example, RNA Segment 1 (about 30 nucleotides) is the target locus recognition sequence of a crRNA and a portion of Hairpin Region 1. RNA Segment 2 (about 35 nucleotides) contains the remainder of Hairpin Region 1 and some of the linear tracrRNA between Hairpin Region 1 and Hairpin Region 2. RNA Segment 3 (about 35 nucleotides) contains the remainder of the linear tracrRNA between Hairpin Region 1 and Hairpin Region 2 and all of Hairpin Region 2. In this example, RNA Segments 2 and 3 are linked, 5′ to 3′, using click chemistry. Further, the 5′ and 3′ end termini of the reaction product are both phosphorylated. The reaction product is then contacted with RNA Segment 1, having a 3′ terminal hydroxyl group, and T4 RNA ligase to produce a guide RNA molecule.

[0792] A number of additional linking chemistries may be used to connect RNA segments according to method of the invention. Some of these chemistries are set out in Table 6 of US20160102322A1, which is incorporated herein by reference in its entirety.

### Vectors

[0793] The disclosure provides, in part, a nucleic acid, e.g., vector, encoding a Gene Writer polypeptide described herein, a template nucleic acid described herein, or both. In some embodiments, a vector comprises a selective marker, e.g., an antibiotic resistance marker. In some embodiments, the antibiotic resistance marker is a kanamycin resistance marker. In some embodiments, the antibiotic resistance marker does not confer resistance to beta-lactam antibiotics. In some embodiments, the vector does not comprise an ampicillin resistance marker. In some embodiments, the vector comprises a kanamycin resistance marker and does not comprise an ampicillin resistance marker. In some embodiments, a vector encoding a Gene Writer polypeptide is integrated into a target cell genome (e.g., upon administration to a target cell, tissue, organ, or subject). In some embodiments, a vector encoding a Gene Writer polypeptide is not integrated into a target cell genome (e.g., upon administration to a target cell, tissue, organ, or subject). In some embodiments, a vector comprising a template nucleic acid (e.g., template DNA) is not integrated into a target cell genome (e.g., upon administration to a target cell, tissue, organ, or subject). In some embodiments, if a vector is integrated into a target site in a target cell genome, the selective marker is not integrated into the genome. In some embodiments, if a vector is integrated into a target site in a target cell genome, genes or sequences involved in vector maintenance (e.g., plasmid maintenance genes) are not integrated into the genome. In some embodiments, if a vector is integrated into a target site in a target cell genome, transfer regulating sequences (e.g., inverted terminal repeats, e.g., from an AAV) are not integrated into the genome. In some embodiments, administration of a vector (e.g., encoding a Gene Writer polypeptide described herein, a template nucleic acid described herein, or both) to a target cell, tissue, organ, or subject results in integration of a portion of the vector into one or more target sites in the genome(s) of said target cell, tissue, organ, or subject. In some embodiments, less than 99, 95, 90, 80, 70, 60, 50, 40, 30, 20, 10, 5, 4, 3, 2, or 1% of target sites (e.g., no target sites) comprising integrated material comprise a selective marker (e.g., an antibiotic resistance gene), a transfer regulating sequence (e.g., an inverted terminal repeat, e.g., from an AAV), or both from the vector.

### AAV Vectors

[0794] In some embodiments, the vector encoding a Gene Writer polypeptide described herein, a template nucleic acid described herein, or both, is an adeno-associated virus (AAV) vector, e.g., comprising an AAV genome. In some embodiments, the AAV genome comprises two genes that encode four replication proteins and three capsid proteins, respectively. In some embodiments, the genes are flanked on either side by 145-bp inverted terminal repeats (ITRs). In some embodiments, the virion comprises up to three capsid proteins (Vp1, Vp2, and/or Vp3), e.g., produced in a 1:1:10 ratio. In some embodiments, the capsid proteins are produced from the same open reading frame and/or from differential splicing (Vp1) and alternative translational start sites (Vp2 and Vp3, respectively). Generally, Vp3 is the most abundant subunit in the virion and participates in receptor recognition at the cell surface defining the tropism of the virus. In some embodiments, Vp1 comprises a phospholipase domain, e.g., which functions in viral infectivity, in the N-terminus of Vp1.

[0795] In some embodiments, packaging capacity of the viral vectors limits the size of the base editor that can be packaged into the vector. For example, the packaging capacity of the AAVs can be about 4.5 kb (e.g., about 3.0, 3.5, 4.0, 4.5, 5.0, 5.5, or 6.0 kb), e.g., including one or two inverted terminal repeats (ITRs), e.g., 145 base ITRs.

[0796] In some embodiments, recombinant AAV (rAAV) comprises cis-acting 145-bp ITRs flanking vector transgene cassettes, e.g., providing up to 4.5 kb for packaging of foreign DNA. Subsequent to infection, rAAV can, in some instances, express a protein described herein and persist without integration into the host genome by existing episomally in circular head-to-tail concatemers. rAAV can be used, for example, in vitro and in vivo. In some embodiments, AAV-mediated gene delivery requires that the length of the coding sequence of the gene is equal or greater in size than the wild-type AAV genome.

[0797] AAV delivery of genes that exceed this size and/or the use of large physiological regulatory elements can be accomplished, for example, by dividing the protein(s) to be delivered into two or more fragments. In some embodiments, the N-terminal fragment is fused to a split intein-N. In some embodiments, the C-terminal fragment is fused to a split intein-C. In embodiments, the fragments are packaged into two or more AAV vectors.

[0798] In some embodiments, dual AAV vectors are generated by splitting a large transgene expression cassette in two separate halves (5 and 3 ends, or head and tail), e.g., wherein each half of the cassette is packaged in a single AAV vector (of <5 kb). The re-assembly of the full-length transgene expression cassette can, in some embodiments, then be achieved upon co-infection of the same cell by both dual AAV vectors. In some embodiments, co-infection is followed by one or more of: (1) homologous recombination (HR) between 5 and 3 genomes (dual AAV overlapping vectors); (2) ITR-mediated tail-to-head concatemerization of 5 and 3 genomes (dual AAV trans-splicing vectors); and/or (3) a combination of these two mechanisms (dual AAV hybrid vectors). In some embodiments, the use of dual AAV vectors in vivo results in the expression of full-length proteins. In some embodiments, the use of the dual AAV vector platform represents an efficient and viable gene transfer strategy for transgenes of greater than about 4.0, 4.1, 4.2, 4.3, 4.4, 4.5, 4.6, 4.7, 4.8, 4.9, or 5.0 kb in size. In some embodiments, AAV vectors can also be used to transduce cells with target nucleic acids, e.g., in the in vitro production of nucleic acids and peptides. In some embodiments, AAV vectors can be used for in vivo and ex vivo gene therapy procedures (see, e.g., West et al., Virology 160:38-47 (1987); U.S. Pat. No. 4,797,368; WO 93/24641; Kotin, Human Gene Therapy 5:793-801 (1994); Muzyczka, J. Clin. Invest. 94:1351 (1994); each of which is incorporated herein by reference in their entirety). The construction of recombinant AAV vectors is described in a number of publications, including U.S. Pat. No. 5,173,414; Tratschin et al., Mol. Cell. Biol. 5:3251-3260 (1985); Tratschin, et al., Mol. Cell. Biol. 4:2072-2081 (1984); Hermonat & Muzyczka, PNAS 81:6466-6470 (1984); and Samulski et al., J. Virol. 63:03822-3828 (1989) (incorporated by reference herein in their entirety).

[0799] In some embodiments, a Gene Writer described herein (e.g., with or without one or more guide nucleic acids) can be delivered using AAV, lentivirus, adenovirus or other plasmid or viral vector types, in particular, using formulations and doses from, for example, U.S. Pat. No. 8,454,972 (formulations, doses for adenovirus), U.S. Pat. No. 8,404,658 (formulations, doses for AAV) and U.S. Pat. No. 5,846,946 (formulations, doses for DNA plasmids) and from clinical trials and publications regarding the clinical trials involving lentivirus, AAV and adenovirus. For example, for AAV, the route of administration, formulation and dose can be as described in U.S. Pat. No. 8,454,972 and as in clinical trials involving AAV. For Adenovirus, the route of administration, formulation and dose can be as described in U.S. Pat. No. 8,404,658 and as in clinical trials involving adenovirus. For plasmid delivery, the route of administration, formulation and dose can be as described in U.S. Pat. No. 5,846,946 and as in clinical studies involving plasmids. Doses can be based on or extrapolated to an average 70 kg individual (e.g. a male adult human), and can be adjusted for patients, subjects, mammals of different weight and species. Frequency of administration is within the ambit of the medical or veterinary practitioner (e.g., physician, veterinarian), depending on usual factors including the age, sex, general health, other conditions of the patient or subject and the particular condition or symptoms being addressed. In some embodiments, the viral vectors can be injected into the tissue of interest. For cell-type specific Gene Writing, the expression of the Gene Writer and optional guide nucleic acid can, in some embodiments, be driven by a cell-type specific promoter.

[0800] In some embodiments, AAV allows for low toxicity, for example, due to the purification method not requiring ultracentrifugation of cell particles that can activate the immune response. In some embodiments, AAV allows low probability of causing insertional mutagenesis, for example, because it does not substantially integrate into the host genome.

[0801] In some embodiments, AAV has a packaging limit of about 4.4, 4.5, 4.6, 4.7, or 4.75 kb. In some embodiments, a Gene Writer, promoter, and transcription terminator can fit into a single viral vector. SpCas9 (4.1 kb) may, in some instances, be difficult to package into AAV. Therefore, in some embodiments, a Gene Writer is used that is shorter in length than other Gene Writers or base editors. In some embodiments, the Gene Writers are less than about 4.5 kb, 4.4 kb, 4.3 kb, 4.2 kb, 4.1 kb, 4 kb, 3.9 kb, 3.8 kb, 3.7 kb, 3.6 kb, 3.5 kb, 3.4 kb, 3.3 kb, 3.2 kb, 3.1 kb, 3 kb, 2.9 kb, 2.8 kb, 2.7 kb, 2.6 kb, 2.5 kb, 2 kb, or 1.5 kb.

[0802] An AAV can be AAV1, AAV2, AAV5 or any combination thereof. In some embodiments, the type of AAV is selected with respect to the cells to be targeted; e.g., AAV serotypes 1, 2, 5 or a hybrid capsid AAV1, AAV2, AAV5 or any combination thereof can be selected for targeting brain or neuronal cells; or AAV4 can be selected for targeting cardiac tissue. In some embodiments, AAV8 is selected for delivery to the liver. Exemplary AAV serotypes as to these cells are described, for example, in Grimm, D. et al, J. Virol. 82: 5887-5911 (2008) (incorporated herein by reference in its entirety). In some embodiments, AAV refers all serotypes, subtypes, and naturally-occurring AAV as well as recombinant AAV. AAV may be used to refer to the virus itself or a derivative thereof. In some embodiments, AAV includes AAV1, AAV2, AAV3, AAV3B, AAV4, AAV5, AAV6, AAV6.2, AAV7, AAVrh.64R1, AAVhu.37, AAVrh.8, AAVrh.32.33, AAV8, AAV9, AAV-DJ, AAV2/8, AAVrh10, AAVLK03, AV10, AAV11, AAV 12, rh10, and hybrids thereof, avian AAV, bovine AAV, canine AAV, equine AAV, primate AAV, nonprimate AAV, and ovine AAV. The genomic sequences of various serotypes of AAV, as well as the sequences of the native terminal repeats (TRs), Rep proteins, and capsid subunits are known in the art. Such sequences may be found in the literature or in public databases such as GenBank. Additional exemplary AAV serotypes are listed in Table 5A.

TABLE 5A
Viral delivery modalities

| Target Tissue | Vehicle | Reference |
|---|---|---|
| Liver | AAV (AAV5, AAV6, AAV8¹, | 1. Wang et al., Mol. Ther. 18, |
| | AAVrh.8¹, AAVhu.37¹, | 118-25 (2010) |
| | AAV2/8, AAV2/rh10², AAV9, | 2. Ginn et al., JHEP Reports, |
| | AAV2, NP40³, NP59^{2, 3}, | 100065 (2019) |
| | AAV3B⁵, AAV-DJ⁴, AAV- | 3. Paulk et al., Mol. Ther. 26, |
| | LK01⁴, AAV-LK02⁴, AAV- | 289-303 (2018). |
| | LK03⁴, AAV-LK19⁴ | 4. L. Lisowski et al., Nature. |
| | Adenovirus (Ad5, HC-AdV⁶) | 506, 382-6 (2014). |
| | | 5. L. Wang et al., Mol. Ther. 23, |
| | | 1877-87 (2015). |
| | | 6. Hausl Mol Ther (2010) |
| Lung | AAV (AAV4, AAV5, AAV6¹, | 1. Duncan et al., Mol Ther |
| | AAV9, H22²) | Methods Clin Dev (2018) |
| | Adenovirus (Ad5, Ad3, Ad21, | 2. Cooney et al., Am J Respir |
| | Ad14)³ | Cell Mol Biol (2019) |
| | | 3. Li et al., Mol Ther Methods |
| | | Clin Dev (2019) |
| Skin | AAV6¹, AAV-LK19² | 1. Petek et al., Mol. Ther. (2010) |
| | | 2. L. Lisowski et al., Nature. |
| | | 506, 382-6 (2014). |
| HSCs | HDAd5/35⁺⁺ | Wang et al. Blood Adv (2019) |

[0803] In some embodiments, a pharmaceutical composition (e.g., comprising an AAV as described herein) has less than 10% empty capsids, less than 8% empty capsids, less than 7% empty capsids, less than 5% empty capsids, less than 3% empty capsids, or less than 1% empty capsids. In some embodiments, the pharmaceutical composition has less than about 5% empty capsids. In some embodiments, the number of empty capsids is below the limit of detection. In some embodiments, it is advantageous for the pharmaceutical composition to have low amounts of empty capsids, e.g., because empty capsids may generate an adverse response (e.g., immune response, inflammatory response, liver response, and/or cardiac response), e.g., with little or no substantial therapeutic benefit.

[0804] In some embodiments, the residual host cell protein (rHCP) in the pharmaceutical composition is less than or equal to 100 ng/ml rHCP per 1×10¹³ vg/ml, e.g., less than or equal to 40 ng/ml rHCP per 1×10¹³ vg/ml or 1-50 ng/ml rHCP per 1×10¹³ vg/ml. In some embodiments, the pharmaceutical composition comprises less than 10 ng rHCP per 1.0×10¹³ vg, or less than 5 ng rHCP per 1.0×10¹³ vg, less than 4 ng rHCP per 1.0×10¹³ vg, or less than 3 ng rHCP per 1.0×10¹³ vg, or any concentration in between. In some embodiments, the residual host cell DNA (hcDNA) in the pharmaceutical composition is less than or equal to 5×10⁶ pg/ml hcDNA per 1×10¹³ vg/ml, less than or equal to 1.2×10⁶ pg/ml hcDNA per 1×10¹³ vg/ml, or 1×10⁵ pg/ml hcDNA per 1×10¹³ vg/ml. In some embodiments, the residual host cell DNA in said pharmaceutical composition is less than 5.0×10⁵ pg per 1×10¹³ vg, less than 2.0×10⁵ pg per 1.0×10¹³ vg, less than 1.1×10⁵ pg per 1.0×10¹³ vg, less than 1.0×10⁵ pg hcDNA per 1.0×10¹³ vg, less than 0.9×10⁵ pg hcDNA per 1.0×10¹³ vg, less than 0.8×10⁵ pg hcDNA per 1.0×10¹³ vg, or any concentration in between.

[0805] In some embodiments, the residual plasmid DNA in the pharmaceutical composition is less than or equal to 1.7×10⁵ pg/ml per 1.0×10¹³ vg/ml, or 1×10⁵ pg/ml per 1×1.0×10¹³ vg/ml, or 1.7×10⁶ pg/ml per 1.0×10¹³ vg/ml. In some embodiments, the residual DNA plasmid in the pharmaceutical composition is less than 10.0×10⁵ pg by 1.0×10¹³ vg, less than 8.0 ×10⁵ pg by 1.0×10¹³ vg or less than 6.8×10⁵ pg by 1.0×10¹³ vg. In embodiments, the pharmaceutical composition comprises less than 0.5 ng per 1.0×10¹³ vg, less than 0.3 ng per 1.0 ×10¹³ vg, less than 0.22 ng per 1.0×10¹³ vg or less than 0.2 ng per 1.0×10¹³ vg or any intermediate concentration of bovine serum albumin (BSA). In embodiments, the benzonase in the pharmaceutical composition is less than 0.2 ng by 1.0×10¹³ vg, less than 0.1 ng by 1.0×10¹³ vg, less than 0.09 ng by 1.0×10¹³ vg, less than 0.08 ng by 1.0×10¹³ vg or any intermediate concentration. In embodiments, Poloxamer 188 in the pharmaceutical composition is about 10 to 150 ppm, about 15 to 100 ppm or about 20 to 80 ppm. In embodiments, the cesium in the pharmaceutical composition is less than 50 pg/g (ppm), less than 30 pg/g (ppm) or less than 20 pg/g (ppm) or any intermediate concentration.

[0806] In embodiments, the pharmaceutical composition comprises total impurities, e.g., as determined by SDS-PAGE, of less than 10%, less than 8%, less than 7%, less than 6%, less than 5%, less than 4%, less than 3%, less than 2%, or any percentage in between. In embodiments, the total purity, e.g., as determined by SDS-PAGE, is greater than 90%, greater than 92%, greater than 93%, greater than 94%, greater than 95%, greater than 96%, greater than 97%, greater than 98%, or any percentage in between. In embodiments, no single unnamed related impurity, e.g., as measured by SDS-PAGE, is greater than 5%, greater than 4%, greater than 3% or greater than 2%, or any percentage in between. In embodiments, the pharmaceutical composition comprises a percentage of filled capsids relative to total capsids (e.g., peak 1+peak 2 as measured by analytical ultracentrifugation) of greater than 85%, greater than 86%, greater than 87%, greater than 88%, greater than 89%, greater than 90%, greater than 91%, greater than 91.9%, greater than 92%, greater than 93%, or any percentage in between. In embodiments of the pharmaceutical composition, the percentage of filled capsids measured in peak 1 by analytical ultracentrifugation is 20-80%, 25-75%, 30-75%, 35-75%, or 37.4-70.3%. In embodiments of the pharmaceutical composition, the percentage of filled capsids measured in peak 2 by analytical ultracentrifugation is 20-80%, 20-70%, 22-65%, 24-62%, or 24.9-60.1%.

[0807] In one embodiment, the pharmaceutical composition comprises a genomic titer of 1.0 to 5.0×10¹³ vg/mL, 1.2 to 3.0×10¹³ vg/mL or 1.7 to 2.3×10¹³ vg/ml. In one embodiment, the pharmaceutical composition exhibits a biological load of less than 5 CFU/mL, less than 4 CFU/mL, less than 3 CFU/mL, less than 2 CFU/mL or less than 1 CFU/mL or any intermediate contraction. In embodiments, the amount of endotoxin according to USP, for example, USP <85> (incorporated by reference in its entirety) is less than 1.0 EU/mL, less than 0.8 EU/mL or less than 0.75 EU/mL. In embodiments, the osmolarity of a pharmaceutical composition according to USP, for example, USP <785> (incorporated by reference in its entirety) is 350 to 450 mOsm/kg, 370 to 440 mOsm/kg or 390 to 430 mOsm/kg. In embodiments, the pharmaceutical composition contains less than 1200 particles that are greater than 25 μm per container, less than 1000 particles that are greater than 25 μm per container, less than 500 particles that are greater than 25 μm per container or any intermediate value. In embodiments, the pharmaceutical composition contains less than 10,000 particles that are greater than 10 μm per container, less than 8000 particles that are greater than 10 μm per container or less than 600 particles that are greater than 10 pm per container.

[0808] In one embodiment, the pharmaceutical composition has a genomic titer of 0.5 to 5.0×10¹³ vg/mL, 1.0 to 4.0×10¹³ vg/mL, 1.5 to 3.0×10¹³ vg/ml or 1.7 to 2.3×10¹³ vg/ml. In one embodiment, the pharmaceutical composition described herein comprises one or more of the following: less than about 0.09 ng benzonase per 1.0×10¹³ vg, less than about 30 pg/g (ppm) of cesium, about 20 to 80 ppm Poloxamer 188, less than about 0.22 ng BSA per 1.0×10¹³ vg, less than about 6.8×10⁵ pg of residual DNA plasmid per 1.0×10¹³ vg, less than about 1.1×10⁵ pg of residual hcDNA per 1.0×10¹³ vg, less than about 4 ng of rHCP per 1.0×10¹³ vg, pH 7.7 to 8.3, about 390 to 430 mOsm/kg, less than about 600 particles that are >25 μm in size per container, less than about 6000 particles that are >10 μm in size per container, about 1.7×10¹³-2.3×10¹³ vg/mL genomic titer, infectious titer of about 3.9×10⁸ to 8.4×10¹⁰ IU per 1.0×10¹³ vg, total protein of about 100-300 pg per 1.0×10¹³ vg, mean survival of >24 days in A7SMA mice with about 7.5×10¹³ vg/kg dose of viral vector, about 70 to 130% relative potency based on an in vitro cell based assay and/or less than about 5% empty capsid. In various embodiments, the pharmaceutical compositions described herein comprise any of the viral particles discussed here, retain a potency of between ±20%, between ±15%, between ±10% or within f 5% of a reference standard. In some embodiments, potency is measured using a suitable in vitro cell assay or in vivo animal model.

[0809] Additional methods of preparation, characterization, and dosing AAV particles are taught in WO2019094253, which is incorporated herein by reference in its entirety.

[0810] Additional rAAV constructs that can be employed consonant with the invention include those described in Wang et al 2019, available at: //doi.org/10.1038/s41573-019-0012-9, including Table 1 thereof, which is incorporated by reference in its entirety.

### Kits, Articles of Manufacture, and Pharmaceutical Compositions

[0811] In an aspect the disclosure provides a kit comprising a Gene Writer or a Gene Writing system, e.g., as described herein. In some embodiments, the kit comprises a Gene Writer polypeptide (or a nucleic acid encoding the polypeptide) and a template DNA. In some embodiments, the kit further comprises a reagent for introducing the system into a cell, e.g., transfection reagent, LNP, and the like. In some embodiments, the kit is suitable for any of the methods described herein. In some embodiments, the kit comprises one or more elements, compositions (e.g., pharmaceutical compositions), Gene Writers, and/or Gene Writer systems, or a functional fragment or component thereof, e.g., disposed in an article of manufacture. In some embodiments, the kit comprises instructions for use thereof.

[0812] In an aspect, the disclosure provides an article of manufacture, e.g., in which a kit as described herein, or a component thereof, is disposed.

[0813] In an aspect, the disclosure provides a pharmaceutical composition comprising a Gene Writer or a Gene Writing system, e.g., as described herein. In some embodiments, the pharmaceutical composition further comprises a pharmaceutically acceptable carrier or excipient. In some embodiments, the pharmaceutical composition comprises a template DNA.

### Chemistry, Manufacturing, and Controls (CMC)

[0814] Purification of protein therapeutics is described, for example, in Franks, Protein Biotechnology: Isolation, Characterization, and Stabilization, Humana Press (2013); and in Cutler, Protein Purification Protocols (Methods in Molecular Biology), Humana Press (2010).

[0815] In some embodiments, a Gene Writer™ system, polypeptide, and/or template nucleic acid (e.g., template DNA) conforms to certain quality standards. In some embodiments, a Gene Writer™ system, polypeptide, and/or template nucleic acid (e.g., template DNA) produced by a method described herein conforms to certain quality standards. Accordingly, the disclosure is directed, in some aspects, to methods of manufacturing a Gene Writer™ system, polypeptide, and/or template nucleic acid that conforms to certain quality standards, e.g., in which said quality standards are assayed. The disclosure is also directed, in some aspects, to methods of assaying said quality standards in a Gene Writer™ system, polypeptide, and/or template nucleic acid. In some embodiments, quality standards include, but are not limited to, one or more (e.g., 1, 2, 3, 4, 5, 6, 7, 8, 9, 10, 11, or 12) of the following:
[0816] (i) the length of the template DNA or the mRNA encoding the GeneWriter polypeptide, e.g., whether the DNA or mRNA has a length that is above a reference length or within a reference length range, e.g., whether at least 80, 85, 90, 95, 96, 97, 98, or 99% of the DNA or mRNA present is greater than 100, 125, 150, 175, or 200 nucleotides long;
[0817] (ii) the presence, absence, and/or length of a polyA tail on the mRNA, e.g., whether at least 80, 85, 90, 95, 96, 97, 98, or 99% of the mRNA present contains a polyA tail (e.g., a polyA tail that is at least 5, 10, 20, 30, 50, 70, 100 nucleotides in length);
[0818] (iii) the presence, absence, and/or type of a 5′ cap on the mRNA, e.g., whether at least 80, 85, 90, 95, 96, 97, 98, or 99% of the mRNA present contains a 5′ cap, e.g., whether that cap is a 7-methylguanosine cap, e.g., a 0-Me-m7G cap;
[0819] (iv) the presence, absence, and/or type of one or more modified nucleotides (e.g., selected from pseudouridine, dihydrouridine, inosine, 7-methylguanosine, 1-N-methylpseudouridine (1-Me-F), 5-methoxyuridine (5-MO-U), 5-methylcytidine (5mC), or a locked nucleotide) in the mRNA, e.g., whether at least 80, 85, 90, 95, 96, 97, 98, or 99% of the mRNA present contains one or more modified nucleotides;
[0820] (v) the stability of the template DNA or the mRNA (e.g., over time and/or under a pre-selected condition), e.g., whether at least 80, 85, 90, 95, 96, 97, 98, or 99% of the DNA or mRNA remains intact (e.g., greater than 100, 125, 150, 175, or 200 nucleotides long) after a stability test;
[0821] (vi) the potency of the template DNA or the mRNA in a system for modifying DNA, e.g., whether at least 1% of target sites are modified after a system comprising the DNA or mRNA is assayed for potency;
[0822] (vii) the length of the polypeptide, first polypeptide, or second polypeptide, e.g., whether the polypeptide, first polypeptide, or second polypeptide has a length that is above a reference length or within a reference length range, e.g., whether at least 80, 85, 90, 95, 96, 97, 98, or 99% of the polypeptide, first polypeptide, or second polypeptide present is greater than 600, 650, 700, 750, 800, 850, 900, 950, 1000, 1050, 1100, 1150, 1200, 1250, 1300, 1350, 1400, 1450, 1500, 1600, 1700, 1800, 1900, or 2000 amino acids long (and optionally, no larger than 2500, 2000, 1500, 1400, 1300, 1200, 1100, 1000, 900, 800, 700, or 600 amino acids long);
[0823] (viii) the presence, absence, and/or type of post-translational modification on the polypeptide, first polypeptide, or second polypeptide, e.g., whether at least 80, 85, 90, 95, 96, 97, 98, or 99% of the polypeptide, first polypeptide, or second polypeptide contains phosphorylation, methylation, acetylation, myristoylation, palmitoylation, isoprenylation, glipyatyon, or lipoylation, or any combination thereof,
[0824] (ix) the presence, absence, and/or type of one or more artificial, synthetic, or non-canonical amino acids (e.g., selected from ornithine, β-alanine, GABA, δ-Aminolevulinic acid, PABA, a D-amino acid (e.g., D-alanine or D-glutamate), aminoisobutyric acid, dehydroalanine, cystathionine, lanthionine, Djenkolic acid, Diaminopimelic acid, Homoalanine, Norvaline, Norleucine, Homonorleucine, homoserine, O-methyl-homoserine and O-ethyl-homoserine, ethionine, selenocysteine, selenohomocysteine, selenomethionine, selenoethionine, tellurocysteine, or telluromethionine) in the polypeptide, first polypeptide, or second polypeptide, e.g., whether at least 80, 85, 90, 95, 96, 97, 98, or 99% of the polypeptide, first polypeptide, or second polypeptide present contains one or more artificial, synthetic, or non-canonical amino acids;
[0825] (x) the stability of the polypeptide, first polypeptide, or second polypeptide (e.g., over time and/or under a pre-selected condition), e.g., whether at least 80, 85, 90, 95, 96, 97, 98, or 99% of the polypeptide, first polypeptide, or second polypeptide remains intact (e.g., greater than 600, 650, 700, 750, 800, 850, 900, 950, 1000, 1050, 1100, 1150, 1200, 1250, 1300, 1350, 1400, 1450, 1500, 1600, 1700, 1800, 1900, or 2000 amino acids long (and optionally, no larger than 2500, 2000, 1500, 1400, 1300, 1200, 1100, 1000, 900, 800, 700, or 600 amino acids long)) after a stability test;
[0826] (xi) the potency of the polypeptide, first polypeptide, or second polypeptide in a system for modifying DNA, e.g., whether at least 1% of target sites are modified after a system comprising the polypeptide, first polypeptide, or second polypeptide is assayed for potency; or
[0827] (xii) the presence, absence, and/or level of one or more of a pyrogen, virus, fungus, bacterial pathogen, or host cell protein, e.g., whether the system is free or substantially free of pyrogen, virus, fungus, bacterial pathogen, or host cell protein contamination.

[0828] In some embodiments, a system or pharmaceutical composition described herein is endotoxin free.

[0829] In some embodiments, the presence, absence, and/or level of one or more of a pyrogen, virus, fungus, bacterial pathogen, and/or host cell protein is determined. In embodiments, whether the system is free or substantially free of pyrogen, virus, fungus, bacterial pathogen, and/or host cell protein contamination is determined.

[0830] In some embodiments, a pharmaceutical composition or system as described herein has one or more (e.g., 1, 2, 3, or 4) of the following characteristics:
[0831] (a) less than 1% (e.g., less than 0.5%, 0.4%, 0.3%, 0.2%, or 0.1%) DNA template relative to the RNA encoding the polypeptide, e.g., on a molar basis;
[0832] (b) less than 1% (e.g., less than 0.5%, 0.4%, 0.3%, 0.2%, or 0.1%) uncapped RNA relative to the RNA encoding the polypeptide, e.g., on a molar basis;
[0833] (c) less than 1% (e.g., less than 0.5%, 0.4%, 0.3%, 0.2%, or 0.1%) partial length RNAs relative to the RNA encoding the polypeptide, e.g., on a molar basis;
[0834] (d) substantially lacks unreacted cap dinucleotides.

### Exemplary Heterologous Object Sequences

[0835] In some embodiments, the systems or methods provided herein comprise a heterologous object sequence, wherein the heterologous object sequence or a reverse complementary sequence thereof, encodes a protein (e.g., an antibody) or peptide. In some embodiments, the therapy is one approved by a regulatory agency such as FDA.

[0836] In some embodiments, the protein or peptide is a protein or peptide from the THPdb database (Usmani et al. PLoS One 12(7):e0181748 (2017), herein incorporated by reference in its entirety. In some embodiments, the protein or peptide is a protein or peptide disclosed in Table 5B. In some embodiments, the systems or methods disclosed herein, for example, those comprising Gene Writers, may be used to integrate an expression cassette for a protein or peptide from Table 5B into a host cell to enable the expression of the protein or peptide in the host. In some embodiments, the sequences of the protein or peptide in the first column of Table 5B can be found in the patents or applications provided in the third column of Table 5B, incorporated by reference in their entireties.

[0837] In some embodiments, the protein or peptide is an antibody disclosed in Table 1 of Lu et al. J Biomed Sci 27(1):1 (2020), herein incorporated by reference in its entirety. In some embodiments, the protein or peptide is an antibody disclosed in Table 6. In some embodiments, the systems or methods disclosed herein, for example, those comprising Gene Writers, may be used to integrate an expression cassette for an antibody from Table 6 into a host cell to enable the expression of the antibody in the host. In some embodiments, a system or method described herein is used to express an agent that binds a target of column 2 of Table 6 (e.g., a monoclonal antibody of column 1 of Table 6) in a subject having an indication of column 3 of Table 6.

TABLE 5B
Exemplary protein and peptide therapeutics.

| Therapeutic peptide | Category | Patent Number |
|---|---|---|
| Lepirudin | Antithrombins and Fibrinolytic | CA1339104 |
| | Agents | |
| Cetuximab | Antineoplastic Agents | CA1340417 |
| Dor se alpha | Enzymes | CA2184581 |
| Denileukin diftitox | Antineoplastic Agents | |
| Etanercept | Immunosuppressive Agents | CA2476934 |
| Bivalirudin | Antithrombins | U.S. Pat. No. 7,582,727 |
| Leuprolide | Antineoplastic Agents | |
| Peginterferon alpha-2a | Immunosuppressive Agents | CA2203480 |
| Alteplase | Thrombolytic Agents | |
| Interferon alpha-n1 | Antiviral Agents | |
| Darbepoetin alpha | Anti-anemic Agents | CA2165694 |
| Reteplase | Fibrinolytic Agents | CA2107476 |
| Epoetin alpha | Hematinics | CA1339047 |
| Salmon Calcitonin | Bone Density Conservation | U.S. Pat. No. 6,440,392 |
| | Agents | |
| Interferon alpha-n3 | Immunosuppressive Agents | |
| Pegfilgrastim | Immunosuppressive Agents | CA1341537 |
| Sargramostim | Immunosuppressive Agents | CA1341150 |
| Secretin | Diagnostic Agents | |
| Peginterferon alpha-2b | Immunosuppressive Agents | CA1341567 |
| Asparagi se | Antineoplastic Agents | |
| Thyrotropin alpha | Diagnostic Agents | U.S. Pat. No. 5,840,566 |
| Antihemophilic Factor | Coagulants and Thrombotic agents | CA2124690 |
| A kinra | Antirheumatic Agents | CA2141953 |
| Gramicidin D | Anti-Bacterial Agents | |
| Intravenous | Immunologic Factors | |
| Immunoglobulin | | |
| Anistreplase | Fibrinolytic Agents | |
| Insulin Regular | Antidiabetic Agents | |
| Tenecteplase | Fibrinolytic Agents | CA2129660 |
| Menotropins | Fertility Agents | |
| Interferon gamma-1b | Immunosuppressive Agents | U.S. Pat. No. 6,936,695 |
| Interferon alpha-2a, | | CA2172664 |
| Recombi nt | | |
| Coagulation factor VIIa | Coagulants | |
| Oprelvekin | Antineoplastic Agents | |
| Palifermin | Anti-Mucositis Agents | |
| Glucagon recombi nt | Hypoglycemic Agents | |
| Aldesleukin | Antineoplastic Agents | |
| Botulinum Toxin Type B | Antidystonic Agents | |
| Omalizumab | Anti-Allergic Agents | CA2113813 |
| Lutropin alpha | Fertility Agents | U.S. Pat. No. 5,767,251 |
| Insulin Lispro | Hypoglycemic Agents | U.S. Pat. No. 5,474,978 |
| Insulin Glargine | Hypoglycemic Agents | U.S. Pat. No. 7,476,652 |
| Collage se | | |
| Rasburicase | Gout Suppressants | CA2175971 |
| Adalimumab | Antirheumatic Agents | CA2243459 |
| Imiglucerase | Enzyme Replacement Agents | U.S. Pat. No. 5,549,892 |
| Abciximab | Anticoagulants | CA1341357 |
| Alpha-1-protei se inhibitor | Serine Protei se Inhibitors | |
| Pegaspargase | Antineoplastic Agents | |
| Interferon beta-1a | Antineoplastic Agents | CA1341604 |
| Pegademase bovine | Enzyme Replacement Agents | |
| Human Serum Albumin | Serum substitutes | U.S. Pat. No. 6,723,303 |
| Eptifibatide | Platelet Aggregation Inhibitors | U.S. Pat. No. 6,706,681 |
| Serum albumin iodo ted | Diagnostic Agents | |
| Infliximab | Antirheumatic Agents, Anti- | CA2106299 |
| | Inflammatory Agents, Non- | |
| | Steroidal, Dermatologic Agents, | |
| | Gastrointesti l Agents and | |
| | Immunosuppressive Agents | |
| Follitropin beta | Fertility Agents | U.S. Pat. No. 7,741,268 |
| Vasopressin | Antidiuretic Agents | |
| Interferon beta-1b | Adjuvants, Immunologic and | CA1340861 |
| | Immunosuppressive Agents | |
| Interferon alphacon-1 | Antiviral Agents and | CA1341567 |
| | Immunosuppressive Agents | |
| Hyaluronidase | Adjuvants, Anesthesia and | |
| | Permeabilizing Agents | |
| Insulin, porcine | Hypoglycemic Agents | |
| Trastuzumab | Antineoplastic Agents | CA2103059 |
| Rituximab | Antineoplastic Agents, | CA2149329 |
| | Immunologic Factors and | |
| | Antirheumatic Agents | |
| Basiliximab | Immunosuppressive Agents | CA2038279 |
| Muromo b | Immunologic Factors and | |
| | Immunosuppressive Agents | |
| Digoxin Immune Fab | Antidotes | |
| (Ovine) | | |
| Ibritumomab | | CA2149329 |
| Daptomycin | | U.S. Pat. No. 6,468,967 |
| Tositumomab | | |
| Pegvisomant | Hormone Replacement Agents | U.S. Pat. No. 5,849,535 |
| Botulinum Toxin Type A | Neuromuscular Blocking Agents, | CA2280565 |
| | Anti-Wrinkle Agents and | |
| | Antidystonic Agents | |
| Pancrelipase | Gastrointesti l Agents and Enzyme | |
| | Replacement Agents | |
| Streptoki se | Fibrinolytic Agents and | |
| | Thrombolytic Agents | |
| Alemtuzumab | | CA1339198 |
| Alglucerase | Enzyme Replacement Agents | |
| Capromab | Indicators, Reagents and | |
| | Diagnostic Agents | |
| Laronidase | Enzyme Replacement Agents | |
| Urofollitropin | Fertility Agents | U.S. Pat. No. 5,767,067 |
| Efalizumab | Immunosuppressive Agents | |
| Serum albumin | Serum substitutes | U.S. Pat. No. 6,723,303 |
| Choriogo dotropin alpha | Fertility Agents and Go dotropins | U.S. Pat. No. 6,706,681 |
| Antithymocyte globulin | Immunologic Factors and | |
| | Immunosuppressive Agents | |
| Filgrastim | Immunosuppressive Agents, | CA1341537 |
| | Antineutropenic Agents and | |
| | Hematopoietic Agents | |
| Coagulation factor ix | Coagulants and Thrombotic | |
| | Agents | |
| Becaplermin | Angiogenesis Inducing Agents | CA1340846 |
| Agalsidase beta | Enzyme Replacement Agents | CA2265464 |
| Interferon alpha-2b | Immunosuppressive Agents | CA1341567 |
| Oxytocin | Oxytocics, Anti-tocolytic Agents | |
| | and Labor Induction Agents | |
| Enfuvirtide | HIV Fusion Inhibitors | U.S. Pat. No. 6,475,491 |
| Palivizumab | Antiviral Agents | CA2197684 |
| Daclizumab | Immunosuppressive Agents | |
| Bevacizumab | Angiogenesis Inhibitors | CA2286330 |
| Arcitumomab | Diagnostic Agents | U.S. Pat. No. 8,420,081 |
| Arcitumomab | Diagnostic Agents | U.S. Pat. No. 7,790,142 |
| Eculizumab | | CA2189015 |
| Panitumumab | | |
| Ranibizumab | Ophthalmics | CA2286330 |
| Idursulfase | Enzyme Replacement Agents | |
| Alglucosidase alpha | Enzyme Replacement Agents | CA2416492 |
| Exe tide | Hypoglycemic Agents | U.S. Pat. No. 6,872,700 |
| Mecasermin | | U.S. Pat. No. 5,681,814 |
| Pramlintide | | U.S. Pat. No. 5,686,411 |
| Galsulfase | Enzyme Replacement Agents | |
| Abatacept | Antirheumatic Agents and | CA2110518 |
| | Immunosuppressive Agents | |
| Cosyntropin | Hormones and Diagnostic Agents | |
| Corticotropin | | |
| Insulin aspart | Hypoglycemic Agents and | U.S. Pat. No. 5,866,538 |
| | Antidiabetic Agents | |
| Insulin detemir | Antidiabetic Agents | U.S. Pat. No. 5,750,497 |
| Insulin glulisine | Antidiabetic Agents | U.S. Pat. No. 6,960,561 |
| Pegaptanib | Intended for the prevention of | |
| | respiratory distress syndrome | |
| | (RDS) in premature infants at high | |
| | risk for RDS. | |
| Nesiritide | | |
| Thymalphasin | | |
| Defibrotide | Antithrombins | |
| tural alpha interferon OR | | |
| multiferon | | |
| Glatiramer acetate | | |
| Preotact | | |
| Teicoplanin | Anti-Bacterial Agents | |
| Ca kinumab | Anti-Inflammatory Agents and | |
| | Monoclo l antibodies | |
| Ipilimumab | Antineoplastic Agents and | CA2381770 |
| | Monoclo l antibodies | |
| Sulodexide | Antithrombins and Fibrinolytic | |
| | Agents and Hypoglycemic Agents | |
| | and Anticoagulants and | |
| | Hypolipidemic Agents | |
| Tocilizumab | | CA2201781 |
| Teriparatide | Bone Density Conservation | U.S. Pat. No. 6,977,077 |
| | Agents | |
| Pertuzumab | Monoclo l antibodies | CA2376596 |
| Rilo cept | Immunosuppressive Agents | U.S. Pat. No. 5,844,099 |
| Denosumab | Bone Density Conservation | CA2257247 |
| | Agents and Monoclo l antibodies | |
| Liraglutide | | U.S. Pat. No. 6,268,343 |
| Golimumab | Antipsoriatic Agents and Monoclo | |
| | l antibodies and TNF inhibitor | |
| Belatacept | Antirheumatic Agents and | |
| | Immunosuppressive Agents | |
| Buserelin | | |
| Velaglucerase alpha | Enzymes | U.S. Pat. No. 7,138,262 |
| Tesamorelin | | U.S. Pat. No. 5,861,379 |
| Brentuximab vedotin | | |
| Taliglucerase alpha | Enzymes | |
| Belimumab | Monoclo l antibodies | |
| Aflibercept | Antineoplastic Agents and | U.S. Pat. No. 7,306,799 |
| | Ophthalmics | |
| Asparagi se erwinia | Enzymes | |
| chrysanthemi | | |
| Ocriplasmin | Ophthalmics | |
| Glucarpidase | Enzymes | |
| Teduglutide | | U.S. Pat. No. 5,789,379 |
| Raxibacumab | Anti-Infective Agents and | |
| | Monoclo l antibodies | |
| Certolizumab pegol | TNF inhibitor | CA2380298 |
| Insulin, isophane | Hypoglycemic Agents and | |
| | Antidiabetic Agents | |
| Epoetin zeta | | |
| Obinutuzumab | Antineoplastic Agents | |
| Fibrinolysin aka plasmin | | U.S. Pat. No. 3,234,106 |
| Follitropin alpha | | |
| Romiplostim | Colony-Stimulating Factors and | |
| | Thrombopoietic Agents | |
| Luci ctant | Pulmo ry surfactants | U.S. Pat. No. 5,407,914 |
| talizumab | Immunosuppressive agents | |
| Aliskiren | Renin inhibitor | |
| Ragweed Pollen Extract | | |
| Secukinumab | Inhibitor | US20130202610 |
| Somatotropin Recombi nt | Hormone Replacement Agents | CA1326439 |
| Drotrecogin alpha | Antisepsis | CA2036894 |
| Alefacept | Dermatologic and | |
| | Immunosupressive agents | |
| OspA lipoprotein | Vaccines | |
| Uroki se | | U.S. Pat. No. 4,258,030 |
| Abarelix | Anti-Testosterone Agents | U.S. Pat. No. 5,968,895 |
| Sermorelin | Hormone Replacement Agents | |
| Aprotinin | | U.S. Pat. No. 5,198,534 |
| Gemtuzumab ozogamicin | Antineoplastic agents and | U.S. Pat. No. 5,585,089 |
| | Immunotoxins | |
| Satumomab Pendetide | Diagnostic Agents | |
| Albiglutide | Drugs used in diabetes; alimentary | |
| | tract and metabolism; blood | |
| | glucose lowering drugs, excl. | |
| | insulins. | |
| Alirocumab | | |
| Ancestim | | |
| Antithrombin alpha | | |
| Antithrombin III human | | |
| Asfotase alpha | Enzymes Alimentary Tract and | |
| | Metabolism | |
| Atezolizumab | | |
| Autologous cultured | | |
| chondrocytes | | |
| Beractant | | |
| Bli tumomab | Antineoplastic Agents | US20120328618 |
| | Immunosuppressive Agents | |
| | Monoclo l antibodies | |
| | Antineoplastic and | |
| | Immunomodulating Agents | |
| C1 Esterase Inhibitor | | |
| (Human) | | |
| Coagulation Factor XIII A- | | |
| Subunit (Recombi nt) | | |
| Conestat alpha | | |
| Daratumumab | Antineoplastic Agents | |
| Desirudin | | |
| Dulaglutide | Hypoglycemic Agents; Drugs | |
| | Used in Diabetes; Alimentary | |
| | Tract and Metabolism; Blood | |
| | Glucose Lowering Drugs, Excl. | |
| | Insulins | |
| Elosulfase alpha | Enzymes; Alimentary Tract and | |
| | Metabolism | |
| Elotuzumab | | US2014055370 |
| Evolocumab | Lipid Modifying Agents, Plain; | |
| | Cardiovascular System | |
| Fibrinogen Concentrate | | |
| (Human) | | |
| Filgrastim-sndz | | |
| Gastric intrinsic factor | | |
| Hepatitis B immune | | |
| globulin | | |
| Human calcitonin | | |
| Human clostridium tetani | | |
| toxoid immune globulin | | |
| Human rabies virus | | |
| immune globulin | | |
| Human Rho(D) immune | | |
| globulin | | |
| Hyaluronidase (Human | | U.S. Pat. No. 7,767,429 |
| Recombi nt) | | |
| Idarucizumab | Anticoagulant | |
| Immune Globulin Human | Immunologic Factors; | |
| | Immunosuppressive Agents; Anti- | |
| | Infective Agents | |
| Vedolizumab | Immunosupressive agent, | US2012151248 |
| | Antineoplastic agent | |
| Ustekinumab | Deramtologic agent, | |
| | Immunosuppressive agent, | |
| | antineoplastic agent | |
| Turoctocog alpha | | |
| Tuberculin Purified Protein | | |
| Derivative | | |
| Simoctocog alpha | Antihaemorrhagics: blood | |
| | coagulation factor VIII | |
| Siltuximab | Antineoplastic and | U.S. Pat. No. 7,612,182 |
| | Immunomodulating Agents, | |
| | Immunosuppressive Agents | |
| Sebelipase alpha | Enzymes | |
| Sacrosidase | Enzymes | |
| Ramucirumab | Antineoplastic and | US2013067098 |
| | Immunomodulating Agents | |
| Prothrombin complex | | |
| concentrate | | |
| Poractant alpha | Pulmo ry Surfactants | |
| Pembrolizumab | Antineoplastic and | US2012135408 |
| | Immunomodulating Agents | |
| Peginterferon beta-1a | | |
| Ofatumumab | Antineoplastic and | U.S. Pat. No. 8,337,847 |
| | Immunomodulating Agents | |
| Obiltoxaximab | | |
| Nivolumab | Antineoplastic and | US2013173223 |
| | Immunomodulating Agents | |
| Necitumumab | | |
| Metreleptin | | US20070099836 |
| Methoxy polyethylene | | |
| glycol-epoetin beta | | |
| Mepolizumab | Antineoplastic and | US2008134721 |
| | Immunomodulating Agents, | |
| | Immunosuppressive Agents, | |
| | Interleukin Inhibitors | |
| Ixekizumab | | |
| Insulin Pork | Hypoglycemic Agents, | |
| | Antidiabetic Agents | |
| Insulin Degludec | | |
| Insulin Beef | | |
| Thyroglobulin | Hormone therapy | U.S. Pat. No. 5,099,001 |
| Anthrax immune globulin | Plasma derivative | |
| human | | |
| Anti-inhibitor coagulant | Blood Coagulation Factors, | |
| complex | Antihemophilic Agent | |
| Anti-thymocyte Globulin | Antibody | |
| (Equine) | | |
| Anti-thymocyte Globulin | Antibody | |
| (Rabbit) | | |
| Brodalumab | Antineoplastic and | |
| | Immunomodulating Agents | |
| C1 Esterase Inhibitor | Blood and Blood Forming Organs | |
| (Recombi nt) | | |
| Ca kinumab | Antineoplastic and | |
| | Immunomodulating Agents | |
| Chorionic Go dotropin | Hormones | U.S. Pat. No. 6,706,681 |
| (Human) | | |
| Chorionic Go dotropin | Hormones | U.S. Pat. No. 5,767,251 |
| (Recombi nt) | | |
| Coagulation factor X | Blood Coagulation Factors | |
| human | | |
| Dinutuximab | Antibody, Immunosuppresive | US20140170155 |
| | agent, Antineoplastic agent | |
| Efmoroctocog alpha | Antihemophilic Factor | |
| Factor IX Complex | Antihemophilic agent | |
| (Human) | | |
| Hepatitis A Vaccine | Vaccine | |
| Human Varicella-Zoster | Antibody | |
| Immune Globulin | | |
| Ibritumomab tiuxetan | Antibody, Immunosuppressive | CA2149329 |
| | Agents | |
| Lenograstim | Antineoplastic and | |
| | Immunomodulating Agents | |
| Pegloticase | Enzymes | |
| Protamine sulfate | Heparin Antagonists, Hematologic | |
| | Agents | |
| Protein S human | Anticoagulant plasma protein | |
| Sipuleucel-T | Antineoplastic and | U.S. Pat. No. 8,153,120 |
| | Immunomodulating Agents | |
| Somatropin recombi nt | Hormones, Hormone Substitutes, | CA1,326,439, CA2252535, |
| | and Hormone Antagonists | U.S. Pat. No. 5,288,703, |
| | | U.S. Pat. No. 5,849,700, |
| | | U.S. Pat. No. 5,849,704, |
| | | U.S. Pat. No. 5,898,030, |
| | | U.S. Pat. No. 6,004,297, |
| | | U.S. Pat. No. 6,152,897, |
| | | U.S. Pat. No. 6,235,004, |
| | | U.S. Pat. No. 6,899,699 |
| Susoctocog alpha | Blood coagulation factors, | |
| | Antihaemorrhagics | |
| Thrombomodulin alpha | Anticoagulant agent, Antiplatelet | |
| | agent | |

TABLE 6
monoclonal antibody

| mAb | Target | Indication |
|---|---|---|
| Muromonab-CD3 | CD3 | Kidney transplant rejection |
| Abciximab | GPIIb/IIIa | Prevention of blood clots in angioplasty |
| Rituximab | CD20 | Non-Hodgkin lymphoma |
| Palivizumab | RSV | Prevention of respiratory syncytial virus |
| | | infection |
| Infliximab | TNFα | Crohn's disease |
| Trastuzumab | HER2 | Breast cancer |
| Alemtuzumab | CD52 | Chronic myeloid leukemia |
| Adalimumab | TNFα | Rheumatoid arthritis |
| Ibritumomab | CD20 | Non-Hodgkin lymphoma |
| tiuxetan | | |
| Omalizumab | IgE | Asthma |
| Cetuximab | EGFR | Colorectal cancer |
| Bevacizumab | VEGF-A | Colorectal cancer |
| Natalizumab | ITGA4 | Multiple sclerosis |
| Panitumumab | EGFR | Colorectal cancer |
| Ranibizumab | VEGF-A | Macular degeneration |
| Eculizumab | C5 | Paroxysmal nocturnal hemoglobinuria |
| Certolizumab | TNFα | Crohn's disease |
| pegol | | |
| Ustekinumab | IL-12/23 | Psoriasis |
| Canakinumab | IL-1β | Muckle-Wells syndrome |
| Golimumab | TNFα | Rheumatoid and psoriatic arthritis, ankylosing |
| | | spondylitis |
| Ofatumumab | CD20 | Chronic lymphocytic leukemia |
| Tocilizumab | IL-6R | Rheumatoid arthritis |
| Denosumab | RANKL | Bone loss |
| Belimumab | BLyS | Systemic lupus erythematosus |
| Ipilimumab | CTLA-4 | Metastatic melanoma |
| Brentuximab | CD30 | Hodgkin lymphoma, systemic anaplastic large |
| vedotin | | cell lymphoma |
| Pertuzumab | HER2 | Breast Cancer |
| Trastuzumab | HER2 | Breast cancer |
| emtansine | | |
| Raxibacumab | B. anthrasis PA | Anthrax infection |
| Obinutuzumab | CD20 | Chronic lymphocytic leukemia |
| Siltuximab | IL-6 | Castleman disease |
| Ramucirumab | VEGFR2 | Gastric cancer |
| Vedolizumab | α4β7 integrin | Ulcerative colitis, Crohn disease |
| Blinatumomab | CD19, CD3 | Acute lymphoblastic leukemia |
| Nivolumab | PD-1 | Melanoma, non-small cell lung cancer |
| Pembrolizumab | PD-1 | Melanoma |
| Idarucizumab | Dabigatran | Reversal of dabigatran-induced anticoagulation |
| Necitumumab | EGFR | Non-small cell lung cancer |
| Dinutuximab | GD2 | Neuroblastoma |
| Secukinumab | IL-17α | Psoriasis |
| Mepolizumab | IL-5 | Severe eosinophilic asthma |
| Alirocumab | PCSK9 | High cholesterol |
| Evolocumab | PCSK9 | High cholesterol |
| Daratumumab | CD38 | Multiple myeloma |
| Elotuzumab | SLAMF7 | Multiple myeloma |
| Ixekizumab | IL-17α | Psoriasis |
| Reslizumab | IL-5 | Asthma |
| Olaratumab | PDGFRα | Soft tissue sarcoma |
| Bezlotoxumab | Clostridium | Prevention of Clostridium difficile infection |
| | difficile enterotoxin B | recurrence |
| Atezolizumab | PD-L1 | Bladder cancer |
| Obiltoxaximab | B. anthrasis PA | Prevention of inhalational anthrax |
| Inotuzumab | CD22 | Acute lymphoblastic leukemia |
| ozogamicin | | |
| Brodalumab | IL-17R | Plaque psoriasis |
| Guselkumab | IL-23 p19 | Plaque psoriasis |
| Dupilumab | IL-4Rα | Atopic dermatitis |
| Sarilumab | IL-6R | Rheumatoid arthritis |
| Avelumab | PD-L1 | Merkel cell carcinoma |
| Ocrelizumab | CD20 | Multiple sclerosis |
| Emicizumab | Factor IXa, X | Hemophilia A |
| Benralizumab | IL-5Rα | Asthma |
| Gemtuzumab | CD33 | Acute myeloid leukemia |
| ozogamicin | | |
| Durvalumab | PD-L1 | Bladder cancer |
| Burosumab | FGF23 | X-linked hypophosphatemia |
| Lanadelumab | Plasma kallikrein | Hereditary angioedema attacks |
| Mogamulizumab | CCR4 | Mycosis fungoides or Sezary syndrome |
| Erenumab | CGRPR | Migraine prevention |
| Galcanezumab | CGRP | Migraine prevention |
| Tildrakizumab | IL-23 p19 | Plaque psoriasis |
| Cemiplimab | PD-1 | Cutaneous squamous cell carcinoma |
| Emapalumab | IFNγ | Primary hemophagocytic lymphohistiocytosis |
| Fremanezumab | CGRP | Migraine prevention |
| Ibalizumab | CD4 | HIV infection |
| Moxetumomab | CD22 | Hairy cell leukemia |
| pasudodox | | |
| Ravulizumab | C5 | Paroxysmal nocturnal hemoglobinuria |
| Caplacizumab | von Willebrand factor | Acquired thrombotic thrombocytopenia purpura |
| Romosozumab | Sclerostin | Osteoporosis in postmenopausal women at |
| | | increased risk of fracture |
| Risankizumab | IL-23 p19 | Plaque psoriasis |
| Polatuzumab | CD79β | Diffuse large B-cell lymphoma |
| vedotin | | |
| Brolucizumab | VEGF-A | Macular degeneration |
| Crizanlizumab | P-selectin | Sickle cell disease |

### Applications

[0838] Using the systems described herein, optionally using any of delivery modalities described herein (including nanoparticle delivery modalities, such as lipid nanoparticles, and viral delivery modalities, such as AAVs), the invention also provides applications (methods) for modifying a DNA molecule, such as nuclear DNA, i.e., in the genome of a cell, whether in vitro, ex vivo, in situ, or in vivo, e.g., in a tissue in an organism, such as a subject including mammalian subjects, such as a human. By integrating coding genes into a DNA sequence template, the Gene Writer system can address therapeutic needs, for example, by providing expression of a therapeutic transgene (e.g., comprised in an object sequence as described herein) in individuals with loss-of-function mutations, by replacing gain-of-function mutations with normal transgenes, by providing regulatory sequences to eliminate gain-of-function mutation expression, and/or by controlling the expression of operably linked genes, transgenes and systems thereof. In certain embodiments, an object sequence (e.g., a heterologous object sequence) comprises a coding sequence encoding a functional element (e.g., a polypeptide or non-coding RNA, e.g., as described herein) specific to the therapeutic needs of the host cell. In some embodiments, an object sequence (e.g., a heterologous object sequence) comprises a promoter, for example, a tissue specific promotor or enhancer. In some embodiments, a promotor can be operably linked to a coding sequence.

[0839] In certain aspects, the invention this provides methods of modifying a target DNA strand in a cell, tissue or subject, comprising administering a system as described herein (optionally by a modality described herein) to the cell, tissue or subject, where the system inserts the heterologous object sequence into the target DNA strand, thereby modifying the target DNA strand. In certain embodiments, the heterologous object sequence is thus expressed in the cell, tissue, or subject. In some embodiments, the cell, tissue or subject is a mammalian (e.g., human) cell, tissue or subject. Exemplary cells thus modified include a hepatocyte, lung epithelium, an ionocyte. Such a cell may be a primary cell or otherwise not immortalized. In related aspects, the invention also provides methods of treating a mammalian tissue comprising administering a system as described herein to the mammal, thereby treating the tissue, wherein the tissue is deficient in the heterologous object sequence. In certain embodiments of any of the foregoing aspects and embodiments, the Gene Writer polypeptide is provided as a nucleic acid, which is present transiently.

[0840] In some embodiments, a system of the invention is capable of producing an insertion in target DNA. It is conceived that the systems described herein are capable of resulting in the expression of an exogenous non-coding nucleic acid, e.g., miRNA, lncRNA, shRNA, siRNA, tRNA, mtRNA, gRNA, or rRNA, expression of a protein coding sequence, e.g., a therapeutic protein or a regulatory protein, incorporation of a regulatory element, e.g., a promoter, enhancer, transcription factor binding site, epigenetic modifier site, miRNA binding site, splice donor or acceptor site, or a terminator sequence, or incorporation of other DNA sequence, e.g., spacer. Depending on the content and context of the insertion, it is thus possible to express an exogenous protein or alter expression of an endogenous protein or cellular system. In some embodiments, a Gene Writing system may be used to knockout an endogenous gene by insertional mutagenesis, e.g., by integration of an insert DNA into a coding or regulatory region. In some embodiments, a Gene Writing system may be used to simultaneously trigger expression of a transgene cassette, e.g., a CAR, while disrupting expression of an endogenous gene or locus, e.g., TRAC, by mediating integration of an insert DNA encoding the transgene cassette into the endogenous gene or locus. In some embodiments, a Gene Writing system may be used to substitute an allele by integrating a transgene expression cassette into the endogenous allele, thus disrupting its expression.

[0841] In embodiments, the Gene Writer™ gene editor system can provide an object sequence comprising, e.g., a therapeutic agent (e.g., a therapeutic transgene) expressing, e.g., replacement blood factors or replacement enzymes, e.g., lysosomal enzymes. For example, the compositions, systems and methods described herein are useful to express, in a target human genome, agalsidase alpha or beta for treatment of Fabry Disease; imiglucerase, taliglucerase alfa, velaglucerase alfa, or alglucerase for Gaucher Disease; sebelipase alpha for lysosomal acid lipase deficiency (Wolman disease/CESD); laronidase, idursulfase, elosulfase alpha, or galsulfase for mucopolysaccharidoses; alglucosidase alpha for Pompe disease. For example, the compositions, systems and methods described herein are useful to express, in a target human genome factor I, II, V, VII, X, XI, XII or XIII for blood factor deficiencies.

[0842] In some embodiments, the heterologous object sequence encodes an intracellular protein (e.g., a cytoplasmic protein, a nuclear protein, an organellar protein such as a mitochondrial protein or lysosomal protein, or a membrane protein). In some embodiments, the heterologous object sequence encodes a membrane protein, e.g., a membrane protein other than a CAR, and/or an endogenous human membrane protein. In some embodiments, the heterologous object sequence encodes an extracellular protein. In some embodiments, the heterologous object sequence encodes an enzyme, a structural protein, a signaling protein, a regulatory protein, a transport protein, a sensory protein, a motor protein, a defense protein, or a storage protein. Other proteins include an immune receptor protein, e.g. a synthetic immune receptor protein such as a chimeric antigen receptor protein (CAR), a T cell receptor, a B cell receptor, or an antibody.

[0843] A Gene Writing™ system may be used to modify immune cells. In some embodiments, a Gene Writing™ system may be used to modify T cells. In some embodiments, T-cells may include any subpopulation of T-cells, e.g., CD4+, CD8+, gamma-delta, naïve T cells, stem cell memory T cells, central memory T cells, or a mixture of subpopulations. In some embodiments, a Gene Writing™ system may be used to deliver or modify a T-cell receptor (TCR) in a T cell. In some embodiments, a Gene Writing™ system may be used to deliver at least one chimeric antigen receptor (CAR) to T-cells. In some embodiments, a Gene Writing™ system may be used to deliver at least one CAR to natural killer (NK) cells. In some embodiments, a Gene Writing™ system may be used to deliver at least one CAR to natural killer T (NKT) cells. In some embodiments, a Gene Writing™ system may be used to deliver at least one CAR to a progenitor cell, e.g., a progenitor cell of T, NK, or NKT cells. In some embodiments, cells modified with at least one CAR (e.g., CAR-T cells, CAR-NK cells, CAR-NKT cells), or a combination of cells modified with at least one CAR (e.g., a mixture of CAR-NK/T cells) are used to treat a condition as identified in the targetable landscape of CAR therapies in MacKay, et al. Nat Biotechnol 38, 233-244 (2020), incorporated by reference herein in its entirety. In some embodiments, the immune cells comprise a CAR specific to a tumor or a pathogen antigen selected from a group consisting of AChR (fetal acetylcholine receptor), ADGRE2, AFP (alpha fetoprotein), BAFF-R, BCMA, CAIX (carbonic anhydrase IX), CCR1, CCR4, CEA (carcinoembryonic antigen), CD3, CD5, CD8, CD7, CD10, CD13, CD14, CD15, CD19, CD20, CD22, CD30, CD33, CLLI, CD34, CD38, CD41, CD44, CD49f, CD56, CD61, CD64, CD68, CD70,CD74, CD99,CD117, CD123, CD133, CD138, CD44v6, CD267, CD269, CDS, CLEC12A, CS1, EGP-2 (epithelial glycoprotein-2), EGP-40 (epithelial glycoprotein-40), EGFR(HER1), EGFR-VIII, EpCAM (epithelial cell adhesion molecule), EphA2, ERBB2 (HER2, human epidermal growth factor receptor 2), ERBB3, ERBB4, FBP (folate-binding protein), Flt3 receptor, folate receptor-a, GD2 (ganglioside G2), GD3 (ganglioside G3), GPC3 (glypican-3), GP100, hTERT (human telomerase reverse transcriptase), ICAM-1, integrin B7, interleukin 6 receptor, IL13Ra2 (interleukin-13 receptor 30 subunit alpha-2), kappa-light chain, KDR (kinase insert domain receptor), LeY (Lewis Y), L1CAM (LI cell adhesion molecule), LILRB2 (leukocyte immunoglobulin like receptor B2), MARTI, MAGE-A1 (melanoma associated antigen A1), MAGE-A3, MSLN (mesothelin), MUC16 (mucin 16), MUCI (mucin I), KG2D ligands, NY-ESO-1 (cancer-testis antigen), PRI (proteinase 3), TRBCI, TRBC2, TFM-3, TACI, tyrosinase, survivin, hTERT, oncofetal antigen (h5T4), p53, PSCA (prostate stem cell antigen), PSMA (prostate-specific membrane antigen), hROR1, TAG-72 (tumor-associated glycoprotein 72), VEGF-R2 (vascular endothelial growth factor R2), WT-1 (Wilms tumor protein), and antigens of HIV (human immunodeficiency virus), hepatitis B, hepatitis C, CMV (cytomegalovirus), EBV (Epstein-Barr virus), HPV (human papilloma virus).

[0844] In some embodiments, immune cells, e.g., T-cells, NK cells, NKT cells, or progenitor cells are modified ex vivo and then delivered to a patient. In some embodiments, a Gene Writer™ system is delivered by one of the methods mentioned herein, and immune cells, e.g., T-cells, NK cells, NKT cells, or progenitor cells are modified in vivo in the patient.

[0845] In some embodiments, a Gene Writing system can be used to make multiple modifications to a target cell, either simultaneously or sequentially. In some embodiments, a Gene Writing system can be used to further modify an already modified cell. In some embodiments, a Gene Writing system can be use to modify a cell edited by a complementary technology, e.g., a gene edited cell, e.g., a cell with one or more CRISPR knockouts. In some embodiments, the previously edited cell is a T-cell. In some embodiments, the previous modifications comprise gene knockouts in a T-cell, e.g., endogenous TCR (e.g., TRAC, TRBC), HLA Class I (B2M), PD1, CD52, CTLA-4, TIM-3, LAG-3, DGK. In some embodiments, a Gene Writing system is used to insert a TCR or CAR into a T-cell that has been previously modified.

### Administration

[0846] The composition and systems described herein may be used in vitro or in vivo. In some embodiments the system or components of the system are delivered to cells (e.g., mammalian cells, e.g., human cells), e.g., in vitro or in vivo. The skilled artisan will understand that the components of the Gene Writer system may be delivered in the form of polypeptide, nucleic acid (e.g., DNA, RNA), and combinations thereof.

[0847] In some embodiments, the system and/or components of the system are delivered as nucleic acids. For example, the recombinase polypeptide may be delivered in the form of a DNA or RNA encoding the recombinase polypeptide. In some embodiments the system or components of the system (e.g., an insert DNA and a recombinase polypeptide-encoding nucleic acid molecule) are delivered on 1, 2, 3, 4, or more distinct nucleic acid molecules. In some embodiments the system or components of the system are delivered as a combination of DNA and RNA. In some embodiments the system or components of the system are delivered as a combination of DNA and protein. In some embodiments the system or components of the system are delivered as a combination of RNA and protein. In some embodiments the recombinase polypeptide is delivered as a protein.

[0848] In some embodiments the system or components of the system are delivered to cells, e.g. mammalian cells or human cells, using a vector. The vector may be, e.g., a plasmid or a virus. In some embodiments delivery is in vivo, in vitro, ex vivo, or in situ. In some embodiments the virus is an adeno associated virus (AAV), a lentivirus, an adenovirus. In some embodiments the system or components of the system are delivered to cells with a viral-like particle or a virosome. In some embodiments the delivery uses more than one virus, viral-like particle or virosome.

[0849] In some embodiments, the recombinase is active upon linear or circular single or double stranded DNA. In some embodiments, the recombinase is active upon DNA after it is converted from single stranded to double stranded in the cell. In some embodiments, the recombinase is active upon DNA after it has formed a concatemer in the cell. In some embodiments, the recombinase polypeptide is delivered to or expressed in the cell after the insert DNA is converted from single to double stranded.

[0850] In some embodiments, recombinase recognition sequences are present 5′ and 3′ of the nucleic acid encoding the recombinase polypeptide. In some embodiments, the recombinase recognition sequences are an attB and an attP with compatible spacer regions and central dinucleotides. In some embodiments, the recombinase recognition sequences have a different spacer region and/or central dinucleotide than the recombinase recognition sequences on the insert DNA or at a target site in the genome. In some embodiments, the recombinase recognition sites do not interact with the recombinase recognition sites on the insert DNA or in the genome. In some embodiments the recombinase recognition sequences are directly adjacent to the nucleic acid encoding the open reading frame of the recombinase polypeptide. In some embodiments the recombinase recognition sequences are external to a gene expression unit for the recombinase. In some embodiments the recombinase recognition sequences (e.g. attB and attP) are in the same 5′ to 3′ orientation. In some embodiments the recombinase recognition sequences (e.g. attB and attP) are in the opposite 5′ to 3′ orientation. In some embodiments, the recombinase polypeptide recombines the recognition sequences that are 5′ and 3′ of the nucleic acid encoding the recombinase polypeptide, resulting in a decrease of recombinase gene expression.

[0851] In some embodiments, multiple recombinase recognition sequences are present on the insert DNA. In some embodiments, the insert DNA comprises two or more recognition sequences. In some embodiments, the insert DNA comprises three or more recognition sequences. In some embodiments, the insert DNA comprises two recognition sequences (e.g. an attB and attP) that are compatible with each other, and a third recognition sequence (e.g. an attB or an attP) that is incompatible with the other recognition sequences on the insert DNA. In some embodiments, the recognition sequences on the insert DNA that are compatible with each other are not compatible with recognition sequences in the target genome. In some embodiments, the recognition sequence on the insert DNA that is incompatible with the other recognition sequences on the insert DNA is compatible with recognition sequences in the target genome. In some embodiments the recognition sequences that are compatible with each other have compatible spacer regions and central dinucleotides, and the recognition sequences that are incompatible have incompatible spacer regions and central dinucleotides. In some embodiments, the compatible recognition sequences on the insert DNA are in the same 5′ to 3′ orientation. In some embodiments, the recombinase acts upon the compatible recognition sequences on the insert DNA to form a circular DNA. In some embodiments, the resulting circular DNA comprises an attL, attR, and either an attP or attB sequence, wherein the attP or attB sequence is compatible with recognition sequences in the target genome. In some embodiments, the multiple recombinase recognition sequences described herein are present in a viral vector genome.

[0852] In one embodiment, the compositions and systems described herein can be formulated in liposomes or other similar vesicles. Liposomes are spherical vesicle structures composed of a uni- or multilamellar lipid bilayer surrounding internal aqueous compartments and a relatively impermeable outer lipophilic phospholipid bilayer. Liposomes may be anionic, neutral or cationic. Liposomes are biocompatible, nontoxic, can deliver both hydrophilic and lipophilic drug molecules, protect their cargo from degradation by plasma enzymes, and transport their load across biological membranes and the blood brain barrier (BBB) (see, e.g., Spuch and Navarro, Journal of Drug Delivery, vol. 2011, Article ID 469679, 12 pages, 2011. doi:10.1155/2011/469679 for review).

[0853] Vesicles can be made from several different types of lipids; however, phospholipids are most commonly used to generate liposomes as drug carriers. Methods for preparation of multilamellar vesicle lipids are known in the art (see for example U.S. Pat. No. 6,693,086, the teachings of which relating to multilamellar vesicle lipid preparation are incorporated herein by reference). Although vesicle formation can be spontaneous when a lipid film is mixed with an aqueous solution, it can also be expedited by applying force in the form of shaking by using a homogenizer, sonicator, or an extrusion apparatus (see, e.g., Spuch and Navarro, Journal of Drug Delivery, vol. 2011, Article ID 469679, 12 pages, 2011. doi:10.1155/2011/469679 for review). Extruded lipids can be prepared by extruding through filters of decreasing size, as described in Templeton et al., Nature Biotech, 15:647-652, 1997, the teachings of which relating to extruded lipid preparation are incorporated herein by reference.

[0854] Lipid nanoparticles are another example of a carrier that provides a biocompatible and biodegradable delivery system for the pharmaceutical compositions described herein. Nanostructured lipid carriers (NLCs) are modified solid lipid nanoparticles (SLNs) that retain the characteristics of the SLN, improve drug stability and loading capacity, and prevent drug leakage. Polymer nanoparticles (PNPs) are an important component of drug delivery. These nanoparticles can effectively direct drug delivery to specific targets and improve drug stability and controlled drug release. Lipid-polymer nanoparticles (PLNs), a new type of carrier that combines liposomes and polymers, may also be employed. These nanoparticles possess the complementary advantages of PNPs and liposomes. A PLN is composed of a core-shell structure; the polymer core provides a stable structure, and the phospholipid shell offers good biocompatibility. As such, the two components increase the drug encapsulation efficiency rate, facilitate surface modification, and prevent leakage of water-soluble drugs. For a review, see, e.g., Li et al. 2017, Nanomaterials 7, 122; doi:10.3390/nano7060122.

[0855] Exosomes can also be used as drug delivery vehicles for the compositions and systems described herein. For a review, see Ha et al. July 2016. Acta Pharmaceutica Sinica B. Volume 6, Issue 4, Pages 287-296; https://doi.org/10.1016/j.apsb.2016.02.001.

[0856] In some embodiments, at least one component of a system described herein comprises a fusosome. Fusosomes interact and fuse with target cells, and thus can be used as delivery vehicles for a variety of molecules. They generally consist of a bilayer of amphipathic lipids enclosing a lumen or cavity and a fusogen that interacts with the amphipathic lipid bilayer. The fusogen component has been shown to be engineerable in order to confer target cell specificity for the fusion and payload delivery, allowing the creation of delivery vehicles with programmable cell specificity (see, for example, the sections relating to fusosome design, preparation, and usage in PCT Publication No. WO/2020014209, incorporated herein by reference in its entirety).

[0857] A Gene Writer system can be introduced into cells, tissues and multicellular organisms. In some embodiments the system or components of the system are delivered to the cells via mechanical means or physical means.

[0858] Formulation of protein therapeutics is described in Meyer (Ed.), Therapeutic Protein Drug Products: Practical Approaches toformulation in the Laboratory, Manufacturing, and the Clinic, Woodhead Publishing Series (2012).

[0859] In some embodiments, a Gene Writer™ system described herein is delivered to a tissue or cell from the cerebrum, cerebellum, adrenal gland, ovary, pancreas, parathyroid gland, hypophysis, testis, thyroid gland, breast, spleen, tonsil, thymus, lymph node, bone marrow, lung, cardiac muscle, esophagus, stomach, small intestine, colon, liver, salivary gland, kidney, prostate, blood, or other cell or tissue type. In some embodiments, a Gene Writer™ system described herein is used to treat a disease, such as a cancer, inflammatory disease, infectious disease, genetic defect, or other disease. A cancer can be cancer of the cerebrum, cerebellum, adrenal gland, ovary, pancreas, parathyroid gland, hypophysis, testis, thyroid gland, breast, spleen, tonsil, thymus, lymph node, bone marrow, lung, cardiac muscle, esophagus, stomach, small intestine, colon, liver, salivary gland, kidney, prostate, blood, or other cell or tissue type, and can include multiple cancers.

[0860] In some embodiments, a Gene Writer™ system described herein described herein is administered by enteral administration (e.g. oral, rectal, gastrointestinal, sublingual, sublabial, or buccal administration). In some embodiments, a Gene Writer™ system described herein is administered by parenteral administration (e.g., intravenous, intramuscular, subcutaneous, intradermal, epidural, intracerebral, intracerebroventricular, epicutaneous, nasal, intra-arterial, intra-articular, intracavernous, intraocular, intraosseous infusion, intraperitoneal, intrathecal, intrauterine, intravaginal, intravesical, perivascular, or transmucosal administration). In some embodiments, a Gene Writer™ system described herein is administered by topical administration (e.g., transdermal administration).

[0861] In some embodiments, a Gene Writer™ system as described herein can be used to modify an animal cell, plant cell, or fungal cell. In some embodiments, a Gene Writer™ system as described herein can be used to modify a mammalian cell (e.g., a human cell). In some embodiments, a Gene Writer™ system as described herein can be used to modify a cell from a livestock animal (e.g., a cow, horse, sheep, goat, pig, llama, alpaca, camel, yak, chicken, duck, goose, or ostrich). In some embodiments, a Gene Writer™ system as described herein can be used as a laboratory tool or a research tool, or used in a laboratory method or research method, e.g., to modify an animal cell, e.g., a mammalian cell (e.g., a human cell), a plant cell, or a fungal cell.

[0862] In some embodiments, a Gene Writer™ system as described herein can be used to express a protein, template, or heterologous object sequence (e.g., in an animal cell, e.g., a mammalian cell (e.g., a human cell), a plant cell, or a fungal cell). In some embodiments, a Gene Writer™ system as described herein can be used to express a protein, template, or heterologous object sequence under the control of an inducible promoter (e.g., a small molecule inducible promoter). In some embodiments, a Gene Writing system or payload thereof is designed for tunable control, e.g., by the use of an inducible promoter. For example, a promoter, e.g., Tet, driving a gene of interest may be silent at integration, but may, in some instances, activated upon exposure to a small molecule inducer, e.g., doxycycline. In some embodiments, the tunable expression allows post-treatment control of a gene (e.g., a therapeutic gene), e.g., permitting a small molecule-dependent dosing effect. In embodiments, the small molecule-dependent dosing effect comprises altering levels of the gene product temporally and/or spatially, e.g., by local administration. In some embodiments, a promoter used in a system described herein may be inducible, e.g., responsive to an endogenous molecule of the host and/or an exogenous small molecule administered thereto.

### Treatment of Suitable Indications

[0863] In some embodiments, a Gene Writer™ system described herein, or a component or portion thereof (e.g., a polypeptide or nucleic acid as described herein), is used to treat a disease, disorder, or condition. In some embodiments, the Gene Writer™ system described herein, or component or portion thereof, is used to treat a disease, disorder, or condition listed in any of Tables 7-12. In some embodiments, the Gene Writer™ system described herein, or component or portion thereof, is used to treat a hematopoietic stem cell (HSC) disease, disorder, or condition, e.g., as listed in Table 7. In some embodiments, the Gene Writer™ system described herein, or component or portion thereof, is used to treat a kidney disease, disorder, or condition, e.g., as listed in Table 8. In some embodiments, the Gene Writer™ system described herein, or component or portion thereof, is used to treat a liver disease, disorder, or condition, e.g., as listed in Table 9. In some embodiments, the Gene Writer™ system described herein, or component or portion thereof, is used to treat a lung disease, disorder, or condition, e.g., as listed in Table 10. In some embodiments, the Gene Writer™ system described herein, or component or portion thereof, is used to treat a skeletal muscle disease, disorder, or condition, e.g., as listed in Table 11. In some embodiments, the Gene Writer™ system described herein, or component or portion thereof, is used to treat a skin disease, disorder, or condition, e.g., as listed in Table 12.

[0864] Tables 7-12 : Indications selected for trans Gene Writers to be used for recombinases

TABLE 7
HSCs

| Disease | Gene Affected |
|---|---|
| Adrenoleukodystrophy (CALD) | ABCD1 |
| Alpha-mannosidosis | MAN2B1 |
| Fanconi anemia | FANCA; FANCC; FANCG |
| Gaucher disease | GBA |
| Globoid cell leukodystrophy | GALC |
| (Krabbe disease) | |
| Hemophagocytic lymphohistiocytosis | PRF1; STX11; STXBP2; UNC13D |
| Malignant infantile osteopetrosis- | TCIRG1; Many genes implicated |
| autosomal recessive osteopetrosis | |
| Metachromatic leukodystrophy | ARSA; PSAP |
| MPS 1S (Scheie syndrome) | IDUA |
| MPS2 | IDS |
| MPS7 | GUSB |
| Mucolipidosis II | GNPTAB |
| Niemann-Pick disease A and B | SMPD1 |
| Niemann-Pick disease C | NPC1 |
| Pompe disease | GAA |
| Sickle cell disease (SCD) | HBB |
| Tay Sachs | HEXA |
| Thalassemia | HBB |

TABLE 8
Kidney

| Disease | Gene Affected |
|---|---|
| Congenital nephrotic syndrome | NPHS2 |
| Cystinosis | CTNS |

TABLE 9
Liver

| Disease | Gene Affected |
|---|---|
| Acute intermittent porphyria | HMBS |
| Alagille syndrome | JAG1 |
| Alpha-1 antitrypsin deficiency | SERPINA1 |
| Carbamoyl phosphate synthetase I deficiency | CPS1 |
| Citrullinemia I | ASS1 |
| Crigler-Najjar | UGT1A1 |
| Fabry | LPL |
| Familial chylomicronemia syndrome | GLA |
| Gaucher | GBE1 |
| GSD1a | G6Pase |
| GSD IV | GBA |
| Heme A | F8 |
| Heme B | F9 |
| HoFH | LDLRAP1 |
| Methylmalonic acidemia | MMUT |
| MPS II | IDS |
| MPS III | Type IIIa: SGSH |
| | Type IIIb: NAGLU |
| | Type IIIc: HGSNAT |
| | Type IIId: GNS S |
| MPS IV | Type IVA: GALNS |
| | Type IVB: GLB1 |
| MPS VI | ARSB |
| MSUD | Type Ia: BCKDHA |
| | Type Ib: BCKDHB |
| | Type II: DBT |
| OTC Deficiency | OTC |
| Polycystic Liver Disease | PRKCSH |
| Pompe | GAA |
| Primary Hyperoxaluria 1 | AGXT (HAO1 or LDHA for CRISPR) |
| Progressive familial intrahepatic cholestasis type 1 | ATP8B1 |
| Progressive familial intrahepatic cholestasis type 2 | ABCB11 |
| Progressive familial intrahepatic cholestasis type 3 | ABCB4 |
| Propionic acidemia | PCCB; PCCA |
| Wilson's Disease | ATP7B |

TABLE 10
Lung

| Disease | Gene Affected |
|---|---|
| Alpha-1 antitrypsin deficiency | SERPINA1 |
| Cystic fibrosis | CFTR |
| Primary ciliary dyskinesia | DNAI1 |
| Primary ciliary dyskinesia | DNAH5 |
| Primary pulmonary hypertension I | BMPR2 |
| Surfactant Protein B (SP-B) Deficiency | SFTPB |
| (pulmonary surfactant metabolism dysfunction 1) | |

TABLE 11
Skeletal muscle

| Disease | Gene Affected |
|---|---|
| Becker muscular dystrophy | DMD |
| Becker myotonia | CLCN1 |
| Bethlem myopathy | COL6A2 |
| Centronuclear myopathy, X-linked (motubular) | MTM1 |
| Congenital myasthenic syndrome | CHRNE |
| Duchenne muscular dystrophy | DMD |
| Emery-Dreifuss muscular dystrophy, AD | LMNA |
| Limb-girdle muscular dystrophy 2A | CAPN3 |
| Limb-girdle muscular dystrophy, type 2D | SGCA |

TABLE 12
Skin

| Disease | Gene Affected |
|---|---|
| Epidermolysis Bullosa Dystrophica Recessive | COL7A1 |
| (Hallopeau-Siemens) | |
| Epidermolysis Bullosa Junctional | LAMB3 |
| Epidermolytic Ichthyosis | KRT1; KRT10 |
| Hailey-Hailey Disease | ATP2C1 |
| Lamellar Ichthyosis/Nonbullous Congenital | TGM1 |
| Ichthyosiform Erythroderma (ARCI) | |
| Netherton Syndrome | SPINK5 |

[0865] In some embodiments, a Gene Writing system may be used to treat a healthy individual, e.g., as a preventative therapy. Gene Writing systems can, in some embodiments, be targeted to generate mutations, e.g., knockout mutations, that have been shown to be protective towards a disease of interest. In some embodiments, a Gene Writing system can be used to insert a protective allele into the genome, e.g., a transgene that expresses a variant of a protein that reduces the risk of developing a particular disease. In some embodiments, integration of a transgene is used to increase the levels of an endogenous protein by providing one or more additional copies. In some embodiments, a Gene Writing system may be used to incorporate a regulatory element, e.g., promoter, enhancer, transcription factor binding site, miRNA binding site, or epigenetic modification site, to alter the expression of an endogenous gene to reduce disease risk or lessen its severity. In some embodiments, a Gene Writing system may be used to replace one or more exons of an endogenous protein to remove an allele that increases disease risk or to alter an allele to one that confers disease protection.

### Plant-Modification Methods

[0866] Gene Writer systems described herein may be used to modify a plant or a plant part (e.g., leaves, roots, flowers, fruits, or seeds), e.g., to increase the fitness of a plant.

### A. Delivery to a Plant

[0867] Provided herein are methods of delivering a Gene Writer system described herein to a plant. Included are methods for delivering a Gene Writer system to a plant by contacting the plant, or part thereof, with a Gene Writer system. The methods are useful for modifying the plant to, e.g., increase the fitness of a plant.

[0868] More specifically, in some embodiments, a nucleic acid described herein (e.g., a nucleic acid encoding a GeneWriter) may be encoded in a vector, e.g., inserted adjacent to a plant promoter, e.g., a maize ubiquitin promoter (ZmUBI) in a plant vector (e.g., pHUC411). In some embodiments, the nucleic acids described herein are introduced into a plant (e.g., japonica rice) or part of a plant (e.g., a callus of a plant) via agrobacteria. In some embodiments, the systems and methods described herein can be used in plants by replacing a plant gene (e.g., hygromycin phosphotransferase (HPT)) with a null allele (e.g., containing a base substitution at the start codon). Systems and methods for modifying a plant genome are described in Xu et. al. Development of plant prime-editing systems for precise genome editing, 2020, Plant Communications.

[0869] In one aspect, provided herein is a method of increasing the fitness of a plant, the method including delivering to the plant the Gene Writer system described herein (e.g., in an effective amount and duration) to increase the fitness of the plant relative to an untreated plant (e.g., a plant that has not been delivered the Gene Writer system).

[0870] An increase in the fitness of the plant as a consequence of delivery of a Gene Writer system can manifest in a number of ways, e.g., thereby resulting in a better production of the plant, for example, an improved yield, improved vigor of the plant or quality of the harvested product from the plant, an improvement in pre- or post-harvest traits deemed desirable for agriculture or horticulture (e.g., taste, appearance, shelf life), or for an improvement of traits that otherwise benefit humans (e.g., decreased allergen production). An improved yield of a plant relates to an increase in the yield of a product (e.g., as measured by plant biomass, grain, seed or fruit yield, protein content, carbohydrate or oil content or leaf area) of the plant by a measurable amount over the yield of the same product of the plant produced under the same conditions, but without the application of the instant compositions or compared with application of conventional plant-modifying agents. For example, yield can be increased by at least about 0.5%, about 1%, about 2%, about 3%, about 4%, about 5%, about 10%, about 20%, about 30%, about 40%, about 50%, about 60%, about 70%, about 80%, about 90%, about 100%, or more than 100%. In some instances, the method is effective to increase yield by about 2×-fold, 5×-fold, 10×-fold, 25×-fold, 50×-fold, 75×-fold, 100×-fold, or more than 100×-fold relative to an untreated plant. Yield can be expressed in terms of an amount by weight or volume of the plant or a product of the plant on some basis. The basis can be expressed in terms of time, growing area, weight of plants produced, or amount of a raw material used. For example, such methods may increase the yield of plant tissues including, but not limited to: seeds, fruits, kernels, bolls, tubers, roots, and leaves.

[0871] An increase in the fitness of a plant as a consequence of delivery of a Gene Writer system can also be measured by other means, such as an increase or improvement of the vigor rating, the stand (the number of plants per unit of area), plant height, stalk circumference, stalk length, leaf number, leaf size, plant canopy, visual appearance (such as greener leaf color), root rating, emergence, protein content, increased tillering, bigger leaves, more leaves, less dead basal leaves, stronger tillers, less fertilizer needed, less seeds needed, more productive tillers, earlier flowering, early grain or seed maturity, less plant verse (lodging), increased shoot growth, earlier germination, or any combination of these factors, by a measurable or noticeable amount over the same factor of the plant produced under the same conditions, but without the administration of the instant compositions or with application of conventional plant-modifying agents.

[0872] Accordingly, provided herein is a method of modifying a plant, the method including delivering to the plant an effective amount of any of the Gene Writer systems provided herein, wherein the method modifies the plant and thereby introduces or increases a beneficial trait in the plant (e.g., by about 1%, 2%, 5%, 10%, 20%, 30%, 40%, 50%, 60%, 70%, 80%, 90%, 100%, or more than 100%) relative to an untreated plant. In particular, the method may increase the fitness of the plant (e.g., by about 1%, 2%, 5%, 10%, 20%, 30%, 40%, 50%, 60%, 70%, 80%, 90%, 100%, or more than 100%) relative to an untreated plant.

[0873] In some instances, the increase in plant fitness is an increase (e.g., by about 1%, 2%, 5%, 10%, 20%, 30%, 40%, 50%, 60%, 70%, 80%, 90%, 100%, or more than 100%) in disease resistance, drought tolerance, heat tolerance, cold tolerance, salt tolerance, metal tolerance, herbicide tolerance, chemical tolerance, water use efficiency, nitrogen utilization, resistance to nitrogen stress, nitrogen fixation, pest resistance, herbivore resistance, pathogen resistance, yield, yield under water-limited conditions, vigor, growth, photosynthetic capability, nutrition, protein content, carbohydrate content, oil content, biomass, shoot length, root length, root architecture, seed weight, or amount of harvestable produce.

[0874] In some instances, the increase in fitness is an increase (e.g., by about 1%, 2%, 5%, 10%, 20%, 30%, 40%, 50%, 60%, 70%, 80%, 90%, 100%, or more than 100%) in development, growth, yield, resistance to abiotic stressors, or resistance to biotic stressors. An abiotic stress refers to an environmental stress condition that a plant or a plant part is subjected to that includes, e.g., drought stress, salt stress, heat stress, cold stress, and low nutrient stress. A biotic stress refers to an environmental stress condition that a plant or plant part is subjected to that includes, e.g. nematode stress, insect herbivory stress, fungal pathogen stress, bacterial pathogen stress, or viral pathogen stress. The stress may be temporary, e.g. several hours, several days, several months, or permanent, e.g. for the life of the plant.

[0875] In somes 10%, 20%, 30%, 40%, 50%, 60%, 70%, 80%, 90%, 100%, or more than 100%) in quality of products harvested from the plant. For example, the increase in plant fitness may be an improvement in commercially favorable features (e.g., taste or appearance) of a product harvested from the plant. In other instances, the increase in plant fitness is an increase in shelf-life of a product harvested from the plant (e.g., by about 1%, 2%, 5%, 10%, 20%, 30%, 40, 50%, 60%, 70%, 80%, 90%, 100%, or more than 100%).

[0876] Alternatively, the increase in fitness may be an alteration of a trait that is beneficial to human or animal health, such as a reduction in allergen production. For example, the increase in fitness may be a decrease (e.g., by about 1%, 2%, 5%, 10%, 20%, 30%, 40%, 50%, 60%, 70%, 80%, 90%, 100%, or more than 100%) in production of an allergen (e.g., pollen) that stimulates an immune response in an animal (e.g., human).

[0877] The modification of the plant (e.g., increase in fitness) may arise from modification of one or more plant parts. For example, the plant can be modified by contacting leaf, seed, pollen, root, fruit, shoot, flower, cells, protoplasts, or tissue (e.g., meristematic tissue) of the plant. As such, in another aspect, provided herein is a method of increasing the fitness of a plant, the method including contacting pollen of the plant with an effective amount of any of the plant-modifying compositions herein, wherein the method increases the fitness of the plant (e.g., by about 1%, 2%, 5%, 10%, 20%, 30%, 40%, 50%, 60%, 70%, 80%, 90%, 100%, or more than 100%) relative to an untreated plant.

[0878] In yet another aspect, provided herein is a method of increasing the fitness of a plant, the method including contacting a seed of the plant with an effective amount of any of the Gene Writer systems disclosed herein, wherein the method increases the fitness of the plant (e.g., by about 1%, 2%, 5%, 10%, 20%, 30%, 40%, 50%, 60%, 70%, 80%, 90%, 100%, or more than 100%) relative to an untreated plant.

[0879] In another aspect, provided herein is a method including contacting a protoplast of the plant with an effective amount of any of the Gene Writer systems described herein, wherein the method increases the fitness of the plant (e.g., by about 1%, 2%, 5%, 10%, 20%, 30%, 40%, 50%, 60%, 70%, 80%, 90%, 100%, or more than 100%) relative to an untreated plant.

[0880] In a further aspect, provided herein is a method of increasing the fitness of a plant, the method including contacting a plant cell of the plant with an effective amount of any of the Gene Writer system described herein, wherein the method increases the fitness of the plant (e.g., by about 1%, 2%, 5%, 10%, 20%, 30%, 40%, 50%, 60%, 70%, 80%, 90%, 100%, or more than 100%) relative to an untreated plant.

[0881] In another aspect, provided herein is a method of increasing the fitness of a plant, the method including contacting meristematic tissue of the plant with an effective amount of any of the plant-modifying compositions herein, wherein the method increases the fitness of the plant (e.g., by about 1%, 2%, 5%, 10%, 20%, 30%, 40%, 50%, 60%, 70%, 80%, 90%, 100%, or more than 100%) relative to an untreated plant.

[0882] In another aspect, provided herein is a method of increasing the fitness of a plant, the method including contacting an embryo of the plant with an effective amount of any of the plant-modifying compositions herein, wherein the method increases the fitness of the plant (e.g., by about 1%, 2%, 5%, 10%, 20%, 30%, 40%, 50%, 60%, 70%, 80%, 90%, 100%, or more than 100%) relative to an untreated plant.

### B. Application Methods

[0883] A plant described herein can be exposed to any of the Gene Writer system compositions described herein in any suitable manner that permits delivering or administering the composition to the plant. The Gene Writer system may be delivered either alone or in combination with other active (e.g., fertilizing agents) or inactive substances and may be applied by, for example, spraying, injection (e.g., microinjection), through plants, pouring, dipping, in the form of concentrated liquids, gels, solutions, suspensions, sprays, powders, pellets, briquettes, bricks and the like, formulated to deliver an effective concentration of the plant-modifying composition. Amounts and locations for application of the compositions described herein are generally determined by the habitat of the plant, the lifecycle stage at which the plant can be targeted by the plant-modifying composition, the site where the application is to be made, and the physical and functional characteristics of the plant-modifying composition.

[0884] In some instances, the composition is sprayed directly onto a plant, e.g., crops, by e.g., backpack spraying, aerial spraying, crop spraying/dusting etc. In instances where the Gene Writer system is delivered to a plant, the plant receiving the Gene Writer system may be at any stage of plant growth. For example, formulated plant-modifying compositions can be applied as a seed-coating or root treatment in early stages of plant growth or as a total plant treatment at later stages of the crop cycle. In some instances, the plant-modifying composition may be applied as a topical agent to a plant.

[0885] Further, the Gene Writer system may be applied (e.g., in the soil in which a plant grows, or in the water that is used to water the plant) as a systemic agent that is absorbed and distributed through the tissues of a plant. In some instances, plants or food organisms may be genetically transformed to express the Gene Writer system.

[0886] Delayed or continuous release can also be accomplished by coating the Gene Writer system or a composition with the plant-modifying composition(s) with a dissolvable or bioerodable coating layer, such as gelatin, which coating dissolves or erodes in the environment of use, to then make the plant-modifying com Gene Writer system position available, or by dispersing the agent in a dissolvable or erodable matrix. Such continuous release and/or dispensing means devices may be advantageously employed to consistently maintain an effective concentration of one or more of the plant-modifying compositions described herein.

[0887] In some instances, the Gene Writer system is delivered to a part of the plant, e.g., a leaf, seed, pollen, root, fruit, shoot, or flower, or a tissue, cell, or protoplast thereof. In some instances, the Gene Writer system is delivered to a cell of the plant. In some instances, the Gene Writer system is delivered to a protoplast of the plant. In some instances, the Gene Writer system is delivered to a tissue of the plant. For example, the composition may be delivered to meristematic tissue of the plant (e.g., apical meristem, lateral meristem, or intercalary meristem). In some instances, the composition is delivered to permanent tissue of the plant (e.g., simple tissues (e.g., parenchyma, collenchyma, or sclerenchyma) or complex permanent tissue (e.g., xylem or phloem)). In some instances, the Gene Writer system is delivered to a plant embryo.

### C. Plants

[0888] A variety of plants can be delivered to or treated with a Gene Writer system described herein. Plants that can be delivered a Gene Writer system (i.e., “treated”) in accordance with the present methods include whole plants and parts thereof, including, but not limited to, shoot vegetative organs/structures (e.g., leaves, stems and tubers), roots, flowers and floral organs/structures (e.g., bracts, sepals, petals, stamens, carpels, anthers and ovules), seed (including embryo, endosperm, cotyledons, and seed coat) and fruit (the mature ovary), plant tissue (e.g., vascular tissue, ground tissue, and the like) and cells (e.g., guard cells, egg cells, and the like), and progeny of same. Plant parts can further refer parts of the plant such as the shoot, root, stem, seeds, stipules, leaves, petals, flowers, ovules, bracts, branches, petioles, internodes, bark, pubescence, tillers, rhizomes, fronds, blades, pollen, stamen, and the like.

[0889] The class of plants that can be treated in a method disclosed herein includes the class of higher and lower plants, including angiosperms (monocotyledonous and dicotyledonous plants), gymnosperms, ferns, horsetails, psilophytes, lycophytes, bryophytes, and algae (e.g., multicellular or unicellular algae). Plants that can be treated in accordance with the present methods further include any vascular plant, for example monocotyledons or dicotyledons or gymnosperms, including, but not limited to alfalfa, apple, Arabidopsis, banana, barley, canola, castor bean, chrysanthemum, clover, cocoa, coffee, cotton, cottonseed, corn, crambe, cranberry, cucumber, dendrobium, dioscorea, eucalyptus, fescue, flax, gladiolus, liliacea, linseed, millet, muskmelon, mustard, oat, oil palm, oilseed rape, papaya, peanut, pineapple, ornamental plants, Phaseolus, potato, rapeseed, rice, rye, ryegrass, safflower, sesame, sorghum, soybean, sugarbeet, sugarcane, sunflower, strawberry, tobacco, tomato, turfgrass, wheat and vegetable crops such as lettuce, celery, broccoli, cauliflower, cucurbits; fruit and nut trees, such as apple, pear, peach, orange, grapefruit, lemon, lime, almond, pecan, walnut, hazel; vines, such as grapes (e.g., a vineyard), kiwi, hops; fruit shrubs and brambles, such as raspberry, blackberry, gooseberry; forest trees, such as ash, pine, fir, maple, oak, chestnut, popular; with alfalfa, canola, castor bean, corn, cotton, crambe, flax, linseed, mustard, oil palm, oilseed rape, peanut, potato, rice, safflower, sesame, soybean, sugarbeet, sunflower, tobacco, tomato, and wheat. Plants that can be treated in accordance with the methods of the present invention include any crop plant, for example, forage crop, oilseed crop, grain crop, fruit crop, vegetable crop, fiber crop, spice crop, nut crop, turf crop, sugar crop, beverage crop, and forest crop. In certain instances, the crop plant that is treated in the method is a soybean plant. In other certain instances, the crop plant is wheat. In certain instances, the crop plant is corn. In certain instances, the crop plant is cotton.

[0890] In certain instances, the crop plant is alfalfa. In certain instances, the crop plant is sugarbeet. In certain instances, the crop plant is rice. In certain instances, the crop plant is potato. In certain instances, the crop plant is tomato. In certain instances, the plant is a crop. Examples of such crop plants include, but are not limited to, monocotyledonous and dicotyledonous plants including, but not limited to, fodder or forage legumes, ornamental plants, food crops, trees, or shrubs selected from Acer spp., Allium spp., Amaranthus spp., Ananas comosus, Apium graveolens, Arachis spp, Asparagus officinalis, Beta vulgaris, Brassica spp. (e.g., Brassica napus, Brassica rapa ssp. (canola, oilseed rape, turnip rape), Camellia sinensis, Canna indica, Cannabis saliva, Capsicum spp., Castanea spp., Cichorium endivia, Citrullus lanatus, Citrus spp., Cocos spp., Coffea spp., Coriandrum sativum, Corylus spp., Crataegus spp., Cucurbita spp., Cucumis spp., Daucus carota, Fagus spp., Ficus carica, Fragaria spp., Ginkgo biloba, Glycine spp. (e.g., Glycine max, Soja hispida or Soja max), Gossypium hirsutum, Helianthus spp. (e.g., Helianthus annuus), Hibiscus spp., Hordeum spp. (e.g., Hordeum vulgare), Ipomoea batatas, Juglans spp., Lactuca sativa, Linum usitatissimum, Litchi chinensis, Lotus spp., Luffa acutangula, Lupinus spp., Lycopersicon spp. (e.g., Lycopersicon esculenturn, Lycopersicon lycopersicum, Lycopersicon pyriforme), Malus spp., Medicago sativa, Mentha spp., Miscanthus sinensis, Morus nigra, Musa spp., Nicotiana spp., Olea spp., Oryza spp. (e.g., Oryza sativa, Oryza latifolia), Panicum miliaceum, Panicum virgatum, Passiflora edulis, Petroselinum crispum, Phaseolus spp., Pinus spp., Pistacia vera, Pisum spp., Poa spp., Populus spp., Prunus spp., Pyrus communis, Quercus spp., Raphanus sativus, Rheum rhabarbarum, Ribes spp., Ricinus communis, Rubus spp., Saccharum spp., Salix sp., Sambucus spp., Secale cereale, Sesamum spp., Sinapis spp., Solanum spp. (e.g., Solanum tuberosum, Solanum integrifolium or Solanum lycopersicum), Sorghum bicolor, Sorghum halepense, Spinacia spp., Tamarindus indica, Theobroma cacao, Trifolium spp., Triticosecale rimpaui, Triticum spp. (e.g., Triticum aestivum, Triticum durum, Triticum turgidum, Triticum hybernum, Triticum macha, Triticum sativum or Triticum vulgare), Vaccinium spp., Vicia spp., Vigna spp., Viola odorata, Vitis spp., and Zea mays. In certain embodiments, the crop plant is rice, oilseed rape, canola, soybean, corn (maize), cotton, sugarcane, alfalfa, sorghum, or wheat.

[0891] The plant or plant part for use in the present invention include plants of any stage of plant development. In certain instances, the delivery can occur during the stages of germination, seedling growth, vegetative growth, and reproductive growth. In certain instances, delivery to the plant occurs during vegetative and reproductive growth stages. In some instances, the composition is delivered to pollen of the plant. In some instances, the composition is delivered to a seed of the plant. In some instances, the composition is delivered to a protoplast of the plant. In some instances, the composition is delivered to a tissue of the plant. For example, the composition may be delivered to meristematic tissue of the plant (e.g., apical meristem, lateral meristem, or intercalary meristem). In some instances, the composition is delivered to permanent tissue of the plant (e.g., simple tissues (e.g., parenchyma, collenchyma, or sclerenchyma) or complex permanent tissue (e.g., xylem or phloem)). In some instances, the composition is delivered to a plant embryo. In some instances, the composition is delivered to a plant cell. The stages of vegetative and reproductive growth are also referred to herein as “adult” or “mature” plants.

[0892] In instances where the Gene Writer system is delivered to a plant part, the plant part may be modified by the plant-modifying agent. Alternatively, the Gene Writer system may be distributed to other parts of the plant (e.g., by the plant's circulatory system) that are subsequently modified by the plant-modifying agent.

### Lipid Nanoparticles

[0893] The methods and systems provided by the invention, may employ any suitable carrier or delivery modality, including, in certain embodiments, lipid nanoparticles (LNPs). Lipid nanoparticles, in some embodiments, comprise one or more ionic lipids, such as non-cationic lipids (e.g., neutral or anionic, or zwitterionic lipids); one or more conjugated lipids (such as PEG-conjugated lipids or lipids conjugated to polymers described in Table 5 of WO2019217941; incorporated herein by reference in its entirety); one or more sterols (e.g., cholesterol); and, optionally, one or more targeting molecules (e.g., conjugated receptors, receptor ligands, antibodies); or combinations of the foregoing.

[0894] Lipids that can be used in nanoparticle formations (e.g., lipid nanoparticles) include, for example those described in Table 4 of WO2019217941, which is incorporated by reference—e.g., a lipid-containing nanoparticle can comprise one or more of the lipids in Table 4 of WO2019217941. Lipid nanoparticles can include additional elements, such as polymers, such as the polymers described in Table 5 of WO2019217941, incorporated by reference.

[0895] In some embodiments, conjugated lipids, when present, can include one or more of PEG-diacylglycerol (DAG) (such as 1-(monomethoxy-polyethyleneglycol)-2,3-dimyristoylglycerol (PEG-DMG)), PEG-dialkyloxypropyl (DAA), PEG-phospholipid, PEG-ceramide (Cer), a pegylated phosphatidylethanoloamine (PEG-PE), PEG succinate diacylglycerol (PEGS-DAG) (such as 4-0-(2′,3′-di(tetradecanoyloxy)propyl-1-0-(w-methoxy(polyethoxy)ethyl) butanedioate (PEG-S-DMG)), PEG dialkoxypropylcarbam, N-(carbonyl-methoxypoly ethylene glycol 2000)-1,2-distearoyl-sn-glycero-3-phosphoethanolamine sodium salt, and those described in Table 2 of WO2019051289 (incorporated by reference), and combinations of the foregoing.

[0896] In some embodiments, sterols that can be incorporated into lipid nanoparticles include one or more of cholesterol or cholesterol derivatives, such as those in WO2009/127060 or US2010/0130588, which are incorporated by reference. Additional exemplary sterols include phytosterols, including those described in Eygeris et al (2020), dx.doi.org/10.1021/acs.nanolett.0c01386, incorporated herein by reference.

[0897] In some embodiments, the lipid particle comprises an ionizable lipid, a non-cationic lipid, a conjugated lipid that inhibits aggregation of particles, and a sterol. The amounts of these components can be varied independently and to achieve desired properties. For example, in some embodiments, the lipid nanoparticle comprises an ionizable lipid is in an amount from about 20 mol % to about 90 mol % of the total lipids (in other embodiments it may be 20-70% (mol), 30-60% (mol) or 40-50% (mol); about 50 mol % to about 90 mol % of the total lipid present in the lipid nanoparticle), a non-cationic lipid in an amount from about 5 mol % to about 30 mol % of the total lipids, a conjugated lipid in an amount from about 0.5 mol % to about 20 mol % of the total lipids, and a sterol in an amount from about 20 mol % to about 50 mol % of the total lipids. The ratio of total lipid to nucleic acid (e.g., encoding the Gene Writer or template nucleic acid) can be varied as desired. For example, the total lipid to nucleic acid (mass or weight) ratio can be from about 10:1 to about 30:1.

[0898] In some embodiments, the lipid to nucleic acid ratio (mass/mass ratio; w/w ratio) can be in the range of from about 1:1 to about 25:1, from about 10:1 to about 14:1, from about 3:1 to about 15:1, from about 4:1 to about 10:1, from about 5:1 to about 9:1, or about 6:1 to about 9:1. The amounts of lipids and nucleic acid can be adjusted to provide a desired N/P ratio, for example, N/P ratio of 3, 4, 5, 6, 7, 8, 9, 10 or higher. Generally, the lipid nanoparticle formulation's overall lipid content can range from about 5 mg/ml to about 30 mg/mL.

[0899] Some non-limiting example of lipid compounds that may be used (e.g., in combination with other lipid components) to form lipid nanoparticles for the delivery of compositions described herein, e.g., nucleic acid (e.g., RNA) described herein (e.g., a template nucleic acid or a nucleic acid encoding a GeneWriter) includes,

[chemical structure]

[0900] In some embodiments an LNP comprising Formula (i) is used to deliver a GeneWriter composition described herein to the liver and/or hepatocyte cells.

[chemical structure]

[0901] In some embodiments an LNP comprising Formula (ii) is used to deliver a GeneWriter composition described herein to the liver and/or hepatocyte cells.

[chemical structure]

[0902] In some embodiments an LNP comprising Formula (iii) is used to deliver a GeneWriter composition described herein to the liver and/or hepatocyte cells.

[chemical structure]

[0903] In some embodiments an LNP comprising Formula (v) is used to deliver a GeneWriter composition described herein to the liver and/or hepatocyte cells.

[chemical structure]

[0904] In some embodiments an LNP comprising Formula (vi) is used to deliver a GeneWriter composition described herein to the liver and/or hepatocyte cells.

[chemical structure]

[0905] In some embodiments an LNP comprising Formula (viii) is used to deliver a GeneWriter composition described herein to the liver and/or hepatocyte cells.

[chemical structure]

[0906] In some embodiments an LNP comprising Formula (ix) is used to deliver a GeneWriter composition described herein to the liver and/or hepatocyte cells.

[chemical structure]

[0907] wherein
[0908] X¹ is O, NR¹, or a direct bond, X² is C2-5 alkylene, X³ is C(=0) or a direct bond, R¹ is H or Me, R³ is Ci-3 alkyl, R² is Ci-3 alkyl, or R² taken together with the nitrogen atom to which it is attached and 1-3 carbon atoms of X² form a 4-, 5-, or 6-membered ring, or X¹ is NR¹, R¹ and R² taken together with the nitrogen atoms to which they are attached form a 5- or 6-membered ring, or R² taken together with R³ and the nitrogen atom to which they are attached form a 5-, 6-, or 7-membered ring, Y¹ is C2-12 alkylene, Y² is selected from

[chemical structure]

[0909] n is 0 to 3, R⁴ is Ci-15 alkyl, Z¹ is Ci-6 alkylene or a direct bond,
[0910] Z² is

[chemical structure]

[0911] (in either orientation) or absent, provided that if Z¹ is a direct bond, Z² is absent;
[0912] R⁵ is C5-9 alkyl or C6-10 alkoxy, R⁶ is C5-9 alkyl or C6-10 alkoxy, W is methylene or a direct bond, and R⁷ is H or Me, or a salt thereof, provided that if R³ and R² are C2 alkyls, X¹ is O, X² is linear C3 alkylene, X³ is C(=0), Y¹ is linear Ce alkylene, (Y²)n-R⁴ is

[chemical structure]

[0913] R⁴ is linear C5 alkyl, Z¹ is C2 alkylene, Z² is absent, W is methylene, and R⁷ is H, then R⁵ and R⁶ are not Cx alkoxy.

[0914] In some embodiments an LNP comprising Formula (xii) is used to deliver a GeneWriter composition described herein to the liver and/or hepatocyte cells.

[chemical structure]

[0915] In some embodiments an LNP comprising Formula (xi) is used to deliver a GeneWriter composition described herein to the liver and/or hepatocyte cells.

[chemical structure]

[0916] In some embodiments an LNP comprises a compound of Formula (xii) and a compound of Formula (xiv).

[chemical structure]

[0917] In some embodiments an LNP comprising Formula (xv) is used to deliver a GeneWriter composition described herein to the liver and/or hepatocyte cells.

[chemical structure]

[0918] In some embodiments an LNP comprising a formulation of Formula (xvi) is used to deliver a GeneWriter composition described herein to the lung endothelial cells.

[chemical structure]

[chemical structure]

[0919] In some embodiments, a lipid compound used to form lipid nanoparticles for the delivery of compositions described herein, e.g., nucleic acid (e.g., RNA) described herein (e.g., a template nucleic acid or a nucleic acid encoding a GeneWriter) is made by one of the following reactions:

[chemical structure]

[0920] In some embodiments, a composition described herein (e.g., a nucleic acid or a protein) is provided in an LNP that comprises an ionizable lipid. In some embodiments, the ionizable lipid is heptadecan-9-yl 8-((2-hydroxyethyl)(6-oxo-6-(undecyloxy)hexyl)amino)octanoate (SM-102); e.g., as described in Example 1 of U.S. Pat. No. 9,867,888 (incorporated by reference herein in its entirety). In some embodiments, the ionizable lipid is 9Z,12Z)-3-((4,4-bis(octyloxy)butanoyl)oxy)-2-((((3-(diethylamino)propoxy)carbonyl)oxy)methyl)propyl octadeca-9,12-dienoate (LP01), e.g., as synthesized in Example 13 of WO2015/095340 (incorporated by reference herein in its entirety). In some embodiments, the ionizable lipid is Di((Z)-non-2-en-1-yl) 9-((4-dimethylamino)butanoyl)oxy)heptadecanedioate (L319), e.g. as synthesized in Example 7, 8, or 9 of US2012/0027803 (incorporated by reference herein in its entirety). In some embodiments, the ionizable lipid is 1,1′-((2-(4-(2-((2-(Bis(2-hydroxydodecyl)amino)ethyl)(2-hydroxydodecyl) amino)ethyl)piperazin-1-yl)ethyl)azanediyl)bis(dodecan-2-ol) (C12-200), e.g., as synthesized in Examples 14 and 16 of WO2010/053572 (incorporated by reference herein in its entirety). In some embodiments, the ionizable lipid is Imidazole cholesterol ester (ICE) lipid (3S, 10R, 13R, 17R)-10, 13-dimethyl-17-((R)-6-methylheptan-2-yl)-2, 3, 4, 7, 8, 9, 10, 11, 12, 13, 14, 15, 16, 17-tetradecahydro-1H-cyclopenta[a]phenanthren-3-yl 3-(1H-imidazol-4-yl)propanoate, e.g., Structure (I) from WO2020/106946 (incorporated by reference herein in its entirety).

[0921] In some embodiments, an ionizable lipid may be a cationic lipid, an ionizable cationic lipid, e.g., a cationic lipid that can exist in a positively charged or neutral form depending on pH, or an amine-containing lipid that can be readily protonated. In some embodiments, the cationic lipid is a lipid capable of being positively charged, e.g., under physiological conditions. Exemplary cationic lipids include one or more amine group(s) which bear the positive charge. In some embodiments, the lipid particle comprises a cationic lipid in formulation with one or more of neutral lipids, ionizable amine-containing lipids, biodegradable alkyn lipids, steroids, phospholipids including polyunsaturated lipids, structural lipids (e.g., sterols), PEG, cholesterol and polymer conjugated lipids. In some embodiments, the cationic lipid may be an ionizable cationic lipid. An exemplary cationic lipid as disclosed herein may have an effective pKa over 6.0. In embodiments, a lipid nanoparticle may comprise a second cationic lipid having a different effective pKa (e.g., greater than the first effective pKa), than the first cationic lipid. A lipid nanoparticle may comprise between 40 and 60 mol percent of a cationic lipid, a neutral lipid, a steroid, a polymer conjugated lipid, and a therapeutic agent, e.g., a nucleic acid (e.g., RNA) described herein (e.g., a template nucleic acid or a nucleic acid encoding a GeneWriter), encapsulated within or associated with the lipid nanoparticle. In some embodiments, the nucleic acid is co-formulated with the cationic lipid. The nucleic acid may be adsorbed to the surface of an LNP, e.g., an LNP comprising a cationic lipid. In some embodiments, the nucleic acid may be encapsulated in an LNP, e.g., an LNP comprising a cationic lipid. In some embodiments, the lipid nanoparticle may comprise a targeting moiety, e.g., coated with a targeting agent. In embodiments, the LNP formulation is biodegradable. In some embodiments, a lipid nanoparticle comprising one or more lipid described herein, e.g., Formula (i), (ii), (ii), (vii) and/or (ix) encapsulates at least 1%, at least 5%, at least 10%, at least 20%, at least 30%, at least 40%, at least 50%, at least 60%, at least 70%, at least 80%, at least 90%, at least 92%, at least 95%, at least 97%, at least 98% or 100% of an RNA molecule, e.g., template RNA and/or a mRNA encoding the Gene Writer polypeptide.

[0922] Exemplary ionizable lipids that can be used in lipid nanoparticle formulations include, without limitation, those listed in Table 1 of WO2019051289, incorporated herein by reference. Additional exemplary lipids include, without limitation, one or more of the following formulae: X of US2016/0311759; I of US20150376115 or in US2016/0376224; I, II or III of US20160151284; I, IA, II, or IIA of US20170210967; I-c of US20150140070; A of US2013/0178541; I of US2013/0303587 or US2013/0123338; I of US2015/0141678; II, III, IV, or V of US2015/0239926; I of US2017/0119904; I or II of WO2017/117528; A of US2012/0149894; A of US2015/0057373; A of WO2013/116126; A of US2013/0090372; A of US2013/0274523; A of US2013/0274504; A of US2013/0053572; A of WO2013/016058; A of WO2012/162210; I of US2008/042973; I, II, III, or IV of US2012/01287670; I or II of US2014/0200257; I, II, or III of US2015/0203446; I or III of US2015/0005363; I, IA, IB, IC, ID, II, IIA, IIB, IIC, IID, or III-XXIV of US2014/0308304; of US2013/0338210; I, II, III, or IV of WO2009/132131; A of US2012/01011478; I or XXXV of US2012/0027796; XIV or XVII of US2012/0058144; of US2013/0323269; I of US2011/0117125; I, II, or III of US2011/0256175; I, II, III, IV, V, VI, VII, VIII, IX, X, XI, XII of US2012/0202871; I, II, III, IV, V, VI, VII, VIII, X, XII, XIII, XIV, XV, or XVI of US2011/0076335; I or II of US2006/008378; I of US2013/0123338; I or X-A-Y-Z of US2015/0064242; XVI, XVII, or XVIII of US2013/0022649; I, II, or III of US2013/0116307; I, II, or III of US2013/0116307; I or II of US2010/0062967; I-X of US2013/0189351; I of US2014/0039032; V of US2018/0028664; I of US2016/0317458; I of US2013/0195920; 5, 6, or 10 of U.S. Pat. No. 10,221,127; III-3 of WO2018/081480; I-5 or I-8 of WO2020/081938; 18 or 25 of U.S. Pat. No. 9,867,888; A of US2019/0136231; II of WO2020/219876; 1 of US2012/0027803; OF-02 of US2019/0240349; 23 of U.S. Pat. No. 10,086,013; cKK-E12/A6 of Miao et al (2020); C12-200 of WO2010/053572; 7C1 of Dahlman et al (2017); 304-O13 or 503-O13 of Whitehead et al; TS-P4C2 of U.S. Pat. No. 9,708,628; I of WO2020/106946; I of WO2020/106946.

[0923] In some embodiments, the ionizable lipid is MC3 (6Z,9Z,28Z,31Z)-heptatriaconta-6,9,28,31-tetraen-19-yl-4-(dimethylamino) butanoate (DLin-MC3-DMA or MC3), e.g., as described in Example 9 of WO2019051289A9 (incorporated by reference herein in its entirety). In some embodiments, the ionizable lipid is the lipid ATX-002, e.g., as described in Example 10 of WO2019051289A9 (incorporated by reference herein in its entirety). In some embodiments, the ionizable lipid is (13Z,16Z)-A,A-dimethyl-3-nonyldocosa-13, 16-dien-1-amine (Compound 32), e.g., as described in Example 11 of WO2019051289A9 (incorporated by reference herein in its entirety). In some embodiments, the ionizable lipid is Compound 6 or Compound 22, e.g., as described in Example 12 of WO2019051289A9 (incorporated by reference herein in its entirety).

[0924] Exemplary non-cationic lipids include, but are not limited to, distearoyl-sn-glycero-phosphoethanolamine, distearoylphosphatidylcholine (DSPC), dioleoylphosphatidylcholine (DOPC), dipalmitoylphosphatidylcholine (DPPC), dioleoylphosphatidylglycerol (DOPG), dipalmitoylphosphatidylglycerol (DPPG), dioleoyl-phosphatidylethanolamine (DOPE), palmitoyloleoylphosphatidylcholine (POPC), palmitoyloleoylphosphatidylethanolamine (POPE), dioleoyl-phosphatidylethanolamine 4-(N-maleimidomethyl)-cyclohexane-1-carboxylate (DOPE-mal), dipalmitoyl phosphatidyl ethanolamine (DPPE), dimyristoylphosphoethanolamine (DMPE), distearoyl-phosphatidyl-ethanolamine (DSPE), monomethyl-phosphatidylethanolamine (such as 16-O-monomethyl PE), dimethyl-phosphatidylethanolamine (such as 16-O-dimethyl PE), 18-1-trans PE, 1-stearoyl-2-oleoyl-phosphatidyethanolamine (SOPE), hydrogenated soy phosphatidylcholine (HSPC), egg phosphatidylcholine (EPC), dioleoylphosphatidylserine (DOPS), sphingomyelin (SM), dimyristoyl phosphatidylcholine (DMPC), dimyristoyl phosphatidylglycerol (DMPG), distearoylphosphatidylglycerol (DSPG), dierucoylphosphatidylcholine (DEPC), palmitoyloleyolphosphatidylglycerol (POPG), dielaidoyl-phosphatidylethanolamine (DEPE), lecithin, phosphatidylethanolamine, lysolecithin, lysophosphatidylethanolamine, phosphatidylserine, phosphatidylinositol, sphingomyelin, egg sphingomyelin (ESM), cephalin, cardiolipin, phosphatidicacid,cerebrosides, dicetylphosphate, lysophosphatidylcholine, dilinoleoylphosphatidylcholine, or mixtures thereof. It is understood that other diacylphosphatidylcholine and diacylphosphatidylethanolamine phospholipids can also be used. The acyl groups in these lipids are preferably acyl groups derived from fatty acids having C10-C24 carbon chains, e.g., lauroyl, myristoyl, paimitoyl, stearoyl, or oleoyl. Additional exemplary lipids, in certain embodiments, include, without limitation, those described in Kim et al. (2020) dx.doi.org/10.1021/acs.nanolett.0c01386, incorporated herein by reference. Such lipids include, in some embodiments, plant lipids found to improve liver transfection with mRNA (e.g., DGTS).

[0925] Other examples of non-cationic lipids suitable for use in the lipid nanoparticles include, without limitation, nonphosphorous lipids such as, e.g., stearylamine, dodeeylamine, hexadecylamine, acetyl palmitate, glycerol ricinoleate, hexadecyl stereate, isopropyl myristate, amphoteric acrylic polymers, triethanolamine-lauryl sulfate, alkyl-aryl sulfate polyethyloxylated fatty acid amides, dioctadecyl dimethyl ammonium bromide, ceramide, sphingomyelin, and the like. Other non-cationic lipids are described in WO2017/099823 or US patent publication US2018/0028664, the contents of which is incorporated herein by reference in their entirety.

[0926] In some embodiments, the non-cationic lipid is oleic acid or a compound of Formula I, II, or IV of US2018/0028664, incorporated herein by reference in its entirety. The non-cationic lipid can comprise, for example, 0-30% (mol) of the total lipid present in the lipid nanoparticle. In some embodiments, the non-cationic lipid content is 5-20% (mol) or 10-15% (mol) of the total lipid present in the lipid nanoparticle. In embodiments, the molar ratio of ionizable lipid to the neutral lipid ranges from about 2:1 to about 8:1 (e.g., about 2:1, 3:1, 4:1, 5:1, 6:1, 7:1, or 8:1).

[0927] In some embodiments, the lipid nanoparticles do not comprise any phospholipids.

[0928] In some aspects, the lipid nanoparticle can further comprise a component, such as a sterol, to provide membrane integrity. One exemplary sterol that can be used in the lipid nanoparticle is cholesterol and derivatives thereof. Non-limiting examples of cholesterol derivatives include polar analogues such as 5a-choiestanol, 53-coprostanol, cholesteryl-(2,-hydroxy)-ethyl ether, cholesteryl-(4′-hydroxy)-butyl ether, and 6-ketocholestanol; non-polar analogues such as 5a-cholestane, cholestenone, 5a-cholestanone, 5p-cholestanone, and cholesteryl decanoate; and mixtures thereof. In some embodiments, the cholesterol derivative is a polar analogue, e.g., dcholesterol-(4′-hydroxy)-buty 1 ether. Exemplary cholesterol derivatives are described in PCT publication WO2009/127060 and US patent publication US2010/0130588, each of which is incorporated herein by reference in its entirety.

[0929] In some embodiments, the component providing membrane integrity, such as a sterol, can comprise 0-50% (mol) (e.g., 0-10%, 10-20%, 20-30%, 30-40%, or 40-50%) of the total lipid present in the lipid nanoparticle. In some embodiments, such a component is 20-50% (mol) 30-40% (mol) of the total lipid content of the lipid nanoparticle.

[0930] In some embodiments, the lipid nanoparticle can comprise a polyethylene glycol (PEG) or a conjugated lipid molecule. Generally, these are used to inhibit aggregation of lipid nanoparticles and/or provide steric stabilization. Exemplary conjugated lipids include, but are not limited to, PEG-lipid conjugates, polyoxazoline (POZ)-lipid conjugates, polyamide-lipid conjugates (such as ATTA-lipid conjugates), cationic-polymer lipid (CPL) conjugates, and mixtures thereof. In some embodiments, the conjugated lipid molecule is a PEG-lipid conjugate, for example, a (methoxy polyethylene glycol)-conjugated lipid.

[0931] Exemplary PEG-lipid conjugates include, but are not limited to, PEG-diacylglycerol (DAG) (such as 1-(monomethoxy-polyethyleneglycol)-2,3-dimyristoylglycerol (PEG-DMG)), PEG-dialkyloxypropyl (DAA), PEG-phospholipid, PEG-ceramide (Cer), a pegylated phosphatidylethanoloamine (PEG-PE), PEG succinate diacylglycerol (PEGS-DAG) (such as 4-0-(2′,3′-di(tetradecanoyloxy)propyl-1-0-(w-methoxy(polyethoxy)ethyl) butanedioate (PEG-S-DMG)), PEG dialkoxypropylcarbam, N-(carbonyl-methoxypolyethylene glycol 2000)-1,2-distearoyl-sn-glycero-3-phosphoethanolamine sodium salt, or a mixture thereof. Additional exemplary PEG-lipid conjugates are described, for example, in U.S. Pat. Nos. 5,885,613, 6,287,591, US2003/0077829, US2003/0077829, US2005/0175682, US2008/0020058, US2011/0117125, US2010/0130588, US2016/0376224, US2017/0119904, and US/099823, the contents of all of which are incorporated herein by reference in their entirety. In some embodiments, a PEG-lipid is a compound of Formula III, III-a-I, III-a-2, III-b-1, III-b-2, or V of US2018/0028664, the content of which is incorporated herein by reference in its entirety. In some embodiments, a PEG-lipid is of Formula II of US20150376115 or US2016/0376224, the content of both of which is incorporated herein by reference in its entirety. In some embodiments, the PEG-DAA conjugate can be, for example, PEG-dilauryloxypropyl, PEG-dimyristyloxypropyl, PEG-dipalmityloxypropyl, or PEG-distearyloxypropyl. The PEG-lipid can be one or more of PEG-DMG, PEG-dilaurylglycerol, PEG-dipalmitoylglycerol, PEG-disterylglycerol, PEG-dilaurylglycamide, PEG-dimyristylglycamide, PEG-dipalmitoylglycamide, PEG-disterylglycamide, PEG-cholesterol (1-[8′-(Cholest-5-en-3[beta]-oxy)carboxamido-3′,6′-dioxaoctanyl] carbamoyl-[omega]-methyl-poly(ethylene glycol), PEG-DMB (3,4-Ditetradecoxylbenzyl-[omega]-methyl-poly(ethylene glycol) ether), and 1,2-dimyristoyl-sn-glycero-3-phosphoethanolamine-N-[methoxy(polyethylene glycol)-2000]. In some embodiments, the PEG-lipid comprises PEG-DMG, 1,2-dimyristoyl-sn-glycero-3-phosphoethanolamine-N-[methoxy(polyethylene glycol)-2000]. In some embodiments, the PEG-lipid comprises a structure selected from:

[chemical structure]

[0932] In some embodiments, lipids conjugated with a molecule other than a PEG can also be used in place of PEG-lipid. For example, polyoxazoline (POZ)-lipid conjugates, polyamide-lipid conjugates (such as ATTA-lipid conjugates), and cationic-polymer lipid (GPL) conjugates can be used in place of or in addition to the PEG-lipid.

[0933] Exemplary conjugated lipids, i.e., PEG-lipids, (POZ)-lipid conjugates, ATTA-lipid conjugates and cationic polymer-lipids are described in the PCT and LIS patent applications listed in Table 2 of WO2019051289A9, the contents of all of which are incorporated herein by reference in their entirety.

[0934] In some embodiments, the PEG or the conjugated lipid can comprise 0-20% (mol) of the total lipid present in the lipid nanoparticle. In some embodiments, PEG or the conjugated lipid content is 0.5-10% or 2-5% (mol) of the total lipid present in the lipid nanoparticle. Molar ratios of the ionizable lipid, non-cationic-lipid, sterol, and PEG/conjugated lipid can be varied as needed. For example, the lipid particle can comprise 30-70% ionizable lipid by mole or by total weight of the composition, 0-60% cholesterol by mole or by total weight of the composition, 0-30% non-cationic-lipid by mole or by total weight of the composition and 1-10% conjugated lipid by mole or by total weight of the composition. Preferably, the composition comprises 30-40% ionizable lipid by mole or by total weight of the composition, 40-50% cholesterol by mole or by total weight of the composition, and 10-20% non-cationic-lipid by mole or by total weight of the composition. In some other embodiments, the composition is 50-75% ionizable lipid by mole or by total weight of the composition, 20-40% cholesterol by mole or by total weight of the composition, and 5 to 10% non-cationic-lipid, by mole or by total weight of the composition and 1-10% conjugated lipid by mole or by total weight of the composition. The composition may contain 60-70% ionizable lipid by mole or by total weight of the composition, 25-35% cholesterol by mole or by total weight of the composition, and 5-10% non-cationic-lipid by mole or by total weight of the composition. The composition may also contain up to 90% ionizable lipid by mole or by total weight of the composition and 2 to 15% non-cationic lipid by mole or by total weight of the composition. The formulation may also be a lipid nanoparticle formulation, for example comprising 8-30% ionizable lipid by mole or by total weight of the composition, 5-30% non-cationic lipid by mole or by total weight of the composition, and 0-20% cholesterol by mole or by total weight of the composition; 4-25% ionizable lipid by mole or by total weight of the composition, 4-25% non-cationic lipid by mole or by total weight of the composition, 2 to 25% cholesterol by mole or by total weight of the composition, 10 to 35% conjugate lipid by mole or by total weight of the composition, and 5% cholesterol by mole or by total weight of the composition; or 2-30% ionizable lipid by mole or by total weight of the composition, 2-30% non-cationic lipid by mole or by total weight of the composition, 1 to 15% cholesterol by mole or by total weight of the composition, 2 to 35% conjugate lipid by mole or by total weight of the composition, and 1-20% cholesterol by mole or by total weight of the composition; or even up to 90% ionizable lipid by mole or by total weight of the composition and 2-10% non-cationic lipids by mole or by total weight of the composition, or even 100% cationic lipid by mole or by total weight of the composition. In some embodiments, the lipid particle formulation comprises ionizable lipid, phospholipid, cholesterol and a PEG-ylated lipid in a molar ratio of 50:10:38.5: 1.5. In some other embodiments, the lipid particle formulation comprises ionizable lipid, cholesterol and a PEG-ylated lipid in a molar ratio of 60:38.5:1.5.

[0935] In some embodiments, the lipid particle comprises ionizable lipid, non-cationic lipid (e.g. phospholipid), a sterol (e.g., cholesterol) and a PEG-ylated lipid, where the molar ratio of lipids ranges from 20 to 70 mole percent for the ionizable lipid, with a target of 40-60, the mole percent of non-cationic lipid ranges from 0 to 30, with a target of 0 to 15, the mole percent of sterol ranges from 20 to 70, with a target of 30 to 50, and the mole percent of PEG-ylated lipid ranges from 1 to 6, with a target of 2 to 5.

[0936] In some embodiments, the lipid particle comprises ionizable lipid/non-cationic-lipid/sterol/conjugated lipid at a molar ratio of 50:10:38.5:1.5.

[0937] In an aspect, the disclosure provides a lipid nanoparticle formulation comprising phospholipids, lecithin, phosphatidylcholine and phosphatidylethanolamine.

[0938] In some embodiments, one or more additional compounds can also be included. Those compounds can be administered separately or the additional compounds can be included in the lipid nanoparticles of the invention. In other words, the lipid nanoparticles can contain other compounds in addition to the nucleic acid or at least a second nucleic acid, different than the first. Without limitations, other additional compounds can be selected from the group consisting of small or large organic or inorganic molecules, monosaccharides, disaccharides, trisaccharides, oligosaccharides, polysaccharides, peptides, proteins, peptide analogs and derivatives thereof, peptidomimetics, nucleic acids, nucleic acid analogs and derivatives, an extract made from biological materials, or any combinations thereof.

[0939] In some embodiments, LNPs are directed to specific tissues by the addition of targeting domains. For example, biological ligands may be displayed on the surface of LNPs to enhance interaction with cells displaying cognate receptors, thus driving association with and cargo delivery to tissues wherein cells express the receptor. In some embodiments, the biological ligand may be a ligand that drives delivery to the liver, e.g., LNPs that display GalNAc result in delivery of nucleic acid cargo to hepatocytes that display asialoglycoprotein receptor (ASGPR). The work of Akinc et al. Mol Ther 18(7):1357-1364 (2010) teaches the conjugation of a trivalent GalNAc ligand to a PEG-lipid (GalNAc-PEG-DSG) to yield LNPs dependent on ASGPR for observable LNP cargo effect (see, e.g., FIG. 6 of Akinc et al. 2010, supra). Other ligand-displaying LNP formulations, e.g., incorporating folate, transferrin, or antibodies, are discussed in WO2017223135, which is incorporated herein by reference in its entirety, in addition to the references used therein, namely Kolhatkar et al., Curr Drug Discov Technol. 2011 8:197-206; Musacchio and Torchilin, Front Biosci. 2011 16:1388-1412; Yu et al., Mol Membr Biol. 2010 27:286-298; Patil et al., Crit Rev Ther Drug Carrier Syst. 2008 25:1-61; Benoit et al., Biomacromolecules. 2011 12:2708-2714; Zhao et al., Expert Opin Drug Deliv. 2008 5:309-319; Akinc et al., Mol Ther. 2010 18:1357-1364; Srinivasan et al., Methods Mol Biol. 2012 820:105-116; Ben-Arie et al., Methods Mol Biol. 2012 757:497-507; Peer 2010 J Control Release. 20:63-68; Peer et al., Proc Natl Acad Sci USA. 2007 104:4095-4100; Kim et al., Methods Mol Biol. 2011 721:339-353; Subramanya et al., Mol Ther. 2010 18:2028-2037; Song et al., Nat Biotechnol. 2005 23:709-717; Peer et al., Science. 2008 319:627-630; and Peer and Lieberman, Gene Ther. 2011 18:1127-1133.

[0940] In some embodiments, LNPs are selected for tissue-specific activity by the addition of a Selective ORgan Targeting (SORT) molecule to a formulation comprising traditional components, such as ionizable cationic lipids, amphipathic phospholipids, cholesterol and poly(ethylene glycol) (PEG) lipids. The teachings of Cheng et al. Nat Nanotechnol 15(4):313-320 (2020) demonstrate that the addition of a supplemental “SORT” component precisely alters the in vivo RNA delivery profile and mediates tissue-specific (e.g., lungs, liver, spleen) gene delivery and editing as a function of the percentage and biophysical property of the SORT molecule.

[0941] In some embodiments, the LNPs comprise biodegradable, ionizable lipids. In some embodiments, the LNPs comprise (9Z,12Z)-3-((4,4-bis(octyloxy)butanoyl)oxy)-2-((((3-(diethylamino)propoxy)carbonyl)oxy)methyl)propyl octadeca-9,12-dienoate, also called 3-((4,4-bis(octyloxy)butanoyl)oxy)-2-((((3-(diethylamino)propoxy)carbonyl)oxy)methyl)propyl (9Z,12Z)-octadeca-9,12-dienoate) or another ionizable lipid. See, e.g, lipids of WO2019/067992, WO/2017/173054, WO2015/095340, and WO2014/136086, as well as references provided therein. In some embodiments, the term cationic and ionizable in the context of LNP lipids is interchangeable, e.g., wherein ionizable lipids are cationic depending on the pH.

[0942] In some embodiments, multiple components of a Gene Writer system may be prepared as a single LNP formulation, e.g., an LNP formulation comprises mRNA encoding for the Gene Writer polypeptide and an RNA template. Ratios of nucleic acid components may be varied in order to maximize the properties of a therapeutic. In some embodiments, the ratio of RNA template to mRNA encoding a Gene Writer polypeptide is about 1:1 to 100:1, e.g., about 1:1 to 20:1, about 20:1 to 40:1, about 40:1 to 60:1, about 60:1 to 80:1, or about 80:1 to 100:1, by molar ratio. In other embodiments, a system of multiple nucleic acids may be prepared by separate formulations, e.g., one LNP formulation comprising a template RNA and a second LNP formulation comprising an mRNA encoding a Gene Writer polypeptide. In some embodiments, the system may comprise more than two nucleic acid components formulated into LNPs. In some embodiments, the system may comprise a protein, e.g., a Gene Writer polypeptide, and a template RNA formulated into at least one LNP formulation.

[0943] In some embodiments, the average LNP diameter of the LNP formulation may be between 10s of nm and 100s of nm, e.g., measured by dynamic light scattering (DLS). In some embodiments, the average LNP diameter of the LNP formulation may be from about 40 nm to about 150 nm, such as about 40 nm, 45 nm, 50 nm, 55 nm, 60 nm, 65 nm, 70 nm, 75 nm, 80 nm, 85 nm, 90 nm, 95 nm, 100 nm, 10⁵ nm, 110 nm, 115 nm, 120 nm, 125 nm, 130 nm, 135 nm, 140 nm, 145 nm, or 150 nm. In some embodiments, the average LNP diameter of the LNP formulation may be from about 50 nm to about 100 nm, from about 50 nm to about 90 nm, from about 50 nm to about 80 nm, from about 50 nm to about 70 nm, from about 50 nm to about 60 nm, from about 60 nm to about 100 nm, from about 60 nm to about 90 nm, from about 60 nm to about 80 nm, from about 60 nm to about 70 nm, from about 70 nm to about 100 nm, from about 70 nm to about 90 nm, from about 70 nm to about 80 nm, from about 80 nm to about 100 nm, from about 80 nm to about 90 nm, or from about 90 nm to about 100 nm. In some embodiments, the average LNP diameter of the LNP formulation may be from about 70 nm to about 100 nm. In a particular embodiment, the average LNP diameter of the LNP formulation may be about 80 nm. In some embodiments, the average LNP diameter of the LNP formulation may be about 100 nm. In some embodiments, the average LNP diameter of the LNP formulation ranges from about 1 mm to about 500 mm, from about 5 mm to about 200 mm, from about 10 mm to about 100 mm, from about 20 mm to about 80 mm, from about 25 mm to about 60 mm, from about 30 mm to about 55 mm, from about 35 mm to about 50 mm, or from about 38 mm to about 42 mm.

[0944] A LNP may, in some instances, be relatively homogenous. A polydispersity index may be used to indicate the homogeneity of a LNP, e.g., the particle size distribution of the lipid nanoparticles. A small (e.g., less than 0.3) polydispersity index generally indicates a narrow particle size distribution. A LNP may have a polydispersity index from about 0 to about 0.25, such as 0.01, 0.02, 0.03, 0.04, 0.05, 0.06, 0.07, 0.08, 0.09, 0.10, 0.11, 0.12, 0.13, 0.14, 0.15, 0.16, 0.17, 0.18, 0.19, 0.20, 0.21, 0.22, 0.23, 0.24, or 0.25. In some embodiments, the polydispersity index of a LNP may be from about 0.10 to about 0.20.

[0945] The zeta potential of a LNP may be used to indicate the electrokinetic potential of the composition. In some embodiments, the zeta potential may describe the surface charge of a LNP. Lipid nanoparticles with relatively low charges, positive or negative, are generally desirable, as more highly charged species may interact undesirably with cells, tissues, and other elements in the body. In some embodiments, the zeta potential of a LNP may be from about −10 mV to about +20 mV, from about −10 mV to about +15 mV, from about −10 mV to about +10 mV, from about −10 mV to about +5 mV, from about −10 mV to about 0 mV, from about −10 mV to about −5 mV, from about −5 mV to about +20 mV, from about −5 mV to about +15 mV, from about −5 mV to about +10 mV, from about −5 mV to about +5 mV, from about −5 mV to about 0 mV, from about 0 mV to about +20 mV, from about 0 mV to about +15 mV, from about 0 mV to about +10 mV, from about 0 mV to about +5 mV, from about +5 mV to about +20 mV, from about +5 mV to about +15 mV, or from about +5 mV to about +10 mV.

[0946] The efficiency of encapsulation of a protein and/or nucleic acid, e.g., Gene Writer polypeptide or mRNA encoding the polypeptide, describes the amount of protein and/or nucleic acid that is encapsulated or otherwise associated with a LNP after preparation, relative to the initial amount provided. The encapsulation efficiency is desirably high (e.g., close to 100%). The encapsulation efficiency may be measured, for example, by comparing the amount of protein or nucleic acid in a solution containing the lipid nanoparticle before and after breaking up the lipid nanoparticle with one or more organic solvents or detergents. An anion exchange resin may be used to measure the amount of free protein or nucleic acid (e.g., RNA) in a solution. Fluorescence may be used to measure the amount of free protein and/or nucleic acid (e.g., RNA) in a solution. For the lipid nanoparticles described herein, the encapsulation efficiency of a protein and/or nucleic acid may be at least 50%, for example 50%, 55%, 60%, 65%, 70%, 75%, 80%, 85%, 90%, 91%, 92%, 93%, 94%, 95%, 96%, 97%, 98%, 99%, or 100%. In some embodiments, the encapsulation efficiency may be at least 80%. In some embodiments, the encapsulation efficiency may be at least 90%. In some embodiments, the encapsulation efficiency may be at least 95%.

[0947] A LNP may optionally comprise one or more coatings. In some embodiments, a LNP may be formulated in a capsule, film, or table having a coating. A capsule, film, or tablet including a composition described herein may have any useful size, tensile strength, hardness or density.

[0948] Additional exemplary lipids, formulations, methods, and characterization of LNPs are taught by WO2020061457, which is incorporated herein by reference in its entirety.

[0949] In some embodiments, in vitro or ex vivo cell lipofections are performed using Lipofectamine MessengerMax (Thermo Fisher) or TransIT-mRNA Transfection Reagent (Mirus Bio). In certain embodiments, LNPs are formulated using the GenVoy_ILM ionizable lipid mix (Precision NanoSystems). In certain embodiments, LNPs are formulated using 2,2-dilinoleyl-4-dimethylaminoethyl-[1,3]-dioxolane (DLin-KC2-DMA) or dilinoleylmethyl-4-dimethylaminobutyrate (DLin-MC3-DMA or MC3), the formulation and in vivo use of which are taught in Jayaraman et al. Angew Chem Int Ed Engl 51(34):8529-8533 (2012), incorporated herein by reference in its entirety.

[0950] LNP formulations optimized for the delivery of CRISPR-Cas systems, e.g., Cas9-gRNA RNP, gRNA, Cas9 mRNA, are described in WO2019067992 and WO2019067910, both incorporated by reference.

[0951] Additional specific LNP formulations useful for delivery of nucleic acids are described in U.S. Pat. Nos. 8,158,601 and 8,168,775, both incorporated by reference, which include formulations used in patisiran, sold under the name ONPATTRO.

[0952] Exemplary dosing of Gene Writer LNP may include about 0.1, 0.25, 0.3, 0.5, 1, 2, 3, 4, 5, 6, 8, 10, or 100 mg/kg (RNA). Exemplary dosing of AAV comprising a nucleic acid encoding one or more components of the system may include an MOI of about 10¹¹, 10¹², 10¹³, and 10¹⁴ vg/kg.

[0953] In some embodiments, a lipid nanoparticle (or a formulation comprising lipid nanoparticles) lacks reactive impurities (e.g., aldehydes or ketones), or comprises less than a preselected level of reactive impurities (e.g., aldehydes or ketones). While not wishing to be bound by theory, in some embodiments, a lipid reagent is used to make a lipid nanoparticle formulation, and the lipid reagent may comprise a contaminating reactive impurity (e.g., an aldehyde or ketone). A lipid regent may be selected for manufacturing based on having less than a preselected level of reactive impurities (e.g., aldehydes or ketones). Without wishing to be bound by theory, in some embodiments, aldehydes can cause modification and damage of RNA, e.g., cross-linking between bases and/or covalently conjugating lipid to RNA (e.g., forming lipid-RNA adducts). This may, in some instances, lead to failure of a reverse transcriptase reaction and/or incorporation of inappropriate bases, e.g., at the site(s) of lesion(s), e.g., a mutation in a newly synthesized target DNA.

[0954] In some embodiments, a lipid nanoparticle formulation is produced using a lipid reagent comprising less than 5%, 4%, 3%, 2%, 1%, 0.9%, 0.8%, 0.7%, 0.6%, 0.5%, 0.4%, 0.3%, 0.2%, or 0.1% total reactive impurity (e.g., aldehyde) content. In some embodiments, a lipid nanoparticle formulation is produced using a lipid reagent comprising less than 5%, 4%, 3%, 2%, 1%, 0.9%, 0.8%, 0.7%, 0.6%, 0.5%, 0.4%, 0.3%, 0.2%, or 0.1% of any single reactive impurity (e.g., aldehyde) species. In some embodiments, a lipid nanoparticle formulation is produced using a lipid reagent comprising: (i) less than 5%, 4%, 3%, 2%, 1%, 0.9%, 0.8%, 0.7%, 0.6%, 0.5%, 0.4%, 0.3%, 0.2%, or 0.1% total reactive impurity (e.g., aldehyde) content; and (ii) less than 5%, 4%, 3%, 2%, 1%, 0.9%, 0.8%, 0.7%, 0.6%, 0.5%, 0.4%, 0.3%, 0.2%, or 0.1% of any single reactive impurity (e.g., aldehyde) species. In some embodiments, the lipid nanoparticle formulation is produced using a plurality of lipid reagents, and each lipid reagent of the plurality independently meets one or more criterion described in this paragraph. In some embodiments, each lipid reagent of the plurality meets the same criterion, e.g., a criterion of this paragraph.

[0955] In some embodiments, the lipid nanoparticle formulation comprises less than 5%, 4%, 3%, 2%, 1%, 0.9%, 0.8%, 0.7%, 0.6%, 0.5%, 0.4%, 0.3%, 0.2%, or 0.1% total reactive impurity (e.g., aldehyde) content. In some embodiments, the lipid nanoparticle formulation comprises less than 5%, 4%, 3%, 2%, 1%, 0.9%, 0.8%, 0.7%, 0.6%, 0.5%, 0.4%, 0.3%, 0.2%, or 0.1% of any single reactive impurity (e.g., aldehyde) species. In some embodiments, the lipid nanoparticle formulation comprises: (i) less than 5%, 4%, 3%, 2%, 1%, 0.9%, 0.8%, 0.7%, 0.6%, 0.5%, 0.4%, 0.3%, 0.2%, or 0.1% total reactive impurity (e.g., aldehyde) content; and (ii) less than 5%, 4%, 3%, 2%, 1%, 0.9%, 0.8%, 0.7%, 0.6%, 0.5%, 0.4%, 0.3%, 0.2%, or 0.1% of any single reactive impurity (e.g., aldehyde) species.

[0956] In some embodiments, one or more, or optionally all, of the lipid reagents used for a lipid nanoparticle as described herein or a formulation thereof comprise less than 5%, 4%, 3%, 2%, 1%, 0.9%, 0.8%, 0.7%, 0.6%, 0.5%, 0.4%, 0.3%, 0.2%, or 0.1% total reactive impurity (e.g., aldehyde) content. In some embodiments, one or more, or optionally all, of the lipid reagents used for a lipid nanoparticle as described herein or a formulation thereof comprise less than 5%, 4%, 3%, 2%, 1%, 0.9%, 0.8%, 0.7%, 0.6%, 0.5%, 0.4%, 0.3%, 0.2%, or 0.1% of any single reactive impurity (e.g., aldehyde) species. In some embodiments, one or more, or optionally all, of the lipid reagents used for a lipid nanoparticle as described herein or a formulation thereof comprise: (i) less than 5%, 4%, 3%, 2%, 1%, 0.9%, 0.8%, 0.7%, 0.6%, 0.5%, 0.4%, 0.3%, 0.2%, or 0.1% total reactive impurity (e.g., aldehyde) content; and (ii) less than 5%, 4%, 3%, 2%, 1%, 0.9%, 0.8%, 0.7%, 0.6%, 0.5%, 0.4%, 0.3%, 0.2%, or 0.1% of any single reactive impurity (e.g., aldehyde) species.

[0957] In some embodiments, total aldehyde content and/or quantity of any single reactive impurity (e.g., aldehyde) species is determined by liquid chromatography (LC), e.g., coupled with tandem mass spectrometry (MS/MS), e.g., as described herein. In some embodiments, reactive impurity (e.g., aldehyde) content and/or quantity of reactive impurity (e.g., aldehyde) species is determined by detecting one or more chemical modifications of a nucleic acid molecule (e.g., an RNA molecule, e.g., as described herein) associated with the presence of reactive impurities (e.g., aldehydes), e.g., in the lipid reagents. In some embodiments, reactive impurity (e.g., aldehyde) content and/or quantity of reactive impurity (e.g., aldehyde) species is determined by detecting one or more chemical modifications of a nucleotide or nucleoside (e.g., a ribonucleotide or ribonucleoside, e.g., comprised in or isolated from a template nucleic acid, e.g., as described herein) associated with the presence of reactive impurities (e.g., aldehydes), e.g., in the lipid reagents, e.g., as described herein. In embodiments, chemical modifications of a nucleic acid molecule, nucleotide, or nucleoside are detected by determining the presence of one or more modified nucleotides or nucleosides, e.g., using LC-MS/MS analysis, e.g., as described herein.

[0958] In some embodiments, a nucleic acid (e.g., RNA) described herein (e.g., a template nucleic acid or a nucleic acid encoding a GeneWriter) does not comprise an aldehyde modification, or comprises less than a preselected amount of aldehyde modifications. In some embodiments, on average, a nucleic acid has less than 50, 20, 10, 5, 2, or 1 aldehyde modifications per 1000 nucleotides, e.g., wherein a single cross-linking of two nucleotides is a single aldehyde modification. In some embodiments, the aldehyde modification is an RNA adduct (e.g., a lipid-RNA adduct). In some embodiments, the aldehyde-modified nucleotide is cross-linking between bases. In some embodiments, a nucleic acid (e.g., RNA) described herein comprises less than 50, 20, 10, 5, 2, or 1 cross-links between nucleotide.

### Retargeting

[0959] Retargeting (e.g., of a Gene Writer polypeptide or nucleic acid molecule, or of a system as described herein) may comprise directing the polypeptide to bind a target site. In some embodiments, the recombinase domain of the polypeptide is also modified.

### Gene Writer Polypeptide Determinants

[0960] In some embodiments, a Gene Writer polypeptide comprises a modification to a DNA-binding domain, e.g., relative to the wild-type polypeptide. In some embodiments, the DNA-binding domain comprises an addition, deletion, replacement, or modification to the amino acid sequence of the original DNA-binding domain. In some embodiments, the DNA-binding domain is modified to include a heterologous functional domain that binds specifically to a target nucleic acid (e.g., DNA) sequence of interest. In some embodiments, the functional domain replaces at least a portion (e.g., the entirety of) the prior DNA-binding domain of the polypeptide. In some embodiments, the functional domain comprises a zinc finger (e.g., a zinc finger that specifically binds to the target nucleic acid (e.g., DNA) sequence of interest. In some embodiments, the functional domain comprises a Cas domain (e.g., a Cas domain that specifically binds to the target nucleic acid (e.g., DNA) sequence of interest. In embodiments, the Cas domain comprises a Cas9 or a mutant or variant thereof (e.g., as described herein). In embodiments, the Cas domain is associated with a guide RNA (gRNA), e.g., as described herein. In embodiments, the Cas domain is directed to a target nucleic acid (e.g., DNA) sequence of interest by the gRNA. In embodiments, the Cas domain is encoded in the same nucleic acid (e.g., RNA) molecule as the gRNA. In embodiments, the Cas domain is encoded in a different nucleic acid (e.g., RNA) molecule from the gRNA.

[0961] In some embodiments, a Gene Writer polypeptide comprises a modification to an endonuclease domain, e.g., relative to the wild-type polypeptide. In some embodiments, the endonuclease domain comprises an addition, deletion, replacement, or modification to the amino acid sequence of the original endonuclease domain. In some embodiments, the endonuclease domain is modified to include a heterologous functional domain that binds specifically to and/or induces endonuclease cleavage of a target nucleic acid (e.g., DNA) sequence of interest. In some embodiments, the endonuclease domain comprises a zinc finger. In some embodiments, the endonuclease domain comprises a Cas domain (e.g., a Cas9 or a mutant or variant thereof). In embodiments, the endonuclease domain comprising the Cas domain is associated with a guide RNA (gRNA), e.g., as described herein. In some embodiments, the endonuclease domain is modified to include a functional domain that does not target a specific target nucleic acid (e.g., DNA) sequence. In embodiments, the endonuclease domain comprises a Fok1 domain.

[0962] All publications, patent applications, patents, and other publications and references (e.g., sequence database reference numbers) cited herein are incorporated by reference in their entirety. For example, all GenBank, Unigene, and Entrez sequences referred to herein, e.g., in any Table herein, are incorporated by reference. Unless otherwise specified, the sequence accession numbers specified herein, including in any Table herein, refer to the database entries current as of May 26, 2021. When one gene or protein references a plurality of sequence accession numbers, all of the sequence variants are encompassed.

### EXAMPLES

[0963] The invention is further illustrated by the following examples. The examples are provided for illustrative purposes only and are not to be construed as limiting the scope or content of the invention in any way.

### Example 1: Delivery of a Gene Writer™ System to Mammalian Cells

[0964] This example describes a Gene Writer™ genome editing system delivered to a mammalian cell for site-specific insertion of exogenous DNA into a mammalian cell genome.

[0965] In this example, the polypeptide component of the Gene Writer™ system is a recombinase protein comprising an amino acid sequence of any of SEQ ID NOs: 1-12,677, and the template DNA component is a plasmid DNA that comprises a target recombination site, e.g., a recognition sequence occurring within a nucleotide sequence of the LeftRegion or RightRegion comprising a sequence of any of SEQ ID NOs: 13,001-25,677 or SEQ ID NOs: 26,001-38,677.

[0966] HEK293T cells are transfected with the following test agents:
[0967] 1. Scrambled DNA control
[0968] 2. DNA coding for the polypeptide described above
[0969] 3. Template DNA described above
[0970] 4. Combination of 2 and 3

[0971] After transfection, HEK293T cells are cultured for at least 4 days and then assayed for site-specific genome editing. Genomic DNA is isolated from each group of HEK293 cells. PCR is conducted with primers that flank the appropriate sequence or genomic locus. The PCR product is run on an agarose gel to measure the length of the amplified DNA.

[0972] A PCR product of the expected length, indicative of a successful Gene Writing™ genome editing event that inserts the DNA plasmid template into the target genome, is observed only in cells that were transfected with the complete Gene Writer™ system of group 4 above.

### Example 2: Targeted Delivery of a Gene Expression Unit into Mammalian Cells Using a Gene Writer™ System

[0973] This example describes the making and using of a Gene Writer genome editor to insert a heterologous gene expression unit into the mammalian genome.

[0974] In this example, a recombinase protein comprising an amino acid sequence of any of SEQ ID NOs: 1-12,677. The recombinase protein targets an appropriate genomic copy of a recognition sequence of the recombinase polypeptide for DNA integration. The template DNA component is a plasmid DNA that comprises a target recombination site (a recognition sequence occurring within a nucleotide sequence of the LeftRegion or RightRegion comprising a sequence of any of SEQ ID NOs: 13,001-25,677 or SEQ ID NOs: 26,001-38,677, respectively) and gene expression unit. A gene expression unit comprises at least one regulatory sequence operably linked to at least one coding sequence. In this example, the regulatory sequences include the CMV promoter and enhancer, an enhanced translation element, and a WPRE. The coding sequence is the GFP open reading frame.

[0975] HEK293 cells are transfected with the following test agents:
[0976] 1. Scrambled DNA control
[0977] 2. DNA coding for the polypeptide described above
[0978] 3. Template DNA described above
[0979] 4. Combination of 2 and 3

[0980] After transfection, HEK293 cells are cultured for at least 4 days and assayed for site-specific Gene Writing genome editing. Genomic DNA is isolated from the HEK293 cells and PCR is conducted with primers that flank the target integration site in the genome. The PCR product is run on an agarose gel to measure the length of DNA. A PCR product of the expected length, indicative of a successful Gene Writing™ genome editing event, is detected in cells transfected with the test agent of group 4 (complete Gene Writer™ system).

[0981] The transfected cells are cultured for a further 10 days, and after multiple cell culture passages are assayed for GFP expression via flow cytometry. The percent of cells that are GFP positive from each cell population are calculated. GFP positive cells are detected in the population of HEK293 cells that were transfected with group 4 test agent, demonstrating that a gene expression unit added into the mammalian cell genome via Gene Writing genome editing is expressed.

### Example 3: Targeted Deliver, of a Splice Acceptor Unit into Mammalian Cells Using a Gene Writer™ System

[0982] This example describes the making and use of a Gene Writing genome editing system to add a heterologous sequence into an intronic region to act as a splice acceptor for an upstream exon. Splicing into the first intron a new exon containing a splice acceptor site at the 5′ end and a polyA tail at the 3′ end will result in a mature mRNA containing the first natural exon of the natural locus spliced to the new exon.

[0983] In this example, a recombinase protein comprising an amino acid sequence of any of SEQ ID NOs: 1-12,677. The recombinase protein targets a compatible recognition site in a genome, e.g., a HEK293 genome, for DNA integration. The template DNA codes for GFP with a splice acceptor site immediately 5′ to the first amino acid of mature GFP (the start codon is removed) and a 3′ polyA tail downstream of the stop codon.

[0984] HEK293 cells are transfected with the following test agents:
[0985] 1. Scrambled DNA control
[0986] 2. DNA coding for the polypeptide described above
[0987] 3. Template DNA described above
[0988] 4. Combination of 2 and 3

[0989] After transfection, HEK293 cells are cultured for at least 4 days and assayed for site-specific Gene Writing genome editing and appropriate mRNA processing. Genomic DNA is isolated from the HEK293 cells. Reverse transcription-PCR is conducted to measure the mature mRNA containing the first natural exon of the target locus and the new exon. The RT-PCR reaction is conducted with forward primers that bind to the target locus (e.g., the first natural exon of the target locus) and with reverse primers that bind to GFP. The RT-PCR product is run on an agarose gel to measure the length of DNA. A PCR product of the expected length is detected in cells transfected with the test agent of group 4, indicative of a successful Gene Writing genome editing event and a successful splice event. This result would demonstrate that a Gene Writing genome editing system can add a heterologous sequence encoding a gene into a target locus, e.g., intronic region, to act as a splice acceptor for the upstream exon.

[0990] The transfected cells are cultured for a further 10 days and, after multiple cell culture passages, are assayed for GFP expression via flow cytometry. The percent of cells that are GFP positive from each cell population are calculated. GFP positive cells are detected in the population of HEK293 cells that were transfected with group 4 test agent, demonstrating that a gene expression unit added into the mammalian cell genome via Gene Writing genome editing is expressed.

### Example 4: Specificity of Gene Writing in Mammalian Cells

[0991] This example describes a Gene Writer™ genome system delivered to a mammalian cell for site-specific insertion of exogenous DNA into a mammalian cell genome and a measurement of the specificity of the site-specific insertion.

[0992] In this example, Gene Writing is conducted in HEK293T cells as described in any of the preceding Examples. After transfection, HEK293T cells are cultured for at least 4 days and then assayed for site-specific genome editing. Linear amplification PCR is conducted as described in Schmidt et al. Nature Methods 4, 1051-1057 (2007) using a forward primer specific to the template DNA that will amplify adjacent genomic DNA. Amplified PCR products are then sequenced using next generation sequencing technology on a MiSeq instrument. The MiSeq reads are mapped to the HEK293T genome to identify integration sites in the genome.

[0993] The percent of LAM-PCR sequencing reads that map to the target genomic site is the specificity of the Gene Writer.

[0994] The number of total genomic sites that LAM-PCR sequencing reads map to is the number of total integration sites.

### Example 5: Efficiency of Gene Writing in Mammalian Cells

[0995] This example describes Gene Writer™ genome system delivered to a mammalian cell for site-specific insertion of exogenous DNA into a mammalian cell genome, and a measurement of the efficiency of Gene Writing.

[0996] In this example, Gene Writing is conducted in HEK293T cells as described in any of the preceding Examples. After transfection, HEK293T cells are cultured for at least 4 days and then assayed for site-specific genome editing. Digital droplet PCR is conducted as described in Lin et al., Human Gene Therapy Methods 27(5), 197-208, 2016. A forward primer binds to the template DNA and a reverse primer binds on one side of the appropriate genomic integration site, thus a PCR amplification is only expected upon integration of target DNA. A probe to the target site containing a FAM fluorophore and is used to measure the number of copies of the target DNA in the genome. Primers and HEX-fluorophore probe specific to a housekeeping gene (e.g. RPP30) are used to measure the copies of genomic DNA per droplet.

[0997] The copy number of target DNA per droplet normalized to the copy number of house keeping DNA per droplet is the efficiency of the Gene Writer.

### Example 6: Determination of Copy Number of a Recombinase in a Cell

[0998] The following example describes the absolute quantification of a recombinase on a per cell basis. This measurement is performed using the AQUA mass spectrometry based methods, e.g., as accessible at the following uniform resource locator (URL):https://www.sciencedirect.com/science/article/pii/S1046202304002087?via%3Dihub

[0999] Following delivery of the recombinase and DNA template to the cells, the recombination is allowed to proceed for 24 hours after which the cells are quantified and then quantified by this MS method. This method involves two stages.

[1000] In the first stage, the amino acid sequence of the recombinase is examined, and a representative tryptic peptide is selected for analysis. An AQUA peptide is then synthesized with an amino acid sequence that exactly mimics the corresponding native peptide produced during proteolysis. However, stable isotopes are incorporated at one residue to allow the mass spectrometer to differentiate between the analyte and internal standard. The synthetic peptide and the native peptide share the same physicochemical properties including chromatographic co-elution, ionization efficiency, and relative distributions of fragment ions, but are differentially detected in a mass spectrometer due to their mass difference. The synthetic peptide is next analyzed by LC-MS/MS techniques to confirm the retention time of the peptide, determine fragment ion intensities, and select an ion for SRM analysis. In such an SRM experiment, a triple quadrupole mass spectrometer is directed to select the expected precursor ion in the first scanning quadrupole, or Q1. Only ions with this one mass-to-charge (m/z) ratio are directed into the collision cell (Q2) to be fragmented. The resulting product ions are passed to the third quadrupole (Q3), where the m/z ratio for single fragment ion is monitored across a narrow m/z window.

[1001] The second stage involves quantification of the recombinase from cell or tissue lysates. A quantified number of cells or mass of tissue is used to initiate the reaction and is used to normalize the quantification to a per cell basis. Cell lysates are separated prior to proteolysis to increase the dynamic range of the assay via SDS-PAGE, followed by excision of the region of the gel where the recombinase migrates. In-gel digestion is performed to obtain native tryptic peptides. In-gel digestion is performed in the presence of the AQUA peptide, which is added to the gel pieces during the digestion process. Following proteolysis, the complex peptide mixture, containing both heavy and light peptides, is analyzed in an LC-SRM experiment using parameters determined during the first stage.

[1002] The results of the mass spectrometry-based quantification is converted to a number of proteins loaded to determine the number of recombinases per cell.

### Example 7: Copy Number of DNA Inside Cell

### Q-FISH

[1003] The following example describes the quantification of delivered DNA template on a per cell basis. In this example the DNA that the recombinase is integrating contains a DNA-probe binding site. Following delivery of the recombinase and DNA template to the cells, the recombination is allowed to proceed for 24 hours, after which the cells are quantified and are prepared for quantitative fluorescence in situ hybridization (Q-FISH). Q-FISH is conducted using FISH Tag DNA Orange Kit, with Alex Fluor 555 dye (ThermoFisher catalog number F32948). Briefly, a DNA probe that binds to the DNA-probe binding site on the DNA template is generated through a procedure of nick translation, dye labeling, and purification as described in the Kit manual. The cells are then labeled with the DNA probe as described in the Kit manual. The cells are imaged on a Zeiss LSM 710 confocal microscope with a 63× oil immersion objective while maintained at 37 C and 5% CO2. The DNA probe is subjected to 555 nm laser excitation to stimulate Alexa Flour. A MATLAB script is written to measure the Alex Fluor intensity relative to a standard generated with known quantities of DNA. Using this method, the amount of template DNA delivered to a cell is determined.

qPCR

[1004] The following example describes the quantification of delivered DNA template on a per cell basis. In this example the DNA that the recombinase is integrating contains a DNA-probe binding site. Following delivery of the recombinase and DNA template to the cells, the recombination is allowed to proceed for 24 hours after which the cells are quantified, and cells are prepared for quantitative PCR (qPCR). qPCR is conducted using standard kits for this protocol, such as the ThermoFisher TaqMan product (https://www.thermofisher.com/us/en/home/life-science/pcr/real-time-pcr/real-time-pcr-assays-search.html). Briefly, primers are designed that specifically amplify a region of the delivered template DNA as well as probes for the specific amplicon. A standard curve is generated by using a serial dilution of quantified pure template DNA to correlate threshold Ct numbers to number of DNA templates. The DNA is then extracted from the cells being analyzed and input into the qPCR reaction along with all additional components per the manufacturer's directions. The samples are than analyzed on an appropriate qPCR machine to determine the Ct number, which is then mapped to the standard curve for absolute quantification. Using this method, the amount of template DNA delivered to a cell is determined.

### Example 8: Intracellular Ratio of DNA: Recombinase

[1005] The following example describes the determination of the ratio of recombinase protein to template DNA cell in the target cells. Following delivery of the recombinase and DNA template to the cells, the recombination is allowed to proceed for 24 hours after which the cells are quantified, and cells are prepared quantification of the recombinase and of the template DNA as outlined in the above examples. These two values (recombinase per cell and template DNA per cell) are then divided (recombinase per cell/template DNA per cell) to determine the bulk average ratio of these quantities. Using this method, the ratio of recombinase to template DNA delivered to a cell is determined.

### Example 9: Activity in Presence of DNA-Damage Response inhibiting Agents—Activity in Presence of NHEJ Inhibitor

[1006] The following example describes the assaying of activity of the recombinase protein in the presence of inhibitors of non-homologous end joining to highlight the lack of dependence on the expression of the proteins involved in these pathways for activity of the recombinase. Briefly, the assay outlined to determine efficiency of recombinase activity outlined in the example above is performed. However, in this case two separate experiments are performed.

[1007] In experiment 1, 24 hours after delivery of the recombinase and Template DNA, 1 sM of the NHEJ inhibitor Scr7 (https://www.sigmaaldrich.com/catalog/product/sigma/sml1546?lang=en&region=US) is added to the cell growth media to inhibit this pathway. All other elements of the protocol are identical.

[1008] In experiment 2, the cells are manipulated identically as in experiment 1 but no inhibitor is added to the media. Both experiments are analyzed for efficiency per the example above and the % inhibited activity relative to uninhibited activity is determined.

### Example 10: Activity in Presence of DNA-Damage Response inhibiting Agents—Activity in Presence of HDR Inhibitor

[1009] The following example describes the assaying of activity of the recombinase protein in the presence of inhibitors of homologous recombination to highlight the lack of dependence on the expression of the proteins involved in these pathways for activity of the recombinase. Briefly, the assay outlined to determine efficiency of recombinase activity outlined in the example above is performed. However, in this case, two separate experiments are performed.

[1010] In experiment 1: 24 hours after delivery of the recombinase and Template DNA, 1 sM of the HR inhibitor B02 (https://www.selleckchem.com/products/b02.html) is added to the cell growth media to inhibit this pathway. All other elements of the protocol are identical.

[1011] In experiment 2: the cells are manipulated identically as in experiment 1 but no inhibitor is added to the media. Both experiments are analyzed for efficiency per the example above and the % inhibited activity relative to uninhibited activity is determined.

### Example 11: Percentage of Nuclear Versus Cytoplasmic Recombinase

[1012] The following example describes the determination of the ratio of recombinase protein in the nucleus vs the cytoplasm of target cells. 12 hours following delivery of the recombinase and DNA template to the cells as described herein, the cells are quantified and prepared for analysis. The cells are split into nuclear and cytoplasmic fractions using the following standard kits, following manufacturer directions: NE-PER Nuclear and Cytoplasmic Extraction by ThermoFisher. Both the cytoplasmic and nuclear fractions are kept and then put through the mass spec based recombinase quantification assay outlined in the example above. Using this method, the ratio of nuclear recombinase to cytoplasmic recombinase in the cells is determined.

### Example 12: Delivery to Plant Cells

[1013] This example illustrates a method of delivering at least one recombinase to a plant cell wherein the plant cell is located in a plant or plant part. More specifically, this example describes delivery of a Gene Writing recombinase and its template DNA to a non-epidermal plant cell (i.e., a cell in a soybean embryo), in order to edit an endogenous plant gene (i.e., phytoene desaturase, PDS) in germline cells of excised soybean embryos. This example describes delivery of polynucleotides encoding the delivered transgene through multiple barriers (e.g., multiple cell layers, seed coat, cell walls, plasma membrane) directly into soybean germline cells, resulting in a heritable alteration of the target nucleotide sequence, PDS. The methods described do not employ the common techniques of bacterially mediated transformation (e.g., by Agrobacterium sp.) or biolistics.

[1014] Plasmids are designed for delivery of recombinase and a single template DNA targeting the endogenous phytoene desaturase (PDS) in soybean (Glycine max). It will be apparent to one skilled in the art that analogous plasmids are easily designed to encode other recombinases and template DNA sequences, optionally including different elements (e. g., different promoters, terminators, selectable or detectable markers, a cell-penetrating peptide, a nuclear localization signal, a chloroplast transit peptide, or a mitochondrial targeting peptide, etc.), and used in a similar manner.

[1015] In a first series of experiments, these vectors are delivered to non-epidermal plant cells in soybean embryos using combinations of delivery agents and electroporation. Mature, dry soybean seeds (cv. Williams 82) are surface-sterilized as follows. Dry soybean seeds are held for 4 hours in an enclosed chamber holding a beaker containing 100 milliliters 5% sodium hypochlorite solution to which 4 milliliters hydrochloric acid are freshly added. Seeds remain desiccated after this sterilization treatment. The sterilized seeds are split into 2 halves by manual application of a razor blade and the embryos are manually separated from the cotyledons. Each test or control treatment is carried out on 20 excised embryos. The following series of experiments is then performed.

[1016] Experiment 1: A delivery solution containing the vectors (100 nanograms per microliter of each plasmid) in 0.01% CTAB (cetyltrimethylammonium bromide, a quaternary ammonium surfactant) in sterile-filtered milliQ water is prepared. Each solution is chilled to 4 degrees Celsius and 500 microliters are added directly to the embryos, which are then immediately placed on ice in a vacuum chamber and subjected to a negative pressure (2×10″3 millibar) treatment for 15 minutes. Following the chilling/negative pressure treatments, the embryos are treated with electric current using a BTX-Harvard ECM-830 electroporation device set with the following parameters: 50V, 25 millisecond pulse length, 75 millisecond pulse interval for 99 pulses.

[1017] Experiment 2: conditions identical to Experiment 1, except that the initial contacting with delivery solution and negative pressure treatments are carried out at room temperature.

[1018] Experiment 3: conditions identical to Experiment 1, except that the delivery solution is prepared without CTAB but includes 0.1% Silwet L-77™ (CAS Number 27306-78-1, available from Momentive Performance Materials, Albany, N.Y.). Half (10 of 20) of the embryos receiving each treatment undergo electroporation, and the other half of the embryos do not.

[1019] Experiment 4: conditions identical to Experiment 3, except that several delivery solutions are prepared, where each further includes 20 micrograms/milliliter of one single-walled carbon nanotube preparation selected from those with catalogue numbers 704113, 750530, 724777, and 805033, all obtainable from Sigma-Aldrich, St. Louis, MO. Half (10 of 20) of the embryos receiving each treatment undergo electroporation, and the other half of the embryos do not.

[1020] Experiment 5: conditions identical to Experiment 3, except that the delivery solution further includes 20 micrograms/milliliter of triethoxylpropylaminosilane-functionalized silica nanoparticles (catalogue number 791334, Sigma-Aldrich, St. Louis, MO. Half (10 of 20) of the embryos receiving each treatment undergo electroporation, and the other half of the embryos do not.

[1021] Experiment 6: conditions identical to Experiment 3, except that the delivery solution further includes 9 micrograms/milliliter branched polyethylenimine, molecular weight −25,000 (CAS Number 9002-98-6, catalogue number 408727, Sigma-Aldrich, St. Louis, MO) or 9 micro grams/milliliter branched polyethylenimine, molecular weight −800 (CAS Number 25987-06-8, catalogue number 408719, Sigma-Aldrich, St. Louis, MO). Half (10 of 20) of the embryos receiving each treatment undergo electroporation, and the other half of the embryos do not.

[1022] Experiment 7: conditions identical to Experiment 3, except that the delivery solution further includes 20% v/v dimethylsulfoxide (DMSO, catalogue number D4540, Sigma-Aldrich, St. Louis, MO). Half (10 of 20) of the embryos receiving each treatment undergo electroporation, and the other half of the embryos do not.

[1023] Experiment 8: conditions identical to Experiment 3, except that the delivery solution further contains 50 micromolar nono-arginine (RRRRRRRRR). Half (10 of 20) of the embryos receiving each treatment undergo electroporation, and the other half of the embryos do not.

[1024] Experiment 9: conditions identical to Experiment 3, except that following the vacuum treatment, the embryos and treatment solutions are transferred to microcentrifuge tubes and centrifuged 2, 5, 10, or 20 minutes at 4000×g. Half (10 of 20) of the embryos receiving each treatment undergo electroporation, and the other half of the embryos do not.

[1025] Experiment 10: conditions identical to Experiment 3, except that following the vacuum treatment, the embryos and treatment solutions are transferred to microcentrifuge tubes and centrifuged 2, 5, 10, or 20 minutes at 4000×g.

[1026] Experiment 11: conditions identical to Experiment 4, except that following the vacuum treatment, the embryos and treatment solutions are transferred to microcentrifuge tubes and centrifuged 2, 5, 10, or 20 minutes at 4000×g.

[1027] Experiment 12: conditions identical to Experiment 5, except that following the vacuum treatment, the embryos and treatment solutions are transferred to microcentrifuge tubes and centrifuged 2, 5, 10, or 20 minutes at 4000×g.

[1028] After the delivery treatment, each treatment group of embryos is washed 5 times with sterile water, transferred to a petri dish containing ½ MS solid medium (2.165 g Murashige and Skoog medium salts, catalogue number MSP0501, Caisson Laboratories, Smithfield, UT), 10 grams sucrose, and 8 grams Bacto agar, made up to 1.00 liter in distilled water), and placed in a tissue culture incubator set to 25 degrees Celsius. After the embryos have elongated, developed roots and true leaves have emerged, the seedlings are transferred to soil and grown out. Modification of all endogenous PDS alleles results in a plant unable to produce chlorophyll and having a visible bleached phenotype. Modification of a fraction of all endogenous PDS alleles results in plants still able to produce chlorophyll; plants that are heterozygous for an altered PDS gene will are grown out to seed and the efficiency of heritable genome modification is determined by molecular analysis of the progeny seeds.

### Example 13: Recombinase-Mediated Plasmid Integration in Human Cells

[1029] This example describes the use of a serine recombinase-based Gene Writer system for the targeted integration of a template DNA into the human genome. More specifically, this example describes the transfection of a two plasmid system into HEK293T cells for in vitro Gene Writing, e.g., as a means of evaluating a new Gene Writing polypeptide for integration activity in human cells.

[1030] Briefly, a two plasmid system was designed, comprising: 1) an integrase expression plasmid, e.g., a plasmid encoding a human codon optimized serine integrase, e.g., a serine integrase comprising an amino acid sequence of any of SEQ ID NOs: 1-12,677, driven by the mammalian CMV promoter, and 2) a template plasmid, e.g., a plasmid comprising (i) a sequence comprising the recognition site of a serine integrase, e.g., a ˜500 bp sequence from the endogenous flanking region of a serine integrase, e.g., a sequence of any of SEQ ID NOs: 13,001-25,677 or SEQ ID NOs: 26,001-38,677; (ii) a promoter for expression in mammalian cells, e.g., a CMV promoter; (iii) a reporter gene whose expression is controlled by (ii), e.g., an EGFP gene; (iv) a self-cleaving polypeptide, e.g., a T2A peptide; (v) a marker enabling selection in mammalian cells, e.g., a puromycin resistance gene; and (vi) a termination signal, e.g., a poly A tail. Without wishing to be bound by theory, some embodiments of the template plasmid may comprise elements occurring in the orientation (i), (ii), (iii), (iv), (v).

[1031] To deliver the Gene Writer system into HEK293T cells, ˜120,000 cells were transfected with either: (1) 50 ng template plasmid and 225 ng transfection balance plasmid (template only control); or (2) 50 ng template plasmid, 25 ng integrase expression plasmid, and 225 ng transfection balance plasmid, using TransIT-293 Reagent (Mirusbio) according to manufacturer's instructions. Three days post-transfection, the efficiency of delivery was measured using flow cytometry to determine the percentage of GFP positive cells. Cells were split between days 3 and 13 of the time course experiments. Between day 13 and day 27, transfected cells that had been split were maintained in one of two conditions: 1) a subset of the cells were maintained in normal cell culture medium and flow cytometry was performed every 3-4 days to determine the GFP expression from successfully integrated template; 2) a subset of the cells were maintained in medium supplemented with 1 pg/mL puromycin, where the puromycin resistant cells were harvested after ˜2 weeks of selection. In some instances, a Gene Writer system that demonstrated activity in human cells resulted in detectable reporter expression in at least 3% of cells at day 21, e.g., detectable expression of GFP in at least 3% of cells as determined by flow cytometry. In some instances, a Gene Writer system that demonstrated activity in human cells resulted in detectable reporter expression in a percentage of cells that was greater than demonstrated with a template only control, e.g., higher as compared to transfection condition (1), e.g., at least 2, 3, 4, 5, 6, 7, 8, 9, 10, 20, 30, 40, 50, 60, 70, 80, 90, 100, 200, 300, 400, 500, 600, 700, 800, 900, or 1000-fold higher compared to a template only control.

[1032] To determine the integration site used by an active Gene Writer, the parallel cultures being maintained under puromycin selection were harvested for genomic isolation and analyzed by a unidirectional sequencing assay, as described herein in Example 18.

[1033] As shown in Table 13 below, Gene Writer polypeptides were assayed for integration of a template DNA comprising a GFP expression cassette and a recognition sequence, in human cells (see Example 13).

TABLE 13
Screening data for recombinase-mediated integration in human cells

| Integrase | | | |
|---|---|---|---|
| A No. | FL58 Accession | Int ID | % GFP+ |
| 25 | NC_001978.3::NP_047974.1 | PhiC31 | 0.915333333 |
| 102 | KY030782.1::APD21144.1 | Int1 | 0 |
| 128 | KP296792.1::AJK27795.1 | Int2 | 3.35 |
| 1200 | YP_459991.1 | Int3 | 7.19 |
| 162 | MF595878.1::ATB52753.1 | Int4 | 0 |
| 1201 | AAB51419.1 | Int5 | 0 |
| 1202 | AAF35174.1 | Int6 | 0.18 |
| 1203 | YP_006082695.1 | Int7 | 0.048 |
| 118 | AY657002.1::AAT72400.1 | Int8 | 0 |
| 511 | MK448811.1::QBX21446.1 | Int9 | 0 |
| 5 | NC_029073.1::YP_009223763.1 | Int10 | 0 |
| 336 | KP836355.1::AJW76937.1 | Int11 | 0 |
| 161 | NC_030947.1::YP_009276898.1 | Int12 | 0 |
| 146 | MG711462.1::AUV56418.1 | Int13 | 0 |
| 330 | KU230356.1::ALY07619.1 | Int14 | 0.38 |
| 1204 | YP_005549228.1 | Int15 | 0 |
| 1205 | YP_189066.1 | Int16 | 0 |
| 1206 | YP_005679179.1 | Int17 | 0.123 |
| 103 | KC595514.1::AGR47239.1 | Int18 | 1.966755 |
| 186 | KM983329.1::AJA42614.1 | Int19 | 0 |
| 6 | NC_018836.1::YP_006906230.1 | Int20 | 0 |
| 4 | NC_028746.1::YP_009193857.1 | Int21 | 0.22 |
| 1207 | YP_002804732.1 | Int22 | 0.16 |
| 19 | NC_021325.1::YP_008058952.1 | Int23 | 0.04 |
| 320 | MH552499.1::AXF52129.1 | Int24 | 0.09 |
| 22 | MK448667.1::QBX13795.1 | Int25 | 0 |
| 1208 | YP_001089468.1 | Int26 | 0 |
| 1209 | YP_001886479.1 | Int27 | 0 |
| 35 | KX522565.1::AOA49517.1 | Int28 | 0 |
| 477 | NC_003216.1::NP_463492.1 | Int29 | 0.91 |
| 436 | NC_025453.1::YP_009103095.1 | Int30 | 10.07333333 |
| 386 | MK448715.1::QBX16366.1 | Int31 | 0 |
| 46 | KM983332.1::AJA42824.1 | Int32 | 0.31 |
| 1210 | BAA12435.1 | Int33 | 0 |
| 462 | JX507079.1::AFU62848.1 | Int34 | 0 |
| 1211 | YP_005759947.1 | Int35 | 0 |
| 458 | NC_019914.1::YP_007236569.1 | Int36 | 0.08 |
| 1212 | YP_004586821.1 | Int37 | 0 |
| 408 | NC_029069.1::YP_009223181.1 | Int38 | 6.3025 |
| 375 | MG969427.1::AVO22625.1 | Int39 | 0 |
| 1213 | YP_353073.2 | Int40 | 0 |
| 1214 | BAG46462.1 | Int41 | 0.05 |
| 434 | MK279899.1::AZS11727.1 | Int42 | 0.08 |
| 1215 | YP_006906969.1 | Int43 | 0.31 |
| 31 | KY676784.1::ARB11450.1 | Int44 | 0 |
| 43 | MG593803.1::AUG87323.1 | Int45 | 0.62 |
| 63 | MK937595.1::QDH92149.1 | Int46 | 0.61 |
| 147 | MH271298.1::AWY04899.1 | Int47 | 0 |
| 418 | MG593801.1::AUG87183.1 | Int48 | 0 |
| 142 | MK450421.1::QAX93309.1 | Int49 | 0 |
| 111 | NC_004682.2::NP_817623.1 | Int50 | 0 |
| 159 | KX641260.1::AOT24690.1 | Int51 | 2.005 |
| 1216 | YP_009031225.1 | Int52 | 0.111 |
| 202 | JF937108.1::AEK10337.2 | Int53 | 0 |
| 113 | MG944221.1::AVJ51390.1 | Int54 | 0.009 |
| 54 | KT124228.1::AKY03507.1 | Int55 | 0 |
| 96 | KC700556.1::AGM12072.1 | Int56 | 0.03 |
| 291 | NC_028960.2::YP_009214300.1 | Int57 | 0 |
| 295 | NC_022984.1::YP_008859055.1 | Int58 | 0 |
| 402 | MH834610.1::AYN57772.1 | Int59 | 0.04 |
| 27 | NC_004664.2::NP_813744.2 | Int60 | 0.17 |
| 23 | NC_018853.1::YP_006907228.1 | Int61 | 0 |
| 32 | MK686068.1::QBZ73369.1 | Int62 | 0.94 |
| 337 | MH155870.1::AWN05230.1 | Int63 | 0.11 |
| 67 | NC_031078.1::YP_009287835.1 | Int64 | 0 |
| 62 | NC_021560.1::YP_008130182.1 | Int65 | 0.29 |
| 491 | KT152029.1::AKY03358.1 | Int66 | 0.15 |
| 390 | MK392363.1::QAY15711.1 | Int67 | 0.24 |
| 304 | MH271308.1::AWY05745.1 | Int68 | 0 |
| 1217 | SGE40566.1 | Int69 | 0.05 |
| 335 | MF319184.1::ASR75970.1 | Int70 | 0.326 |
| 353 | JN243855.1::AEL19745.1 | Int71 | 0.61 |
| 28 | KT021004.1::ALA06428.1 | Int72 | 0 |
| 1218 | CBG73463.1 | Int73 | 0.038 |
| 435 | JN116825.1::AEV52018.1 | Int74 | 0.131 |
| 448 | MN096365.1::QDK02252.1 | Int75 | 0 |
| 331 | NC_007814.1::YP_512335.1 | Int76 | 2.53 |
| 332 | DQ221100.2::ABB55416.1 | Int77 | 1.71 |
| 371 | KY963371.1::ARW58518.1 | Int78 | 12.66 |
| 360 | KY963370.1::ARW58461.1 | Int79 | 9.36 |
| 338 | MK085976.1::AZF88373.1 | Int80 | 1.82 |
| 1219 | YP_001376196.1 | Int94 | 0.23 |
| 460 | JX887877.1::AFV15398.1 | Int95 | 4.89 |
| 474 | KF296717.1::AGV99364.1 | Int96 | 0.14 |
| 380 | MG727702.1::AUS03929.1 | Int97 | 0.93 |
| 1220 | AAD26564.1 | Int98 | 0 |
| 479 | KX190835.1::ANT40095.1 | Int99 | 0 |
| 461 | MF417928.1::ASN71601.1 | Int100 | 0.32 |
| 475 | MF417933.1::ASN71805.1 | Int101 | 21.03 |
| 478 | MH341451.1::AWN07855.1 | Int102 | 0.24 |
| 1221 | CAC97653.1 | Int103 | 0.22 |
| 1222 | CAD10281.2 | Int104 | 0.58 |
| 477 | NC_003216.1::NP_463492.1 | Int105 | 0.77 |
| 1223 | YP_004301563.1 | Int106 | 1.77 |
| 1224 | YP_006538656.1 | Int107 | 0 |
| 1225 | YP_006685721.1 | Int108 | 0 |
| 982 | NZ_CP030772.1::WP_138968117.1 | Int109 | 0.13 |
| 983 | NZ_CP011275.1::WP_082859072.1 | Int110 | 0.52 |
| 984 | NC_019309.1::YP_006962361.1 | Int111 | 0.17 |
| 985 | NZ_CP029174.1::WP_108943154.1 | Int112 | 0.57 |
| 986 | NZ_CP032696.1::WP_120708991.1 | Int113 | 0.2 |
| 987 | NC_011758.1::WP_012606065.1 | Int114 | 0.08 |
| 989 | NZ_CP014508.1::WP_082779173.1 | Int115 | 0.05 |
| 990 | NZ_AP018205.1::WP_017291662.1 | Int116 | 0.27 |
| 995 | NZ_CP024313.1::WP_104825745.1 | Int117 | 0.09 |
| 1005 | NC_013856.1::WP_012977106.1 | Int118 | 0.44 |
| 1012 | NZ_CP032692.1::WP_120663868.1 | Int119 | 0.17 |
| 1015 | NZ_AP014686.1::WP_049810452.1 | Int120 | 0 |
| 1037 | NZ_CP032687.1::WP_120667728.1 | Int121 | 0.12 |
| 1042 | NZ_CP019604.1::WP_066842370.1 | Int122 | 0.43 |
| 1072 | NC_021908.1::WP_020920456.1 | Int123 | 0 |
| 1081 | NC_015597.1::WP_013851017.1 | Int124 | 0 |
| 1085 | NC_014825.1::WP_013483873.1 | Int125 | 0.06 |
| 1091 | NZ_CP018901.1::WP_057039620.1 | Int126 | 0.26 |
| 1095 | NZ_CP009453.1::WP_053556490.1 | Int127 | 0.03 |
| 1097 | NZ_CP023038.1::WP_010511773.1 | Int128 | 0.06 |
| 1101 | NC_014824.1::WP_013483611.1 | Int129 | 0 |
| 1102 | NZ_CP014527.1::WP_066137218.1 | Int130 | 0 |
| 1105 | NZ_CP017949.1::WP_106721837.1 | Int131 | 0.13 |
| 1106 | NZ_CP015292.1::WP_011331383.1 | Int132 | 0.48 |
| 1109 | NC_013164.1::WP_012797137.1 | Int133 | 0.34 |
| 1112 | NZ_CM008899.1::WP_058686676.1 | Int134 | 0.05 |
| 1113 | LN997845.1::CUW33404.1 | Int135 | 0 |
| 1114 | NZ_CP017949.1::WP_106721836.1 | Int136 | 0 |
| 1115 | NZ_CP011583.1::WP_031623921.1 | Int137 | 0 |
| 1116 | NZ_CP035407.1::WP_129137749.1 | Int138 | 27.56 |
| 1120 | NZ_CP046245.1::WP_156276654.1 | Int139 | 0 |
| 1124 | NZ_AP018296.1::WP_096695372.1 | Int140 | 0.07 |
| 1127 | NC_014825.1::WP_013483758.1 | Int141 | 0.1 |
| 1128 | NZ_CP040905.1::WP_139896886.1 | Int142 | 0.07 |
| 1131 | NZ_CP021678.1::WP_080626804.1 | Int143 | 0.03 |
| 1132 | NZ_CP013238.1::WP_045144988.1 | Int144 | 0.5 |
| 1135 | NC_004954.1::NP_862380.1 | Int145 | 0 |
| 1138 | NZ_CP020539.1::WP_081570537.1 | Int146 | 0.3 |
| 1140 | NZ_CP014289.1::WP_061885392.1 | Int147 | 0.34 |
| 1141 | NC_018688.1::WP_148283638.1 | Int148 | 0.64 |
| 1147 | NZ_CP032704.1::WP_145892019.1 | Int149 | 0 |
| 1153 | NZ_CP042515.1::WP_151523155.1 | Int150 | 0.29 |
| 1156 | NC_007411.1::WP_011316659.1 | Int151 | 0 |
| 1160 | NZ_AP014816.1::WP_066349550.1 | Int152 | 0 |
| 1163 | NZ_CP028186.1::WP_007215987.1 | Int153 | 0 |
| 1164 | NZ_CP016078.1::WP_075740684.1 | Int154 | 0 |
| 1165 | NC_018688.1::WP_000398825.1 | Int155 | 0.18 |
| 1167 | NZ_LR134433.1::WP_084758891.1 | Int156 | 0.1 |
| 1171 | NC_017791.1::WP_014686872.1 | Int157 | 0 |
| 1174 | NZ_LR594663.1::WP_162590241.1 | Int158 | 0 |
| 1175 | NZ_CP015456.1::WP_072285883.1 | Int159 | 0.11 |
| 1179 | NC_008704.1::WP_011562846.1 | Int160 | 0.07 |
| 1180 | NC_006907.1::YP_220381.1 | Int161 | 0.08 |
| 1182 | NZ_CP045481.1::WP_153030621.1 | Int162 | 0 |
| 1183 | NZ_CP014850.1::WP_033698958.1 | Int163 | 2.7 |
| 1188 | NC_018696.1::WP_085963899.1 | Int164 | 0.03 |
| 1189 | NZ_CP021746.1::WP_103654430.1 | Int165 | 0.32 |
| 1193 | NC_006362.1::WP_011212228.1 | Int166 | 0.07 |
| 1196 | NC_005016.1::NP_863503.1 | Int167 | 0 |
| 1198 | NZ_CP007723.1::WP_040145024.1 | Int168 | 0.14 |
| 129 | NC_041909.1::YP_009598586.1 | Int169 | 1.45 |
| 321 | NC_004820.1::NP_852555.1 | Int170 | 0.07 |
| 450 | FM864213.1::CAR95427.1 | Int171 | 0.16 |
| 541 | AY657002.1::AAT72399.1 | Int172 | 0.23 |
| 529 | KT336320.1::ALA07058.1 | Int173 | 0.35 |
| 34 | MF172979.1::ASD51140.1 | Int174 | 0.34 |
| 132 | MF172979.1::ASD51126.1 | Int175 | 0.16 |
| 322 | KP836356.2::AMS33992.1 | Int176 | 2.43 |
| 26 | MG711467.1::AUV56803.1 | Int177 | 0 |
| 152 | MG711466.1::AUV56714.1 | Int178 | 0.06 |
| 1226 | YP_001384783.1 | Int179 | 0 |
| 148 | KU160495.1::ALY08054.1 | Int180 | 3.49 |
| 9 | MF766046.1::ATI18835.1 | Int181 | 0.14 |
| 1227 | YP_001392519.1 | Int182 | 0.22 |
| 472 | NC_013646.1::YP_003347458.1 | Int183 | 0 |
| 51 | HQ906662.1::ADW80128.1 | Int184 | 0.05 |
| 33 | JQ680357.1::AFB75709.1 | Int185 | 1.01 |
| 1228 | BAF67264.1 | Int186 | 0 |
| 1229 | NP_470568.1 | Int187 | 0.05 |
| 52 | NC_005262.3::NP_944235.2 | Int188 | 4.42 |
| 36 | KY092483.1::APD18725.1 | Int189 | 0.06 |
| 134 | MH271320.1::AWY06686.1 | Int190 | 0.17 |
| 50 | MK450426.1::QAX94052.1 | Int191 | 11.46 |
| 165 | NC_013694.1::YP_003358736.1 | Int192 | 0.57 |
| 1230 | YP_706485.1 | Int193 | 0 |
| 97 | NC_021304.1::YP_008051452.1 | Int194 | 0.19 |
| 326 | NC_041983.1::YP_009607592.1 | Int195 | 0.1 |
| 420 | MH834619.1::AYN58532.1 | Int196 | 0.01 |
| 42 | MG593800.1::AUG87127.1 | Int197 | 0.66 |
| 29 | MK450433.1::QAX95039.1 | Int198 | 0.35 |
| 82 | MH248947.1::AWY07618.1 | Int199 | 0.17 |
| 516 | JX262376.1::AFO10918.1 | Int200 | 0.11 |
| 548 | NC_042051.1::YP_009616474.1 | Int201 | 0.11 |
| 333 | NC_041971.1::YP_009605116.1 | Int202 | 0.38 |
| 441 | MF140416.1::ASR87211.1 | Int203 | 0.19 |
| 354 | NC_028947.1::YP_009212783.1 | Int204 | 0.37 |
| 988 | NZ_CP005961.1::WP_042933187.1 | Int206 | 0.18 |
| 991 | NZ_CP030772.1::WP_138968811.1 | Int207 | 0.14 |
| 992 | NC_011987.1::WP_012653163.1 | Int208 | 0.17 |
| 993 | NZ_CP036427.1::WP_145267375.1 | Int209 | 0.06 |
| 994 | NZ_CP018231.1::WP_065283598.1 | Int210 | 0.31 |
| 996 | NZ_CP020899.1::WP_010009933.1 | Int211 | 0.12 |
| 997 | NZ_CP016290.1::WP_065284390.1 | Int212 | 0.15 |
| 998 | NZ_CP050090.1::WP_166481266.1 | Int213 | 0.27 |
| 999 | NZ_CP016619.1::WP_099510182.1 | Int214 | 0.1 |
| 1000 | NZ_AP014659.1::WP_035679705.1 | Int215 | 0.04 |
| 1001 | NC_020061.1::WP_004112891.1 | Int216 | 0.14 |
| 1002 | NZ_CP032692.1::WP_120764347.1 | Int217 | 0.1 |
| 1003 | NZ_CP016457.1::WP_069067140.1 | Int218 | 0 |
| 1004 | NZ_AP014687.1::WP_063824339.1 | Int219 | 0 |
| 1006 | NC_016588.1::WP_014189963.1 | Int220 | 0.09 |
| 1007 | NC_013860.1::WP_012978683.1 | Int221 | 0 |
| 1008 | NC_013857.1::WP_012977507.1 | Int222 | 0.17 |
| 1009 | NC_021909.1::WP_020923455.1 | Int223 | 0.14 |
| 1010 | NZ_CP018231.1::WP_072642081.1 | Int224 | 0 |
| 1011 | NZ_CP031599.1::WP_057822058.1 | Int225 | 0.15 |
| 1013 | NZ_CP020447.2::WP_080620360.1 | Int226 | 0 |
| 1014 | NZ_CP013053.1::WP_037377708.1 | Int227 | 0.17 |
| 1016 | NZ_CP012899.1::WP_157097479.1 | Int228 | 0 |
| 1017 | NZ_CP016289.1::WP_065283428.1 | Int229 | 0 |
| 1018 | NZ_CP018231.1::WP_065283441.1 | Int230 | 0.21 |
| 1019 | NZ_CP053209.2::WP_027688391.1 | Int231 | 0.16 |
| 1020 | NZ_CP025615.1::WP_102115455.1 | Int232 | 0.1 |
| 1021 | NZ_CP049159.1::WP_165098388.1 | Int233 | 0.01 |
| 1022 | NC_006824.1::WP_011254970.1 | Int234 | 0.14 |
| 1023 | NZ_HG916854.1::WP_051509115.1 | Int235 | 0.05 |
| 1024 | NC_010627.1::WP_012404129.1 | Int236 | 0.24 |
| 1025 | NZ_CP023072.1::WP_037435892.1 | Int237 | 0.05 |
| 1026 | NC_000914.2::WP_010875070.1 | Int238 | 0 |
| 1027 | NZ_CP021815.1::WP_088198182.1 | Int239 | 0 |
| 1028 | NZ_CP026529.1::WP_088199679.1 | Int240 | 0.02 |
| 1029 | NC_019847.2::WP_015241694.1 | Int241 | 0 |
| 1030 | NC_019847.2::WP_049589666.1 | Int242 | 0.04 |
| 1031 | NZ_CP013419.1::WP_059581534.1 | Int243 | 0 |
| 1032 | NC_013193.1::WP_012806738.1 | Int244 | 0.12 |
| 1033 | NZ_CP013419.1::WP_059669918.1 | Int245 | 0.11 |
| 1034 | NZ_CP026685.1::WP_104902331.1 | Int246 | 0.18 |
| 1035 | NZ_CP024793.1::WP_100897719.1 | Int247 | 0.11 |
| 1036 | NZ_CP049701.1::WP_166349160.1 | Int248 | 0.22 |
| 1038 | NZ_CP023072.1::WP_037435909.1 | Int249 | 0 |
| 1039 | NZ_CP021216.1::WP_014531100.1 | Int250 | 0 |
| 1040 | NZ_CP014311.1::WP_062175057.1 | Int251 | 0 |
| 1041 | NC_009468.1::WP_043508908.1 | Int252 | 0.05 |
| 1043 | NZ_CP038639.1::WP_135707565.1 | Int253 | 0 |
| 1044 | NZ_CP017077.1::WP_069709769.1 | Int254 | 0.06 |
| 1045 | NZ_CP016620.1::WP_099515887.1 | Int255 | 0.28 |
| 1046 | NZ_CP016619.1::WP_099513340.1 | Int256 | 0.06 |
| 1047 | NC_008308.1::YP_718035.1 | Int257 | 0.03 |
| 1048 | NZ_CP015322.1::WP_006199992.1 | Int258 | 0.33 |
| 1049 | NZ_CP026528.1::WP_158528806.1 | Int259 | 0.07 |
| 1050 | NZ_LR594691.1::WP_102905083.1 | Int260 | 0 |
| 1051 | NC_020562.1::WP_015460498.1 | Int261 | 0 |
| 1052 | NZ_CP044544.1::WP_100951630.1 | Int262 | 0.22 |
| 1053 | NC_008760.1::WP_011798428.1 | Int263 | 0.05 |
| 1054 | NZ_CP013544.1::WP_011053437.1 | Int264 | 0 |
| 1055 | NZ_CP013572.1::WP_081278377.1 | Int265 | 0 |
| 1056 | NZ_CP018231.1::WP_081374274.1 | Int266 | 0.32 |
| 1057 | NZ_CP024313.1::WP_104825738.1 | Int267 | 0.44 |
| 1058 | NC_008378.1::WP_011649403.1 | Int268 | 0.03 |
| 1059 | NZ_CP017243.1::WP_004675975.1 | Int269 | 0.17 |
| 1060 | NZ_CP021214.1::WP_017273893.1 | Int270 | 0.1 |
| 1061 | NZ_CP023072.1::WP_095689837.1 | Int271 | 0.45 |
| 1062 | NC_009508.1::WP_011950828.1 | Int272 | 0.06 |
| 1063 | NZ_CP013535.1::WP_081279173.1 | Int273 | 0.01 |
| 1064 | NZ_CP017077.1::WP_069709873.1 | Int274 | 0.11 |
| 1065 | NZ_CP017077.1::WP_083274844.1 | Int275 | 0.4 |
| 1066 | NZ_CP016619.1::WP_099513354.1 | Int276 | 0 |
| 1067 | NZ_CP030355.1::WP_082057937.1 | Int277 | 0.19 |
| 1068 | NZ_CP015745.1::WP_064334697.1 | Int278 | 0.1 |
| 1069 | NZ_CP034911.1::WP_069456400.1 | Int279 | 0.26 |
| 1070 | NZ_CP030764.1::WP_112905663.1 | Int280 | 0 |
| 1071 | NC_007762.1::WP_011427411.1 | Int281 | 0.11 |
| 1073 | NZ_CP013633.1::WP_064842796.1 | Int282 | 0 |
| 1074 | NC_004041.2::WP_011053488.1 | Int283 | 0.5 |
| 1075 | NC_008381.1::WP_011654186.1 | Int284 | 0.14 |
| 1076 | NZ_CP020910.1::WP_086083774.1 | Int285 | 0 |
| 1077 | NZ_CPO25015.1::WP_105009893.1 | Int286 | 0.17 |
| 1078 | NC_015579.1::WP_013831319.1 | Int287 | 0.06 |
| 1079 | NZ_CP039651.1::WP_109154411.1 | Int288 | 0.11 |
| 1080 | NZ_CP030762.1::WP_112907845.1 | Int289 | 0 |
| 1082 | NZ_CP016289.1::WP_065284176.1 | Int290 | 0.13 |
| 1083 | NZ_CP021819.1::WP_088201210.1 | Int291 | 0.14 |
| 1084 | NC_007960.1::WP_041359701.1 | Int292 | 0.04 |
| 1086 | NZ_CP026528.1::WP_158528808.1 | Int293 | 0.14 |
| 1087 | NZ_AP014686.1::WP_080587274.1 | Int294 | 0.11 |
| 1088 | NC_020061.1::WP_004112912.1 | Int295 | 0.07 |
| 1089 | NZ_CP017563.1::WP_154671697.1 | Int296 | 0.26 |
| 1090 | NZ_CP049735.1::WP_165586638.1 | Int297 | 0.2 |
| 1099 | NZ_CP016620.1::WP_099515711.1 | Int302 | 0 |
| 1100 | NZ_CP023549.1::WP_096787955.1 | Int303 | 0 |
| 1103 | NZ_CP014527.1::WP_066137015.1 | Int304 | 0 |
| 1104 | NZ_CP035512.1::WP_082731421.1 | Int305 | 0 |
| 1107 | NZ_CP021071.1::WP_084015878.1 | Int306 | 0 |
| 1108 | NZ_CP016453.1::WP_083217015.1 | Int307 | 0 |
| 1110 | NZ_CP016620.1::WP_099515874.1 | Int308 | 0 |
| 1111 | NZ_CP049701.1::WP_166354437.1 | Int309 | 0 |
| 1117 | NC_014825.1::WP_013483791.1 | Int310 | 0 |
| 1118 | NC_014825.1::WP_013483878.1 | Int311 | 0 |
| 1119 | NZ_CP044332.1::WP_016919146.1 | Int312 | 0 |
| 1121 | NZ_CP033248.1::WP_153738853.1 | Int313 | 0 |
| 1122 | NZ_CP013238.1::WP_071981582.1 | Int314 | 0 |
| 1123 | NZ_CM003332.1::WP_039285843.1 | Int315 | 0 |
| 1125 | NZ_CP015585.1::WP_083671481.1 | Int316 | 0 |
| 1126 | NZ_CP018336.1::WP_073541495.1 | Int317 | 0.55 |
| 1129 | NZ_CP033248.1::WP_153738854.1 | Int318 | 0 |
| 1130 | NC_014825.1::WP_013483874.1 | Int319 | 0 |
| 1133 | NZ_CP007453.1::WP_025436591.1 | Int320 | 0 |
| 1134 | NZ_CP017949.1::WP_106721914.1 | Int321 | 0 |
| 1137 | NZ_CP008945.1::WP_038606886.1 | Int322 | 0.17 |
| 1139 | NZ_CP046254.1::WP_140043508.1 | Int323 | 0 |
| 1142 | NC_002682.1::WP_044547337.1 | Int324 | 0.04 |
| 1143 | NC_008826.1::WP_011828792.1 | Int325 | 0.11 |
| 1144 | NZ_AP022320.1::WP_162071183.1 | Int326 | 0 |
| 1145 | NZ_LR135387.1::WP_000136908.1 | Int327 | 0 |
| 1146 | CP033508.1::QKC67623.1 | Int328 | 0 |
| 1148 | NZ_CP016080.1::WP_027047857.1 | Int329 | 0 |
| 1149 | NZ_CP032928.1::WP_162993116.1 | Int330 | 0 |
| 1150 | NZ_LR135483.1::WP_033652754.1 | Int331 | 0.09 |
| 1151 | NZ_LR594668.1::WP_162571537.1 | Int332 | 0 |
| 1152 | NZ_CP014289.1::WP_061885389.1 | Int333 | 0 |
| 1154 | NC_014825.1::WP_013483880.1 | Int334 | 0 |
| 1155 | NZ_CP014308.1::WP_062174163.1 | Int335 | 0 |
| 1157 | NZ_CP033248.1::WP_153738977.1 | Int336 | 0 |
| 1158 | NZ_LN907829.1::WP_067437236.1 | Int337 | 0 |
| 1159 | NZ_CM017044.1::WP_000709098.1 | Int338 | 0 |
| 1161 | NC_014825.1::WP_013483789.1 | Int339 | 0 |
| 1166 | NZ_CP031591.1::WP_111772986.1 | Int340 | 0 |
| 1168 | NC_003064.2::WP_162180340.1 | Int341 | 0 |
| 1169 | NZ_AFSD01000008.1::WP_035243797.1 | Int342 | 0 |
| 1170 | NZ_CP039905.1::WP_080843366.1 | Int343 | 0 |
| 1172 | NZ_LR594663.1::WP_162590298.1 | Int344 | 0 |
| 1173 | NC_009717.1::WP_157048325.1 | Int345 | 0 |
| 1176 | NZ_CP016593.1::WP_014538220.1 | Int346 | 0 |
| 1177 | NC_019761.1::WP_015211582.1 | Int347 | 0 |
| 1178 | NZ_CP014289.1::WP_061885391.1 | Int348 | 0 |
| 1181 | NC_007961.1::WP_011505253.1 | Int349 | 0 |
| 1184 | NZ_CP015439.1::WP_066328033.1 | Int350 | 0 |
| 1185 | AP022559.1::BBW99057.1 | Int351 | 0.52 |
| 1186 | NZ_LR134446.1::WP_068741343.1 | Int352 | 0.03 |
| 1187 | NC_019957.1::WP_015297851.1 | Int353 | 0 |
| 1190 | NZ_CP007453.1::WP_025436590.1 | Int354 | 0 |
| 1191 | NZ_CP017949.1::WP_106721912.1 | Int355 | 0 |
| 1195 | NZ_CP008945.1::WP_038606889.1 | Int356 | 0 |
| 507 | KY963369.1::ARW58402.1 | Int357 | 0 |
| 504 | KT336320.1::ALA07059.1 | Int358 | 0 |
| 530 | KT336321.1::ALA07121.1 | Int359 | 0 |
| 505 | KT336321.1::ALA07122.1 | Int360 | 0 |
| 531 | KX077896.1::ANM47644.1 | Int361 | 0 |
| 506 | KX077896.1::ANM47643.1 | Int362 | 0 |
| 532 | FN997652.1::CBR26922.1 | Int363 | 0 |
| 451 | FN997652.1::CBR26923.1 | Int364 | 0 |
| 133 | MF172979.1::ASD51128.1 | Int365 | 0 |
| 160 | MK448666.1::QBX13692.1 | Int366 | 0 |
| 552 | MK448666.1::QBX13693.1 | Int367 | 0 |
| 121 | MK448667.1::QBX13733.1 | Int368 | 0 |
| 106 | MK448667.1::QBX13731.1 | Int369 | 0 |
| 533 | MK448674.1::QBX14111.1 | Int370 | 0 |
| 508 | MK448674.1::QBX14110.1 | Int371 | 0 |
| 122 | MK448687.1::QBX14891.1 | Int372 | 0 |
| 542 | MK448687.1::QBX14890.1 | Int373 | 0 |
| 154 | MK448700.1::QBX15583.1 | Int374 | 0 |
| 107 | MK448700.1::QBX15585.1 | Int375 | 0 |
| 543 | MK448713.1::QBX16269.1 | Int376 | 0 |
| 550 | MK448719.1::QBX16517.1 | Int377 | 0 |
| 123 | MK448719.1::QBX16516.1 | Int378 | 0 |
| 144 | MK448720.1::QBX16591.1 | Int379 | 0 |
| 509 | MK448741.1::QBX17590.1 | Int380 | 0 |
| 534 | MK448741.1::QBX17591.1 | Int381 | 0 |
| 535 | MK448752.1::QBX18231.1 | Int382 | 0 |
| 510 | MK448752.1::QBX18232.1 | Int383 | 0 |
| 536 | MK448811.1::QBX21447.1 | Int384 | 0 |
| 124 | MK448819.1::QBX21895.1 | Int385 | 0 |
| 553 | MK448819.1::QBX21894.1 | Int386 | 0 |
| 125 | MK448825.1::QBX22171.1 | Int387 | 0 |
| 554 | MK448825.1::QBX22172.1 | Int388 | 0 |
| 126 | MK448835.1::QBX22708.1 | Int389 | 0 |
| 127 | MK448836.1::QBX22750.1 | Int390 | 0 |
| 518 | MK448838.1::QBX22844.1 | Int391 | 0 |
| 547 | MK448838.1::QBX22843.1 | Int392 | 0 |
| 135 | MK448846.1::QBX23238.1 | Int393 | 0.22 |
| 545 | MK448846.1::QBX23239.1 | Int394 | 0 |
| 546 | MK448847.1::QBX23319.1 | Int395 | 0 |
| 136 | MK448847.1::QBX23320.1 | Int396 | 0 |
| 155 | MK448934.1::QBX27918.1 | Int397 | 0 |
| 537 | MK448935.1::QBX27959.1 | Int398 | 0 |
| 519 | MK448935.1::QBX27960.1 | Int399 | 0 |
| 512 | MK448994.1::QBX31153.1 | Int400 | 0 |
| 538 | MK448994.1::QBX31154.1 | Int401 | 0 |
| 137 | MK448997.1::QBX31307.1 | Int402 | 0.1 |
| 138 | MK448997.1::QBX31309.1 | Int403 | 0 |
| 539 | MK448999.1::QBX31462.1 | Int404 | 0 |
| 540 | MK359990.1::QEM40854.1 | Int405 | 0 |
| 454 | MK359990.1::QEM40855.1 | Int406 | 0.19 |
| 1231 | YP_002336631.1 | Int407 | 0 |
| 1232 | YP_001646422.1 | Int408 | 0 |
| 183 | JQ660954.1::AFJ96082.1 | Int409 | 13.57 |
| 72 | NC_021865.1::YP_008320369.1 | Int410 | 1.65 |
| 184 | NC_030950.1::YP_009277275.1 | Int411 | 0 |
| 163 | NC_018264.1::YP_006546326.1 | Int412 | 0 |
| 185 | KM983327.1::AJA42491.1 | Int413 | 0 |
| 11 | MF766047.1::ATI18915.1 | Int414 | 0 |
| 10 | MF766048.1::ATI18993.1 | Int415 | 0 |
| 7 | MH590601.1::AXH70257.1 | Int416 | 0 |
| 17 | MH669004.1::AXQ61107.1 | Int417 | 0 |
| 8 | MK392364.1::QAY15794.1 | Int418 | 0 |
| 68 | KU517658.1::AMB17413.1 | Int419 | 0 |
| 1233 | NP_268897.1 | Int420 | 0 |
| 1234 | YP_005869510.1 | Int421 | 0 |
| 1235 | YP_002736920.1 | Int422 | 0.17 |
| 1236 | YP_003445547.1 | Int423 | 0.35 |
| 1237 | NP_112664.1 | Int424 | 0.33 |
| 1238 | YP_002747001.1 | Int425 | 0 |
| 480 | NC_027982.1::YP_009167795.1 | Int426 | 0 |
| 350 | NC_031929.1::YP_009323520.1 | Int427 | 5.2 |
| 157 | KX456210.1::ANS02547.1 | Int428 | 0 |
| 158 | DQ394810.1::ABD63849.1 | Int429 | 0.26 |
| 374 | KY349816.1::APZ81892.1 | Int430 | 0 |
| 345 | KJ608189.1::AIS74015.1 | Int431 | 12.97 |
| 372 | MF417874.1::ASN68226.1 | Int432 | 1.69 |
| 366 | MK448669.1::QBX13835.1 | Int433 | 0 |
| 410 | MK448672.1::QBX14038.1 | Int434 | 0 |
| 339 | MK448705.1::QBX15858.1 | Int435 | 0.1 |
| 340 | MK448708.1::QBX15966.1 | Int436 | 0 |
| 377 | MK448714.1::QBX16272.1 | Int437 | 0 |
| 341 | MK448742.1::QBX17688.1 | Int438 | 0 |
| 411 | MK448778.1::QBX19706.1 | Int439 | 0 |
| 404 | MK448826.1::QBX22213.1 | Int440 | 0 |
| 378 | MK448831.1::QBX22445.1 | Int441 | 0 |
| 342 | MK448834.1::QBX22610.1 | Int442 | 0 |
| 405 | MK448844.1::QBX23130.1 | Int443 | 0 |
| 412 | MK448849.1::QBX23375.1 | Int444 | 0 |
| 343 | MK448873.1::QBX24735.1 | Int445 | 0 |
| 381 | MK448874.1::QBX24736.1 | Int446 | 0 |
| 406 | MK448875.1::QBX24786.1 | Int447 | 0.16 |
| 346 | MK448878.1::QBX24961.1 | Int448 | 0 |
| 367 | MK448879.1::QBX25020.1 | Int449 | 0 |
| 407 | MK448898.1::QBX26003.1 | Int450 | 0 |
| 382 | MK448927.1::QBX27562.1 | Int451 | 0 |
| 344 | MK448940.1::QBX28214.1 | Int452 | 0 |
| 383 | MK448986.1::QBX30733.1 | Int453 | 0 |
| 421 | MK449012.1::QBX32092.1 | Int454 | 0 |
| 38 | MG711465.1::AUV56620.1 | Int455 | 0 |
| 49 | MF417875.1::ASN68324.1 | Int456 | 6.77 |
| 1239 | BAE05705.1 | Int457 | 0 |
| 1240 | YP_003472505.1 | Int458 | 0 |
| 1241 | BAF92844.1 | Int459 | 3.29 |
| 456 | NC_007064.1::YP_240778.1 | Int460 | 0 |
| 457 | NC_007065.1::YP_240852.1 | Int461 | 15.17 |
| 464 | NC_008722.1::YP_950630.1 | Int462 | 0 |
| 465 | NC_008723.1::YP_950693.1 | Int463 | 0 |
| 466 | NC_031241.1::YP_009302049.1 | Int464 | 0 |
| 459 | NC_020490.2::YP_009130680.1 | Int465 | 0 |
| 500 | NC_019915.1::YP_007236622.1 | Int466 | 0 |
| 438 | NC_024391.1::YP_009044994.1 | Int467 | 0 |
| 467 | MF417895.1::ASN69744.1 | Int468 | 0 |
| 46 | MF417901.1::ASN70113.1 | Int469 | 0 |
| 469 | MF417930.1::ASN71670.1 | Int470 | 0 |
| 470 | MF417982.1::ASN72884.1 | Int471 | 0 |
| 423 | MF417958.1::ASN72539.1 | Int472 | 0 |
| 1242 | YP_003251752.1 | Int473 | 0 |
| 370 | NC_019544.1::YP_007010946.1 | Int474 | 0 |
| 437 | DQ453159.1::ABI36844.1 | Int475 | 2.64 |
| 392 | HM072038.1::ADF59162.1 | Int476 | 3.07 |
| 433 | KX965989.1::APC46450.1 | Int477 | 0 |
| 444 | MF417925.1::ASN71428.1 | Int478 | 11.77 |
| 445 | MF417893.1::ASN69614.1 | Int479 | 6.84 |
| 393 | MF417886.1::ASN69149.1 | Int480 | 38.07 |
| 379 | MK560763.1::QBP06974.1 | Int481 | 0.36 |
| 37 | KY092479.1::APD18506.1 | Int482 | 0 |
| 41 | KY092482.1::APD18671.1 | Int483 | 0 |
| 39 | KY092481.1::APD18613.1 | Int484 | 0 |
| 57 | KY092480.1::APD18560.1 | Int485 | 0.21 |
| 44 | KY092484.1::APD18778.1 | Int486 | 0.09 |
| 45 | MH825699.1::AYD86220.1 | Int487 | 0.72 |
| 143 | MK450431.1::QAX94753.1 | Int488 | 0 |
| 145 | JQ809701.1::AFL47903.1 | Int489 | 0 |

[1034] Individual polypeptides and cognate recognition sequences are shown in Table 13 (with “Integrase A No.” corresponding to the respective Integrase No. in the sequence listing attached herewith) in column 1 and were assigned an integrase identification name (“Int ID”) in column 3. The integration efficiency is indicated in column 4 as the percent of cells expressing GFP (“% GFP+”) as measured by flow cytometry at 21 days post-transfection in the absence of antibiotic selection.

[1035] In a further example, HEK293T cells were transfected with an integrase expression plasmid and a template plasmid harboring a 520 bp attP containing region followed by an EGFP reporter driven by CMV promoter. The percentage of EGFP positive cells at day 21 post-transfection was analyzed by flow cytometry. As shown in FIG. 1A, 9 out of 9 integrases depicted achieved higher integration efficiency compared to the positive control integrase PhiC31 in 293T cells. Data for integrases shown comprised greater than 2 replicates.

### Example 14: Dual AAV Delivery of Serine Integrase and Template DNA to Mammalian Cells

[1036] This example demonstrates the use of a serine recombinase based Gene Writer system for the targeted integration of a template DNA into the human genome. More specifically, a recombinase, e.g., an integrase comprising an amino acid sequence of any of SEQ ID NOs: 1-12,677, e.g., the Bxb1 recombinase protein (SEQ ID NO: 11,636), and a template DNA comprising the associated attachment site, e.g., a sequence from a LeftRegion or RightRegion of of any of SEQ ID NOs: 13,001-25,677 or SEQ ID NOs: 26,001-38,677, respectively, e.g., the LeftRegion comprising a sequence of SEQ ID NO: 24,636, are co-delivered to HEK293T cells as separate AAV viral vectors to insert DNA precisely and efficiently in a mammalian cell genome containing the corresponding Bxb1 attachment landing pad site.

[1037] Two transgene configurations are assessed to determine the integration, stability, and expression using different AAV donor formats (FIG. 1B): 1) template comprising attP* or attB* that utilizes formation of double-stranded circularized DNA following AAV transduction in the cell nucleus; or 2) template comprising double attachment sites, attP-attP* or attB-attB*, that can integrate into the mammalian genome independent of double-stranded circularization of the DNA following AAV transduction in the cell nucleus.

[1038] To prepare HEK293T cells for Bxb1-mediated genomic integration of a template, HEK293T landing pad cell lines were generated containing the Bxb1 attP-attP* or Bxb1 attB-attB* sites. HEK293T cells were seeded in 10 cm plates (5×10⁶ cells) prior to lentiviral transfection. Lentiviral transduction using the Lenti-X Packaging Single Shots (VSV-G, Takara Bio) was performed the following day with lentiviral vector plasmid DNA (containing attP-attP* or attB-attB*). Lentiviral titering was performed and the virus filtered using 0.22 μm filter and 1 mL lentiviral aliquots were made and stored at −80° C. HEK293T cells were seeded at 1×10⁵ cells/well in 4×6-well plates. HEK293T cells were then transduced with attP-attP* or attB-attB* lentivirus and cultured for 48 hours before starting puromycin selection (1 μg/mL). Cells were kept under puromycin selection for at least 7 days and then scaled up to 150 mm culture plates. The cells were then harvested for genomic DNA (gDNA) and assayed for lentivirus integration copy number by ddPCR.

[1039] Adeno-associated viral vectors containing Bxb1 integrase or the corresponding Bxb1 attP*/attP-attP* donor or Bxb1 attB*/attB-attB* donor were generated based on the pAAV-CMV-EGFP-WPRE-pA viral backbone (Sirion Biotech), but with replacement of the CMV promoter with the EF1a promoter. pAAV-Ef1a-BXB1-WPRE-pA was generated using a human codon optimized Bxb1 (GenScript). pAAV-Stuffer-attP*(Bxb1)-Ef1a-EGFP-WPRE-pA and pAAV-Stuffer-attB*(Bxb1)-Ef1a-EGFP-WPRE-pA template constructs contained a 500 bp stuffer sequence between the 5′ AAV2 ITR sequence and Ef1a promoter. pAAV-Stuffer-attP(Bxb1)-Ef1a-EGFP-WPRE-pA-attP*(Bxb1)-Stuffer and pAAV-Stuffer-attB(Bxb1)-Ef1a-EGFP-WPRE-pA-attB*(Bxb1)-Stuffer donor constructs contained a 500 bp stuffer sequence between the AAV2 ITR sequence and Ef1a promoter, as well as a 500 bp stuffer sequence between the 3′ attP*/attB* attachment site and 3′ AAV2 ITR sequence (FIG. 2). The above listed AAV vectors were packaged into AAV2 serotype (Sirion Biotech) at a 1¹³ total vg scale: AAV2-Ef1a-BAB1-WPRE-pA, AAV2StuWer-attP*(BAB)-Ef1a-EGFP-WPRE-pA. AAV2-Stuffer-attB*(BAB)-Ef1a-EGFP-WPRE-pA, AAV2-Stuffer-attP(BAB1)-Ef1a-EGFP-WPRE-pA-attP*(BABB)-Stuffer, AAV2-Stuffer-attB(BAB)-Ef1a-EGFP-WPRE-pA-attB*(BA)-Stuffer.

[1040] HEK293T landing pad cells containing either attP-attP* or attB-attB* landing pad sites were seeded in a 48-well plate format at 40,000 cells/well. 24 h later, the following conditions were tested: dual AAV transduction with 1) AAV2-attP*-Ef1a-EGFP with or without AAV2-Ef1a-BXB1 integrase, 2) AAV2-attP-attP*-Ef1a-EGFP donor with or without AAV2-Ef1a-BXB1 integrase, 3) AAV2-attB*-Ef1a-EGFP with or without AAV2-Ef1a-BXB1 integrase, 4) AAV2-attB-attB*-Ef1a-EGFP with or without AAV2-Ef1a-BXB1 integrase (FIG. 3A). The AAV comprising the integrase was dosed at an MOI of about 25,000, and the AAV comprising the template was dosed at an MOI of about 75,000. To assess the efficiency of a dual AAV delivery of a serine integrase and a template comprising its recognition site to integrate into the human genome, ddPCR was performed to quantify integration events (% CNV/landing pad) on day 3 and day 7 post-transduction. ˜5% integration was detected using an attB* donor to attP-attP* landing pad cell line, and this integration was stable and consistent at both timepoints (FIG. 3B), indicative of successful DNA Gene Writing by a dual AAV delivery system.

### Example 15: In Vitro Combination mRNA and AAV Delivery of a Gene Writing polypeptide and Template DNA for Site-Specific Integration in Human Cells

[1041] This example demonstrates use of a Gene Writer system for the site-specific insertion of exogenous DNA into the mammalian cell genome. More specifically, a recombinase, e.g., an integrase comprising an amino acid sequence of any of SEQ ID NOs: 1-12,677, e.g., the Bxb1 recombinase protein (SEQ ID NO: 11,636), and a template DNA comprising the associated attachment site, e.g., a sequence from a LeftRegion or RightRegion of any of SEQ ID NOs: 13,001-25,677 or SEQ ID NOs: 26,001-38,677, respectively, e.g., the LeftRegion comprising a sequence of SEQ ID NO: 24,636, are introduced into a HEK293T landing pad cell line. In this example, the recombinase is delivered as mRNA encoding the recombinase, and the template DNA is delivered via AAV.

[1042] HEK293T landing pad cells containing either the attP-attP* or attB-attB* landing pad sites (see Example 14) were seeded in a 48-well plate format at 40,000 cells/well. 24 h later, the following conditions were tested: 1) AAV2-attP*-Ef1a-EGFP with or without mRNA encoding the BXB1 integrase; 2) AAV2-attP-attP*-Ef1a-EGFP donor with or without mRNA encoding the BXB1 integrase; 3) AAV2-attB*-Ef1a-EGFP with or without mRNA encoding the BXB1 integrase; and 4) AAV2-attB-attB*-Ef1a-EGFP with or without mRNA encoding the BXB1 integrase (FIG. 4A). The mRNA encoding the integrase was dosed at about 1 pg and the AAV comprising the template was dosed at an MOI of about 75,000. The timing of delivery was also assessed by the following conditions: 1) mRNA delivery of BXB1 integrase and AAV delivery of template DNA on the same day, 2) mRNA delivery of BXB1 integrase 24 h prior to AAV delivery of template DNA, 3) AAV delivery of template DNA 24 h prior to mRNA delivery of BXB1 integrase. ddPCR was performed to assess the integration mediated through mRNA delivery of a serine integrase and AAV delivery of a template comprising its attachment, ddPCR was performed to assay for integration (% CNV/landing pad) on day 3 post-transfection of mRNA and post-transduction of AAV. ˜2-4% integration was detected using an attP* donor to attB-attB* landing pad 293T cell line (FIG. 4B). AAV delivery of attachment site donor 24 h prior to mRNA delivery of BXB1 integrase achieved the highest % CNV/landing pad of ˜4% (FIG. 3B). These results are indicative of successful DNA Gene Writing genome editing events that insert the AAV-delivered DNA fragment that is site-specific, mediated by mRNA delivery of serine integrase and AAV delivery of its respective site-specific attachment site.

### Example 16: Ex Vivo Combination mRNA and AAV Delivery of a Gene Writing Polypeptide and Template DNA to HSCs for the Treatment of Beta-Thalassemia and Sickle Cell Disease

[1043] This example describes delivery of mRNA encoding an integrase and AAV template DNA into C34+ cells (hematopoietic stem and progenitor cells) in order to write an actively expressed γ-globin gene cassette to treat genetic mutations that lead to beta-thalassemia and sickle cell disease.

[1044] In this example, AAV6 is used to deliver the template DNA. More specifically, the AAV6 template DNA includes, in order, 5′ ITR, an integrase attachment site, e.g., an attP or attB, e.g., a LeftRegion or RightRegion comprising a nucleic acid sequence of any of SEQ ID NOs: 13,001-25,677 or SEQ ID NOs: 26,001-38,677, respectively, a pol II promoter, e.g., the human β-globin promoter, a human fetal γ-globin coding sequence, a poly A tail and 3′ITR. Considering the maximum volume limit of electroporation reagents, integrase mRNA and the AAV6 template are co-delivered into CD34 cells via different conditions, e.g.: 1) AAV6 template and integrase mRNA are co-electroporated; 2) integrase mRNA is electroporated 15 mins prior to AAV6 donor transduction.

[1045] After electroporation/transduction, cells are incubated in CD34 maintenance media for 2 days. Then, ˜10% of the treated cells are harvested for genomic DNA isolation to determine integration efficiency. The rest of the cells are transferred to erythroid expansion and differentiation media. After ˜20 days differentiation, three assays will be performed to determine the integration of γ-globin after erythroid differentiation: 1) a subset of cells is stained with NucRed (Thermo Fisher Scientific) to determine the enucleation rate; 2) a subset of the cells is stained with fluorescein isothiocyanate (FITC)-conjugated anti-γ-globin antibody (Santa Cruz) to determine the percentage of fetal hemoglobin positive cells; 3) a subset of the cells is harvested for HPLC to determine y-globin chain expression.

### Example 17: Ex Vivo Delivery of a Gene Writer polypeptide and Circular DNA Template for Generating CAR-T Cells

[1046] In this example, a Gene Writing system is delivered as a deoxyribonucleoprotein (DNP) to human primary T-cells ex vivo for the generation of CAR-T cells, e.g., CAR-T cells for treating B-cell lymphoma.

[1047] The Gene Writer polypeptide, e.g., integrase, e.g., integrase comprising an amino acid sequence of any of SEQ ID NOs: 1-12,677, is prepared and purified for use directly in its active protein form. For the template component, minicircle DNA plasmids that lack plasmid backbone and bacterial sequences are used in this example, e.g., prepared as according to a method of Chen et al. Mol Ther 8(3):495-500 (2003), wherein a recombination event is first used to excise these extraneous plasmid maintenance functions to minimize plasmid size and cellular response. Template DNA minicircles comprise, in order, an integrase attachment site (attP or attB), e.g., a LeftRegion or RightRegion comprising a nucleic acid sequence of any of SEQ ID NOs: 13,001-25,677 or SEQ ID NOs: 26,001-38,677, respectively, a pol II promoter, e.g., EF-1, a human codon optimized chimeric Antigen Receptor (including an extracellular ligand binding domain, a transmembrane domain, and intracellular signaling domains), e.g., the CD19-specific Hul9-CD828Z (Genbank MN698642; Brudno et al. Nat Med 26:270-280 (2020)) CAR molecule, and a poly A tail. The template DNA is first mixed with purified integrase protein and incubated at room temperature for 15-30 mins to form DNP complexes. Then, the DNP complex is nucleofected into activated T cells. Integration by the Gene Writer system is assayed using ddPCR for molecular quantification, and CAR expression is measured by flow cytometry.

### Example 18: Unidirectional Sequencing Assay for Determination of Integration Site

[1048] In this example, unidirectional sequencing is performed to determine the sequence of an unknown integration site with an unbiased profile of genome wide specificity.

[1049] Integration experiments are performed as in previous examples by using a Gene Writing system comprising an integrase and a template DNA for insertion. The integrase and donor plasmids are transfected into 293T cells. Genomic DNA is extracted at 72 hours post transfection and subjected to unidirectional sequencing according to the following method. First, a next generation library is created by fragmentation of the genomic DNA, end repair, and adaptor ligation. Next, fragmented genomic DNA harboring template DNA integration events is amplified by two-step nested PCR using forward primers binding to template specific sequence and reverse primers binding to sequencing adaptors. PCR products are visualized on a capillary gel electrophoresis instrument, purified, and quantified by Qubit (ThermoFisher). Final libraries are sequenced on a Miseq using 300 bp paired end reads (Illumina). Data analysis is performed by detecting the DNA flanking the insertion and mapping that sequence back to the human genome sequence, e.g., hg38.

### Example 19: Production of mRNA Encoding a Gene Writer Polypeptide

[1050] In this example, an integrase is expressed by in vitro transcription from mRNA. The mRNA template plasmid included the T7 promoter followed by the 5′UTR, the integrase coding sequence, the 3′ UTR, and ˜100 nucleotide long poly(A) tail. The plasmid is linearized by enzymatic restriction resulting in blunt end or 5′ overhang downstream of poly(A) tail and used for in vitro transcription (IVT) using T7 polymerase (NEB). Following IVT, the RNA is treated with DNase I (NEB). After buffer exchange, enzymatic capping is performed using Vaccinia capping enzyme (NEB) and 2′-O-methyltransferase (NEB) in the presence of GTP and SAM (NEB). The capped RNA is purified and concentrated using silica columns (for example, Monarch @ RNA Cleanup kit) and buffered by 2 mM sodium citrate pH 6.5.

### Example 20: Use of Dual AAV Vector for the Treatment of Cystic Fibrosis in CFTR Mouse Model

[1051] In this example, a Gene Writing system is delivered as a dual AAV vector system for the treatment of cystic fibrosis in a mouse model of disease. Cystic fibrosis is a lung disease that is caused by mutations in the CTFR gene, which can be treated by the insertion of the wild-type CTFR gene into the genome of lung cells, such as cells found in the respiratory bronchioles and columnar non-ciliated cells in the terminal bronchiole.

[1052] A Gene Writing polypeptide, e.g., comprising an amino acid sequence of any of SEQ ID NOs: 1-12,677, and a template DNA comprising a cognate attachment site, e.g., an attB or attP site, e.g., a LeftRegion or RightRegion sequence of any of SEQ ID NOs: 13,001-25,677 or SEQ ID NOs: 26,001-38,677, respectively, are packaged into AAV6 capsids with expression of the polypeptide driven by the CAG promoter, the combination of which has been shown to be effective for high level transduction and expression in murine respiratory epithelial cells according to the teachings of Halbert et al. Hum Gene Ther 18(4):344-354 (2007).

[1053] AAV preparations are co-delivered intranasally to CFTR gene knockout (Cftr^{tm1Unc}) mice (The Jackson Labs) using a modified intranasal administration, as described previously (Santry et al. BMC Biotechnol 17:43 (2017)). Briefly, AAVs are packaged, purified, and concentrated with either an integrase or template DNA, comprising the CFTR gene under the control of a pol II promoter, e.g., CAG promoter, and a cognate attachment site. In some embodiments, the CFTR expression cassette is flanked by the integrase attachment sites. Prepared AAVs are each delivered at a dose ranging from 1×10¹⁰-1×10¹² vg/mouse using a modified intranasal administration to the CFTR knockout mouse. After one week, lung tissue is harvested and used for genomic extraction and tissue analysis. To measure integration efficiency, CFTR gene integration is quantified using ddPCR to determine the fraction of cells and target sites containing or lacking the insertion. To assay expression from successfully integrated CFTR, tissue is analyzed by immunohistochemistry to determine expression and pathology.

### Example 21: Method of Treating Ornithine Transcarbamylase Deficiency Through the Introduction of Transiently Expressed Integrase

[1054] Ornithine transcarbamylase (OTC) deficiency is a rare genetic disorder that results in an accumulation of ammonia due to not having efficient breakdown of nitrogen. The accumulation of ammonia leads to hyperammonemia that can debilitating and in severe cases lethal. This example describes the treatment of OTC deficiency by the delivery and expression of an mRNA encoding a Gene Writer polypeptide, e.g., an integrase sequence of any of SEQ ID NOs: 1-12,677, along with the delivery of an AAV providing the template DNA for integration. The AAV template comprises a wild-type copy of the human OTC gene under the control of a pol II promoter, e.g., ApoE.hAAT, and a cognate attachment site, e.g., an attB or attP site, e.g., a LeftRegion or RightRegion sequence of any of SEQ ID NOs: 13,001-25,677 or SEQ ID NOs: 26,001-38,677, respectively. In some embodiments, the OTC expression cassette is flanked by the integrase attachment sites.

[1055] In this example, LNP formulation of integrase mRNA follows the formulation of LNP-INT-01 (methods taught by Finn et al. Cell Reports 22:2227-2235 (2018), incorporated herein by reference) and template DNA is formulated in AAV2/8 (methods taught by Ginn et al. JHEP Reports (2019), incorporated herein by reference). Briefly, OTC deficiency is restored by treating neonatal Spf^{ash} mice (The Jackson Lab) by injecting LNP formulations (1-3 mg/kg) containing the integrase mRNA and AAV (1×10¹⁰-1×10¹² vg/mouse) containing the template DNA via the superficial temporal facial vein (Lampe et al. J Vis Ep 93:e52037 (2014)). The Spf^{ash} mouse has some residual mouse OTC activity which, in some embodiments, is silenced by the administration of an AAV that expresses an shRNA against mouse OTC as previously described (Cunningham et al. Mol Ther 19(5):854-859 (2011), the methods of which are incorporated herein by reference). OTC enzyme activity, ammonia levels, and orotic acid are measured as previously described (Cunningham et al. Mol Ther 19(5):854-859 (2011)). After 1 week, mouse livers are harvested and used for gDNA extraction and tissue analysis. The integration efficiency of hOTC is measured by ddPCR on extracted gDNA. Mouse liver tissue is analyzed by immunohistochemistry to confirm hOTC expression.

### Example 22: Use of a Gene Writing to Integrate a large Payload into Human Cells

[1056] This example describes the integrase-mediated integration of a large payload into human cells in vitro.

[1057] In this example, the Gene Writer polypeptide component comprises an mRNA encoding an integrase, e.g., an integrase sequence comprising an amino acid sequence of any of SEQ ID NOs: 1-12,677, and a template DNA comprising: a cognate attachment site, e.g., an attB or attP site, e.g., a LeftRegion or RightRegion comprising a sequence of any of SEQ ID NOs: 13,001-25,677 or SEQ ID NOs: 26,001-38,677, respectively; a GFP expression cassette, e.g., a CMV promoter operably linked to EGFP; and stuffer sequence to bring the total plasmid size to approximately 20 kb.

[1058] Briefly, HEK293T cells are co-electroporated with the integrase mRNA and large template DNA. After three days, integration efficiency and specificity are measured. In order to measure efficiency of integration, droplet digital PCR (ddPCR) is performed on genomic DNA e.g., as described by Lin et al. Hum Gene Ther Methods 27(5):197-208 (2016), using primer-probe sets that amplify across the junction of integration, e.g., with one primer annealing to the template DNA and the other to an appropriate flanking region of the genome, such that only integration events are quantified. Data are normalized to an internal reference gene, e.g., RPP30, and efficiency is expressed as the average integration events per genome across the population of cells. To measure specificity, integration events in genomic DNA are assessed by unidirectional sequencing to determine genome coordinates, as described in Example 18.

### Example 23: Use of a Gene Writing to Integrate a Bacterial Artificial Chromosome into Human Embryonic Stem Cells Ex Vivo

[1059] This example describes the integrase-mediated integration of a bacterial artificial chromosome (BAC) into human embryonic stem cells (hESCs).

[1060] BAC vectors are capable of maintaining extremely large (>100 kb) DNA payloads, and thus can carry many genes or complex gene circuits that may be useful in cellular engineering. Though there has been demonstration of their integration into hESCs (Rostovskaya et al. Nucleic Acids Res 40(19):e150 (2012)), this was accomplished using transposons that lack sequence specificity in their integration patterns. This Example describes sequence-specific integration of large constructs.

[1061] In this example, a BAC engineered to carry the desired payload further comprises an attachment site, e.g., an attB or attP site, e.g., a LeftRegion or RightRegion comprising a sequence of any of SEQ ID NOs: 13,001-25,677 or SEQ ID NOs: 26,001-38,677, respectively, that enables recognition by the Gene Writer polypeptide, e.g., an integrase, e.g., an integrase comprising an amino acid sequence of any of SEQ ID NOs: 1-12,677. An approximately 150 kb BAC is introduced into hESCs by electroporation or lipofection as per the teachings of Rostovskaya et al. Nucleic Acids Res 40(19):e150 (2012). After three days, integration efficiency and specificity are measured. In order to measure efficiency of integration, droplet digital PCR (ddPCR) is performed on genomic DNA e.g., as described by Lin et al. Hum Gene Ther Methods 27(5):197-208 (2016), using primer-probe sets that amplify across the junction of integration, e.g., with one primer annealing to the template DNA and the other to an appropriate flanking region of the genome, such that only integration events are quantified. Data are normalized to an internal reference gene, e.g., RPP30, and efficiency is expressed as the average integration events per genome across the population of cells. To measure specificity, integration events in genomic DNA are assessed by unidirectional sequencing to determine genome coordinates, as described in Example 18.

### Example 24: Use of Dual AAV Vector to Integrate a Transene into a Mouse Model that Contains an Integrase landing Pad Site

[1062] Integrase proteins are found naturally in bacteriophage and utilize a sequence of the phage genome (attP) to integrate the part of its genome into a bacteria's genome at a specific sequence (attB). Integrase proteins can be utilized as drivers to integrate DNA into a genome when supplied with a donor vector carrying an insert DNA that bears an appropriate recognition sequence (e.g. attP or attB) and the target or host genome bears a corresponding recognition sequence (e.g. attB or attP). This requirement for a specific sequence to be found in the host genome to have efficient integration can limit the use and/or efficacy of an integrase to insert a transgene into the genome of a mouse, making it challenging to create a mouse model or treat a disease found in the background of a mouse genetic disease model. In this example, a mouse engineered to have an attP recognition site (e.g., attP sequence for Bxb1 integrase) in its genome is used to demonstrate targeted integration by delivery of 1) an insert DNA that bears a sequence of interest and further comprises an attB recognition site (e.g., attB sequence for Bxb1 integrase) and 2) an integrase (e.g., Bxb1 integrase) that catalyzes the integration of the insert DNA into the genomic attP site. Further, in this example, the Bxb1-specific attP and attB recognition sequences used have the central dinucleotide changed from GT to GA. In some examples, the DNA sequence of interest is a heterologous object sequence comprising an RNA polymerase II promoter sequence (e.g., Human thyroxine binding globulin, TBG) and the DNA coding region of a therapeutic protein or a reporter gene (e.g., Renilla reniformis luciferase).

[1063] Briefly, AAVs (e.g., AAV-DJ) are packaged, purified, and concentrated with either a construct comprising DNA encoding an integrase protein (e.g., Bxb1) or comprising the insert DNA (e.g., Renilla reniformis luciferase under the control of TBG promoter and the described attB sequence). Mice with a stable integration of the attP recognition sequence are co-administered one or both of the two AAV viruses via intraperitoneal injection at doses ranging from 1×10¹⁰-1×10¹³ vg per virus per mouse. The integration is monitored over time by unidirectional sequencing of livers, among other organs, as previously described. In-life imaging of the luciferase expression is monitored as previously described (Bhaumik, S., & Gambhir, S. S., PNAS 2002, https://doi.org/10.1073/pnas.012611099).

### Example 25: Treatment of Multiple Diseases with a Single Composition Incorporating Multiple Genes

[1064] Ornithine transcarbamylase (OTC) deficiency and Citrullinemia type I are distinct diseases caused by mutations in different genes (OTC and ASS1, respectively) that both result in disruption of the urea cycle, ultimately leading to the accumulation of nitrogen (as ammonia) in the blood. The accumulation of ammonia leads to hyperammonemia, which can ultimately cause tissue and neurotoxicity with debilitating and potentially fatal consequences.

[1065] This example describes the design and use of a single Gene Writing system that can be provided for treatment of more than one disease. More specifically, this example describes the treatment of OTC deficiency or Citrullinemia type I by the delivery and expression of an mRNA encoding a Gene Writer polypeptide, e.g., an integrase sequence of any of SEQ ID NOs: 1-12,677, and an AAV comprising a template DNA for integration. The template DNA in this example comprises functional copies of both the human OTC and ASS1 genes separated by a self-cleaving peptide (for example 2A) under the control of a pol II promoter, e.g., ApoE.hAAT, and a cognate attachment site, e.g., an attB or attP site, e.g., a LeftRegion or RightRegion sequence of any of SEQ ID NOs: 13,001-25,677 or SEQ ID NOs: 26,001-38,677. In some embodiments, the expression cassette comprising both OTC and ASS1 is flanked by integrase attachment sites. The composition described is used to treat either OTC deficiency or Citrullinemia type I.

[1066] In this example, LNP formulation of integrase mRNA follows the formulation of LNP-INT-01 (methods taught by Finn et al. Cell Reports 22:2227-2235 (2018), incorporated herein by reference) and template DNA is packaged in AAV2/8 (methods taught by Ginn et al. JHEP Reports (2019), incorporated herein by reference). Briefly, OTC deficiency is restored by treating neonatal Spf^{ash} mice (The Jackson Lab) by injecting LNP formulations (1-3 mg/kg) containing the integrase mRNA and AAV (1×10¹⁰-1×10¹² vg/mouse) containing the template DNA via the superficial temporal facial vein (Lampe et al. J Vis Exp 93:e52037 (2014)). The Spf^{aah} mouse has some residual mouse OTC activity which, in some embodiments, is silenced by the administration of an AAV that expresses an shRNA against mouse OTC as previously described (Cunningham et al. Mol Ther 19(5):854-859 (2011), the methods of which are incorporated herein by reference). OTC enzyme activity, ammonia levels, and orotic acid are measured as previously described (Cunningham et al. Mol Ther 19(5):854-859 (2011)). After 1 week, mouse livers are harvested and used for gDNA extraction and tissue analysis. The integration efficiency of hOTC is measured by ddPCR on extracted gDNA. Mouse liver tissue is analyzed by immunohistochemistry to confirm hOTC expression.

[1067] In some embodiments, the same composition described and used to treat a model of OTC deficiency above may also be used to treat Citrullinemia type I. Briefly, ASS1 deficiency is restored by treating a neonatal lethal argininosuccinate synthetase (ASS) knockout mouse model (Cindy Y Kok et al, Mol Ther. 21(10):1823-1831 (2013), the methods of which are incorporated herein by reference in their entirety) using the described LNP and AAV. Specifically, ASS knockout mice are injected with LNP formulations (1-3 mg/kg) containing the integrase mRNA and AAV (1×10¹⁰-1×10¹² vg/mouse) containing the template DNA via the superficial temporal facial vein (Lampe et al. J Vis Exp 93:e52037 (2014)). Ammonia levels, orotic acid and overall mice survival are measured as previously described (Cindy Y Kok et al, Mol Ther. 21(10):1823-1831 (2013)). After 2-4-8 weeks, mouse livers are harvested and used for gDNA extraction and tissue analysis. The integration efficiency of hASS1 is measured by ddPCR on extracted gDNA. Mouse liver tissue is analyzed by immunohistochemistry to confirm hASS1 expression.

[1068] In some embodiments, the Gene Writing system integrates the OTC-ASS1 expression cassette into OTC deficiency and ASS1 knockout mouse models. This same system thus restores healthy urea cycles in both models. In some embodiments, blood ammonia levels are reduced from hyperammonemia to normal levels, e.g., OTC deficiency or ASS1 knockout mice treated with the Gene Writing system show at least a 2, 5, 10, 50, or at least a 100-fold reduction in blood ammonia levels relative to control mice. In some embodiments, orotic acid levels are reduced from elevated to normal levels, e.g., OTC deficiency or ASS1 knockout mice treated with the Gene Writing system show at least a 2, 5, 10, 50, or at least a 100-fold reduction in orotic acid levels relative to control mice.

### Example 26: Gene Writers for Integration of a CAR in T-Cells In Vivo

[1069] This example describes a Gene Writer™ genome editing system delivered T-cells in vivo for integration and stable expression of a genetic payload. Specifically, targeted nanoparticles are used to deliver a Gene Writing system capable of integrating a chimeric antigen receptor (CAR) expression cassette into the genome of T-cells to generate CAR-T cells in a murine model.

[1070] In this example, a Gene Writing system comprises an mRNA encoding a Gene Writing polypeptide, e.g., a recombinase enzyme described herein, and an insert DNA comprising a recombinase recognition site and a transgene cassette, wherein the transgene cassette comprises the coding sequence for the CD19-specific m194-1BBz CAR driven by the EF1a promoter (Smith et al. Nat Nanotechnol 12(8):813-820 (2017)). In order to achieve delivery specifically to T-cells, targeted LNPs (tLNPs) are generated that carry a conjugated mAb against CD4. See, e.g., Ramishetti et al. ACS Nano 9(7):6706-6716 (2015). Alternatively, conjugating a mAb against CD3 can be used to target both CD4* and CD8* T-cells (Smith et al. Nat Nanotechnol 12(8):813-820 (2017)). In other embodiments, the nanoparticle used to deliver to T-cells in vivo is a constrained nanoparticle that lacks a targeting ligand, as taught by Lokugamage et al. Adv Mater 31(41):e1902251 (2019).

[1071] The tLNP can be made by first preparing the nucleic acid mix (e.g., polypeptide mRNA: template DNA molar ratio of 1:40) with a mixture of lipids (cholesterol, DSPC, PEG-DMG, Dlin-MC3-DMA, and DSPE-PEG-maleimide) and then chemically conjugating the desired DTT-reduced mAb (e.g., anti-CD4, e.g., clone YTS.177) to the maleimide functional group on the LNPs. See Ramishetti et al. ACS Nano 9(7):6706-6716 (2015).

[1072] Six to 8 week old C57BL6/J mice are injected intravenously with formulated LNP at a dose of 1 mg RNA/kg body weight. Blood is collected at one day and three days post-administration in heparin-coated collection tubes, and the leukocytes are isolated by density centrifugation using Ficoll-Paque PLUS (GE Healthcare). Five days post-administration, animals are euthanized and blood and organs (spleen, lymph nodes, bone marrow cells) are harvested for T-cell analysis. Expression of the anti-CD19 CAR is detected by FACS using specific immunological sorting. Positive cells are confirmed for integration by methods as described herein, e.g., molecular combing or Q-FISH.

### Example 27: Characterization of Integration Sites by Molecular Combine

[1073] AAV genomes are known to undergo multiple mechanisms of intra and intermolecular recombination after delivery to cells (McCarty et al Annu Rev Genet 38:819-45 (2004)). Since an insert DNA may be delivered via an AAV vector, it is possible that in this context, some of the molecules may occur as concatemers, and when used as a substrate for Gene Writing, these concatemeric insert DNA molecules may result in the integration of more than one copy of the original insert DNA. It may thus be useful to analyze the fraction of integration events that result in single vs concatemeric insertions of the template DNA, the average number of copies per integration site, and the orientation of concatemeric molecules, e.g., the frequency of head-to-head or head-to-tail conformations. This example describes the use of molecular combing technology to determine the configuration of integration sites after AAV-mediated delivery of a Gene Writing system in human cells.

[1074] The Bxb1 recombinase (SEQ ID NO: 11,636) is an enzyme that has been used to integrate DNA in human cells that have been modified to contain an appropriate recognition site in the genome, and is used here as a representative example of recombinase systems disclosed herein. In this example, HEK293T landing pad cell lines are generated by single copy infection with a lentiviral vector containing the BXB1 attP-attP* site. To perform the recombinase-mediated integration, single copy landing pad cells are first seeded in a 48-well plate at ˜40,000 cells/well. At ˜24 hr post-seeding, adeno-associated viral vectors containing the BXB1 attB* donor (cognate recognition site to the attP* site in the landing pad) are transduced with an AAV containing an insert DNA in the presence or absence of a second AAV comprising the coding sequence for Bxb1 integrase. 2 weeks post transduction, ˜10% of the AAV transduced cells are harvested and gDNA is analyzed using a ddPCR assay specific to the landing pad site to confirm integration (% CNV/landing pad). Methods for molecular combing follow the approach of Kaykov et al Sci Rep 6:19636 (2016), incorporated herein by reference in its entirety. Briefly, ˜300,000 transduced cells from each transduced sample are extracted for high molecular weight genomic DNA into an agarose plug. Genomic DNA molecules are then mechanically stretched and aligned in a controlled and consistent manner on the glass surface, enabling precise and direct measurements along the length of the DNA fiber. In-situ hybridization is performed using prelabeled DNA probes that enable visualization for integration site configuration analysis. Probes for the Bxb1 attP-attP* landing pad (target site), AAV Bxb1 attB*donor sequence (insert DNA), and reference gene RPP30 are labeled using three distinct colors for differentiating the signal from each probe. Post hybridization, fluorescence signals are acquired and quantified. By this method, the number and location of the distinct fluorescence signals relative to each other provide a view of the insert copy number and orientation within integrated DNA.

### Example 28: Determination of Integration Sites by Inverse PCR

[1075] This example describes the characterization of integration sites for a Gene Writer system. In some embodiments, a Gene Writer system may exhibit exquisite specificity for a single target site or target sequence. In other embodiments, a Gene Writer system may have a more relaxed specificity and catalyze integration of an insert DNA at a variety of locations in the genome. Thus, for any given Gene Writer, it is useful to determine the breadth of its integration profile.

[1076] In this example, a Gene Writing system is used to modify the genome of HEK293T cells as described in any of the preceding Examples. After transfection, HEK293T cells are cultured for at least 4 days and then assayed for site-specific genome editing. Genomic DNA is first digested with pairs of restriction enzymes that generate incompatible cohesive ends and that cut at least once in the insert DNA, and then self-ligated to generate circular DNA ideally comprising both insert DNA and flanking genomic DNA. Inverted PCR amplification is conducted as described in Olivares et al Nat Biotechnol 20:1124-1128 (2002), the methods of which are incorporated herein by reference in their entirety, using forward and reverse primers specific to the insert DNA that will result in amplification of adjacent genomic DNA. Amplified PCR products are then sequenced using next generation sequencing technology on a MiSeq instrument. For sequence analysis, MiSeq reads are mapped to the HEK293T genome to identify locations of integration. In some embodiments, a Gene Writer system described herein results in detectable integration at a single site. In some embodiments, a Gene Writer system described herein results in detectable integration at a limited number of sites, e.g., less than 100, 90, 80, 70, 60, 50, 45, 40, 35, 30, 25, 20, 15, 10, 9, 8, 7, 6, 5, 4, 3, or less than 2 sites. In other embodiments, a Gene Writer system described herein results in detectable integration at more than 100 sites.

### Example 29: Use of an Insulator Configuration Surrounding a DNA Recognition Sequence for Improving the Stability of Transgene Expression after Recombinase-Mediated Integration

[1077] In this example, the stability of expression of an integrated transgene is improved through the use of insulator configurations as described in this invention. A DNA recognition sequence comprised on a template nucleic acid will ultimately be split into two terminal recombinase transfer sequences after recombinase-mediated integration. Accordingly, this example describes a configuration in which insulator sequences are located upstream and downstream of the DNA recognition sequence, such that recombination places the insulators inside of the recombinase transfer sequences but at the termini of the inserted DNA. This configuration thus provides an approach by which entire payload of the template nucleic acid, less the DNA recognition sequence, is insulated from incoming chromosomal silencing effects and from outgoing transcriptional activity as described herein (FIGS. 6 and 7).

[1078] In order to determine the effect of the insulator configuration on transgene expression, a template nucleic acid either comprising or lacking insulators as described herein is integrated into cells. Briefly, HEK293T and HepG2 cells are nucleofected using varying concentrations of (1) an expression plasmid for producing a recombinase capable of catalyzing recombination using the DNA recognition sequence of (1), e.g., a recombinase comprising the sequence of any of SEQ ID NO: n (e.g., SEQ ID NOs: 1-12,677), wherein n is a corresponding number of the DNA recognition sequence included on the template plasmid (e.g., wherein a recombinase of SEQ ID NO: 1 is chosen, a LeftRegion of SEQ ID NO: 13,001 or a right region of SEQ ID NO: 26,001 is chosen); and (2) a template plasmid comprising a reporter cassette, e.g., the constitutive CMV promoter driving EGFP expression, a DNA recognition sequence, e.g., a DNA recognition sequence comprised in a LeftRegion of SEQ ID NO: (n+13,000) or RightRegion of SEQ ID NO: (n+26,000), wherein n is chosen from 1-12,677, and optionally insulators placed immediately upstream and downstream of the DNA recognition sequence, e.g., the 5′-HS4 chicken β-globin insulator. In some embodiments, the cells used comprise an endogenous target sequence that is also recognized by the recombinase of (1), such that the recombinase is capable of catalyzing the recombination of the DNA recognition sequence of (2) with the endogenous target sequence. In some embodiments, a recombinase without an endogenous target site in the native genome is used for the purpose of experimentation by first integrating an appropriate target site into the genome, e.g., by creating a landing pad comprising the target site. As an example, a landing pad cell line may be generated by transducing HEK293T cells with a lentiviral vector comprising the attB site of the recombinase comprising an amino acid sequence of SEQ ID NO: 11,636, comprising the attB sequence 5′-GGCTTGTCGACGACGGCGGTCTCCGTCGTCAGGATCAT-3′ (SEQ ID NO: 38962). Accordingly, the recombinase expression plasmid encodes the protein sequence of SEQ ID NO: 11,636 and the DNA recognition sequence of the template plasmid comprises a sequence from the LeftRegion or RightRegion comprising the sequence 5′-GGTTTGTCTGGTCAACCACCGCGGTCTCAGTGGTGTACGGTACAAACC-3′ (SEQ ID NO: 38963).

[1079] At three days post-transduction, nucleofection efficiency is determined by measuring EGFP expression by flow cytometry. Subsequently, EGFP expression is similarly assessed on days 7, 10, 14, 21, 28, and 60 post-transduction. At day 21, when plasmid DNA is expected to have been diluted out and GFP fluorescence corresponds to expression from the integrated reporter cassette, a baseline reading of integration frequency is determined by assessing the percent of cells found to be GFP+, while a baseline reading of reporter expression level is determined by assessing median fluorescence, as measured by flow cytometry. The stability of transgene expression is then determined by assessing both the percent of cells remaining GFP+ and the median fluorescence levels at days 28 and 60 post-transduction. Additionally, at days 28 and 60 post-transduction, a portion of cells is first treated with an inhibitor of histone deactylase (HDAC), e.g., trichostatin A (TSA), or an inhibitor of DNA methylation, e.g., 5-azacytidine (5-aza), prior to fluorescence measurements.

[1080] In some embodiments, cells treated with template nucleic acid comprising the described insulator configuration will show a decrease in the loss of frequency of expression (e.g., percent GFP+) and/or loss of reporter expression (e.g., median fluorescence) at day 28 and/or day 60 post-transduction, e.g., at least 1.1, 1.2, 1.3, 1.4, 1.5, 1.6, 1.7, 1.8, 1.9, 2.0, 2.5, 3, 4, 5, 6, 7, 8, 9, or at least 10-fold lower than cells treated with the template nucleic acid lacking the insulators. In some embodiments, cells treated with template nucleic acid comprising the described insulator configuration will show a higher frequency of expression (e.g., percent GFP+) and/or a higher level of expression (e.g., median fluorescence) at day 28 and/or day 60 post-transduction, e.g., at least 1.1, 1.2, 1.3, 1.4, 1.5, 1.6, 1.7, 1.8, 1.9, 2.0, 2.5, 3, 4, 5, 6, 7, 8, 9, or at least 10-fold higher than cells treated with the template nucleic acid lacking the insulators. In some embodiments, cells treated with template nucleic acid comprising the described insulator configuration will demonstrate a smaller increase in frequency of expression (e.g., percent GFP+) and/or level of expression (e.g., median fluorescence) after further treatment with TSA or 5-aza relative to no treatment with TSA or 5-aza, e.g., at least at least 1.1, 1.2, 1.3, 1.4, 1.5, 1.6, 1.7, 1.8, 1.9, 2.0, 2.5, 3, 4, 5, 6, 7, 8, 9, or at least 10-fold smaller increase than cells treated with the template nucleic acid lacking the insulators. In some embodiments, cells treated with template nucleic acid comprising the described insulator configuration will demonstrate an increase in frequency of expression (e.g., percent GFP+) and/or level of expression (e.g., median fluorescence) after further treatment with TSA or 5-aza of less than 10, 9, 8, 7, 6, 5, 4, 3, 2.5, 2.0, 1.9, 1.8, 1.7, 1.6, 1.5, 1.4, 1.3, 1.2, or less than 1.1-fold increase as compared to no treatment with TSA or 5-aza.

### Example 30: Insulator Configurations for Recombinase-Mediated Transene Integration Assayed in a 32D Cell-Based Genotoxicity Assay

[1081] In this example, the murine myeloblast-like cell line 32D is used as a sensor cell line for genotoxicity. In brief, 32D cells are treated with a genome engineering system, e.g., a recombinase system as described herein, and subsequently grown in vitro in the absence of IL-3 or implanted into mice for in vivo transformation assessment. Genotoxicity of a system is assessed by quantifying the number of colonies capable of IL-3-independent growth (in vitro) or by monitoring implanted mice for the rates of tumor formation and mortality (Li et al Mol Ther 17(4):716-724 (2009), the methods of which are incorporated by reference). Here, the 32D cell line is used to assess genotoxicity in cells treated with template nucleic acid comprising an insulator configuration as described herein, e.g., as described in Example 29.

[1082] In order to determine the effect of the insulator configuration on genotoxicity, a template nucleic acid either comprising or lacking insulators as described herein is integrated into cells. Briefly, 32D cells are nucleofected using varying concentrations of (1) a template plasmid and (2) a recombinase expression vector, as described in Example 29. Additionally, cells are nucleofected with (1) only as a negative control or transduced with gammaretrovirus at a target MOI (e.g., MGNP2 at MOI of 1-10) as a positive control. At 24 hr post-transduction, cells are washed and split into 5 independent pools for in vitro transformation assessment, 5 pools for in vivo transformation assessment, and one for transfection or transduction efficiency. First, one subculture is used to determine the transduction efficiency by measuring the fraction of GFP+ cells by flow cytometry at 48 hr post-transduction. The in vitro assessment pools are plated and grown in the absence of IL-3 for quantification of colonies capable of IL-3-independent growth. The remaining 5 subcultures are expanded for ˜2 weeks in the presence of IL-3 before collecting, washing with HBSS, enumerating, and injecting into female C3H/HeJ mice (one independent pool per mouse, 5 mice each). Treated mice are monitored weekly for up to 18 weeks post-transplantation for tumor formation, as previously described.

[1083] In some embodiments, the use of a template plasmid comprising an insulator configuration as described herein will result in the formation of fewer IL-3 independent colonies, e.g., at least 1.1, 1.2, 1.3, 1.4, 1.5, 1.6, 1.7, 1.8, 1.9, 2.0, 2.5, 3, 4, 5, 6, 7, 8, 9, or at least 10-fold fewer colonies as compared to a template plasmid lacking insulators. In some embodiments, the fraction of mice developing tumors when implanted with cells treated with template plasmid comprising an insulator configuration as described herein will be lower, e.g., at least 20%, 40%, 60%, 80%, or 100% lower than mice implanted with cells treated with a template plasmid lacking insulators. In some embodiments, the median latency of tumors derived from cells treated with a template plasmid comprising an insulator configuration as described herein will be longer, e.g., at least 1.1, 1.2, 1.3, 1.4, 1.5, 1.6, 1.7, 1.8, 1.9, or at least 2-fold longer than those derived from cells treated with a template plasmid lacking insulators. In some embodiments, the 18-week survival rate of mice implanted with cells treated with template plasmid comprising an insulator configuration as described herein will be higher, e.g., at least 1.1, 1.2, 1.3, 1.4, 1.5, 1.6, 1.7, 1.8, 1.9, or at least 2-fold higher than that of mice implanted with cells treated with template plasmid lacking insulators.

### Example 31: Recombinase System with Insulators is Designed to Reduce Interference of Payload on Surrounding Genome-RNA Seq for Transcriptome Analysis

[1084] This example describes methods for measuring a reduction in impact of an integrated transgene on the surrounding genome enabled through the use of insulator configurations as described in this invention. Given a genomic integration has the potential to impact expression of endogenous genes in the vicinity of the integration event, it is highly desirable for a therapeutic insertion to have components to minimize this change in local gene expression. Here, the inclusion of an insulator configuration as described herein, e.g., as described in Example 29, in a template nucleic acid is assessed for impact on the change in gene expression relative to a template nucleic acid lacking insulators.

[1085] In this example, human primary T cells are nucleofected with systems employing template plasmids comprising insulator configurations as described herein, e.g., Example 29, or template plasmids lacking insulators. Cells are harvested at days 14 and 28 post-nucleofection and RNA is extracted and purified. Briefly, first strand cDNA is generated using the SuperScript® VILO™ cDNA Synthesis Kit (ThermoFisher), as according to manufacturer's instructions, followed by second strand synthesis using DNA Polymerase I. cDNA is purified using Agencourt AMPure XP beads (Beckman Coulter), as according to manufacturer's instructions, and used to prepare DNA libraries by fragmentation, size selection, adaptor ligation, and qPCR quantification. Libraries are sequenced using an Illumina HiSeq 2000 and RNA-seq reads are aligned to reference transcripts to determine a global gene expression profile. Additionally, the expression of specific transcripts located closed to the recombinase-mediated integration site is quantified by qPCR or ddPCR using primers and probes specific to the transcripts.

[1086] In some embodiments, integration using a template plasmid comprising an insulator configuration as described herein will result in a change in expression that is lower, e.g., at least 1.1, 1.2, 1.3, 1.4, 1.5, 1.6, 1.7, 1.8, 1.9, 2.0, 2.5, 3, 4, 5, 6, 7, 8, 9, or at least 10-fold lower than the change in expression after integration using a template plasmid lacking insulators for at least one gene local to the site of integration. In some embodiments, integration using a template plasmid comprising an insulator configuration as described herein will result in a less than 10, 9, 8, 7, 6, 5, 4, 3, 2.5, 2.0, 1.9, 1.8, 1.7, 1.6, 1.5, 1.4, 1.3, 1.2, or a less than 1.1-fold change in gene expression for at least one gene local to the site of integration, compared to otherwise similar untreated cells. In some embodiments, integration using a template plasmid comprising an insulator configuration as described herein will result in a less than 10, 9, 8, 7, 6, 5, 4, 3, 2.5, 2.0, 1.9, 1.8, 1.7, 1.6, 1.5, 1.4, 1.3, 1.2, or a less than 1.1-fold change in expression for at least 90%, e.g., at least 90%, 95%, 96%, 97%, 97%, 99%, 99.5% or at least 99.9% of global transcripts, compared to otherwise similar untreated cells.

### Example 32: Selection of Lipid Reagents with Reduced Aldehyde Content

[1087] In this example, lipids are selected for downstream use in lipid nanoparticle formulations containing Gene Writing component nucleic acid(s), and lipids are selected based at least in part on having an absence or low level of contaminating aldehydes. Reactive aldehyde groups in lipid reagents may cause chemical modifications to component nucleic acid(s), e.g., RNA, e.g., template RNA, during LNP formulation. Thus, in some embodiments, the aldehyde content of lipid reagents is minimized.

[1088] Liquid chromatography (LC) coupled with tandem mass spectrometry (MS/MS) can be used to separate, characterize, and quantify the aldehyde content of reagents, e.g., as described in Zurek et al. The Analyst 124(9):1291-1295 (1999), incorporated herein by reference. Here, each lipid reagent is subjected to LC-MS/MS analysis. The LC/MS-MS method first separates the lipid and one or more impurities with a C8 HPLC column and follows with the detection and structural determination of these molecules with the mass spectrometer. If an aldehyde is present in a lipid reagent, it is quantified using a staple-isotope labeled (SIL) standard that is structurally identical to the aldehyde but is heavier due to C13 and N15 labeling. An appropriate amount of the SIL standard is spiked into the lipid reagent. The mixture is then subjected to LC-MS/MS analysis. The amount of contaminating aldehyde is determined by multiplying the amount of SIL standard and the peak ratio (unknown/SIL). Any identified aldehyde(s) in the lipid reagents is quantified as described. In some embodiments, lipid raw materials selected for LNP formulation are not found to contain any contaminating aldehyde content above a chosen level. In some embodiments, one or more, and optionally all, lipid reagents used for formulation comprise less than 3% total aldehyde content. In some embodiments, one or more, and optionally all, lipid reagents used for formulation comprise less than 0.3% of any single aldehyde species. In some embodiments, one or more, and optionally all, lipid reagents used in formulation comprise less than 0.3% of any single aldehyde species and less than 3% total aldehyde content.

### Example 33: Quantification of RNA Modification Caused by Aldehydes During Formulation

[1089] In this example, the RNA molecules are analyzed post-formulation to determine the extent of any modifications that may have happened during the formulation process, e.g., to detect chemical modifications caused by aldehyde contamination of the lipid reagents (see, e.g., Example 36).

[1090] RNA modifications can be detected by analysis of ribonucleosides, e.g., as according to the methods of Su et al. Nature Protocols 9:828-841 (2014), incorporated herein by reference in its entirety. In this process, RNA is digested to a mix of nucleosides, and then subjected to LC-MS/MS analysis. RNA post-formulation is contained in LNPs and must first be separated from lipids by coprecipitating with GlycoBlue in 80% isopropanol. After centrifugation, the pellets containing RNA are carefully transferred to a new Eppendorf tube, to which a cocktail of enzymes (benzonase, Phosphodiesterase type 1, phosphatase) is added to digest the RNA into nucleosides. The Eppendorf tube is placed on a preheated Thermomixer at 37° C. for 1 hour. The resulting nucleosides mix is directly analyzed by a LC-MS/MS method that first separates nucleosides and modified nucleosides with a C18 column and then detects them with mass spectrometry.

[1091] If aldehyde(s) in lipid reagents have caused chemical modification, data analysis will associate the modified nucleoside(s) with the aldehyde(s). A modified nucleoside can be quantified using a SIL standard which is structurally identical to the native nucleoside except heavier due to C13 and N15 labeling. An appropriate amount of the SIL standard is spiked into the nucleoside digest, which is then subjected to LC-MS/MS analysis. The amount of the modified nucleoside is obtained by multiplying the amount of SIL standard and the peak ratio (unknown/SIL). LC-MS/MS is capable of quantifying all the targeted molecules simultaneously.

[1092] In some embodiments, the use of lipid reagents with higher contaminating aldehyde content results in higher levels of RNA modification as compared to the use of higher purity lipid reagents as materials during the lipid nanoparticle formulation process. Thus, in preferred embodiments, higher purity lipid reagents are used that result in RNA modification below an acceptable level.

### Example 34: Formulation of Lipid Nanoparticles encapsulating Firefly Luciferase mRNA

[1093] In this example, a reporter mRNA encoding firefly luciferase was formulated into lipid nanoparticles comprising different ionizable lipids. Lipid nanoparticle (LNP) components (ionizable lipid, helper lipid, sterol, PEG) were dissolved in 100% ethanol with the lipid component. These were then prepared at molar ratios of 50:10:38.5:1.5 using ionizable lipid LIPIDV004 or LIPIDV005 (Table 14), DSPC, cholesterol, and DMG-PEG 2000, respectively. Firefly Luciferase mRNA-LNPs containing the ionizable lipid LIPIDV003 (Table 14) were prepared at a molar ratio of 45:9:44:2 using LIPIDV003, DSPC, cholesterol, and DMG-PEG 2000, respectively. Firefly luciferase mRNA used in these formulations was produced by in vitro transcription and encoded the Firefly Luciferase protein, further comprising a 5′ cap, 5′ and 3′ UTRs, and a polyA tail. The mRNA was synthesized under standard conditions for T7 RNA polymerase in vitro transcription with co-transcriptional capping, but with the nucleotide triphosphate UTP 100% substituted with N1-methyl-pseudouridine triphosphate in the reaction. Purified mRNA was dissolved in 25 mM sodium citrate, pH 4 to a concentration of 0.1 mg/mL.

[1094] Firefly Luciferase mRNA was formulated into LNPs with a lipid amine to RNA phosphate (N:P) molar ratio of 6. The LNPs were formed by microfluidic mixing of the lipid and RNA solutions using a Precision Nanosystems NanoAssemblr™ Benchtop Instrument, using the manufacturer's recommended settings. A 3:1 ratio of aqueous to organic solvent was maintained during mixing using differential flow rates. After mixing, the LNPs were collected and dialyzed in 15 mM Tris, 5% sucrose buffer at 4° C. overnight. The Firefly Luciferase mRNA-LNP formulation was concentrated by centrifugation with Amicon 10 kDa centrifugal filters (Millipore). The resulting mixture was then filtered using a 0.2 μm sterile filter. The final LNP was stored at −80° C. until further use.

TABLE 14
Ionizable Lipids

| | | Molecular | |
|---|---|---|---|
| LIPID ID | Chemical Name | Weight | Structure |
| LIPIDV003 | (9Z,12Z)-3-((4,4- bis(octyloxy)butanoyl) oxy)-2-((((3- (diethylamino)propoxy) carbonyl)oxy)methyl)propyl octadeca-9,12-dienoate | 852.29 | [chemical structure] |
| LIPIDV004 | Heptadecan-9-yl 8-((2- hydroxyethyl)(8- (nonyloxy)-8-oxooctyl) amino)octanoate | 710.18 | [chemical structure] |
| LIPIDV005 | | 919.56 | [chemical structure] |

[1095] Prepared LNPs were analyzed for size, uniformity, and % RNA encapsulation. The size and uniformity measurements were performed by dynamic light scattering using a Malvern Zetasizer DLS instrument (Malvern Panalytical). LNPs were diluted in PBS prior to being measured by DLS to determine the average particle size (nanometers, nm) and polydispersity index (pdi). The particle sizes of the Firefly Luciferase mRNA-LNPs are shown in Table 15.

TABLE 15
LNP particle size and uniformity

| | | Particle | |
|---|---|---|---|
| | Ionizable | Size | |
| LNP ID | Lipid | (nm) | pdi |
| LNPV019-002 | LIPIDV005 | 77 | 0.04 |
| LNPV006-006 | LIPIDV004 | 71 | 0.08 |
| LNPV011-003 | LIPIDV003 | 87 | 0.08 |

[1096] The percent encapsulation of luciferase mRNA was measured by the fluorescence-based RNA quantification assay Ribogreen (ThermoFisher Scientific). LNP samples were diluted in 1×TE buffer and mixed with the Ribogreen reagent per manufacturer's recommendations and measured on a i3 SpectraMax spectrophotomer (Molecular Devices) using 644 nm excitation and 673 nm emission wavelengths. To determine the percent encapsulation, LNPs were measured using the Ribogreen assay with intact LNPs and disrupted LNPs, where the particles were incubated with 1×TE buffer containing 0.2% (w/w) Triton-X100 to disrupt particles to allow encapsulated RNA to interact with the Ribogreen reagent. The samples were again measured on the i3 SpectraMax spectrophotometer to determine the total amount of RNA present. Total RNA was subtracted from the amount of RNA detected when the LNPs were intact to determine the fraction encapsulated. Values were multiplied by 100 to determine the percent encapsulation. The Firefly Luciferase mRNA-LNPs that were measured by Ribogreen and the percent RNA encapsulation is reported in Table 16.

TABLE 16
RNA encapsulation after LNP formulation

| | Ionizable | % mRNA |
|---|---|---|
| LNP ID | Lipid | encapsulation |
| LNPV019-002 | LIPIDV005 | 98 |
| LNPV006-006 | LIPIDV004 | 92 |
| LNPV011-003 | LIPIDV003 | 97 |

### Example 35: In Vitro Activity Testing of mRNA-LNPs in Primary Hepatocytes

[1097] In this example, LNPs comprising the luciferase reporter mRNA were used to deliver the RNA cargo into cells in culture. Primary mouse or primary human hepatocytes were thawed and plated in collagen-coated 96-well tissue culture plates at a density of 30,000 or 50,000 cells per well, respectively. The cells were plated in 1× William's Media E with no phenol red and incubated at 37° C. with 5% CO₂. After 4 hours, the medium was replaced with maintenance medium (lx William's Media E with no phenol containing Hepatocyte Maintenance Supplement Pack (ThermoFisher Scientific)) and cells were grown overnight at 37° C. with 5% CO₂. Firefly Luciferase mRNA-LNPs were thawed at 4° C. and gently mixed. The LNPs were diluted to the appropriate concentration in maintenance media containing 7.5% fetal bovine serum. The LNPs were incubated at 37° C. for 5 minutes prior to being added to the plated primary hepatocytes. To assess delivery of RNA cargo to cells, LNPs were incubated with primary hepatocytes for 24 hours and cells were then harvested and lysed for a Luciferase activity assay. Briefly, medium was aspirated from each well followed by a wash with 1×PBS. The PBS was aspirated from each well and 200 μL passive lysis buffer (PLB) (Promega) was added back to each well and then placed on a plate shaker for 10 minutes. The lysed cells in PLB were frozen and stored at −80° C. until luciferase activity assay was performed.

[1098] To perform the luciferase activity assay, cellular lysates in passive lysis buffer were thawed, transferred to a round bottom 96-well microtiter plate and spun down at 15,000 g at 4° C. for 3 min to remove cellular debris. The concentration of protein was measured for each sample using the Pierce™ BCA Protein Assay Kit (ThermoFisher Scientific) according to the manufacturer's instructions. Protein concentrations were used to normalize for cell numbers and determine appropriate dilutions of lysates for the luciferase assay. The luciferase activity assay was performed in white-walled 96-well microtiter plates using the luciferase assay reagent (Promega) according to manufacturer's instructions and luminescence was measured using an i3X SpectraMax plate reader (Molecular Devices). The results of the dose-response of Firefly luciferase activity mediated by the Firefly mRNA-LNPs are shown in FIG. 1A and indicate successful LNP-mediated delivery of RNA into primary cells in culture. As shown in FIG. 1A, LNPs formulated as described herein were analyzed for delivery of cargo to primary human (FIG. 1A) and mouse (FIG. 1B) hepatocytes, as described herein. The luciferase assay revealed dose-responsive luciferase activity from cell lysates, indicating successful delivery of RNA to the cells and expression of Firefly luciferase from the mRNA cargo.

### Example 36: LNP-Mediated Delivery of RNA to the Mouse Liver

[1099] To measure the effectiveness of LNP-mediated delivery of firefly luciferase containing particles to the liver, LNPs were formulated and characterized as described herein and tested in vitro prior to administration to mice. C57BL6 male mice (Charles River Labs) at approximately 8 weeks of age were dosed with LNPs via intravenous (i.v.) route at 1 mg/kg. Vehicle control animals were dosed i.v. with 300 μL phosphate buffered saline. Mice were injected via intraperitoneal route with dexamethasone at 5 mg/kg 30 minutes prior to injection of LNPs. Tissues were collected at necropsy at or 6, 24, 48 hours after LNP administration with a group size of 5 mice per time point. Liver and other tissue samples were collected, snap-frozen in liquid nitrogen, and stored at −80° C. until analysis.

[1100] Frozen liver samples were pulverized on dry ice and transferred to homogenization tubes containing lysing matrix D beads (MP Biomedical). Ice-cold 1× luciferase cell culture lysis reagent (CCLR) (Promega) was added to each tube and the samples were homogenized in a Fast Prep-24 5G Homogenizer (MP Biomedical) at 6 m/s for 40 seconds. The samples were transferred to a clean microcentrifuge tube and clarified by centrifugation. Prior to luciferase activity assay, the protein concentration of liver homogenates was determined for each sample using the Pierce™ BCA Protein Assay Kit (ThermoFisher Scientific) according to the manufacturer's instructions. Luciferase activity was measured with 200 pg (total protein) of liver homogenate using the luciferase assay reagent (Promega) according to manufacturer's instructions using an i3X SpectraMax plate reader (Molecular Devices). Liver samples revealed successful delivery of mRNA by all lipid formulations, with reporter activity following the ranking LIPIDV005>LIPIDV004>LIPIDV003 (FIG. 2). As shown in FIG. 2, Firefly luciferase mRNA-containing LNPs were formulated and delivered to mice by iv, and liver samples were harvested and assayed for luciferase activity at 6, 24, and 48 hours post administration. Reporter activity by the various formulations followed the ranking LIPIDV005>LIPIDV004>LIPIDV003. RNA expression was transient and enzyme levels returned near vehicle background by 48 hours. Post-administration. This assay validated the use of these ionizable lipids and their respective formulations for RNA systems for delivery to the liver.

[1101] Without wishing to be limited by example, the lipids and formulations described in this example are support the efficacy for the in vivo delivery of other RNA molecules beyond a reporter mRNA. All-RNA Gene Writing systems can be delivered by the formulations described herein. For example, all-RNA systems employing a Gene Writer polypeptide mRNA, Template RNA, and an optional second-nick gRNA are described for editing the genome in vitro by nucleofection, by using modified nucleotides, by lipofection, and for editing cells, e.g., primary T cells. As described in this application, these all-RNA systems have many unique advantages in cellular immunogenicity and toxicity, which is of importance when dealing with more sensitive primary cells, especially immune cells, e.g., T cells, as opposed to immortalized cell culture cell lines. Further, it is contemplated that these all RNA systems could be targeted to alternate tissues and cell types using novel lipid delivery systems as referenced herein, e.g., for delivery to the liver, the lungs, muscle, immune cells, and others, given the function of Gene Writing systems has been validated in multiple cell types in vitro here, and the function of other RNA systems delivered with targeted LNPs is known in the art. The in vivo delivery of Gene Writing systems has potential for great impact in many therapeutic areas, e.g., correcting pathogenic mutations), instilling protective variants, and enhancing cells endogenous to the body, e.g., T cells. Given an appropriate formulation, all-RNA Gene Writing is conceived to enable the manufacture of cell-based therapies in situ in the patient.

### Example 37: Identification of attB and attP Attachment Sites for Exemplary Serine Integrases

[1102] Putative attB and attP attachment sites were predicted by modeling the biology of phage/host recombinase driven integration. These two DNA sequences are recognized by the serine recombinase enzyme multimeric complex, where attB represents the target integration site on the host and attP represents the donor strand integration cleavage site. To predict these sequence, viral/phage genomes were mapped to their host prokaryote genomes through their respective serine recombinase protein sequences. In any case where a match was found between the serine recombinase in the virus and the host, the recombinase DNA sequence was then used as an anchor for an alignment. Starting with the aligned recombinases, the sequences 5′ and 3′ from the serine recombinase sequence in both virus and host DNA sequences were compared in the pre-integrated viral sequence relative to the post-integrated viral sequence in the prokaryotic host. This process was continued until the sequences ceased to match, thereby mapping the viral genome onto the prokaryotic host. The junctions between the virus and the host were then used to predict a putative host target sequence left and right half attachment sites, attB left (attBL) and attB right (attBR). Also predicted were the viral attachment sites, attP left (attPL) and attP right (attPR). This data is shown in Table 26 below.

TABLE 26

| | | SEQ ID | | SEQ ID | | SEQ ID | | SEQ ID |
|---|---|---|---|---|---|---|---|---|
| FL58Accession | attBL | NO | attBR | NO | attPL | NO | attPR | NO |
| MF172979.1:: | TTACATCTTCAAGCTC | 38784 | AAATGATGGGACGA | 38827 | TGGAAGAAATGACG | 38870 | TGGAATTCAAGTTA | 38913 |
| ASD51140.1 | ACTTGCAAC | | AGCTATTATGC | | CGTCTGTAAA | | AATATCCTACA | |
| YP_006906969.1 | CGCGGTCGCGCCGCG | 38785 | GGGGTCCGGCAGGA | 38828 | ACCCACGTCAGTGGA | 38871 | GCGAGTCCTTTAGA | 38914 |
| | TGCGGTCGTT | | ACAGCCGCCAG | | TCTAAAGGA | | GACACTGACCC | |
| KU517658.1:: | GCTACATAGTCGCCA | 38786 | CTGCAGTGGCAGCA | 38829 | AAATGCTCGGTACAT | 38872 | TCTTTAATGTAGCGC | 38915 |
| AMB17413.1 | GTACCTCCCT | | AAATCAATGTT | | GAAAAAGCG | | CCAAATGCT | |
| MK448719.1:: | TCAGGTAGTGAACCG | 38787 | TCCTCATCACTCTTTA | 38830 | TTAGTCTTTTTGGTAG | 38873 | GTGGTCAGGAAATT | 38916 |
| QBX16516.1 | TTTTTTGTTG | | TTTTTTGAA | | AAGGAACA | | ATCATTTGAT | |
| MK448825.1:: | AATTAGTAGTGAACC | 38788 | AAGACAAGATGTGTC | 38831 | CTAGTCTTTCTGATA | 38874 | AAAATGGTGTTCGG | 38917 |
| QBX22171.1 | GTTTTTTGTG | | AATTCGGCAC | | GAATGAGCA | | ATTGATTTATA | |
| MF172979.1:: | TTACATCTTCAAGCTC | 38789 | AAATGATGGGACGA | 38832 | TGGAAGAAATGACG | 38875 | TGGAATTCAAGTTA | 38918 |
| ASD51126.1 | ACTTGCAAC | | AGCTATTATGC | | CGTCTGTAAA | | AATATCCTACA | |
| MK448846.1:: | TCTCGTATTGAGGTG | 38790 | TTATGTGTGCGTTGC | 38833 | CTAGTCTTTTTGATAG | 38876 | TTTCGAAACTCTTAG | 38919 |
| QBX23238.1 | GCGATTTTTT | | CTAAAAAATG | | AAAAAGCA | | GTAGAGTGTA | |
| MK448720.1:: | AGAATTATATAATAAT | 38791 | TCTGGCTGTTTTTTAT | 38834 | CTAGTTAATTTCAAA | 38877 | AAAACGGTCAGGTT | 38920 |
| QBX16591.1 | ACCCATGGT | | GAATGGAAT | | ATATCTCAA | | ATCGAAATATA | |
| MG711462.1:: | TATAAACAACATAGA | 38792 | TGCTATATCTGCTATT | 38835 | TTGTGCATTGTACAC | 38878 | AAAACTTACGTTTTT | 38921 |
| AUV56418.1 | GCGGTCAATA | | CTGTTACGC | | CTTGATAAC | | CAGGTGGCTT | |
| MG711466.1:: | GCTTTTTGAAAAAAC | 38793 | CCCCATTCAAGCGCG | 38836 | ATGATCTATACCGTA | 38879 | AGAATCGAACTCAC | 38922 |
| AUV56714.1 | GGAGGTTTCA | | CTACCAAAAC | | GGCGAAATG | | GGCCTCTTGA | |
| MK448934.1:: | CAAATTTATCAGATTT | 38794 | ATGGCTTTTTTGTGA | 38837 | TTAATCCCCCTTAACA | 38880 | AACGAACAAGTCAT | 38923 |
| QBX27918.1 | TTTTGACAT | | TTAGCAAAAG | | GTTTCCAT | | ATCTATGTGA | |
| MF595878.1:: | ATTCACAAATGATCG | 38795 | GAGCGTTTTTGTTTT | 38838 | AATGGAATATCATCT | 38881 | AAATCCTTTATAAAT | 38924 |
| ATB52753.1 | GGAGGGGAAG | | GCAAAGGGTA | | GAAATCTCG | | TCAAGGTTTA | |
| KM983329.1:: | TCTGTACCTAAAACAT | 38796 | CTATTCCTATTGGAT | 38839 | TATTTCATTACCTCTT | 38882 | TAGGGTATTTCATTG | 38925 |
| AJA42614.1 | CCATTAAAG | | CTTGAAGATA | | ACATGTTA | | CCTTCTTTA | |
| MK448705.1:: | CTATGTCAACGACTTA | 38797 | AGGATTTTAGTGTCA | 38840 | TTATAAATTTTTTTCA | 38883 | ATATCAAAATTATTT | 38926 |
| QBX15858.1 | CTCAAACTT | | TTGATTCAAT | | CGTTCGGA | | TTGATTTTTA | |
| MK448873.1:: | CGCCCTCTTTACCAAT | 38798 | AGGATTTTAGTGCCA | 38841 | TTATCGTTTCCTAGTC | 38884 | ATATCAAAATTATTT | 38927 |
| QBX24735.1 | TATTCAGCG | | TTGATTCAAT | | GGGTATTT | | TTGATTTTTA | |
| MK448940.1:: | TCTTATGAAAAAGGA | 38799 | AGAAATTTACTATCC | 38842 | CTAAACTGGTTTTTTA | 38885 | ACATTGCTATCAAGT | 38928 |
| QBX28214.1 | GCTTGTCCTT | | TACATTTCAA | | GAGATTGT | | GGAAGATATA | |
| KT337339.1:: | AAAAGCACGCTGATA | 38800 | TTCGCTCACAATAAG | 38843 | CACCAACATCTCAAT | 38886 | CTTACCGAATGCAAC | 38929 |
| ALA47468.1 | ATCAGCAAGA | | AGAGAACTT | | CAAGGATAG | | ACGAGATCAC | |
| MK448714.1:: | TTTATCCGCATTTTCC | 38801 | GCGCAAAAAACAAA | 38844 | TTATTTAAATGTACCC | 38887 | ATATCGAGATCAAG | 38930 |
| QBX16272.1 | GATGCGTTT | | CAAATTTAGAT | | CAAGCGTC | | TGGAGAATTTG | |
| MK448874.1:: | ATATAACAAAAGCGA | 38802 | CAAATTTAGTATCAT | 38845 | AAATGAAAAATCCTT | 38888 | GTATCAAAATTTTAT | 38931 |
| QBX24736.1 | GCGAGGTAGT | | TCATTTCCAC | | TCAAATACG | | GGAAAATTTA | |
| MK448927.1:: | AGATACTCTTTCCAAC | 38803 | AGTGTTTAACTTACA | 38846 | TTACATTTCCTCAGCA | 38889 | ACATGGAAATTTTAT | 38932 |
| QBX27562.1 | CTATTTGTT | | CTTATCTCTA | | TCAATAAG | | TTAAAAAATA | |
| CP019719.1:: | AGTTCTTGGGGAATC | 38804 | GGACATCCTTTGATC | 38847 | CTCCTCATGCATATG | 38890 | TCGTATCAATGGATC | 38933 |
| QHZ54073.1 | AAATGAAGAG | | GCGTATACCG | | ATAAGTAAT | | CTCATGCAT | |
| MK448715.1:: | ATTTTATCAGAGTTTC | 38805 | CCCTGTTTTGCTACC | 38848 | TTATGATAGTTCGCC | 38891 | GCATTGATATTTTTT | 38934 |
| QBX16366.1 | CGCTCTGTT | | GAGTATTAAG | | CCAAAGGTC | | TCAATTTTTA | |
| MK448826.1:: | GTATATTTAAAGTCTA | 38806 | ATGTATCAAGTGAAC | 38849 | AATTATTCATATTTGC | 38892 | GAATTGATATATTTT | 38935 |
| QBX22213.1 | TTTAAACAG | | ACTATTAATA | | CATTTAAA | | TGAATTTTTA | |
| MK448844.1:: | AACACCAGTCTTTCGA | 38807 | CGGTATTGTATCAAG | 38850 | TCAAAATGTATCAAA | 38893 | GCATAGATTTAATGC | 38936 |
| QBX23130.1 | CTGGTGCAA | | TTAATCAGAA | | GTCGTCCGA | | TAGATATATA | |
| MK448875.1:: | TAATATCAACGACTTA | 38808 | AATTACAGTATTTAG | 38851 | TTATAAATTTTTTTCA | 38894 | AAATCAACGTTATTT | 38937 |
| QBX24786.1 | CACAAACTT | | GAGCACCTAC | | CGTTCGGA | | TTAAATTGTA | |
| MK448898.1:: | AGACGGTCAACAGAC | 38809 | AATTACTGTATTTAG | 38852 | TTAAGCTTGTAATTTC | 38895 | AAATCAACGTTATTT | 38938 |
| QBX26003.1 | CGCCTTTTAT | | GAGCACCGAC | | ATTTCAAG | | TTAAATTGTA | |
| MK448672.1:: | AAAGATAAAACAAAA | 38810 | AGCATTATTTAGGTA | 38853 | AAATGAAAATCAACG | 38896 | ATCGATATTATTTTT | 38939 |
| QBX14038.1 | GAGGTAAAAC | | CTACAACTAG | | TAACAAGCT | | AAGTTTTAA | |
| JX507079.1:: | CCCCAGAGAGACGGG | 38811 | AGGCGGCGGGAATC | 38854 | TAAATGGTGGCGGA | 38897 | AAGGGTTGGCCTTG | 38940 |
| AFU62848.1 | TTTGTCTTTT | | GAACCCGCGTC | | ACACGGAACC | | GGTAAATGGTG | |
| KX077896.1:: | AGTGGTCCAAAAATA | 38812 | CGCATATCTCCTTAA | 38855 | TATGTTAAAGAAAAA | 38898 | GTTTGATAGGTTTCT | 38941 |
| ANM47644.1 | GAAAGTAGAA | | AAATTTTTTC | | CGATATTGT | | TGATAAGTCA | |
| MK448674.1:: | CTCAATTGTGAGGTG | 38813 | AGTAGACGAAAGGC | 38856 | CTAATCTTTCTGATAG | 38899 | TAGAGGGGACTGAG | 38942 |
| QBX14111.1 | GCGATTTTTT | | TGTAACAAAAG | | AATAAGCA | | GTAGAATTATA | |
| MK448741.1:: | CTCAATTGTGAGGTG | 38814 | GTGACTGTGACTGAA | 38857 | CTAATCTTTCTGATAG | 38900 | TAGAGGGGACAGA | 38943 |
| QBX17591.1 | GCGATTTTTT | | AGGTTGCAGT | | AATATGCA | | GGTAGACTTGTA | |
| MK448752.1:: | CCTTGAAGATGCGAA | 38815 | AAAAGACAAAGTCA | 38858 | ATGACAGATAAACAA | 38901 | AAAATTGAAAAACT | 38944 |
| QBX18231.1 | AGGACTCTAG | | GTATAGACTTT | | CACGCTCTC | | AGTTCATTAA | |
| MK448811.1:: | CCTCAATTGCGAGGT | 38816 | GCACTGATATTTTGG | 38859 | GCTAATCTTTCTGATA | 38902 | GAAGAATGGTGACC | 38945 |
| QBX21447.1 | GGCGATTTTT | | AAAGAACTTA | | GAATAAGC | | GGTCATAATTA | |
| MK448935.1:: | ATCTCAATTGAGGTG | 38817 | GAGACTGCGACCGA | 38860 | TCAGTCTTTTTGATAG | 38903 | TCGAAGGAACAGAA | 38946 |
| QBX27959.1 | GCGATTTTTT | | AAGGTTGCGTT | | AAGAAACA | | GTTGACTTATA | |
| MK448994.1:: | TCAATTTCTGAGGTG | 38818 | GGAATTATTCTCCTTT | 38861 | CTAATCTTTCTGATAG | 38904 | ATGTCCTGGTCACTT | 38947 |
| QBX31154.1 | GCGATTTTTT | | CGAATAAGA | | AATAAGCA | | AAATTCTTCA | |
| MK448999.1:: | CATCTCAATTGAGGT | 38819 | GATACTGCGACCGAA | 38862 | GTCAGTCTTTTTGATA | 38905 | TGGAAGGAACAGAA | 38948 |
| QBX31462.1 | GGCGATTTTT | | AGGTTGCGGT | | GAAGAGAC | | GTCGACCTGTA | |
| MN270275.1:: | TTATCTTGGACTATTT | 38820 | CGCATATCTCCTTAA | 38863 | ATATGAACCCTTTCTA | 38906 | GTTTGATAGGTTTCT | 38949 |
| QGJ86433.1 | TCTTAGCC | | AAATTTTTTC | | ATGTGAGT | | TGATAAGTCA | |
| MN270276.1:: | GTGGTCCCAAAATAG | 38821 | TTTTGAGAAGTCATC | 38864 | ATGTTAAAGAAAAAC | 38907 | GTGTGAGAAGTGAA | 38950 |
| QGJ86497.1 | AAAGTAGAAT | | AAAGTAGTAA | | GATATTGTC | | GTTGGGGAATG | |
| MK448713.1:: | CTCAATTACGAGGTG | 38822 | TAAGTTAAGAAAAAA | 38865 | CTAGTCTTTTTGATAG | 38908 | ATTGTGAGTTAGTG | 38951 |
| QBX16269.1 | GCGATTTTTT | | ATGAAACTCA | | AAAAAGCA | | GGTACGGATTA | |
| MK448846.1:: | TCTCGTATTGAGGTG | 38823 | TTATGTGTGCGTTGC | 38866 | CTAGTCTTTTTGATAG | 38909 | TTTCGAAACTCTTAG | 38952 |
| QBX23239.1 | GCGATTTTTT | | CTAAAAAATG | | AAAAAGCA | | GTAGAGTGTA | |
| MK448719.1:: | TCAGGTAGTGAACCG | 38824 | TCCTCATCACTCTTTA | 38867 | TTAGTCTTTTTGGTAG | 38910 | GTGGTCAGGAAATT | 38953 |
| QBX16517.1 | TTTTTTGTTG | | TTTTTTGAA | | AAGGAACA | | ATCATTTGAT | |
| MK448666.1:: | ATTGGGTAGTGAACC | 38825 | CTTTAAAAATGGCTT | 38868 | CTAGTCCTTCTGATA | 38911 | AAGAAGATAAGAAA | 38954 |
| QBX13693.1 | GTTTTTTGTG | | ACGGATTGAT | | GAAGAGGCA | | ATCAGCCTAA | |
| MK448825.1:: | AATTAGTAGTGAACC | 38826 | AAGACAAGATGTGTC | 38869 | CTAGTCTTTCTGATA | 38912 | AAAATGGTGTTCGG | 38955 |
| QBX22172.1 | GTTTTTTGTG | | AATTCGGCAC | | GAATGAGCA | | ATTGATTTATA | |

The application's sequence listing, which the Patent Office published only in electronic form, follows.

SEQUENCE LISTING (39022 sequences)

SEQ ID NO: 1 - protein, 2445 aa, Unknown
  Description of Unknown: Integrase B2 sequence
  G3DSA:1.20.120.20,IPR036162,PS51737,IPR011109,TIGR01760,PF00239, G3DSA:1.10.10.2600,IPR006119,IPR016024,IPR010090,PF10145, SSF53041,cd00338,SSF48371,SM00857,IPR038109,PTHR37813, mobidb-lite,G3DSA:3.40.50.1390,PF07508,Coil
MASRIQGITVEIGGDTTKLSKALESVNKSIKGTQSGLKDVNKLLKLDPSNTELVVQKQKMLKDAIEATKEKLATLKTAAQQANEQLANGEITQQQYDALQREIVETEQNLRSLQDQAATTNATLAKIDEAGEKLQNIGSSVENVGKKFLPVTAAVTGLGTAAVKTAADFDSEMSKVSAISGATGDDFDQLRAKAREMGAKTKFSASEAASAMEYMAMAGWKTSDMLNGIEGVMNLAAASGEDLATTSDIVTDALTAFGLSAADSGHFADILAAASSNANTNVSMMGETFKYCAPIAGALGFSAEDTAEAIGLMANSGIKASQAGTSLRTIMNNLSGEVTFAGKNIGEVTIATSNADGSMRSLNDILADCRVAFSGLTESEKASNAEALVGKNAMSGFLALMNSSETDINKLRGAIENCDGASESMAETMQDNLNGQLTILKSQLEELAISFGDILMPTIRKIVSAVQQFVDKLNSMDEGTRETIIKIGLLAASIGPLLIVLGKTISTVGTAMRGFSSLAKGVRLLITHVGSASGVFSKLGVVLGGLSGPVVAVVAVIGTLVAAFMNLWNTNEEFRTAITGIWNDIVSKVKGFCDQLTQRINGLGFDFKDVTEVLKAVWDGLCQVLAPLFEGAFQNISTILGVVLDTLLGLFDVFSNVFSGNWSGAWEAVKGIFSSIWDGVKSVFSTTLTALKSALDVFLGLFGTDWQTVWGSIKSFFETVWSGISSFFSNTVSAIQSVATTVFTAVSSFFTTVLTSIQTTFSTIWTAISTAVSSVLNTIHTTVTTVWTAISTAISTVMNTISTTITSVWNGIYNTMKPLLDAFKYLFETIWQAIQILIGAALTAIQTKITSIWNAIVAFVTPILTGLQTTFSTVWSAIQTAISTVLTAIQTAVTTVWNAIVSFLSPLLTGIQTRMSTAWNAIKTVISTVLSAIQSTVSSIWSAISSKISGVVNGIKSVVSSGWNAMKSTVSSLSNSIKSAATTAFNSMKSGISSTISGIKSTITNGFNSAVSFIKGLAGQAFSWGSDMIGNIVSGIQSRIQDVASAVSGVADRIRSFLHFSVPDEGPLADMESWMPDFMQGLANGITTNTSLVTAAAENLSTTLSTSITNSMRGVEQAYSKSWAAISQTVKTGTAGVSAAMRSAWSSITTSTTSTWNSIKTTIQTSFAAVKSNVTSATAAVKSSMTSAWSAVKSLTTTSWNGIKSVITTAWNGIKSLTTSATASVKSSMTSAWNAVKTLTNTSWNGIKTVITTAWNSIKSLTTSSVSAVRSTATSGWNTLKSTTTSAFNSIKSTVSSAMSSLRSTVSSGVASIRSSFNSLGSIASSAYRWGADICSQMAAGVRAAAGSVIAAAENVASRVRSLLHFSVPDEGPLSDADTYMPDFMKLLATGIKKNVKSVVKAVQGLAGSMSNNLTTPVDSLGDWMDSVVGSFATTIKKSQSGIGSAARDVGSGIQSQLMSGLSGVKTQFQQLWTDLQGITKAAVGNMSDEVKQGFADMKTSIGELSSQTSSLGNAIRSLGDTFNSDFLKSLGNGISKVGDTVNTVTGLVDKLGSMKNTIGNLGSTMQNLGNVLGTENGGGLLSNIGSFLSKIGSADGGQIVSNFGNLISGLTSKMGGLGEGITGIISKLGSLSSSGGGILSNLGGLLSGVVTKIGGLGGSLSGLLSGVGSTLGGIAGSAGSAIAGLFGSVGTAVSGLAAGAGTALAGVASSAGGFLASAGTALAGLAGPAGIAVAAVGGIGLGLTALWKNCDGFREGVTNIWNKVTSVFSNGVNGKLDYIVTKSISRFARNTIDSLTCTRELRQLKPPVGIYFEKENIDTLDAKGELILTILSALAQDESRSISDNIRWSIQKKFQSGVPHINLKRMLGYELGANKQWVIVPEQAEIIRYIFDRFVKGQTANKIALELNQMEKFTVNGKKWSASSILIVLRNEKYVGDIEMQKTITKDFLTHRSSINKGEAPRYYVKNHHVGIIDRVTWDKVQTMLFEKPRADMTKGPGKKKVKSIKGSPFGNLRCGAILENGPDAGKPCGEGFFRTTYTGVANGYSDERSLKATGEDTGEYLEKYTYSYPVWRCKRKVGERDGEPPKNGSPDQKAYCRSKKGCMSDEEKEAANKRCPSERYHECALEQSFMELLYSMKRDFEQHGDASMIVAMFDNAYEQAVRLANNNSISVQRMATVENQIKEMEERLQDAISHQVAALREAALEQNVELNEALSNGEVTIDDIDLDIRSGLTPGSIGVSFYGTETEEGSEAQIYTELVNDLQERLKTLQQERQTIEEEQGVLAIMKKNFEYFLACLKELPDTNAGGMPLRVNGLDVQGTLLRDVDGNAIEGRKRAITSGKLKLTPERIAEAPDMLHFEKGIYCAFVESGVLQGDVATYKTNFGVTLTSKGNRRTLDSFMGYKRSDMDGNVVYVDAPYKVYGFSIQYRRYLTTAAKREREEAV

SEQ ID NO: 2 - protein, 1198 aa, Unknown
  Description of Unknown: Integrase B3 sequence
  PTHR30461:SF3,SM00857,G3DSA:1.10.10.2600,IPR036162,PF13408, PS51737,IPR025827,G3DSA:3.40.50.1390,IPR006119,IPR038109, PF07508,IPR011109,SSF53041,PF00239,PTHR30461, PS51736,Coil,cd00338
MRVSVNLNAQKPDTTTNAVIYARYSSHGQTEQSIEGQLAKGHEYAAAQGYTVVHEYIDRAMTGRNDNREAFQKMLSDTGKHQFQVVIVWKVDRFGRNREEIAFNKHTCKKNGVRVEYVAESLPNSPEAVILESVLEGMAEYYSIQLSQNIRRGQLESAKKCQCVGGSVPLGYTLDSDKHFVIDPQTAPVVKKIFDLYAEGATISEITGQLNEQGIRTARKQLFTKNSLTKLLKNEKYIGVYTYKDIVRVEGGVPAIVDESTFDRVQELLKINRRAPSHTWTKVEYLLTDKLFCGHCGSPMVGESGFSHTGAKYSYYGCIKRRREKACDKKPVRQDWIEALVLDETVKLLHDDELMEYIIDRTWEYYQVTDKVQEEKAVLEAQLAEVDKAINNLVRAIEAGIFNAATKSRMDELDAQKAALTASLADLELTSGIRITRDHIEYFLLRLRDLDVKDRECQKRLVQTFVNAVFIYDDGRVKITYNYSGQSSTITLNQIASAEKGKGFVCCLPCSTSSPRFPRGVAAFFVFWEKRLRINYQFQLFCAIMEAKTAEGERKMKKLLAVCLMALVCWVCAGYAEETRVGDTVIFGQYEQDGNLDNGSEPIAWLVLDVQGGKALLMSRYALDCLPFHDEKTDAAWNQSALNAWLQADFHAAFTDAEWAAIAPVTLADTAADGNPEWQNTDAEPAETHVFLFSYAQVMQYLPEQEQRKVSGTEYARSRGAKFLGFTTIGIGETDWWLRSPGKASYDACFLDVRGAVGTKCVTEKLGVRPALWMDLSADRNAFPYEQQVQAKQFAEQGDYAEATALLDTLGDYAGSVALAKEYRYQQAQAEAASGNYDAAIALYTELAGYADSDALCRASRYEKAVAAQEAGDYAGAMALLADAGQYADSMARLRECCKQQGISIYYFSEDAVNAGVDTGYAKQDTISGDDKHFGWRLGRFFLTGFTRVTADENQQPVFIKTLGDSVTLWFDLEQNIDALNGNAQLSLAADANGYDQQFGIPKTNFGRGTLIVRHTDYQNAKNEPAVYTDYLLAKGTTGANTRIVLHEEGDYEVALDYEVQDGELTHITSKFGNYRIFLRFSIRNGNCMVYPFDLLTGAELQNTSVAEAGFSLDLARSRYLDINVRRAVLVETANGVIEDERFNRPAKDGDRYTQEGIYTISVSNRYTGESTTKTIFVGSQELLETYVRNGFSLERLK

SEQ ID NO: 3 - protein, 1198 aa, Unknown
  Description of Unknown: Integrase B4 sequence
  PTHR30461:SF3,IPR036162,PS51737,IPR011109,PTHR30461, PF00239,G3DSA:1.10.10.2600,IPR006119,SSF48452,SSF53041, cd00338,SM00857,IPR011990,IPR025827,IPR038109, PS51736,PF13408,G3DSA:3.40.50.1390,PF07508,Coil
MRVSVNLNAQKPDTTTNAVIYARYSSHGQTEQSIEGQLAKGHEYAAAQGYTVVHEYIDRAMTGRNDNREAFQKMLSDTGKHQFQVVIVWKVDRFGRNREEIAFNKHTCKKNGVRVEYVAESLPNSPEAVILESVLEGMAEYYSIQLSQNIRRGQLESAKKCQCVGGSVPLGYTLDSDKHFVIDPQTAPVVKKIFDLYAEGATISEITGQLNEQGIRTARKQLFTKNSLTKLLKNEKYIGVYTYKDIVRVEGGVPAIVDESTFDRVQELLKINRRAPSHTWTKVEYLLTDKLFCGHCGSPMVGESGFSHTGAKYSYYGCIKRRREKACDKKPVRQDWIEALVLDETVKLLHDDELMEYIIDRTWEYYQVTDKVQEEKAVLEAQLAEVDKAINNLVRAIEAGIFNAATKSRMDELDAQKAALTASLADLELTSGIRITRDHIEYFLLRLRDLDVKDRECQKRLVQTFVNAVFIYDDGRVKITYNYSGQSSTITLNQIASAEKGKGFVCCLPCSTLTAISGRKSRHFLFFGENRTQIYYQFQLYCAIMEAKTAEGERKMKKLLAVCLTALVCWVCAGYAEETQVGDTVMFGQYEQDGNLDNGSEPIAWQVLDVQGGKALLMSRYALDCLPFHDEKTDAVWNQSALNAWLQADFHAAFTDAEWAAIAPVTLADTAADGNPEWKNTDAEPAETHVFLLSYAQVMQYLPEQEQRKVSGTEYARSRGAKFLGFTTIGIGETDWWLRSPGKESYDACFLDVRGAVGTKCVTEKLGVRPALWMDLSADRNAFPYEQQVQAKQLAEQGDYAKATALLDTLGDYAGSAALAKEYRYQQAQAEAASGNYDAAIALYTELAGYADSDALCRASRYEKAVAAQEAGDYAGAMALFADAGQYADSMARLRECCKQQGISIYYFSQDAVNAGVDTGYAKQDTISGDDKHFGWRLGRFFLTGFTRVTADENQQPVFIKTLGDSVTLWFDLEQNIDALNGNAQLSLAADANGYDQQFGIPKTNFGRGTLIVRHTDYQNAKNEPAVYTDYLLAKGTTGANTRIVLHEEGDYEVALDYEVQDGELTHITSKFGNYRIFLRFSIRNGNCMVYPFDLLTGAELQNTSVAEAGFSLDLARSRYLDINVRRAVLVETANGVIEDERFNRPAKDGDRYTQEGIYTISVSNRYTGESTTKTIFVGSQELLETYVRNGFSLERLK

SEQ ID NO: 4 - protein, 1097 aa, Unknown
  Description of Unknown: Integrase B5 sequence
  PTHR30461:SF3,IPR036162,PS51737,IPR011109,PTHR30461, PF00239,G3DSA:1.10.10.2600,IPR006119,SSF48452,SSF53041, cd00338,SM00857,IPR011990,IPR025827,IPR038109, PS51736,PF13408,G3DSA:3.40.50.1390,PF07508,Coil
MRVSVNLNAQKPDTTTNAVIYARYSSHGQTEQSIEGQLAKGHEYAAAQGYTVVHEYIDRAMTGRNDNREAFQKMLSDTGKHQFQVVIVWKVDRFGRNREEIAFNKHTCKKNGVRVEYVAESLPNSPEAVILESVLEGMAEYYSIQLSQNIRRGQLESAKKCQCVGGSVPLGYTLDSDKHFVIDPQTAPVVKKIFDLYAEGATISEITGQLNEQGIRTARKQLFTKNSLTKLLKNEKYIGVYTYKDIVRVEGGVPAIVDESTFDKVQELLKINRRAPSHTWTKVEYLLTDKLFCGHCGSPMVGESGFSHTGAKYSYYGCIKRRREKACDKKPVRQDWIEALVLDETVKLLHDDELMEYIIDRTWEYYQVTDKVQEEKAVLEAQLAEVDKAINNLVRAIEAGIFNAATKSRMDELDAQKAALTASLADLELTSGIRITRDHIEYFLLRLRDLDVKDRECQKRLVQTFVNAVFIYDDGRVKITYNYSGQSSTITLNQIASAEKGKGFVCCLPCSTSSPRFPRGVAALFLFWGKSGVNRLPISAVLCNNGSEPLRGWCWMCRAAIAPVTLADTAADGNPEWQNTDAEPAETHVFLLSYAQVMQYLPEQEQRKVSGTEYARSRGAKFLGFTTIGIGETDWWLRSPGKESYDACFLDVRGAVGTKCVTEKLGVRPALWMNLSADRSAFPYEQQVQAKQFAEQGDYAEATALLDTLGDYAGSAALAKEYRYQRAQAEAASGNYDAAIALYTELAGYADSDALCRASRYEKAVAAQEAGNYAGAMALFADAGQYADSMARLRECCKQQGISIYYFSADAVNAGVDTGYAKQDTISGDDKHFGWRLGRFFLTGFTRVTADENQQPVFIKTLGDSVTLWFDLEQDIDALNGNAQLSLAADANGYDQQFGIPKTNFGRGTLIVRHTDYQNAKNEPAVYTDYLLAKGTTGANTRIVLHEEGDYEVALDYEVQDSELTHITSKFGNYRIFLRFSIRNGNCMVYPFDLLTGAELQNTSVAEAGFSLDLARSRYLDINVRRAVLVETANGVIEDERFNRPAKDGDRYTQEGIYTISVSNRYTGESTTKTIFVGSQELLETYVRNGFSLERLK

SEQ ID NO: 5 - protein, 1097 aa, Unknown
  Description of Unknown: Integrase B6 sequence
  PTHR30461:SF3,SM00857,G3DSA:1.10.10.2600,IPR036162,PF13408, PS51737,G3DSA:3.40.50.1390,IPR025827,IPR006119,IPR038109, PF07508,IPR011109,SSF53041,PF00239,PTHR30461, PS51736,Coil,cd00338
MRVSVNLNAQKPDTTTNAVIYARYSSHGQTEQSIEGQLAKGHEYAAAQGYTVVHEYIDRAMTGRNDNREAFQKMLSDTGKHQFQVVIVWKVDRFGRNREEIAFNKHTCKKNGVRVEYVAESLPNSPEAVILESVLEGMAEYYSIQLSQNIRRGQLESAKKCQCVGGSVPLGYTLDSDKHFVIDPQTAPVVKKIFDLYAEGATISEITGQLNEQGIRTIRKQLFTKNSLTKLLKNEKYIGVYTYKDIVRVEGGVPAIVDKSTFDRVQELLKINRRAPSHTWTKVEYLLTDKLFCGHCGSPMVGESGFSHTGAKYSYYGCIKRRREKACDKKPVRQDWIEALVLDETVKLLHDDELMEYIIDRTWEYYQVTDKVQEEKAVLEAQLAEVDKAINNLVRAIEAGIFNAATKSRMDELDAQKAALTTSLADLELTSGIRITRDHIEYFLLRLRDLDVKDRECQKRLVQTFVNAVFVYDDGRVKITYNYSGQSSTITLNQIASAEKGKGFVCCLPCSTFSPRFPRGVAALFCFLGKTAANQLPISAVLCNNGSEPLRGWCWMCRAAIAPVTLADTAADGNPEWQNTDAEPAETHVFLLSYAQVMQYLPEQEQRKVSGTEYARSRGAKFLGFTTIGIGETDWWLRSPGKESYDACFLDVRGAVGTKCVTEKLGVRPALWMDLSADRNAFPYEQQVQAKQFAEQGDYAEATALLDTLGDYAGSAALAKEYRYQQAQAEAASGNYDAAIARYTELAGYADSDALCRASRYEKAVAAQEAGDYAGAMALFADAGQYADSMARLRECCKQQGISIYYFSADAVNAGVDTGYAKQDTISGDDKHFGWRLGRFFLTGFTRVTADENQQPVFIKTLGDSVTLWFDLEQDIDALNGNAQLSLAADANGYDQQFGIPKTNFGRGTLIVRHTDYQNAKNEPAVYTDYLLAKGTTGANTRIVLHEEGDYEVALDYEVQDGELTHITSKFGNYRIFLRFSIRNGNCMVYPFDLLTGAELQNTAVAEAGFSLDLARSRYLDINVRRAVLVETANGVIEDERFNRPAKDGDRYTQEGIYTISVSNRYTGESTTKTIFVGSQELLETYVRNGFSLERLK

SEQ ID NO: 6 - protein, 1097 aa, Unknown
  Description of Unknown: Integrase B7 sequence
  PTHR30461:SF3,IPR036162,PS51737,IPR011109,PTHR30461, PF00239,G3DSA:1.10.10.2600,IPR006119,SSF48452,SSF53041, cd00338,SM00857,IPR011990,IPR025827,IPR038109, PS51736,PF13408,G3DSA:3.40.50.1390,PF07508,Coil
MRVSVNLNAQKPDTTTNAVIYARYSSHGQTEQSIEGQLAKGHEYAAAQGYTVVHEYIDRAMTGRNDNREAFQKMLSDTGKHQFQVIIVWKVDRFGRNREEIAFNKHTCKKNGVRVEYVAESLPNSPEAVILESVLEGMAEYYSIQLSQNIRRGQLESAKKCQCVGGSVPLGYTLDSDKHFVIDPQTAPVVKKIFDLYAEGATISEITGQLNEQGIRTIRKQLFTKNSLTKLLKNEKYIGVYTYKDIVRVEGGVPAIVDKSTFDRVQELLKINRRAPSHTWTKVEYLLTDKLFCGHCGSPMVGESGFSHTGAKYSYYGCIKRRREKACDKKPVRQDWIEALVLDETVKLLHDDELMEYIIDRTWEYYQVTDKVQEEKAVLEAQLAEVDKAINNLVRAIEAGIFNAATKSRMDELDAQKAALTASLADLELTSGIRITRDHIEYFLLRLRDLDIKDRECQKRLVQTFVNAVFVYDDGRVKITYNYSGKSSTITLNQIDGAEKGKGFVCCLPCSTSSPRFPRGVAALFCFLGKTAANQLPISAVLCNNSSEPLRGWCWMCRAAIAPVTLADTAADGNPEWQNTDAEPVEARVFLLSYAEAVRYFPEQEQRKVSGTEYARSRGAKFLGFTTIGIGETDWWLRSPGKESYDACFLDVRGAVGTKCVTEKLGVRPALWMDLSADRNAFPYEQQVQAKQFAEQGDYAEATALLDTLGDYAGSAALAKEYRYQQAQAEAASGNYDAAIALYTELAGYADSDALCRASRYEKAVAAQEAGDYAGAMALFADAGQYADSMARLRECCKQQGISIYYFSADAVNAGVDTGYANQDTISGDDKHFGWRLGRFFLTGFTRVTADENQQPVFIKTLGDSVTLWFDLEQDIDALNGNAQLSLAADANGYDQQFGIPKTNFGRGTLIVRHTDYQNAKNEPAVYTDYLLAKGTTGANTRIVLHEEGDYEVALDYEVQDSELTHITSKFGNYRIFLRFSIRNGNCMVYPFDLLTGAELQNTAVAEAGFSLDLARSRYLDINVRRAVLVETANGVIEDERFNRPAKDGDRYTQEGIYTISVSNRYTGESTTKTIFVGSQELLETYVRNGFSLERLK

SEQ ID NO: 7 - protein, 1097 aa, Unknown
  Description of Unknown: Integrase B8 sequence
  PTHR30461:SF3,IPR036162,PS51737,IPR011109,PTHR30461, PF00239,G3DSA:1.10.10.2600,IPR006119,SSF48452,SSF53041, cd00338,SM00857,IPR011990,IPR025827,IPR038109, PS51736,PF13408,G3DSA:3.40.50.1390,PF07508,Coil
MRVSVNLNAQKPDTTTNAVIYARYSSHGQTEQSIEGQLAKGHEYAAAQGYTVVHEYIDRAMTGRNDNREAFQKMLSDTGKHQFQVIIVWKVDRFGRNREEIAFNKHTCKKNGVRVEYVAESLPNSPEAVILESVLEGMAEYYSIQLSQNIRRGQLESAKKCQCVGGSVPLGYTLDSDKHFVIDPQTAPVVKKIFDLYAEGATISEITGQLNEQGIRTIRKQLFTKNSLTKLLKNEKYIGVYTYKDIVRVEGGVPAIVDKSTFDRVQELLKINRRAPSHTWTKVEYLLTDKLFCGHCGSPMVGESGFSHTGAKYSYYGCIKRRREKACDKKPVRQDWIEALVLDETVKLLHDDELMEYIIDRTWEYYQVTDKVQEEKAVLEAQLAEVDKAINNLVRAIEAGIFNAATKSRMDELDAQKAALTASLADLELTSGIRITRDHIEYFLLRLRDLDVKDRECQKRLVQTFVNAVFIYDDGRVKITYNYSGQSSTITLNQIASAEKGKGFVCCLPCSTSSPRFPRGVAALFCFLGKTAANQLPISAVLCNNSSEPLRGWCWMCRAAIAPVTLADTAADGNPEWQNTDAEPAETHVFLLSYAQVMQYLPEQEQRKVSGTEYARSRGAKFLGFTTIGIGETDWWLRSPGKESYDACFLDVRGVVGTKCVTEKLGVRPALWMDLYADRNAFPYEQQVQAKQFAEQGDYAEATALLDTLGDYAGSAALAKEYRYQQAQAEAASGNYDAAIALYTELAGYADSDALCRASRYEKAVAAQEAGDYAGAMALFADAGQYADSMARLRECCKQQGISIYYFSQDAVNAGVDTGYAKQDTISGDDKHFGWRLGRFFLTGFTRVTADENQQPVFIKTLGDSVTLWFDLEQDIDALNGNAQLSLAADANGYDQQFGIPKTNFGRGTLIVRHTDYQNAKNEPAVYTDYLLAKGTTGANTRIVLHEEGDYEVALDYEVQDGELTHITSKFGNYRIFLRFSIRNGNCMVYPFDLLTGAELQNTAVAEAGFSLDLARSRYLDINVRRAVLVETANGVIEDERFNRPAKDGDRYTQEGIYTISVSNRYTGESTTKTIFVGSQELLETYVRNGFSLERLK

SEQ ID NO: 8 - protein, 1035 aa, Unknown
  Description of Unknown: Integrase B9 sequence
  PTHR30461:SF3,IPR036162,PF01095,PS51737,IPR011109, IPR013830,PTHR30461,PF00239,IPR033131,PS00503, G3DSA:1.10.10.2600,IPR011050,IPR006119,SSF53041,IPR012334, cd00338,SM00857,G3DSA:3.40.50.1110,IPR025827,IPR038109,IPR036514,
  CONT. FROM ABOVE: SSF51126,IPR000070,PS51736,PF13472,cd01821, PF13408,IPR037459,G3DSA:3.40.50.1390,SSF52266,PF07508,G3DSA: 2.160.20.10,Coil
MRVSVNLNAQKPDTTTNAVIYARYSSHGQTEQSIEGQLAKGHEYAAAQGYTVVHEYIDRAMTGRNDNREAFQKMLSDTGKHQFQVVIVWKVDRFGRNREEIAFNKHTCKKNGVRVEYVAESLPNSPEAVILESVLEGMAEYYSIQLSQNIRRGQLESAKKCQCVGGSVPLGYTLDSDKHFVIDPQTAPVVKKIFDLYAEGATISEITGQLNEQGIRTARKQLFTKNSLTKLLKNEKYIGVYTYKDIVRVEGGVPAIVDESTFDRVQELLKINRRAPSHTWTKVEYLLTDKLFCGHCGSPMVGESGFSHTGAKYSYYGCIKRRREKACDKKPVRQDWIEALVLDETVKLLHDDELMEYIIDRTWEYYQVTDKVQEEKAVLEAQLAEVDKAINNLVRAIEAGIFNAATKSRMDELDAQKAALTASLADLELTSGIRITRDHIEYFLLRLRDLDVKDRECQKRLVQTFVNAVFIYDDGRVKITYNYSGQSSTITLNQIASAEKGKGFVCCLPCSLQAAIDAVPMSSRMPTILLLRMDEYHEKVIVNKDNIRIIGEARDRTVITNSGCAKDLDADGKEKGTFLSYTFLVTGNNVEVENLTIRNDAGDGSLVGQAVAVYAAGDRGVWRNVRMIAHQDTLFCGPTMPKVARDALPRLIPEGVTSVGDCPLTLNRQYFEDCYIQGDVDFIFGPYRCWFERCTLFMNKRGGLYTAANTPEQSPYGLVFHNCKLTGECAPGQAYLGRPWRAFARTVFLHCEMDEHVSPQGFQDWQGGAPVTERYAEYGTTGARADQSTRHPKQKRMTEADAAAYTIREVIGGYDNWHPQHRTPTWFLCGDSTMADYPANAAPMTGWGQALKRLVPENVFVENCAVCGRSSKSFVAEKRLNFVELCLRKGDKLFIQFGHNDEKPDVDRATDAHVTYPEYLGMYIDAARRQGAEPILLTPIARRRFDENGKLQHTHGEYPAVMRDLADYRGVRLLDMERASEKLLTALGSEGSKVLFNWQEHHLNYPDGVQDNTHLSDTGAVRMAQIALTLLEEAQ

SEQ ID NO: 9 - protein, 1034 aa, Unknown
  Description of Unknown: Integrase B10 sequence
  PTHR30461:SF3,IPR036162,PS51737,IPR011109,PTHR30461, IPR027417,PF00239,IPR002611,PF00665,G3DSA:1.10.10.2600, IPR006119,SSF53041,PF01695,cd00009,SSF52540, cd00338,PS50994,SM00857,IPR025827,IPR038109,PF13408,G3DSA:3.
  CONT. FROM ABOVE: 40.50.1390,IPR001584,G3DSA:3.40.50.300,PF07508, Coil
MYEEIKTACLYLRYSSSNQTEQSIEGQMHVCQDFCKRHNIRIVEMYIDRATSASKDIEKRVEFLKMIKDSEKGNFNAVIVYKLDRFARSRYDSATYKYRLKRNGVQLISATENITQDPEGIILESVLEGMAEFYSAELSQKINRGMRESAMKHNSIGGAIPLGYKTVDKKLVIDETTAPIVREAFQMYADGESVAEICRTFNNRGYKTSKGTRFGKSSFTKIFRNEKYIGVYKYHDYRAEDVIPPIIDKDLWDRVQVRVGKIKKAPARNKARHTYLLTGKLFCGHCGSAMNADGNSQGYLYYRCYGKKNLDKQCNKRNMEKNLIERLVAQDAMSFLTDEYIEKIATIACDRNKQEIESDSPIPVIRDRIRQVDVSLNNLLKAIETGSAPDMLVKRMGELETEKKDMEVQLKKEMAHQVYIDKEQVIFWLEKFREGDINDEEFCQTVIDLFVNSVTVWDEPDDKFKITIAYNLTSIPQKTYRLSKDGRLSDYASNTPGSSTQVTLQPQLRLSKVSYDTVQKRYRIGRSGITLIMKRYNESGLSLDDLRQMPASKVVDLIYPKANLRHKDIPLPDFGKIHEQMVQMGKHADLSFLWIDYKKEHPNGYQLAQFYKLYRDFMVDTYGTSKTSMPVERIPGEKMYIDWVGDQPELLLDTTTGELRKVHIFTTTLGFSSLVYAEIFLDEKLPHFIAGTVHALSYYGAVPKYLVPDNLRTAVTRHSKDELVLQSAFSDLETFYDTIILPPPPRKPKGKPTVENHVRFLETHLVEELKKDTYTSLEALNAAVKKIVADINQRPFQKKSDIRKSRMNGFEKYDKPRMNQLPGESYTLCDYKYFLKVPDNYHLEYDAHYYSVLYLRYPAADLDETIYRPERQLDTQTIERLSTCHWIEEGKNLIVTGSSASGKTYLINAFCVTAMKQSKSVKYIKANTLMSEMEQARIKSTNLDYLNKLTKLDLLVIDDFGLMDLALDKCRDLFEVLDTRDGRKSTVVISQFPVSTWFDMFADNTYADACLTRITDKHHTYRLEMNGINMRETE

SEQ ID NO: 10 - protein, 973 aa, Unknown
  Description of Unknown: Integrase B11 sequence
  PTHR30461:SF3,SM00857,G3DSA:1.10.10.2600,IPR036162,PF13408, PS51737,G3DSA:3.40.50.1390,IPR025827,PS51736,IPR006119, IPR038109,PF07508,IPR011109,SSF53041,PTHR30461, mobidb-lite,cd00338,PF00239
MAKYKQVVQEQIGVIYARYSSSGQRDESIEGQLRDCHAFAERYNIRIIEEYCDRAMTGTSDRRPEFQRMIRDSSKGQFNVVITWKNDRFARSRYDSAVYKAKLKQNGVRLLYAKESIPDGPEGIVLESVMEGFAEYYSANLSQNVRRGNYDSALKRQTLGQTVFGLRKGADKRFEIDPATGPVVQRIFKEYAAGQSAVSIYTALNEEGFRTLRGNPFNKNSIRKILQNEKYVGVYEYADIRDEHGIPAIVSRETFDRVQIMLEKHHRSPAAKKDAGGFLLTTKLFCGVCGEPMTGDCGTGKSGTVYSYYICNGRRAKKCKQERVSKEWIEDVVVAALAEVVNNDEMINAFADHFIAWQATQQKGSAVADLEQRIKQIDTAIRNTMSVIDSGLITESLKTHLLELEAEKTALADALAKKRLDTIELDRETVIWFLERFRTADQSDPGWRIYIVETFLQAVYLYDDGRLLLRLNYGGKNNEVSLKAVEETVAEGEQLSSMFEFRVPRRAISGSGGLTIHSSARLLFMPKKTRMMRLYFLLSPVFRYNHSRGIPQIRTRRKKIMRKCIRTAAALLLALALAAGLFGCSKLTPIVSGGDKPHTTEPAATGSQTDTEDTQNMENAEDTGEQDWAGEEESSDPAPVETDPPVWEGPETVVYLAPYDALAVEYGGYFYYVDRDDNLCRTTTDMTDYTLFCEAQIRGDVRIIGITDAGRMYLSSGGQSCYVDLAEGRDGMAADYGMVESQTFTGAALSIGIRALRGGWMYYTKSGENGLFRAKIGAVPEEENCIVFDKDIREAAVTGDYLIYTYNRGSRADLQVTLADDPDSLLLTIEGNGTYPTTMLAGTDDRSGTPLLLVSRYELIDRGAEYSVYDLSTLELATDSMLDSAKLQRLGYCFGKNGDEIVCFNNCLRFDPFGTFSDGSSQYYPNAYYTDDYLVSFFSITYAGNGWYFFADADQGGATHAIEEGGTELIPLV

SEQ ID NO: 11 - protein, 973 aa, Unknown
  Description of Unknown: Integrase B12 sequence
  PTHR30461:SF3,SM00857,G3DSA:1.10.10.2600,IPR036162,PF13408, IPR025827,PS51737,G3DSA:3.40.50.1390,PS51736,IPR006119, IPR038109,PF07508,IPR011109,SSF53041,PTHR30461, mobidb-lite,cd00338,PF00239
MQKSSNHLGSQVGVIYARYSSSGQRDESIEGQLRDCHAFAERYNIHIIEEYCDRAMTGTSDRRPEFQRMIRDSSKGQFNVVITWKNDRFARSRYDSAVYKAKLKQNGVRLLYAKESIPDGPEGIVLESVMEGFAEYYSANLSQNVKRGNYDSALKRQTLGQTVFGLRKGADKRFEVDPATGPVVQRIFREYAAGQSAVSIYTALNEEGFRTLRGNPFNKNSLRKILQNEKYVGVYEYADIRDEHGIPALVSRETFDRVQIMLEKHHRSPAAKKDAGGFLLTTKLFCGACGEPMTGDCGTGKSGTVYSYYICNGRRARKCKKERVSKEWIEDVVVAALAEVVNNDEMITSFADHFVAWQATQQTGSAVADLEQRIKQIDMAIKNTMSVIDSGLITESLKTHLLELEAEKTALADALAKKRLDTVELDRDTVIWFLERFRTADLSDPGWRIYIVETFLQAVYLYDDGRLLLRLNYGGKNNEVSLKAVEETVADGEQLSSMFEFRVPRRAISGSGGLTIHSSARLLFMPEKARMMRLYFLLSPVFRYNHSRGIPQIRTRRKKIMRKCIRTAAALLLALALAAGLFGCSIPAPIVSGGDKPHTTEPAATEPGTDTEDMQNTENAEGTGEQDWAGEEESSDPAPVETDPPVWEGPETVVYLAPYDALAVEYGGYFYYVDRDDNLCRTTTDMTDYTLFCEAQIRGDVRIIGITDAGRMYLSSGGQSCYVDLAEGRDGMAADYGMVESQTFTGAALSIGIRALRGGWMYYTKSGENGLFRAKIGAVPEEENCIVFDKDIREAAVTGDYLIYTYNRGSRADLQVTLADDPDSLLLTIEGNGTYPTTMLAGTDDRSGTPLLLVSRYELIDRGAEYSVYDLSTLELATDSMLDSAKLQRLGYCFGKNGDEIVCFNNCLRFDPIGTFSDGSYKYYPDAYYTDDYLVSFFSITYAGNGWYFFADADQGGATHAIEEGGTELIPLV

SEQ ID NO: 12 - protein, 882 aa, Unknown
  Description of Unknown: Integrase B13 sequence
  PTHR30461:SF3,cd00338,SM00857,G3DSA:1.10.10.2600,IPR036162, PF13408,PS51737,IPR025827,G3DSA:3.40.50.1390,IPR006119, IPR038109,PF07508,IPR011109,SSF53041,PTHR30461, PS51736,Coil,PF00239
MARKKNIAAGLDAVIYARYSSHNQREVSIEQQIAECTKHAAALGLRIVGTYEDRAISGKTDNRPRFQQMMRDAEKGKFQAVVAWKSNRIGRNMLQAMVNEAKLDDYGVKVFYAEEDFDDTAAGRFALRNMMNVNQFYSENMAEDITRGLYDNANKCMANGRQPLGYKRGADGKVMLDEPAAAVVREIFTRVAAGDLFVDIARDLNAKGIKTSKGAAWNKGSFQSICQNERYKGIYIYGDVRIVDGIPRIVSDELWYRVQEAMRMKKNPVGTRHRVGAEDYLLTGKLRCGHCGSYMTGVSGTSRNGELHYYYTCQKRRTEHACNKKNVRRDVIEPAIAQAIKMYCLTDDVIEWMADQTVQYWEKHDNDLQIEALEQQLAENKKATSNMLKAIEMGIITEATRSRMVELETENSKLTAQLSAAKRDVVKINREDLIDELHVLRSKDIQDREVQAELFKDFLVAAYIYDDNRLKLVFSFMGKDNSVEIPLETGEDPPDGEDSPDAKMFVLTPDCSTKKALYFVGSMVLFFFSAAKNGGLHCLACIVFRCFAGGSVQPPGHWCFGRSEGAGSADDLQHLIEHLFHLPHQRELGAGAVKVVVGSGGVEIVVALQIVGQKADAALQRHQLGTPGKALFLRRAHGSPGGGEIPLGEHLVQVQVKVDLALVGLVLGAVVGTGADGVAEIVGRQARHHGVKVNDTDTLSGGGIDQDVVDLGVVVGNTQRDLTGCQQIQQGVAILFPRMDEGDLRCNVLGTAQRIGGKGFFKVCIAVGRVVEACNGFVEGRGRIICQLILEFAQGLGNSAEVGLAAHLLQADGVLYKVVGTPRAALGIQMAGRTGQGGDHVQGLPCRVAACGKDLLPQMPGHAADILHQAHRVGKGVGVDAL

SEQ ID NO: 13 - protein, 875 aa, Unknown
  Description of Unknown: Integrase B14 sequence
  PTHR30461:SF3,cd00338,SM00857,G3DSA:1.10.10.2600,IPR036162, PF13408,IPR025827,PS51737,G3DSA:3.40.50.1390,IPR006119, IPR038109,PF07508,SSF53041,IPR011109,PTHR30461, PS51736,Coil,PF00239
MKKFPIDLSCLTEEEISQFQEDPYTLYNGDQNVAIYLRYSSTGQSDQSIEGQLRDCRTFCKANHYRIVAIYVDRATTARKDVEKRVHLMEMISDSAKQNWEYVIVWKLDRFARNRNDSAIMKMRLRKNGVKVLSATEHLTDSPESIILESVLEGMAEFFSAELSQKVTRGMRESALKCHSVGGHIPLGYKVENHKLVVDPDTAHIVQEAFSLYANGESVADICRKFNSAGYKTAKNTEFNRSSFKAMFRNTRYIGTYTYKDIIIENGIPAIIDKELFETVQRRLSKTATAPARGKAKVDYLLSGKLFCGHCGASMNGESGAGRHGKVYHYYSCYTKKRKLGCDKRPLKKDYIEGIVARDALNLLTNQLIDEIADMAIRQSEQDLINDTHIPQLTAQLSEVEKSITNITAAIEKGIASETLMNRLVQLEHEKKTINKEIKAEEKFVYRIDRDQIVFWLSQFKYGNIEDEDFRRRLIDLLVNSVTVWDEPDGYKITTAYNLTSCKTKTFRVEKNPAAEEATGFDFGESECNNRTNCHGKYKTVSNLSNKGREQDYNCHQDPNVSTAEQRAENLNQPLTDTKICVGGDLAQHDQRTDQRDHCPHGCFREAFINRNNGLLAVLAADQGADCTHKYPNPGVAHESKEITSGRFLRINGSDKNINYRNDNHGKAYNLITVEMIRGIAHGLYFIKIQRLQWLHVDPIHCLHQNRVNNQIDHGDGEHAKHPGAFIKRAAEGLHCRVDQSDGHNLRGLECKEEDTGGSNVNTKQSPLYKGIVFIVAANITNGFYQSEEQNVDGRATNKGCSDIGGKEQHYHRHNRTTMAKLAAQQLFSQNIHCTRIPQSQTQGTAEYQLNSKDGAQPFAQQTGNVIIPMEQSGK

SEQ ID NO: 14 - protein, 823 aa, Unknown
  Description of Unknown: Integrase B15 sequence
  PTHR30461:SF3,SM00857,G3DSA:1.10.10.2600,IPR036162,PF13408, IPR025827,G3DSA:3.40.50.1390,PS51737,IPR006119,IPR038109, PF07508,IPR011109,SSF53041,PTHR30461,Coil, PS51736,cd00338,PF00239
MKAAIYARFSSHNQREESIEGQVRACKRFAKEHGMTIVEIYADRSLSGLHADNRPEFQRMIQDSDHHRFEALIMWNLDRFSRDKYDTAVYKTRLKKNGVSLYYSDQSIPDTPEGIILESLLEGFAQYYSANLARNAKRGLQENARKCLWNGGCVPLGYLIDEHQRFVLEPIGAACVRMIFELYASGQSIKSIVCTLNEKGYKTVKGNRFRLGSIQGILRNRKYIGEYHASGITVPNGIPAIVDVQLFNDVQARLGVVASAKAHNKADIPYLLTTKVFCGHCRSPMIGESGTGKGGATYRYYKCSCRKNRKGTCDKKTEPKDWLEENVVRQTVKNVLRPEVIKEISENCAAALKADASDESLVQALKAQLAETDKALRNLLKAIEAGIISSTTRERMAELESQKSELEAQIAREQLRKPEITAEQISFWLESFLAGDIHDPKYQERIINALVRRVDVYDDGPEKQKLTIFYNITKNNRSFSKISISKCSDIECIALAIRLAAGERKERRDCLKDGTAAALAYVAYALYRAANGIASNYQPETGSRLADWLSGRLAKPFSDVPGLFVSVFFSRKFPQAGVYSCYALGVSAAVLFAALTLICAWIVLLSVDRKKTARLFGALYAGQALYLLMLMATYMFFFAEDEAQWLAEFDRYVSLPALLIALTACMALTWNESRMRTRSGAAMLAMTAALIPLDHPELMRETFITREAVVKTLWENSGTDSVVAFLRENMELSTMRRLYLMGDCRYIFLYEQLMPQAMVEEQRADSMEAMQKRLDEGRYDYAFVGNLEPDGFLAQGGLQANTLYAVVYDETGRATLERAASME

SEQ ID NO: 15 - protein, 820 aa, Unknown
  Description of Unknown: Integrase B16 sequence
  PTHR30461:SF3,IPR036162,PS51737,IPR003675,IPR011109, PTHR30461,PF02517,PF00239,G3DSA:1.10.10.2600,IPR006119, SSF53041,cd00338,SM00857,IPR025827,IPR038109, PF13408,G3DSA:3.40.50.1390,PF07508,Coil
MKKFKFPIDLSMLTEEEINQFREDPSTLFQGDTDVCLYLRFSSERQKEQSIEGQLRDCMAYCKRKNYRIVAIYVDRATTARKDVEKRVHFQEMITASVHQTWKLVIVWKLDRFARNREDSAVFKMRLRKNGVKVESATEGISKNPEGIILEAVLEGIAEYYSADLSQKITRGMRESALKCHSIGGHVPLGYKIEDHKLVINPDTAHIVQEAFELYANGETVADICRMFNAKGYRTAKGAEFNRNSFKSMFRNRRYIGVYRYKDFEKEGGVPAIIDKDLFETVQKRLSANAEAPARGKAKVDYLLAGKLFCGHCGGSMNGESGTSKTGAVHNYYTCYTRKRQHSCDKKPLRKEWIEQIVAQDAMELLTDDAIQEMADMAISQTEKDLQENTRIPELSERMKETESGIANITKAVEKGIASDALMSRLVELEKEKKNLLRLIAEEEKYVCKIDRDQIVYWLTKFKDGNIEDENFKRIIIDLMVNSVTVWDEPDGFRITTAYNLTSCKNKTFRIPSSSDKGFGFEGLESTISLAVILVKLRRAFCVDTLMFELDREVYCMKKVLSVSIKTIIFFVGWAICVSVIPIPDTASAVIWRFWAELIPLLSVIAITLIFWLADQKKIRLHLTGKPVYNIILGGVTGTIWLGASVGILSILGVVQIEGKNQIAMLWLWLLAAFLNTVMQEMLVRGYLYQMIKSNGSIAAAIIVSTGLFTFAHGGAFEAGILPVLNVITMSLFMTAVLEYTGSLIAPIVIHFLWNGVGAIILGGVSLAEDYPHLFDMTIHGNPILSGGSCKIEGSIIVLFMNLAFLIGFVAAKKRKDRNR

SEQ ID NO: 16 - protein, 819 aa, Unknown
  Description of Unknown: Integrase B17 sequence
  PTHR30461:SF3,IPR036162,cd06174,PS51737,IPR003675, IPR011109,PTHR30461,PF02517,PF00239,G3DSA:1.10.10.2600, IPR006119,SSF53041,cd00338,SM00857,IPR025827, IPR038109,PS51736,PF13408,G3DSA:3.40.50.1390,PF07508,Coil
MARKKKFAPNDNNLAIAYYRFSSHSQNDASIDQQRELAHDWADAHGFKIVQEYEDAAISGTTDARPGFQQMLSEVAKIRPHTLIMWKTDRLGRDKYVLAMAKKKIRDAGCEIHLLAEHIPTEGPEGVLIEGLMEAMAEYYSRQLSQNIQRGMDYNAQHALYNGHKLFGYDVDRSTKKYIPDPSTAPFVQWAFKEYASGRPLKAIAEEMNAQGLRTPRNAKFSVNMLNKMLKNRAYIGEYHHGDITVAGGMPVLVDEATFDRAQRRFAENKRKGSQRAHGMDDADAPRYWLTGKLYCGECGSTMQGVSGTSKTGRTYYYYYCSAQRRKECHLHKARKRDLEDMVLFALHNIVDDEENVTALALDAAEYYERNHNDAAYLEALEAKRREVEKSLANLVKVIERGVVSDTVTQRLAQLEEQKSALNDAIGTENVRVSLCEDRHSIQAYFDKFLHADVNDPEIRDQVFEYFVDKVYLYDDKLVVSMWFSEDDKQEITWRDWFSLDEYWTDESPFVKGGGVEFDCFPLGSTISLAVILVKLRRAFCVDTLMFELDREVYCMKKVLSVSIKTIIFFVGWAICVSVIPIPDTASAVIWRFWAELIPLLSVIAITLIFWLADQKKIRLHLTGKPVYNIILGGVTGTIWLGASVGILSILGVVQIEGKNQIAMLWLWLFAAFLNTVMQEMLVRGYLYQMIKSNSNIAAAIIVSTGLFTFAHGGAFEAGILPVLNVITMSLFMTAVLEYTGSLIAPIVIHFLWNGVGAIILGGVSLAEDYPHLFDMTIHGNPILSGGSCKIEGSIIVLFMNLAFLIGFVAAKKRKDRNR

SEQ ID NO: 17 - protein, 818 aa, Unknown
  Description of Unknown: Integrase B18 sequence
  PTHR30461:SF3,IPR007492,PF04397,IPR036162,PS50930, PS51737,IPR011109,PF00072,PTHR30461,PF00239, G3DSA:1.10.10.2600,PS50110,G3DSA:3.40.50.2300,IPR006119,SSF53041, SM00448,IPR011006,cd00338,SM00857,SSF52172,IPR001789,IPR025827,
  CONT. FROM ABOVE: cd00156,IPR038109,PS51736,PF13408, G3DSA:3.40.50.1390,PF07508,G3DSA:2.40.50.1020,SM00850,Coil
MARKKNIAAGLDAVIYARYSSHNQREVSIEQQIAECTKHAAALGLRIVGTYEDRAISGKTDNRPRFQQMMRDAEKGKFQAVVAWKSNRIGRNMLQAMVNEAKLDDYGVKVFYAEEDFDDTAAGRFALRNMMNVNQFYSENMAEDITRGLYDNANKCMANGRQPLGYKRGADGKVMLDEPAAAVVREIFTRVAAGDLFVDIARDLNAKGIKTSKGAAWNKGSFQSICQNERYKGIYIYGNVRIVDGIPRIVSDELWYRVQEAMRMKKNPVGTRHRVGAEDYLLTGKLRCGHCGSYMTGVSGTSRNGELHYYYTCQKRRTEHACNKKNVRRDVIEPAIAQAIKMYCLTDDVIEWMADQTVQYWEKHDNDLQIEALEQQLAENKKATSNMLKAIEMGIITEATRSRMVELETENSKLTAQLSAAKRDVVKINREDLIDELHILRSKDIHDREVQAELFKDFLVTAYIYDDNRLKLVFSFMGKDNSVEIPLETGEDPPDGEDPPDAKMFVLTPDCSTRSERHHTLCGAFFVLHCSRKTQKNFCPLPQPARNGLFCARMADHGRRNLCYNIKNREAEGTGGAAMNLQTAIVEDSKPDAERLKQLLKKAFENENISCSCFASGDEFLRAGWREGYQVVFLDICMEGTNGIETAQRLRAADPDLLIVFVTSSPEYVWDAFPVHPFDYLLKPYKEEKFEQLAGELRRVLCRQQPELEVRIARQIVRLPLTKIYYATAQNHYVRVVTDDGECRATANFAQVQEQLQTQPEFLVCNRGVIINMSKVLRFEGDCIEMLDGTHLPVRQKDKNSLLAQFTQYQFRGMQREF

SEQ ID NO: 18 - protein, 818 aa, Unknown
  Description of Unknown: Integrase B19 sequence
  PTHR30461:SF3,IPR007492,PF04397,IPR036162,PS50930, PS51737,IPR011109,PF00072,PTHR30461,PF00239, G3DSA:1.10.10.2600,PS50110,G3DSA:3.40.50.2300,IPR006119,SSF53041, SM00448,IPR011006,cd00338,SM00857,SSF52172,IPR001789,IPR025827
  CONT. FROM ABOVE: ,cd00156,IPR038109,PS51736,PF13408, G3DSA:3.40.50.1390,PF07508,G3DSA:2.40.50.1020,SM00850,Coil
MARKKNIAAGQNAVIYARYSSHNQREVSIEQQVRECMKHAAELGLHVVGTYEDRAISGKTDKRPNFQRMMRDAEKGKFQAVVAWKSNRIGRNMLQAMVNEAKLEDCGVKVFYAEEDFDDTAAGRFALRNMMNVNQFYSENMAEDITRGLYDNASKCMANGRQPLGYKRGEDGRVVLDEANAAVVREIFTRVAAGDLFVDIARDLNAQGIKTSKGANWNKGSFQSICQNERYRGIYIYGDVRVVDGIPRIVSDDLWYRVQEAMRMKKNPVGTRHRVGAEDYLLTGKLRCGHCGSYMTGVSGTSRNGELHYYYTCQKRRTEHACDKKNIRRDVIEPAVAQAIKMYCLTDDVIEWMADRTVEYWEKHDNDLQIEALEQQLAENKKATSNMLKAIEMGIITEATRTRMVELETEQSRLSVQLNAAKEDVVKIDREQIISYLELLQQGEIHDRDFQMELFKNFLVAVYVYDDNRMKLVFSCMGDQNSVEIPLETGEDPPDGGLSPDAKMFVLTPDSSTRSERHHTLCGAFFVLHCSRKTQKNFCPLPQPARNGLFCARMADHGRRNLCYNIKNREAEGTGGAAMNLQTAIVEDSKPDAERLKQLLKKAFENENISCSCFASGDEFLRAGWREGYQVVFLDICMEGTNGIETAQRLRAADPDLLIVFVTSSPEYVWDAFPVHPFDYLLKPYKEEKFEQLAGELRRVLCRQQPELEVRIARQIVRLPLTKIYYATAQNHYVRVVTDDGECRATANFAQVQEQLQTQPEFLVCNRGVIINMSKVLRFEGDCIEMLDGTHLPVRQKDKNSLLAQFTQYQFRGMQREF

SEQ ID NO: 19 - protein, 805 aa, Unknown
  Description of Unknown: Integrase B20 sequence
  TIGR00010,IPR036162,PS51737,IPR011109,IPR032466, PF00239,PTHR46124,G3DSA:1.10.10.2600,PF01026,IPR015991, IPR006119,SSF53041,cd00338,SM00857,IPR025827, G3DSA:3.20.20.140,IPR038109,IPR001130,SSF51556,cd01310,PF13408,
  CONT. FROM ABOVE: G3DSA:3.40.50.1390,PF07508
MPTSKNTARKYAAGGSSDNSCGVEPLRAVIYARYSSSGQREESIEGQLRDCYEFAKKHGIIVIGEYIDKAMTGRVDRRPDFQRMMKDSEKGRFNCVLLWKMDRFARNRYDSAMYKYKLKKNGIRIFYAKETIPDGPEGIILESVMEGYAEYYSENLAQNVKRGNYDSALELKTLGKTCLGLKTGPDGRYMIDQAEAAIVRRIFEEYAEGERAKDIYERLNSEGYRTSRGGKFNKNSLRRILSNKKYIGVYEYEDIYVENGIPAIITDWDLFERVQKMLKINHDAPARGKAQNFLLTTKLFCGLCGSPMIGDGGTSHTGKAYAYYSCTKRKRGRSCKKESVPKDWIEDLVVGELVKIVHNDELIEQIADRVMEYQKREKDQSGLHALEIRQKENEKAISNMLAAIEAGIITPSTKTRLMELEADRADIEKGIAHELLAEPEFERDQIIYFLERFRSGDINDEAYRIMLVDTFLNSVYLYDDDHLVLVMNYSGENCKVDLKLVEGAVSGDGCKGSAFAPSSALKRTVFGDIGAPGTVLFLHRYAVRRFYMTAIFDTHAHYDDDAFNDDREQLLAALPGQGIARVVDVGASLASCRKVLELMEQYDYIYGAIGVHPSETAELTEESYSWLKEQCRKKKCLAVGEIGLDYYWPEPDHETQKKWFLRQLDLAREIKKPVIIHSRDAAKDTVDLMTEAHAEEIGGVIHCYSYTKETAKIFLDMGFYFGIGGVLTFKNAKKLKEAVEYIPMDRIALETDCPYLAPEPNRGKRNSSLNIPYVIAAMAQIKGITEEEVRKAAWDNSLKLYRMDK

SEQ ID NO: 20 - protein, 793 aa, Unknown
  Description of Unknown: Integrase B21 sequence
  PTHR30461:SF3,IPR036162,PS51737,IPR003675,IPR011109, PTHR30461,PF02517,PF00239,G3DSA:1.10.10.2600,IPR006119, SSF53041,cd00338,SM00857,IPR025827,IPR038109, PS51736,PF13408,G3DSA:3.40.50.1390,PF07508,Coil
MQRAVIYARYSPGPNQTEQSIEGQVRECTKYAELHDLRIVGTYIDRKISGKTDNRREFQRMIDDSEKHIFDIIILYHTDRFARNRYDSAIYKHKLKENGVELRYATTDIPKGPEGIILESIMEGWAEYYSAELSRKIKRGMRESALKCHSTGAGRCLGYRTAEDKSLVIEPEGAKAVQTVFDMYIKGKSHADICRYLNDCGFRTAQGKLFNKNSVTHIIRNKRYIGVYTYDDITIEDGIPAIISKDTFHLAQLEAARRKTAKRPKEPKAEYLLSGKAFCGHCQKPLVGVSGTGKSGNKWYYYYCQESRAKRGCTKKPVKRDWLEREVVKRTVAEVLQPEVIQHIAKKCYDLQMEYRQDNSDVLFYELKLKDVRKAIKNTMHAIESGVKTKTLPARLQELENEEEALEAELAIAKASDFVITADQIEFLLTQFAEPWECESEEEYHRRIIKCFVHKVFLFDDKLLIYYNVSRDGKTREQSEAELLEEALGEGFDKRSSGSTISLAVILVKLRRAFCVDTLMFELDREVYCMKKVLSVSIKTIIFFVGWAICVSVIPIPDTASAVIWRFWAELIPLLSVIAITLIFWLADQKKIRLHLTGKPVYNIILGGVTGTIWLGASVGILSILGVVQIEGKNQIAMLWLWLLAAFLNTVMQEMLVRGYLYQMIKSNGSIAAAIIVSTGLFTFAHGGAFEAGILPVLNVITMSLFMTAVLEYTGSLIAPIVIHFLWNGVGAIILGGVSLAEDYPHLFDMTIHGNPILSGGSCKIEGSIIVLFMNLAFLIGFVAAKKRKDRNR

SEQ ID NO: 21 - protein, 787 aa, Unknown
  Description of Unknown: Integrase B22 sequence
  SM00857,G3DSA:1.10.10.2600,IPR036162,PF13408,IPR025827, PS51737,G3DSA:3.40.50.1390,PS51736,IPR006119,IPR038109, PF07508,SSF53041,IPR011109,PTHR30461,Coil, mobidb-lite,cd00338,PF00239
MYGCLRKGNDMDEFAARPVADILARYSTDNQNPVTIDVQVEKCREWCERNGYQVGKIFSDEAVSGMKETRAGYEACMMHLGMGGAQLVVVYDQSRMFREFTEWFQFRKDVDMLGARVASVTQPMVGGDLKDPAVFINEAATAMLNHAQVLITRQKTIDALKHNAREGKSSGGKPPLGYDLDKDKKYVVNEHEAEAVRLVFQLFARGFSYGEIIDELNSRGYLTKRGQPFGKNSIFDLLKNEKYIGRLVYGATKAQADGRWNSHAKSKEDAIVVENGVPAIIEQELWEQVQSRIRTRKGAGGRYSAKREYLLTGRVFCGDCGASMVVMGSKASGYQYYECNNKRRTHTCKMKNVRTEWLEQTVAASIKQMLTEPANIEMLVDVARDQERQITTEYDTRRAELASRYTRVCRQLENGVNALLEGVVSSELKEKVRRLEEEKAEIEAETAELNQYKGYVGLDDATIRRCVENVAKVDINTSEGLKLILAVVSRVNIHTDTIEIKTLISMDGTDPDPTKSRPQHLELFPSESASGEKYHTTPENGSGHQMKTALYSQKRLYSAVFYAFKMLRQRNGNIFYALFVSVPAKQTRMAGRKGMLLFFTSIIFRLDFGIALGMPAYRANFRRACGIRYVSAYHAHPHGGAPLTKNLAVLNVGSQLVVTLFMRFFNVPHAGEQFRQLLKAFTAGGTGKFGIHLGPFIVFPGCRVPQVFQRAGHFAAGKMLKPDLGMFLFIAGCFIKDVPHLLVAVFTRTQRIDLIFCTSVQLARKCGLQIFPRLTVLQFHGQCLPLY

SEQ ID NO: 22 - protein, 786 aa, Unknown
  Description of Unknown: Integrase B23 sequence
  PTHR30461:SF3,IPR036162,PS51737,IPR011109,PTHR30461, PF00239,G3DSA:1.10.10.2600,IPR006119,PF14287,SSF53041, IPR025378,SM00857,IPR025827,cd03770,IPR038109, PS51736,mobidb-lite,PF13408,G3DSA:3.40.50.1390,PF07508,Coil
MKKQPDKGKITALYERLSHDDERAGESVSIENQKRILEDYAQKNGFTNIRHFTDDGVRGTTFKRPGLDAMLEEIRAGNVATVIIKDQSRIGRDVVEVGLLKRTFDEYHVRFIAANDNLDTANGFDIMSIFRDVINEWYVADTSRKIKTVFKSRMEKGLRCSGSVSYGYLASKENKGEWVIDEEAAAVVRRIFHSVVAGESIASIARALRAEKIPIPSEHWKRIGAPVRSAKYTDPYAWSTTTISYILKRPEYTGRKVLGKTVCENYKTKSTRKTAPEEQYIFDGEIPAIVDEETWNTVQRLMGTKRRAPKRQNTPNRLTGLLYCADCGAKLTHRSSLVQGKYLDDAFVCSSYRQLTRDCTMHYIPTAKMEAAILAAIQRVSWYVRHNEAEFIERVRKATDQHQENAVKEYRQKVSKAQRRYKELDGLVKKLYEGNATGKIPDKHFTRLLAEYDEEQTGLEAAIAQWQEAIESWNADRLKTDKFIELVSRYTDFSELTTPMLNEFIEKVVVHEGEGRGNSRRQRIDIYLNFIGAFEVPAHIVTPMEAEEQRRQQEEQAAKEARSQELAKAREEKRKAEKREFTARKKAGLLTPEEQAADEARLAHNRAWQKEWRKKRKAAEPPKPPKPKSLKELAALQKAGADLTPEEAERLAAYRERKNRQHKAWYERQKAAQPPKPRTLKELAAAQVAGQPLTPEETERLEASRSRKKNAYQELKAQAETDPAAAAELARRRAYHSEATKKSRQKMYEEAAAGNPAAQARYENFLAARRENYHRKKHDEKGEQIA

SEQ ID NO: 23 - protein, 779 aa, Unknown
  Description of Unknown: Integrase B24 sequence
  IPR036162,PS51737,IPR011109,PF00072,G3DSA:1.10.10.10, cd00383,PF00239,IPR036388,G3DSA:1.10.10.2600,PTHR26402:SF519, G3DSA:3.40.50.2300,PS50110,IPR006119,PTHR26402,IPR016032, SSF53041,SM00448,IPR011006,cd00338,SM00857,SSF52172,IPR001789,
  CONT. FROM ABOVE: IPR025827,cd00156,IPR001867,IPR038109,PF00486, SSF46894,PS51736,PS51755,IPR039420,PF13408,G3DSA:3.40.50.1390 ,SM00862,PF07508,Coil
MSLALELAQTQIARAKPAEDQVPKTARAAIYARYSSHKQQELSIEGQLREIQEYCQKKDLKVVRAYIDRAKSGRTSTKRTEFRRMLEDAKRGEFDTIVVYKFNRFFRNLTEQVITMEDLRKVSVTMQSVHDVVPEGSGGVYMRAIYGADAEVYSLGVSEDTKRGMRDAAADYRTPGSLPMWLMADTNKKIVLNEPAARVMRQAAVMYDEGATLRQCCEYINAAGYKTRQGHKWNPTTLSASFRNVRLMGVFRFKDEILKEGIFPAAVEPDLWRRINAKLDGKHMPQRARALEEYYLTPRLFCGLCGAPMYGAIAYGAMSHGVKNVYRYYRCDNRLKNHSCKQKLVRKEIVEDAVFRAVIGTLTDENIARIALQAEKLSAETATTGAEKLRLLDELAAVNTEINNISRAIAAGIITDTTRDMLIDAERRRTGIQQRIEDAEAKEKETVRAEDVAAWLYCFREGAKKDEELKAQILQRLVARAELFEDGPHDGHVVVWCKLADAETAITEFFERTPAGGAKEGRPSGLPFSVSFPPPEESGGRRAFIGIGGDVVMYRIMVVEDDDAIAGVLQRTLEKWGYEVRRTEDFENVIEEFLHFEPHLVMMDISLPFFDGYHWCAEIRKISKVPVLFLSAAGENLNIVMALSMGADDFITKPFDLSVAVAKVEALLRRTYSFGAQSGAALAVGGAMLDLKSACLHYEGKKLELTKNEFRILQMLFEHKGEIVTRDTLISALWGQDAFLDDNTLTVNVARLRSHLEEIGLGGLVRTQKGVGYLVEEQT

SEQ ID NO: 24 - protein, 766 aa, Unknown
  Description of Unknown: Integrase B25 sequence
  cd00338,SM00857,G3DSA:1.10.10.2600,IPR036162,PS51737, G3DSA:3.40.50.1390,mobidb-lite,IPR006119,IPR038109,PF07508, SSF53041,IPR011109,PTHR30461,PS51736,Coil, PF00239
MTRQKVEVIPASVRSVQNGGQLKAQTNIRVAAYCRVSTGDESQQTSYTTQKAFYTDLITKKPGWIFAGIYADEAKSGTNREHREEFNRMMKDAMDGKLDYIVTKSISRFARNTIDSLTCTRELRQLKPPVGIYFEKENIDTLDAKGELILTILSALAQDESRSISDNIRWSIQKNFQAGIPHINLKRMLGYELGENKEWVIVPEQAEIVRYIFDRYAKGQTANKIARELNQMSKTTVNGRKWTASAVLIVLRNEKYVGDVEMQKTITKDFLTHRSSINKGEAPRYYVKNHHVGIIDRVTWDKVQAMLYEKPRSDTTKGPGRKKAKSMKGSPFGNLRCGAILENGSNAGKPCGEGFFRVTYTGVANGYTDERSLKAMGEDTGEYLEKYSYSYPIWRCKRKMGEREDEPPKNGTPDQKMYSRSKKGCMSNAEKEAADKRCPSEIYHECALEQSFMELLYSMKRDYEQNGEASMIMAMFNNVYEQMLRQAKNNSISVQRVAAVNRQIEDLEERLQDVIKHQVEALREAALEQSAKLSECLSNGEITLDDIDTDIRSGLTPGSIGTSFYDFEVEEGSEAQIYTELVKDLQERLRALRQERQAIEEEQGDLATVKKNFEFFLACLKELPDTNSAGMPLKVNGLDVQGTLMRDAEGNPIEGRARAITSGKLKVTPERIAEAPDMLHFEKGIYCAFIKGGVLQGDAAIYKTNFGVTLTTKGNRRTLNSFMGYKRCDLNGTVVYVDAPYKVYGFSIQYRRYLTTAAKRERGIAV

SEQ ID NO: 25 - protein, 766 aa, Unknown
  Description of Unknown: Integrase B26 sequence
  cd00338,SM00857,G3DSA:1.10.10.2600,IPR036162,PS51736, PS51737,G3DSA:3.40.50.1390,IPR006119,IPR038109,PF07508, SSF53041,IPR011109,PTHR30461,mobidb-lite,Coil, PF00239
MTRQKVEVIPASVRSVQNGGQLKAQTNIRVAAYCRVSTGDESQQTSYTTQKAFYTDLITKKPGWIFAGIYADEAKSGTNREHREEFNRMMKDAMDGKLDYIVTKSISRFARNTIDSLTCTRELRQLKPPVGIYFEKENIDTLDAKGELILTILSALAQDESRSISDNIRWSIQKNFQAGIPHINLKRMLGYELGENKEWVIVPEQAEIVRYIFDRYAKGQTANKIARELNQMSKTTVNGRKWTASAVLIVLRNEKYVGDVEMQKTITKDFLTHRSSINKGEAPRYYVKNHHVGIIDRVTWDKVQAMLYEKPRSDTTKGPGRKKAKSMKGSPFGNLRCGAILENGSNAGKPCGEGFFRVTYTGVANGYTDERSLKAMGEDTGEYLEKYSYSYPIWRCKRKMGEREDEPPKNGTPDQKMYSRSKKDCMSNAEKEAADKRCPSEIYHECALEQSFMELLYSMKRDYEQNGEASMIMAMFNNVYEQMLRQAKNNSISVQRVAAVNRQIEDLEERLQDVIKHQVEALREAALEQSAKLSECLSNGEITLDDIDTDIRSGLTPGSIGTSFYDFEVEEGSEAQIYTELVKDLQERLRALRQERQAIEEEQGDLATVKKNFEFFLACLKELPDTNSAGMPLKVNGLDVQGTLMRDAEGNPIEGRARAITSGKLKVTPERIAEAPDMLHFEKGIYCAFIKGGVLQGDAAIYKTNFGVTLTTKGNRRTLNSFMGYKRCDLNGTVVYVDAPYKVYGFSIQYRRYLTTAAKRERGIAV

SEQ ID NO: 26 - protein, 765 aa, Unknown
  Description of Unknown: Integrase B27 sequence
  IPR036162,PS51737,IPR011109,PF00072,G3DSA:1.10.10.10, cd00383,PF00239,IPR036388,G3DSA:1.10.10.2600,G3DSA:3.40.50.2300, PS50110,IPR006119,PTHR26402,SSF53041,SM00448, IPR011006,cd00338,SM00857,SSF52172,IPR001789,PTHR26402:SF661,
  CONT. FROM ABOVE: IPR025827,cd00156,IPR038109,IPR001867,PF00486, PS51736,IPR039420,PS51755,PF13408,G3DSA:3.40.50.1390,SM00862, PF07508,Coil
MTNAVIYARYSPGPNQTDQSIEGQIHECTRFCEDNDLRIVGTYIDRKQTGRNDNRADFQKMLRDSSRHGFSTVVVWKIDRFGRNREEIAKNKAVLRMNGVRVLSAKEHIPDGPEGIILESVLEGLAEYYSANLSQNIKRGMRESALKCQFNGSGLSTGYTVDADHKYRIDPDGAAVVRTIFEMYDSGKKIADIQRYLQQSNIKTMRGKEYTHYGISRILRNRVYIGEYHWHDIVVPGGVPKIIDNDLFDRVQKRLEANKHAPAARRGDVDFLLTSKLICGNCKSTMIGDCGTGKNGARWYYYTCRAKKTKSSKCRKKSVPKEALEREVTALTAAYVLRDDVIDYIADKVVEIQKSEHDDKSMLRYFESQLKDTNKAIANIMRAIEAGIITETTRSRLEELEDTKRDLETEIIKEKVARPTIEREQVIFFLEKFRGGNVDDKEYQRKIIDTFVHKVILYDDKITITYNYSTDSTKNAENTVESIESAASAAECKCSDKSSSSPPMTRILLLQCSCYFYTHARFPNLRLIFTRYDKICIIIPEGDPMRILLAEDEKSLNRIITKQLKAAGYSVDSCFDGGEAYDLITSTDYDAAVFDVMMPIMNGFELVKKIRAHGIDTPVLFLTARDSIEDRVTGLDIGADDYLIKPFSFDELSARLRVMTRKKYGEKTGIISVGDLTVDTAARRVERAGREISLSAKEYELLQYLVMNKGVVLSREKIEDHIWNYDYEGGTNVVDVYIRYLRKKIDEGEDIKLIHTVRGAGYVIK

SEQ ID NO: 27 - protein, 765 aa, Unknown
  Description of Unknown: Integrase B28 sequence
  IPR036162,PS51737,IPR011109,PF00072,G3DSA:1.10.10.10, cd00383,PF00239,IPR036388,G3DSA:1.10.10.2600,G3DSA:3.40.50.2300, PS50110,IPR006119,PTHR26402,SSF53041,SM00448, IPR011006,cd00338,SM00857,SSF52172,IPR001789,PTHR26402:SF661,
  CONT. FROM ABOVE: IPR025827,cd00156,IPR001867,IPR038109,PF00486 ,PS51736,IPR039420,PS51755,PF13408,G3DSA:3.40.50.1390,SM00862, PF07508,Coil
MTNAVIYARYSPGPNQTDQSIEGQIHECTRFCEDNDLRIVGTYIDRKQTGRNDNRADFQKMLRDSSRHGFSTVVVWKIDRFGRNREEIAKNKAVLRMNGVRVLSAKEHIPDGPEGIILESVLEGLAEYYSANLSQNIKRGMRESALKCQFNGSGLSTGYTVDADHKYRIDPDGAAVVRTIFEMYDGGKKIADILRYLQQSNIKTMRGKEYTHYGISRILRNRVYIGEYHWHDIVVPGGVPQIIDNDLFDRVQKRLEVNKHGPAARRGDVDFLLTSKLICGNCKSTMIGDCGTGKNGARWYYYTCRAKKTKSSKCRKKSVPKEALEREVTALTAAYVLRDDVIDYIANKVVEIQKSEHDDKSMLRYFESQLKDTNKAIANIMRAIEAGIITETTRSRLEELEDTKRDLETEIIKEKVARPTIEREQVIFFLEKFRGGNVDDKEYQRKIIDTFVHKVILYDDKITITYNYSTDSTKNAENTVESIESAASAAECKCSNKPSSSPPITRILLLRCSCYFYTHARFPNLRLIFTRYDKICIIIPEGDPMRILLAEDEKSLNRIITKQLKAAGYSVDSCFDGGEAYDLITSTDYDAAVFDVMMPIMNGFELVKKIRAHGIDTPVLFLTARDSIEDRVTGLDIGADDYLIKPFSFDELSARLRVMTRKKYGEKTGIISVGDLTVDTAARRVERAGREISLSAKEYELLQYLVMNKGVVLSREKIEDHIWNYDYEGGTNVVDVYIRYLRKKIDEGEDIKLIHTVRGAGYVIK

SEQ ID NO: 28 - protein, 765 aa, Unknown
  Description of Unknown: Integrase B29 sequence
  IPR036162,PS51737,IPR011109,PF00072,G3DSA:1.10.10.10, cd00383,PF00239,IPR036388,G3DSA:1.10.10.2600,G3DSA:3.40.50.2300, PS50110,IPR006119,PTHR26402,SSF53041,SM00448, IPR011006,cd00338,SM00857,SSF52172,IPR001789,PTHR26402:SF661,
  CONT. FROM ABOVE: IPR025827,cd00156,IPR038109,IPR001867,PF00486, PS51736,IPR039420,PS51755,PF13408,G3DSA:3.40.50.1390,SM00862 ,PF07508,Coil
MTNAVIYARYSPGPNQTDQSIEGQIHECTRFCEDNDLRIVGTYIDRKQTGRNDNRADFQKMLRDSSRHGFSTVVVWKIDRFGRNREEIAKNKAVLRMNGVRVLSAKEHIPDGPEGIILESVLEGLAEYYSANLSQNIKRGMRESALKCQFNGSGLSTGYTVDADHKYRIDPDGAAVVRTIFEMYDGGKKIADILRYLQQSNIKTMRGKEYTHYGISRILRNRVYIGEYHWHDIVVPGGVPQIIDNDLFDRVQKRLEANKHAPAARRGDVDFLLTSKLICGNCKSTMIGDCGTGKNGARWYYYTCRAKKTKSSKCRKKSVPKEALEREVTALTAAYVLRDDVIDYIANKVVEIQKSEHDDKSMLRYFESQLKDTNKAIANIMRAIEAGIITETTRSRLEELEDTKRDLETEIIKEKVARPTIEREQVIFFLEKFRGGNVDDKEYQRKIIDTFVHKVILYDDKITITYNYSTDSTKNAENTVESIESAASAAECKCSNKFSSSPPVTRILLLQCSCYFYTHARFPNLRLIFTRYDKICIIIPEGDPMRILLAEDEKSLNRIITKQLKAAGYSVDSCFDGGEAYDLITSTDYDAAVFDVMMPIMNGFELVKKIRAHGIDTPVLFLTARDSIEDRVTGLDIGADDYLIKPFSFDELSARLRVMTRKKYGEKTGIISVGDLTVDTAARRVERAGREISLSAKEYELLQYLVMNKGVVLSREKIEDHIWNYDYEGGTNVVDVYIRYLRKKIDEGEDIKLIHTVRGAGYVIK

SEQ ID NO: 29 - protein, 749 aa, Unknown
  Description of Unknown: Integrase B30 sequence
  PTHR30461:SF3,cd00338,SM00857,G3DSA:1.10.10.2600,IPR036162, PF13408,PS51737,IPR025827,G3DSA:3.40.50.1390,IPR006119, IPR038109,PF07508,IPR011109,SSF53041,PTHR30461, PS51736,Coil,PF00239
MRAKKKPAMLEPDMQDAVIYTRYSSHNQRDCSIEQQVADCEIFARQNNLRVVKVYADRHLSGTTDNRPQFQQMLKDAAHGHWAYVICWKIDRFARNRYDSATYKFRLKKAGVRVLYAKESIPDGPEGILLESVLEGSAEYYSAALAQNIRRGMKYNAEQCKVNSGSIPFGYCKGPDGRFAIHEANAEVVREIFRKAAAGMPFVDIANDLNSRGLKTSRGGRWNKGSFRLLMNEAYIGVYHFSDTRIEGGMPALIDQGTFWAANERLKANSSVRGRHQDGGDYLLTGKLKCAHCGSYMIGFSGTGKSGELHYYYGCQKRRRERACKKANVPREWIERVVVKAALDYVLRPDVMEWIADAVMEYQEREAASAQLAALTAELEENQKATDNVMKAIEAGIITSTTKQRLLDLEAKAQDLKRAIELEKLSHVRLERDQVLFWLDRFRGGSLQSQEFRRKVIDAFVSVVYLSDDHLRIAFNYSGGSNAEADFDLVMDAEAAAGELSKKFAQGHVTSTSKKSHLKTYVFQVAFAISAILLRQIRQDVRPQSLLLPQSIEAAVQIHFIDCRKNGAAQQQTLVVERSLRLGGLAAEHHRKTSLQLLAEDIVGCPGGAVLPLHFEQRVDIFDREHRFGDCNVHQGCNLIPGIFFADGVIHHPFFDIVAHHRRGQLHPAETTEVAVDKLHRLIQIQPYRGEIVVPGQGKARSTRRNAEFGFSFHSILFRSCSCTFYKQERCFCAKAGETLSVKALLPVK

SEQ ID NO: 30 - protein, 748 aa, Unknown
  Description of Unknown: Integrase B31 sequence
  PTHR30461:SF3,IPR036162,PS51737,IPR011109,PTHR30461, PF00239,G3DSA:1.10.10.2600,IPR006119,SSF53041,cd00338, SM00857,IPR025827,IPR038109,PS51736,mobidb-lite, PF13408,G3DSA:3.40.50.1390,PF07508,Coil
MCAKKKPAMLEPDMQDAVIYTRYSSHNQRDCSIEQQVADCEIFARQNNLRVVKVYADRHLSGTTDNRPQFQQMLKDAAHGHWAYVICWKIDRFARNRYDSATYKFRLKKAGVRVLYAKESIPDGPEGILLESVLEGSAEYYSAALAQNIRRGMKYNAEQCKVNSGSIPFGYRKGPDGRFAIHEANAEVVREIFRKAAAGMPFVDIANDLNGRGLKTSRGGRWNKGSFRLLMNEAYIGVYHFSDTRIEGGMPALIDQGTFWAANERLKANSSVRGRHQDGGDYLLTGKLKCAHCGSYMIGFSGTGKSGELHYYYGCQKRRRDRACKKANVPREWIERVVVKAALDYVLRPDVMEWIADAVMEYQEREAASAQLAALTAELEENQKATDNVMKAIEAGIITSTTKQRLLDLEAKAQDLKRAIELEKLSHVRLERDQVLFWLDCFRGGSLQSQEFRRKVIDAFVSVVYLSDDHLRIAFNYSGGSNAEADFDLVMDAEAAAGELSKKFAQGHVASTTCEPDELSVLHQREEPHRFAVRLFPFHLIASLSHEIKQHVDVLTDGAEIVSSAAPASIVPGAAAHLRQELFLPHQNGVSDPLVFLYKGFQLLIFFYDTDVGQVLREGTGIEPVRLRVKVQRRQRVQRLIGVPHIGMPVIFFWRLLEASYPILGLADRLIVVEQRLSIVTIELVGVRIAVCIVLVLERLDAFRPRGKVKPDAHRLRMGGQSCHDRQGQNPRCDRRNKFSSHDKTSFL

SEQ ID NO: 31 - protein, 731 aa, Unknown
  Description of Unknown: Integrase B32 sequence
  PTHR30461:SF3,IPR036162,PS51737,IPR029016,PF15714,IPR039472 ,IPR011109,PTHR30461,PF00239,G3DSA:3.30.450.40, G3DSA:1.10.10.2600,IPR006119,SSF53041,cd00338,SM00857,IPR025827 ,IPR038109,PS51736,PF13408,G3DSA:3.40.50.1390,PF07508,Coil
MKKSKPPQRIAGYLRISDEDKLQRLADENTSIENQRQIVKMYCDENFPNAELTFFEDRAISGYSFDKRPGYLAMRQGLFDGKYDTLIIKDLSRFSRRNGHGLAELEDLRDANVRIISISDNVDTVDDDDWLKVRMFFFVNEMPVADASKKVTAVIRAKQKSGEWICNAPYGYTKDGRTQNYKIVQETVPVIKLIFEKYLEGWGYGKIRDYLNENKVPTPRMTEKIVAERKEKTYKRNVSNGWSAVSIQKILTNDAYIGTYRGHKVARKGINGKMEDVPEDEHIVIEHHHEAIIDDATFQSVQLMMKQRTRNNYRGVRKYPTPYTGILFCGDCGARMFSISRPDLRAAYKCSNYQKAGIKSCTGHKVVVEDLDRAAKSYLMLIRSQCKDLEAELKKSIENEKEVTGRQAGSIEELEKLLARKENALEMSIQSRIEDIAENPENAAQIKKTYKSVEENLNREIESIKSNIEILNNERNSTIKANRTAKTVFEVFDNIIKKPALDENDVRFIFERINVFEDGHIDFYLRSDIDELLRIGGIPEPVKEKPINFRQDTVDIALEGRIVQPSGNGLYDVYSVNVVRSGDALEIFTAADGQVVFKKYSPLVELGELAGVYAEVLAKNLGRPVLVCDRESIVAATGTGKGQLLGRQISDAAARLLAMRGPYTAPETAARRITAFDKGETVLLCVCPIVVQGDVEGGVLLTGRPQDAAPDTETARAVNIAAAFLAKWMEE

SEQ ID NO: 32 - protein, 731 aa, Unknown
  Description of Unknown: Integrase B33 sequence
  PTHR30461:SF3,SM00857,G3DSA:1.10.10.2600,IPR036162,PF13408, PS51737,IPR025827,G3DSA:3.40.50.1390,IPR006119,IPR038109, PF07508,IPR011109,SSF53041,PF00239,PTHR30461, mobidb-lite,Coil,cd00338
MPRKPAKHPAKPKRGKKLEVEEPGVLYGRYSSHNQKDISVEQQFEKGYELAAEYGIRIIDTYADRAVSGRTDKRRDFQRMMTDAAKGKFRYVIAWKSNRMGRNMLEALINEARLQDLGVRVLYVEEDFDDTAAGRFAARSMMNVNQFYSENMAEDIKRGLYDNAANCMVANGHLPYGYKADETLHYAIDEPKAAVIREIFTRVSCGEAFVDIMASLNARGIKTSYGRPWGRSSFQKILSNERYRGIYIYGDVRKEGGIPRIISDELYFKVQEVITTKKNPQGRHRVNGDYLLTGKLFCGHCKSPMTGISGTSRSGNLHYYYVCQKRRTEKTCEKKNLRRDDIELQVAKAIKRRTLDDDTINWIADSVVEYSQHQESASGIGLLEDQLKDTQRSIKNLMAAIEQGIITPTTKARLMELEKEQSDIDRKITMAKADVIPVNRDQLVGWLKKLQAGDVHDKKYQAELFDTFLIAVYVYDNPDGQDYMKVVFNYAGSKNTVEIPLDPSVIDNVENIETGAVRLSSAQVHQKYRLPVWVVGIFLCMEDGVEVYPRQGKSIFPHQKYRLPVWVVGIFYAFSRRERSGRALPSPRGEGAERSEADEVERSRPPPVPPVVPPNPTTLHPSRRTAAPPSPQGEGLQAPLWLHRCSDALGEAVYTPPHTPGAPSRAASSRRDRPLTSVSKQSAHTVSPPRTHGHRYASAHDGSGAKHTSHRRIRVPPFFRKIIMHLDNFRP

SEQ ID NO: 33 - protein, 726 aa, Unknown
  Description of Unknown: Integrase B34 sequence
  PTHR30461:SF3,IPR036162,PS51737,IPR011109,PTHR30461,PF00239 ,G3DSA:1.10.10.2600,IPR006119,SSF53041,cd00338,SM00857,IPR025827 ,IPR007214,IPR038109,cd04335,mobidb-lite,G3DSA:3.90.960.10, PF13408,G3DSA:3.40.50.1390,PF07508,PF04073,IPR036754,Coil
  CONT. FROM ABOVE: ,SSF55826
MPRKPAKHPAKPKRGKKLEVEEPGVLYGRYSSHNQKDISVEQQFEKGYELAAEYGIRIIDTYADRAVSGRTDKRRDFQRMMTDAAKGKFRYVIAWKSNRMGRNMLEALINEARLQDLGVRVLYVEEDFDDTAAGRFAARSMMNVNQFYSENMAEDIKRGLYDNAANCMVANGHLPYGYKADETLHYAIDEPKAAVIREIFTRVSCGEAFVDIMASLNARGIKTSYGRPWGRSSFQKILSNERYRGIYIYGDVRKEGGIPRIISDELYFKVQEVITTKKNPQGRHRVNGDYLLTGKLFCGHCKSPMTGISGTSRSGNLHYYYVCQKRRTEKTCEKKNLRRDDIELQVAKAIKRRTLDDDTINWIADSVVEYSQHQESASGIGLLEDQLKDTQRSIKNLMAAIEQGIITPTTKARLMELEKEQSDIDRKITMAKADVIPVNRDQLVGWLKKLQAGDVHDKKYQAELFDTFLIAVYVYDNPDGQDYMKVVFNYAGSKNTVEIPLDPSVIDNVENIETGAVRLSSAQVHQPENPAARRGCWIFRFQGTLSWHENSAIFGKTVHTGGYSMNKAEIYDLLRTRGIWHEITEHKAVYNMAELTDVALPYPEADAKNLFVRDDKKRNYYLITVRGDKRVDLKEFRHRYGTRALSFASENDLMQVLGLIPGAVTPLGLLNDAECKVQLYLDEAFFAAPGLIGVHPNDNTATVWLRADDLAALIREHGNPVHIAEL

SEQ ID NO: 34 - protein, 722 aa, Unknown
  Description of Unknown: Integrase B35 sequence
  cd00338,SM00857,IPR036162,IPR036779,G3DSA:3.40.50.1390, IPR006119,PF07508,cd00118,IPR011109,IPR018392, SSF53041,PTHR30461,G3DSA:3.10.350.10,PF01476,PS51736, Coil,PF00239
MNLETFLRILHIPSNLSIDEILDMLIIYLRKSRKDMDYFKDESIEKTLQRHEKDLQDFIIGIFGKPIPEHNIYREVASGDTIENRPVMQEVLSVIENDDKKGVICIEIERLARGNTIDQGIIAQTFKYTGTKIVTPMKIYDLDNEDDLSYFEDGLYQSRKYLKYTKRILSRGRVRSVKEGNYVGSVLPYGSNKIKIPNEKGFMLVENESEAKVVKLMADLFLNGLNTTYTVKENDTVSTIAKTFGTHKKVIITHNLDLKINYSIKLIVDSKSIDYTIQENDTLESISATYHIKVDHIHIPNDIFKPGETIKIIIDDMRPTNIAHYFNYLKITPRKAKEWTANMIRNILQSPTIYGYLTWDRRKTVTTLVNGKIVRKNPNNNDYLFVKGKHYENSILNEEYRSRIQEKFLSNRVKTVPDEKELKNPLVGLVVCGYCGNNMTRRPYYIRKDAKPTVKRVYEVDKTKLRLLLREHKGDYSLNDIARALKVSKCCVDHWFASNDDKFTMPYANKWEDLKKLLNIETTEFDKAVTTLEESITPAHADTLMCSRPRCKCVSSDLELVETKILQTLKIIKEDYKKYVDNYEEEVKKEIRDNKEIIQVIDNEIDKVNSQIEKACELVEAGAYTKDLFKKRIDVLNSQLEALINQKQELPNANNLTQEFNNKKKAIPILEDVLSKYAPEMTAEEKNELLSTIIKKIIYKKDRGGRYLKENFNIDIILLPFD

SEQ ID NO: 35 - protein, 719 aa, Unknown
  Description of Unknown: Integrase B36 sequence
  PTHR30461:SF3,IPR036162,IPR036779,IPR011109,PTHR30461, PF01476,PF00239,IPR006119,SSF53041,cd00338, SM00857,SM00257,cd00118,PS51736,G3DSA:3.40.50.1390, PF07508,IPR018392,G3DSA:3.10.350.10,Coil
MNLDTFLQIMNVSRDLTVDEILDMFIIYLRKSRKDMDYYKDESIEKTLQRHEKELQDFIISIFGKPIPEHNIYREVASGDTIEDRPVIQEVLSLIEEDRVKGVVCIEIERLARGNTMDQGIIAQAFQYSNTKIITPMKIYNLDNEDDLSYFEDGLYQARKYLKYTKRILARGRLRSVKDGKYVGSVLPYGYNKQKIPNEKGYVLVENESESKVVKLLADLFLNGLNTTYTVKENEIISDIAKLFGAHKKDIITCNLDLKVDQEIRLTVNSKSLPYKIKENDTLESIAANYNIDINNIHIPHNFFKPGENIKIILNDMRATNIAHYLNYLKIKPRKSKEWTANMVRNILQGYTIYGYLTWDRRKTTKTLVNGHIVKKNPNNDDFTLVRGKHEAILGEDIKQQIEAKFLSNRLKTVPDNKEMKNPLLGLVVCGYCGNNMTRRPYYLRKDAKPTAKRIYDIDKPKLRLLLREHKGNYSLNDIARALHVSKNSVDHWFSSNDEKFCIPHADKWEDLKKLLNIETNEFDKAITTIEESITPPHTDTLMCSRPRCKCVSSELELVEDKILKSLKIIMSEYKNYVNNYEEAVKKEICTNKEMIEAIDHEIDKIKSQIEKACELVETGAYTQDLFIKRTNTLNEQLETLLNQKTELSKSKDRTKDLYSKKKAIPILEDVISKYSKDMTAEEKNALLSTIIKQVIYKKEKGGRYLKENFSLKIILLSF

SEQ ID NO: 36 - protein, 719 aa, Unknown
  Description of Unknown: Integrase B37 sequence
  cd00338,SM00857,IPR036162,IPR036779,G3DSA:3.40.50.1390, SM00257,IPR006119,PF07508,IPR018392,IPR011109, SSF53041,cd00118,G3DSA:3.10.350.10,PTHR30461,PF01476, PS51736,Coil,PF00239
MNLDTFLQIMNVSRDLTVDEILDMFIIYLRKSRKDMDYYKDESIEKTLQRHEKELQDFIVSIFGKPIPEHNIYREVASGDTIEDRPVIQEVLSLIEEDRVKGVVCIEIERLARGNTMDQGIIAQAFQYSNTKIITPMKIYNLDNEDDLSYFEDGLYQARKYLKYTKRILARGRLRSVKDGKYVGSVLPYGYNKQKIPNEKGYVLVENESESKVVKLLADLFLNGLNTTYTVKENEIISDIAKLFGAHKKDIITCNLDLKVDQEIRLTVNSKSLPYKIKENDTLESIAASYNIDINNIHIPHNFFKPGENIKIILNDMRATNIAHYINYLKIKPRKSKEWTANMVRNILQGYTIYGYLTWDRRKTTKTLVNGHIVKKNPNNDDFTLVRGKHEAILSEDIKQQIEAKFLSNRLKTVPDNKEMKNPLLGLVVCGYCGNNMTRRPYYLRKDAKPTAKRIYDIDKPKLRLLLRKHKGNYSLNDIARTLHVSKNSVDHWFSSNDEKFCIPHADKWEDLKKLLNIETNEFDKAITTIEESITPPHTDTLMCSRPRCKCVSSELELVEDKILKSLKIIMSEYKNYVNNYEEAVKKEICTNKEMIEAIDHEIDKIKSQIEKACELVETGAYTQDLFIKRTNTLNEQLETLLNQKTELSKSKDRTKDLYSKKKAIPILEDVISKYSKDMTAEEKNALLSTIIKQVIYKKEKGGRYLKENFSLKIILLSF

SEQ ID NO: 37 - protein, 719 aa, Unknown
  Description of Unknown: Integrase B38 sequence
  PTHR30461:SF3,IPR036162,IPR036779,IPR011109,PTHR30461, PF01476,PF00239,IPR006119,SSF53041,cd00338, SM00857,SM00257,cd00118,PS51736,G3DSA:3.40.50.1390, PF07508,IPR018392,G3DSA:3.10.350.10,Coil
MNLDTFLQIMNVSRDLTVDEILDMFIIYLRKSRKDMDYYKDESIEKTLQRHEKELQDFIVSIFGKPIPEHNIYREVASGDTIEDRPVIQEVLSLIEEDRVKGVVCIEIERLARGNTMDQGIIAQAFQYSNTKIITPMKIYNLDNEDDLSYFEDGLYQARKYLKYTKRILARGRLRSVKDGKYVGSVLPYGYNKQKIPNEKGYVLVENESESKVVKLLADLFLNGLNTTYTVKENEIISDIAKLFGAHKKDIITCNLDLKVDQEIRLTVNSKSLPYKIKENDTLESIAANYNIDINNIHIPHNFFKPGENIKIILNDMRATNIAHYLNYLKIKPRKSKEWTANMVRNILQGYTIYGYLTWDRRKTTKTLVNGHIVKKNPNNDDFTLVRGKHEAILGEDIKQQIEAKFLSNRLKTVPDNKEMKNPLLGLVVCGYCGNNMTRRPYYLRKDAKPTAKRIYDIDKPKLRLLLREHKGNYSLNDIARALHVSKNSVDHWFSSNDEKFCIPHADKWEDLKKLLNIETNEFDKAITTIEESITPPHTDTLMCSRPRCKCVSSELELVEDKILKSLKIIMSEYKNYVNNYEEAVKKEICTNKEMIEAIDHEIDKIKSQIEKACELVETGAYTQDLFIKRTNTLNEQLETLLNQKTELSKSKDRTKDLYSKKKAIPILEDVISKYSKDMTAEEKNALLSTIIKQVIYKKEKGGRYLKENFSLKIILLSF

SEQ ID NO: 38 - protein, 719 aa, Unknown
  Description of Unknown: Integrase B39 sequence
  PTHR30461:SF3,cd00338,SM00857,IPR036162,G3DSA:3.40.50.1390, SM00257,IPR006119,PF07508,IPR018392,IPR011109, SSF53041,cd00118,PTHR30461,PF01476,PS51736, Coil,PF00239
MNLDTFLQIMNVSRDLTVDEILDMFIIYLRKSRKDMDYYKDESIEKTLQRHEKELQDFIVSIFGKPIPEHNIYREVASGDTIEDRPVIQEVLSLIEEDRVKGVVCIEIERLARGNTMDQGIIAQAFQYSNTKIITPMKIYNLDNEDDLSYFEDGLYQARKYLKYTKRILARGRLRSVKDGKYVGSVLPYGYNKQKIPNEKGYVLVENESESKVVKLLADLFLNGLNTTYTVKENEIISDIAKLFGTHKKDIITCNLDLKVDQEIRLTVNSKSLPYRIKENDTLESIAANYNIDINNIHIPHNFFKPGENIKIILNDMRATNIAHYLNYLKIKPRKSKEWTANMVRNILQGYTIYGYLTWDRRKTTKTLVNGHIVKKNPNNDDFTLVRGKHEAILSEDIKQQIEAKFLSNRLKTVPDNKEMKNPLLGLVVCGYCGNNMTRRPYYLRKDAKPTAKRIYDIDKPKLRLLLRKHKGNYSLNDIARALHVSKNSVDHWFSSNDEKFCIPHADKWEDLKKLLNIETNEFDKAITTIEESITPPHTDTLMCSRPRCKCVSSELELVENKILKSLKIIMSEYKNYVNNYEEAVKKEICTNKEMIEAIDHEIDKIKSQIEKACELVETGAYTQDLFIKRTNTLNEQLETLLNQKTELSKSKDRTKDLYSKKKAIPILEDVISKYSKDMTAEEKNALLSTIIKQVIYKKEKGGRYLKENFSLKIILLSF

SEQ ID NO: 39 - protein, 719 aa, Unknown
  Description of Unknown: Integrase B40 sequence
  cd00338,SM00857,IPR036162,G3DSA:3.40.50.1390,SM00257, IPR006119,PF07508,IPR018392,IPR011109,SSF53041, cd00118,PTHR30461,PF01476,PS51736,Coil, PF00239
MNLDTFLQIMNVSRELTVDEILDMFIIYLRKSRKDMDYYKDESIEKTLQRHEKELQDFIVSIFGKPIPEHNIYREVASGDTIEDRPVIQEVLSLIEEDRVKGVVCIEIERLARGNTMDQGIIAQAFQYSNTKIITPMKIYNLDNEDDLSYFEDGLYQARKYLKYTKRILARGRLRSVKDGKYVGSVLPYGYNKQKIPNEKGYVLVENESESKVVKLLADLFLNGLNTTYTVKENEIISDIAKLFGTHKKDIITCNLDLKVDQEIRLTVNSKSLPYKIKENDTLESIAANYNIDINNIHIPHNFFKPGENIKIILNDMRATNIAHYLNYLKIKPRKSKEWTANMVRNILQSYTIYGYLTWDRRKTTKTLVNGHIVKKNPNNDDFTLVRGKHEAILSEDIKQQIEAKFLSNRLKTVPDNKEMKNPLLGLVVCGYCGNNMTRRPYYLRKNAKPTAKRIYDIDKPKLRLLLREHKGNYSLNNIARALHVSKNSVDHWFSSNDEKFCIPHADKWDDLKKLLNIETNEFDKAITTIEESITSPHTDTLMCSRPRCKCVSSELELVEDKILKSLKIIISEYKNYVNNYEEAVKKEICTNKEMIEAIDHEIDKIKSQIEKACELVETGAYSQDLFIKRTNTLNEQLETLLNQKKELSKSKDRTKDLYSKRKAIPILEDVISKYSKDMTAEEKNALLSAIIKQVIYKKEKGGRYLKENFSLKIILLSF

SEQ ID NO: 40 - protein, 719 aa, Unknown
  Description of Unknown: Integrase B41 sequence
  PTHR30461:SF3,IPR036162,IPR036779,IPR011109,PTHR30461, PF01476,PF00239,IPR006119,SSF53041,cd00338, SM00857,SM00257,cd00118,PS51736,G3DSA:3.40.50.1390, PF07508,IPR018392,G3DSA:3.10.350.10,Coil
MNLDTFLQIMNVSRDLTVDEILDMFIIYLRKSRKDMDYYKDESIEKTLQRHEKELQDFIVSIFGKPIPEHNIYREVASGDTIEDRPVIQEVLSLIEEDRVKGVVCIEIERLARGNTMDQGIIAQAFQYSNTKIITPMKIYNLDNEDDLSYFEDGLYQARKYLKYTKRILARGRLRSVKDGKYVGSVLPYGYNKQKIPNEKGYVLVENESESKVVKLLADLFLNGLNTTYTVKENEIISDIAKLFGAHKKDIITCNLDLKVDQEIRLTVNSKSLPYKIKENDTLESIAANYNIDINNIHIPHNFFKPGENIKIILNDMRAANIAHYLNYLKIKPRKSKEWTANMVRNILQGYTIYGYLTWDRRKTTKTLVNGHIVKKNPNNDDFTLVRGKHEAILSEDIKQQIEAKFLSNRLKTVPDNKEMKNPLLGLVVCGYCGNNMTRRPYYLRKDAKPTAKRIYDIDKPKLRLLLREHKGNYSLNDIARALHVSKNSVDHWFSSNDEKFCIPHADKWEDLKKLLNIETNEFDKAITTIEESITPPHTDTLMCSRPRCKCVSSELELVEDKILKSLKIIMSEYKNYVNNYEEAVKKEICTNKEMIEAIDHEIDKIKSQIEKACELVETGAYTQDLFIKRTNTLNEQLETLLNQKTELSKSKDRTKDLYSKKKAIPILEDVISKYSKDMTAEEKNALLSTIIKQVIYKKEKGGRYLKENFSLKIILLSF

SEQ ID NO: 41 - protein, 719 aa, Unknown
  Description of Unknown: Integrase B42 sequence
  PTHR30461:SF3,IPR036162,IPR036779,IPR011109,PTHR30461, PF01476,PF00239,IPR006119,SSF53041,cd00338, SM00857,SM00257,cd00118,PS51736,G3DSA:3.40.50.1390, PF07508,IPR018392,G3DSA:3.10.350.10,Coil
MNLDTFLQIMNVSRDLTVDEILDMFIIYLRKSRKDMDYYKDESIEKTLQRHEKELQDFIVSIFGKPIPEHNIYREVASGDTIEDRPVIQEVLSLIEEDRVKGVVCIEIERLARGNTMDQGIIAQAFQYSNTKIITPMKIYNLDNEDDLSYFEDGLYQARKYLKYTKRILARGRLRSVKDGKYVGSVLPYGYNKQKIPNEKGYVLVENESESKVVKLLADLFLNGLNTTYTVKENEIISDIAKLFGAHKKDIITCNLDLKVDQEIRLTVNSKSLPYKIKENDTLESIAASYNIDINNIHIPHNFFKPGENIKIILNDMRATNIAHYLNYLKIKPRKSKEWTANMVRNILQGYTIYGYLTWDRRKTTKTLVNGHIVKKNPNNDDFTLVRGKHEAILSEDIKQQIEAKFLSNRLKTVPDNKEMKNPLLGLVVCGYCGNNMTRRPYYLRKDAKPTAKRIYDIDKPKLRLLLREHKGNYSLNDIARALHVSKNSVDHWFSSNDEKFCIPHADKWEDLKKLLNIETNEFDKAITTIEESITPPHTDTLMCSRPRCKCVSSELELVEDKILKSLKIIMSEYKNYVNNYEEAVKKEICTNKEMIEAIDHEIDKIKSQIEKACELVETGAYTQDLFIKRTNTLNEQLETLLNQKTELSKSKDRTKDLYSKKKAIPILEDVISKYSKDMTAEEKNALLSTIIKQVIYKKEKGGRYLKENFSLKIILLSF

SEQ ID NO: 42 - protein, 719 aa, Unknown
  Description of Unknown: Integrase B43 sequence
  PTHR30461:SF3,IPR036162,IPR036779,IPR011109,PTHR30461, PF01476,PF00239,IPR006119,SSF53041,cd00338, SM00857,SM00257,cd00118,PS51736,G3DSA:3.40.50.1390, PF07508,IPR018392,G3DSA:3.10.350.10,Coil
MNLDTFLQIMNVSRDLTVDEILDMFIIYLRKSRKDMDYYKDESIEKTLQRHEKELQDFIVSIFGKPIPEHNIYREVASGDTIEDRPVIQEVLSLIEEDRVKGVVCIEIERLARGNTMDQGIIAQAFQYSNTKIITPMKIYNLDNEDDLSYFEDGLYQARKYLKYTKRILARGRLRSVKDGKYVGSVLPYGYNKQKIPNEKGYVLVENESESKVVKLLADLFLNGLNTTYTVKENEIISDIAKLFGAHKKDIITCNLDLKVDQEIRLTVNSKSLPYKIKENDTLESIAANYNIDINNIHIPHNFFKPGENIKIILNDMRATNIAHYLNYLKIKPRKSKEWTANMVRNILQGYTIYGYLTWDRRKTTKTLVNGHIVKKNPNNDDFTLVRGKHEAILGEDIKQQIEAKFLSNRLKTVPDNKEMKNPLLGLVVCGYCGNNMTRRPYYLRKDAKPTAKRIYDIDKPKLRLLLREHKGNYSLNDIARALHVSKNSVDHWFSSNDDKFCIPHADKWEDLKKLLNIETNEFDKAITTIEESITPPHTDTLMCSRPRCKCVSSELELVENKILKSLKIIMSEYKNYVNNYEEAVKKEICTNKEMIEAIDHEIDKIKSQIEKACELVETGAYTQDLFIKRTNTLNEQLETLLNQKTELSKSKDRTKDLYSKKKAIPILEDVISKYSKDMTAEEKNDLLSTIIKQVIYKKEKGGRYLKENFSLKIILLSF

SEQ ID NO: 43 - protein, 719 aa, Unknown
  Description of Unknown: Integrase B44 sequence
  PTHR30461:SF3,IPR036162,IPR036779,IPR011109,PTHR30461, PF01476,PF00239,IPR006119,SSF53041,cd00338, SM00857,SM00257,cd00118,PS51736,G3DSA:3.40.50.1390, PF07508,IPR018392,G3DSA:3.10.350.10,Coil
MNLDTFLQIMNVSRDLTVDEILDMFIIYLRKSRKDMDYYKDESIEKTLQRHEKELQDFIVSIFGKPIPEHNIYREVASGDTIEDRPVIQEVLSLIEEDRVKGVVCIEIERLARGNTMDQGIIAQAFQYSNTKIITPMKIYNLDNEDDLSYFEDGLYQARKYLKYTKRILARGRLRSVKDGKYVGSVLPYGYNKQKIPNEKGYILVENESESKVVKLLADLFLNGLNTTYTVKENEIISDIAKLFGTHKKDIITCNLDLKVDQEIRLTVNSKSLPYRIKENDTLESIAANYNIDINNIHIPHNFFKPGENIKIILNDMRATNIAHYLNYLKIKPRKSKEWTANMVRNILQGYTIYGYLTWDRRKTTKTLVNGHIVKKNPNNDDFTLVRGKHEAILSEDIKQQIEAKFLSNRLKTVPDNKEMKNPLLGLVVCGYCGNNMTRRPYYLRKDAKPTAKRIYDIDKPKLRLLLREHKGNYSLNDIARALHVSKNSVDHWFSSNDDKFCIPHADKWKDLKKLLNIETNEFDKAITTIEESITPPHTDTLMCSRPRCKCVSSELELVENKILKSLKIIMSEYKNYVNNYEEAVKKEICTNKEMIEAIDHEIDKIKSQIEKACELVETGAYTQDLFIKRTNTLNEQLETLLNQKTELSKSKDRTKDLYSKKKAIPILEDVISKYSKDMTAEEKNALLSAIIKQVIYKKEKGGRYLKENFSLKIILLSF

SEQ ID NO: 44 - protein, 719 aa, Unknown
  Description of Unknown: Integrase B45 sequence
  PTHR30461:SF3,SM00857,IPR036162,G3DSA:3.40.50.1390,SM00257, IPR006119,PF07508,IPR018392,cd00118,SSF53041, IPR011109,PF00239,PTHR30461,PF01476,PS51736, Coil,cd00338
MNLDTFLQIMNVSRDLTVDEILDMFIIYLRKSRKDMDYYKDESIEKTLQRHEKELQDFIVSIFGKPIPEHNIYREVASGDTIEDRPVIQEVLSLIEEDRVKGVVCIEIERLARGNTMDQGIIAQAFQYSNTKIITPMKIYNLDNEDDLSYFEDGLYQARKYLKYTKRILARGRLRSVKDGKYVGSVLPYGYNKQKIPNEKGYVLVENESESKVVKLLADLFLNGLNTTYTVKENEIISDIAKLFGAHKKDIITCNLDLKVDQEIRLTVNSKSLPYKIKENDTLESIAASYNIDINNIHIPHNFFKPGENIKIILNDMRATNIAHYLNYLKIKPRKSKEWTANMVRNILQGYTIYGYLTWDRRKTTKTLVNGHIVKKNPNNDDFTLVRGKHEAILNEDIKQQIEAKFLSNRLKTVPDNKEMKNPLLGLVVCGYCGNNMTRRPYYLRKDAKPTAKRIYDIDKPKLRLLLREHKGNYSLNDIARALHVSKNSVDHWFSSNDDKFCIPHADKWEDLKKLLNIETNEFDKAITTIEESITPPHTDTLMCSRPRCKCVSSELELVENKILKSLKIIMSEYKNYVNNYEEAVKKEICTNKEMIEAIDHEIDKIKSQIEKACELVETGAYTQDLFIKRTNTLNEQLETLLNQKTELSKSKDRTKDLYSKKKAIPILEDVISKYSKDMTAEEKNALLSTIIKQVIYKKEKGGRYLKENFSLKIILLSF

SEQ ID NO: 45 - protein, 719 aa, Unknown
  Description of Unknown: Integrase B46 sequence
  PTHR30461:SF3,IPR036162,IPR036779,IPR011109,PTHR30461, PF01476,PF00239,IPR006119,SSF53041,cd00338, SM00857,SM00257,cd00118,PS51736,G3DSA:3.40.50.1390, PF07508,IPR018392,G3DSA:3.10.350.10,Coil
MNLDTFLQIMNVSRDLTVDEILDMFIIYLRKSRKDMDYYKDESIEKTLQRHEKELQDFIVSIFGKPIPEHNIYREVASGDTIEDRPVIQEVLSLIEEDRVKGVVCIEIERLARGNTMDQGIIAQAFQYSNTKIITPMKIYNLDNEDDLSYFEDGLYQARKYLKYTKRILARGRLRSVKDGKYVGSVLPYGYNKQKIPNEKGYVLVENESESKVVKLLADLFLNGLNTTYTVKENEIISDIAKLFGAHKKDIITCNLDLKVDQEIRLTVNSKSLPYKIKENDTLESIAANYNIDINNIHIPHNFFKPGENIKIILNDMRATNIAHYLNYLKIKPRKSKEWTANMVRNILQGYTIYGYLTWDRRKTTKTLVNGHIVKKNPNNDDFTLVRGKHEAILGEDIKQQIEAKFLSNRLKTVPDNKEMKNPLLGLVVCGYCGNNMTRRPYYLRKDAKPTAKRIYDIDKPKLRLLLREHKGNYSLNDIARALHVSKNSVDHWFSSTDDKFCVPHADKWEDLKKLLNIETNEFDKAITTIEESITPPHTDTLMCSRPRCKCVSSELELVEDKILKSLKIIMSEYKNYVNNYEEAVKKEICTNKEMIEAIDHEIDKIKSQIEKACELVETGAYTQDLFIKRTNTLNEQLETLLNQKTELSKSKDRTKDLYSKKKAIPILEDVISKYSKDMTAEEKNALLSTIIKQIIYKKEKGGRYLKENFSLKIILLSF

SEQ ID NO: 46 - protein, 719 aa, Unknown
  Description of Unknown: Integrase B47 sequence
  cd00338,SM00857,IPR036162,IPR036779,G3DSA:3.40.50.1390, SM00257,IPR006119,PF07508,cd00118,IPR011109, SSF53041,IPR018392,G3DSA:3.10.350.10,PTHR30461,PF01476, PS51736,Coil,PF00239
MNLDTFLQIMNVSRDLTVDEILDMFIIYLRKSRKDMDYYKDESIEKTLQRHEKELQDFIVSIFGKPIPEHNIYREVASGDTIEDRPVIQEVLSLIEEDRVKGVVCIEIERLARGNTMDQGIIAQAFQYSNTKIITPMKIYNLDNEDDLSYFEDGLYQARKYLKYTKRILARGRLRSVKDGKYVGSVLPYGYNKQKIPNEKGYVLVENESESKVVKLLADLFLNGLNTTYTVKENEIISDIAKLFGAHKKDIITCNLDLKVDQEIRLTVNSKSLPYKIKENDTLESIAANYNIDINNIHIPHNFFKPGENIKIILNDMRATNIAHYLNYLKIKPRKSKEWTANMVRNILQGYTIYGYLTWDRRKTTKTLVNGHIVKKNPNNDDFTLVRGKHEAILGEDIKQQIEAKFLSNRLKTVPDNKEMKNPLLGLVVCGYCGNNMTRRPYYLRKDAKPTAKRIYDIDKPKLRLLLREHKGNYSLNDIARALHVSKNSVDHWFSSNDEKFCIPHADKWEDLKKLLNIETNEFDKAITTIEESITPPHTDILMCSRPRCKCVSSELELVEDKILKSLKIIMSEYKNYVNNYEEAVKKEICTNKEMIEAIDHEIDKIKSQIEKACELVETGAYTQDLFIKRTNTLNEQLETLLNQKTELSKSKDRTKDLYSKKKAIPILEDVISKYSKDMTAEEKNALLSTIIKQVIYKKEKGGRYLKENFSLKIILLSF

SEQ ID NO: 47 - protein, 719 aa, Unknown
  Description of Unknown: Integrase B48 sequence
  PTHR30461:SF3,IPR036162,IPR036779,IPR011109,PTHR30461, PF01476,PF00239,IPR006119,SSF53041,cd00338, SM00857,SM00257,cd00118,PS51736,G3DSA:3.40.50.1390, PF07508,IPR018392,G3DSA:3.10.350.10,Coil
MNLDTFLQIMNVSRDLTVDEILDMFIIYLRKSRKDMDYYKDESIEKTLQRHEKELQDFIVSIFGKPIPEHNIYREVASGDTIEDRPVIQEVLSLIEEDRVKGVVCIEIERLARGNTMDQGIIAQAFQYSNTKIITPMKIYNLDNEDDLSYFEDGLYQARKYLKYTKRILARGRLRSVKDGKYVGSVLPYGYNKQKIPNEKGYVLVENESESKVVKLLADLFLNGLNTTYTVKENEIISDIAKLFGTHKKDIITCNLDLKVDQEIRLTVNSKSLPYKIKENDTLESIAASYNIDINNIHIPHNFFKPGENIKIILNDMRATNIAHYLNYLKIKPRKSKEWTANMVRNILQGYTIYGYLTWDRRKTTKTLVNGHIVKKNPNNDDFTLVRGKHEAILGEDIKQQIEAKFLSNRLKTVPDNKEMKNPLLGLVVCGYCGNNMTRRPYYLRKDAKPTAKRIYDIDKPKLRLLLREHKGNYSLNDIARALHVSKNSVDHWFSSNDEKFCIPHADKWEDLKKLLNIETNEFDKAITTIKESITPPHTDTLMCSRPRCKCVSSELELVEDKILKSLKIIMSEYKNYVNNYEEAVKKEICTNKEMIEAIDHEIDKIKSQIEKACELVETGAYTQDLFIKRTNTLNEQLETLLNQKTELSKSKDRTKDLYSKKKAIPILEDVISKYSKDMTAEEKNDLLSTIIKQVIYKKEKGGRYLKENFSLKIILLSF

SEQ ID NO: 48 - protein, 719 aa, Unknown
  Description of Unknown: Integrase B49 sequence
  PTHR30461:SF3,IPR036162,IPR036779,IPR011109,PTHR30461, PF01476,PF00239,IPR006119,SSF53041,cd00338, SM00857,SM00257,cd00118,PS51736,G3DSA:3.40.50.1390, PF07508,IPR018392,G3DSA:3.10.350.10,Coil
MNLDTFLQIMNVSRDLTVDEILDMFIIYLRKSRKDMDYYKDESIEKTLQRHEKELQDFIVSIFGKPIPEHNIYREVASGDTIEDRPVIQEVLSLIEEDRVKGVVCIEIERLARGNTMDQGIIAQAFQYSNTKIITPMKIYNLDNEDDLSYFEDGLYQARKYLKYTKRILARGRLRSVKDGKYVGSVLPYGYNKQKIPNEKGYVLVENESESKVVKLLADLFLNGLNTTYTVKENEIISDIAKLFGTHKKDIITCNLDLKVDQEIRLTVNSKSLPYKIKENDTLESIAANYNIDINNIHIPHNFFKPGENIKIILNDMRATNIAHYLNYLKIKPRKSKEWTANMVRNILQGYTIYGYLTWDRRKTTKTLVNGHIVKKNPNNDDFTLVRGKHEAILGEDIKQQIEAKFLSNRLKTVPDNKEMKNPLLGLVVCGYCGNNMTRRPYYLRKDAKPTAKRIYDIDKPKLRLLLREHKGNYSLNDIARALHVSKNSVDHWFSSNDEKFCIPHADKWEDLKKLLNIETNEFDKAITTIEESITPPHTDTLMCSRPRCKCVSSELELVEDKILKSLKIIMSEYKNYVNNYEEAVKKEICTNKEMIEAIDHEIDKIKSQIEKACELVETGAYTQDLFIKRTNTLNEQLETLLNQKTELSKSKDRTKDLYSKKKAIPILEDVISKYSKDMTAEEKNALLSTIIKQVIYKKEKGGRYLKENFSLKIILLSF

SEQ ID NO: 49 - protein, 719 aa, Unknown
  Description of Unknown: Integrase B50 sequence
  PTHR30461:SF3,SM00857,IPR036162,G3DSA:3.40.50.1390,SM00257, IPR006119,PF07508,IPR018392,SSF53041,cd00118, IPR011109,PF00239,PTHR30461,PF01476,PS51736, Coil,cd00338
MNLDTFLQIMNVSRDLTVDEILDMFIIYLRKSRKDMDYYKDESIEKTLQRHEKELQDFIVSIFGKPIPEHNIYREVASGDTIEDRPVIQEVLSLIEEDRVKGVVCIEIERLARGNTMDQGIIAQAFQYSNTKIITPMKIYNLDNEDDLSYFEDGLYQARKYLKYTKRILARGRLRSVKDGKYVGSVLPYGYNKQKIPNEKGYVLVENESESKVVKLLADLFLNGLNTTYTVKENEIISDIAKLFGAHKKDIITCNLDLKVDQEIKLTVNSKSLPYKIKENDTLESIAANYNIDINNVHIPHNFFKPGENIKIILNDMRATNIAHYLNYLKIKPRKSKEWTANMVRNILQGYTIYGYLTWDRRKTTKTLVNGHIVKKNPNNDDFTLVRGKHEAILGEDIKHQIEAKFLSNRLKTVPDNKEMKNPLLGLVVCGYCGNNMTRRPYYLRKDAKPTAKRIYDIDKPKLRLLLREHKGNYSLNDIARALHVSKNSVDHWFSSNDEKFCIPHADKWEDLKKLLNIETNEFDKAITTIEESITPPHTDTLMCSRPRCKCVSSELELVENKILKSLKIIMSEYKNYVNNYEEAVKKEICTNKEMIEAIDHEIDKIKSQIEKACELVETGAYTQDLFIKRTNTLNEQLEILLNQKTELSKSKDRTKDLYSKKKAIPILEDVISKYSKDMTAEEKNALLSTIIKQVIYKKEKGGRYLKENFSLKIILLSF

SEQ ID NO: 50 - protein, 719 aa, Unknown
  Description of Unknown: Integrase B51 sequence
  PTHR30461:SF3,cd00338,SM00857,IPR036162,G3DSA:3.40.50.1390, SM00257,IPR006119,PF07508,cd00118,SSF53041, IPR018392,IPR011109,PTHR30461,PF01476,PS51736, Coil,PF00239
MNLDTFLQIMNVSRDLTVDEILDMFIIYLRKSRKDMDYYKDESIEKTLQRHEKELQDFIVSIFGKPIPEHNIYREVASGDTIEDRPVIQEVLSLIEEDRVKGVVCIEIERLARGNTMDQGIIAQAFQYSNTKIITPMKIYNLDNEDDLSYFEDGLYQARKYLKYTKRILARGRLRSVKDGKYVGSVLPYGYNKQKIPNEKGYVLVENESESKVVKLLADLFLNGLNTTYTVKENEIISDIAKLFGTHKKDIITCNLDLKVDQEIRLTVNSKSLPYKIKENDTLESIAANYNIDINNIHIPHNFFKPGENIKIILNDMRATNIAHYLNYLKIKPRKSKEWTANMVRNILQGYTIYGYLTWDRRKTTKTLVNGHIVKKNPNNDDFTLVRGKHEAILGEDIKQQIEAKFLSNRLKTVPDNKEMKNPLLGLVVCGYCGNNMTRRPYYLRKDAKPTAKRIYDIDKPKLRLLLREHKGNYSLNDIARALHVSKNSVDHWFSSNDDKFCIPHADKWEDLKKLLNIETNEFDKAITTIKESITPPHTDTLMCSRPRCKCVSSELELVEDKILKSLKIIMSEYKNYVNNYEEAVKKEICTNKEMIEAIDHEIDKIKSQIEKACELVETGAYTQDLFIKRTNTLNEQLETLLNQKTELSKSKDRTKDLYSKKKAIPILEDVISKYSKDMTAEEKNALLSTIIKQVIYKKEKGGRYLKENFSLKIILLSF

SEQ ID NO: 51 - protein, 719 aa, Unknown
  Description of Unknown: Integrase B52 sequence
  PTHR30461:SF3,IPR036162,IPR036779,IPR011109,PTHR30461, PF01476,PF00239,IPR006119,SSF53041,cd00338, SM00857,SM00257,cd00118,PS51736,G3DSA:3.40.50.1390, PF07508,IPR018392,G3DSA:3.10.350.10,Coil
MNLDTFLQIMNVSRDLTVDEILDMFIIYLRKSRKDMDYYKDESIEKTLQRHEKELQDFIVSIFGKPIPEHNIYREVASGDTIEDRPVIQEVLSLIEEDRVKGVVCIEIERLARGNTMDQGIIAQAFQYSNTKIITPMKIYNLDNEDDLSYFEDGLYQARKYLKYTKRILARGRLRSVKDGKYVGSVLPYGYNKQKIPNEKGYVLVENESESKVVKLLADLFLNGLNTTYTVKENEIISDIAKLFGTHKKDIITCNLDLKVDQEIRLTVNSKSLPYRIKENDTLESIAANYNIDINNIHIPHNFFKPGENIKIILNDMRATNIAHYLNYLKIKPRKSKEWTANMVRNILQGYTIYGYLTWDRRKTTKTLVNGHIVKKNPNNDDFTLVRGKHEAILSEDIKQQIEAKFLSNRLKTVPDNKEMKNPLLGLVVCGYCGNNMTRRPYYLRKDAKPTAKRIYDIDKPKLRLLLREHKGNYSLNDIARALHVSKNSVDHWFSSNDDKFCIPHADKWKDLKKLLNIETNEFDKAITTIEESITPPHTDTLMCSRPRCKCVSSELELVENKILKSLKIIMSEYKNYVNNYEEAVKKEICTNKEMIEAIDHEIDKIKSQIEKACELVETGAYTQDLFIKRTNTLNEQLETLLNQKTELSKSKDRTKDLYSKKKAIPILEDVISKYSKDMTAEEKNALLSTIIKQVIYKKEKGGRYLKENFSLKIILLSF

SEQ ID NO: 52 - protein, 719 aa, Unknown
  Description of Unknown: Integrase B53 sequence
  PTHR30461:SF3,IPR036162,IPR036779,IPR011109,PTHR30461, PF01476,PF00239,IPR006119,SSF53041,cd00338, SM00857,SM00257,cd00118,PS51736,G3DSA:3.40.50.1390, PF07508,IPR018392,G3DSA:3.10.350.10,Coil
MNLDTFLQIMNVSRDLTVDEILDMFIIYLRKSRKDMDYYKDESIEKTLQRHEKELQDFIVSIFGKPIPEHNIYREVASGDTIEDRPVIQEVLSLIEEDRVKGVVCIEIERLARGNTMDQGIIAQAFQYSNTKIITPMKIYNLDNEDDLSYFEDGLYQARKYLKYTKRILARGRLRSVKDGKYVGSVLPYGYNKQKIPNEKGYVLVENESESKVVKLLADLFLNGLNTTYTVKENEIISDIAKLFGAHKKDIITCNLDLKVDQEIRLTVNSKSLPYKIKENDTLESIAANYNIDINNIHIPHNFFKPGENIKIILNDMRATNIAHYLNYLKIKPRKSKEWTANMVRNILQGYTIYGYLTWDRRKTTKTLVNGHIVKKNPNNDDFTLVRGKHEAILSEDIKQQIEAKFLSNRIKTVPDNKEMKNPLLGLVVCGYCGNNMTRRPYYLRKDAKPTAKRIYDIDKPKLRLLLREHKGNYSLNDIARALHVSKNSVDHWFSSNDEKFCIPHADKWEDLKKLLNIETNEFDKAITTIEESITPPHTDTLMCSRPRCKCVSSELELVEDKILKSLKIIMSEYKNYVNNYEEAVKKEICTNKEMIEAIDHEIDKIKSQIEKACELVETGAYTQDLFIKRTNTLNEQLETLLNQKTELSKSKDRTKDLYSKKKAIPILEDVISKYSKDMTAEEKNALLSTIIKQVIYKKEKGGRYLKENFSLKIILLSF

SEQ ID NO: 53 - protein, 719 aa, Unknown
  Description of Unknown: Integrase B54 sequence
  PTHR30461:SF3,IPR036162,IPR036779,IPR011109,PTHR30461, PF01476,PF00239,IPR006119,SSF53041,cd00338, SM00857,SM00257,cd00118,PS51736,G3DSA:3.40.50.1390, PF07508,IPR018392,G3DSA:3.10.350.10,Coil
MNLDTFLQMMNVSRDLTVDEILDMFIIYLRKSRKDMDYYKDESIEKTLQRHEKELQDFIVSIFGKPIPEHNIYREVASGDTIEDRPVIQEVLSLIEEDRVKGVVCIEIERLARGNTMDQGIIAQAFQYSNTKIITPMKIYNLDNEDDLSYFEDGLYQARKYLKYTKRILARGRLRSVKDGKYVGSVLPYGYNKQKIPNEKGYVLVENESESKVVKLLADLFLNGLNTTYTVKENEIISDIAKLFGAHKKDIITCNLDLKVDQEIRLTVNSKSLPYKIKENDTLESIAASYNIDINNIHIPHNFFKPGENIKIILNDMRATNIAHYLNYLKIKPRKSKEWTANMVRNILQGYTIYGYLTWDRRKTTKTLVNGHIVKKNPNNDDFTLVRGKHEAILSEDIKQQIEAKFLSNRLKTVPDNKEMKNPLLGLVVCGYCGNNMTRRPYYLRKDAKPTAKRIYDIDKPKLRLLLREHKGNYSLNDIARALHVSKNSVDHWFSSNDEKFCIPHADKWEDLKKLLNIETNEFDKAITTIEESITPPHTDTLMCSRPRCKCVSSELELVEDKILKSLKIIMSEYKNYVNNYEEAVKKEICTNKEMIEAIDHEIDKIKSQIEKACELVETGAYTQDLFIKRTNTLNEQLETLLNQKTELSKSKDRTKDLYSKKKAIPILEDVISKYSKDMTAEEKNALLSTIIKQVIYKKEKGGRYLKENFSLKIILLSF

SEQ ID NO: 54 - protein, 719 aa, Unknown
  Description of Unknown: Integrase B55 sequence
  PTHR30461:SF3,IPR036162,IPR036779,IPR011109,PTHR30461, PF01476,PF00239,IPR006119,SSF53041,cd00338, SM00857,SM00257,cd00118,PS51736,G3DSA:3.40.50.1390, PF07508,IPR018392,G3DSA:3.10.350.10,Coil
MNLDTFLQIMNVSRDLTVDEILDMFIIYLRKSRKDMDYYKDESIEKTLQRHEKELQDFIVSIFGKPIPEHNIYREVASGDTIEDRPVIQEVLSLIEEDRVKGVVCIEIERLARGNTMDQGIIAQAFQYSNTKIITPMKIYNLDNEDDLSYFEDGLYQARKYLKYTKRILARGRLRSVKDGKYVGSVLPYGYNKQKIPNEKGYVLVENESESKVVKLLADLFLNGLNTTYTVKENEIISDIAKLFGAHKKDIITCNLDLKVDQEIRLTVNSKSLPYKIKENDTLESIAASYNIDINNIHIPHNFFKPGENIKIILNDMRATNIAHYLNYLKIKPRKSKEWTANMVRNILQGYTIYGYLTWDRRKTTKTLVNGHIVKKNPNNDDFTLVRGKHEAILSEDIKQQIEAKFLSNRLKTVPDNKEMKNPLLGLVVCGYCGNNMTRRPYYLRKDAKPTAKRIYDIDKPKLRLLLRKHKGNYSLNDIARALHVSKNSVDHWFSSNDEKFCIPHADKWEDLKKLLNIETNEFDKAITTIEESITPPHTDTLMCSRPRCKCVSSELELVEDKILKSLKIIMSEYKNYVNNYEEAVKKEICTNKEMIEAIDHEIDKIKSQIEKACELVETGAYTQDLFIKRTNTLNEQLETLLNQKTELSKSKDRTKDLYSKKKAIPILEDVISKYSKDMTAEEKNALLSTIIKQVIYKKEKGGRYLKENFSLKIILLSF

SEQ ID NO: 55 - protein, 719 aa, Unknown
  Description of Unknown: Integrase B56 sequence
  PTHR30461:SF3,cd00338,SM00857,IPR036162,G3DSA:3.40.50.1390, SM00257,IPR006119,PF07508,IPR018392,SSF53041, cd00118,IPR011109,PTHR30461,PF01476,PS51736, Coil,PF00239
MNLDTFLQIMNVSRDLTVDEILDMFIIYLRKSRKDMDYYKDESIEKTLQRHEKELQDFIVSIFGKPIPEHNIYREVASGDTIEDRPVIQEVLSLIEEDRVKGVVCIEIERLARGNTMDQGIIAQAFQYSNTKIITPMKIYNLDNEDDLSYFEDGLYQARKYLKYTKRILARGRLRSVKDGKYVGSVLPYGYNKQKIPNEKGYVLVENESESKIVKLLADLFLNGLNTTYTVKENEIISDIAKLFGTHKKDIITCNLDLKVDQEIRLTVNSKSLPYRIKENDTLESIAANYNIDINNIHIPHNFFKPGENIKIILNDMRATNIAHYLNYLKIKPRKSKEWTANMVRNILQGYTIYGYLTWDRRKTTKTLVNGHIVKKNPNNDDFTLVRGKHEAILSEDIKQQIEAKFLSNRLKTVPDNKEMKNPLLGLVVCGYCGNNMTRRPYYLRKDAKPTAKRIYDIDKPKLRLLLREHKGNYSLNDIARALHVSKNSVDHWFSSNDEKFCIPHADKWEDLKKLLNIETNEFDKAITTIEESITPPHTDTLMCSRPRCKCVSSELELVENKILKSLKIIMSEYKNYVNNYEEAVKKEICTNKEMIEAIEHEIDKIKSQIEKACELVETGAYTQDLFIKRTNTLNEQLETLLNQKTELSKSKDRTKDLYSKKKAIPILEDVISKYSKDMTAEEKNALLSTIIKQVIYKKEKGGRYLKENFSLKIILLSF

SEQ ID NO: 56 - protein, 719 aa, Unknown
  Description of Unknown: Integrase B57 sequence
  PTHR30461:SF3,IPR036162,IPR036779,IPR011109,PTHR30461, PF01476,PF00239,IPR006119,SSF53041,cd00338, SM00857,SM00257,cd00118,PS51736,G3DSA:3.40.50.1390, PF07508,IPR018392,G3DSA:3.10.350.10,Coil
MNLDTFLQIMNVSRDLTVDEILDMFIIYLRKSRKDMDYYKDESIEKTLQRHEKELQDFIVSIFGKPIPEHNIYREVASGDTIEDRPVIQEVLSLIEEDRVKGVVCIEIERLARGNTMDQGIIAQAFQYSNTKIITPMKIYNLDNEDDLSYFEDGLYQARKYLKYTKRILARGRLRSIKDGKYVGSVLPYGYNKQKIPNEKGYVLVENESESKVVKLLADLFLNGLNTTYTVKENEIISDIAKLFGTHKKDIITCNLDLKVDQEIRLTVNSKSLPYKIKENDTLESIAANYNIDINNIHIPHNFFKPGENIKIILNDMRATNIAHYLNYLKIKPRKSKEWTANMVRNILQGYTIYGYLTWDRRKTTKTLVNGHIVKKNPNNNDFTLVRGKHEAILSEDIKQQIEAKFLSNRLKTVPDNKEMKNPLLGLVICGYCGNNMTRRPYYLRKDAKPTAKRIYDIDKPKLRLLLREHKGNYSLNDIARALHVSKNSVDHWFSSNDEKFCIPHADKWEDLKKLLNIETNEFDKAITTIEESITPPHTDTLMCSRPRCKCVSSELELVEDKILKSLKIIMSEYKNYVNNYEEAVKKEICTNKEMIEAIDHEIDKIKSQIEKACELVETGAYTQDLFIKRTNTLNEQLETLLNQKTELSKSKDRTKDLYSKKKAIPILEDVISKYSKDMTAEEKNALLSTIIKQVIYKKEKGGRYLKENFSLKIILLSF

SEQ ID NO: 57 - protein, 719 aa, Unknown
  Description of Unknown: Integrase B58 sequence
  PTHR30461:SF3,IPR036162,IPR036779,IPR011109,PTHR30461, PF01476,PF00239,IPR006119,SSF53041,cd00338, SM00857,SM00257,cd00118,PS51736,G3DSA:3.40.50.1390, PF07508,IPR018392,G3DSA:3.10.350.10,Coil
MNLDTFLQIMNVSRDLTVDEILDMFIIYLRKSRKDMDYYKDESIEKTLQRHEKELQDFIVSIFGKPIPEHNIYREVASGDTIEDRPVIQEVLSLIEEDRVKGVVCIEIERLARGNTMDQGIIAQAFQYSNTKIITPMKIYNLDNEDDLSYFEDGLYQARKYLKYTKRILARGRLRSVKDGKYVGSVLPYGYNKQKIPNEKGYVLVENESESKVVKLLADLFLNGLNTTYTVKENEIISDIAKLFGAHKKDIITCNLDLKVDQEIRLTVNSKSLPYKIKENDTLESIAASYNIDINNIHIPHNFFKPGENIKIILNDMRATNIAHYLNYLKIKPRKSKEWTANMVRNILQGYTIYGYLTWDRRKTTKTLVNGHIVKKNPNNDDFTLVRGKHEAILGEDIKQQIEAKFLSNRLKTVPDNKEMKNPLLGLVVCGYCGNNMTRRPYYLRKDAKPTAKRIYDIDKPKLRLLLREHKGNYSLNDIARALHVSKNSVDHWFSSNDEKFCIPHADKWEDLKKLLNIETNEFDKAITTIKESITPPHTDTLMCSRPRCKCVSSELELVEDKILKSLKIIMSEYKNYVNNYEEAVKKEICTNKEMIEAIDHEIDKIKSQIEKACELVETGAYTQDLFIKRTNTLNEQLETLLNQKTELSKSKDRTKDLYSKKKAIPILEDVISKYSKDMTAEEKNALLSTIIKQVIYKKEKGGRYLKENFSLKIILLSF

SEQ ID NO: 58 - protein, 719 aa, Unknown
  Description of Unknown: Integrase B59 sequence
  cd00338,SM00857,IPR036162,G3DSA:3.40.50.1390,SM00257, IPR006119,PF07508,cd00118,IPR018392,IPR011109, SSF53041,PTHR30461,PF01476,PS51736,Coil, PF00239
MNLDTFLQIMNVSRELTVDEILDMFIIYLRKSRKDMDYYKDESIEKTLQRHEKELQDFIVSIFGKPIPEHNIYREVASGDTIEDRPVIQEVLSLIEEDRVKGVVCIEIERLARGNTMDQGIIAQAFQYSNTKIITPMKIYNLDNEDDLSYFEDGLYQARKYLKYTKRILTRGRLRSVKDGKYVGSVLPYGYNKQKIPNEKGYVLVENESESKVVKLLADLFLNGLNTTYTVKENEIISDIAKLFGTHKKDIITCNLDLKVDQEIRLTVNSKSLPYKIKENDTLESIAANYNIDINNIHIPHNFFKPGENIKIILNDMRATNIAHYLNYLKIKPRNSKEWTANMVRNILQSYTIYGYLTWDRRKTTKTLVNGHIVKKNPNNDDFTLVRGKHKAILSEDIKQQIEAKFLSNRLKTVPDNKEMKNPLLGLVVCGYCGNNMTRRPYYLRKDAKPTAKRIYDIDKPKLRLLLREHKGNYSLNDIARALHVSKNSVDHWFSSNDEKFCIPHADKWDDLKKLLNIETNEFDKAITTIEESITSPHTDTLMCSRPRCKCVSSELELVEDKILKSLKIIMSEYKNYVNNYEEAVKKEICTNKEMIEAIDHEIDKIKSQIEKACELVETGAYSQDLFIKRTNTLNEQLETLLNQKKELSKSKDRTKDLYSKKKAIPILEDVISKYSKDMTAEEKNALLSAIIKQVIYKKEKGGRYLKENFSLKIILLSF

SEQ ID NO: 59 - protein, 719 aa, Unknown
  Description of Unknown: Integrase B60 sequence
  PTHR30461:SF3,IPR036162,IPR036779,IPR011109,PTHR30461, PF01476,PF00239,IPR006119,SSF53041,cd00338, SM00857,SM00257,cd00118,PS51736,G3DSA:3.40.50.1390, PF07508,IPR018392,G3DSA:3.10.350.10,Coil
MNLDTFLQIMNVSRDLTVDEILDMFIIYLRKSRKDMDYYKDESIEKTLQRHEKELQDFIVSIFGKPIPEHNIYREVASGDTIEDRPVIQEVLSLIEEDRVKGVVCIEIERLARGNTMDQGIIAQAFQYSNTKIITPMKIYNLDNEDDLSYFEDGLYQARKYLKYTKRILARGRLRSVKDGKYVGSVLPYGYNKQKIPNEKGYVLVENESESKVVKLLADLFLNGLNTTYTVKENEIISDIAKLFGTHKKDIITCNLDLKVDQEIRLTVNSKSLPYKIKENDTLESIAASYNIDINNIHIPHNFFKPGENIKIILNDMRATNIAHYLNYLKIKPRKSKEWTANMVRNILQGYTIYGYLTWDRRKTTKTLVNGHIVKKNPNNDDFTLVRGKHEAILSEDIKQQIEAKFLSNRLKTVPDNKEMKNPLLGLVVCGYCGNNMTRRPYYLRKDAKPTAKRIYDIDKPKLRLLLREHKGNYSLNDIARALHVSKNSVDHWFSSNDEKFCIPHADKWEDLKKLLNIETNEFDKAITTIEESITPPHTDTLMCSRPRCKCVSSELELVEDKILKSLKIIMSEYKNYVNNYEEAVKKEICTNKEMIEAIDHEIDKIKSQIEKACELVETGAYTQDLFIKRTNTLNEQLETLLNQKTELSKSKDRTKDLYSKKKAIPILEDVISKYSKDMTAEEKNALLSTIIKQVIYKKEKGGRYLKENFSLKIILLSF

SEQ ID NO: 60 - protein, 719 aa, Unknown
  Description of Unknown: Integrase B61 sequence
  PTHR30461:SF3,IPR036162,IPR036779,IPR011109,PTHR30461, PF01476,PF00239,IPR006119,SSF53041,cd00338, SM00857,SM00257,cd00118,PS51736,G3DSA:3.40.50.1390, PF07508,IPR018392,G3DSA:3.10.350.10,Coil
MNLDTFLQIMNVSRDLTVDEILDMFIIYLRKSRKDMDYYKDESIEKTLQRHEKELQDFIVSIFGKPIPEYNIYREVASGDTIEDRPVIQEVLSLIEEDRVKGVVCIEIERLARGNTMDQGIIAQAFQYSNTKIITPMKIYNLDNEDDLSYFEDGLYQARKYLKYTKRILARGRLRSVKDGKYVGSILPYGYNKQKIPNEKGYVLVENESESKVVKLLADLFLNGLNTTYTVKENEIISDIAKLFGTHKKDIITCNLDLKVDQEIRLTVNSKSLPYKIKENDTLESIAANYNIDINNIHIPHNFFKPGENIKIILNDMRATNIAHYLNYLKIKPRKSKEWTANMVRNILQGYTIYGYLTWDRRKTTKTLVNGHIVKKNPNNDDFTLVRGKHEAILGEDIKQQIEAKFLSNRLKTVPDNKEMKNPLLGLVVCGYCGNNMTRRPYYLRKDAKPTAKRIYDIDKPKLRLLLREHKGNYSLNDIARALHVSKNSVDHWFSSNDEKFCIPHADKWEDLKKLLNIETNEFDKAITTIEESITPPHTDTLMCSRPRCKCVSSELELVEDKILKSLKIIMSEYKNYVNNYEEAVKKEICTNKEMIEAIDHEIDKIKSQIEKACELVETGAYTQDLFIKRTNTLNEQLETLLNQKTELSKSKDRTKDLYSKKKAIPILEDVISKYSKDMTAEEKNALLSTIIKQVIYKKEKGGRYLKENFSLKIILLSF

SEQ ID NO: 61 - protein, 719 aa, Unknown
  Description of Unknown: Integrase B62 sequence
  PTHR30461:SF3,IPR036162,IPR036779,IPR011109,PTHR30461, PF01476,PF00239,IPR006119,SSF53041,cd00338, SM00857,SM00257,cd00118,PS51736,G3DSA:3.40.50.1390, PF07508,IPR018392,G3DSA:3.10.350.10,Coil
MNLDTFLQIMNVSRDLTVDEILDMFIIYLRKSRKDMDYYKDESIEKTLQRHEKELQDFIVSIFGKPIPEHNIYREVASGDTIEDRPVIQEVLSLIEEDRVKGVVCIEIERLARGNTMDQGIIAQAFQYSNTKIITPMKIYNLDNEDDLSYFEDGLYQARKYLKYTKRILARGRLRSVKDGKYVGSVLPYGYNKQKIPNEKGYVLVENESESKVVKLLADLFLNGLNTTYTVKENEIISDIAKLFGTHKKDIITCNLDLKVDQEIRLTVNSKSLPYKIKENDTLESIAASYNIDINNIHIPHNFFKPGENIKIILNDMRATNIAHYLNYLKIKPRKSKEWTANMVRNILQGYTIYGYLTWDRRKTTKTLVNGHIVKKNPNNDDFTLVKGKHEAILSEDIKQQIEAKFLSNRLKTVPDNKEMKNPLLGLVVCGYCGNNMTRRPYYLRKDAKPTAKRIYDIDKPKLRLLLREHKGNYSLNDIARALHVSKNSVDHWFSSNDEKFCIPHADKWEDLKKLLNIETNEFDKAITTIEESITPPHTDTLMCSRPRCKCVSSELELVEDKILKSLKIIMSEYKNYVNNYEEAVKKEICTNKEMIEAIDHEIDKIKSQIEKACELVETGAYTQDLFIKRTNTLNEQLETLLNQKTELSKSKDRTKDLYSKKKAIPILEDVISKYSKDMTAEEKNALLSTIIKQVIYKKEKGGRYLKENFSLKIILLSF

SEQ ID NO: 62 - protein, 719 aa, Unknown
  Description of Unknown: Integrase B63 sequence
  cd00338,SM00857,IPR036162,IPR036779,G3DSA:3.40.50.1390, SM00257,IPR006119,PF07508,cd00118,SSF53041, IPR018392,IPR011109,PTHR30461,G3DSA:3.10.350.10,PF01476, PS51736,Coil,PF00239
MNLDTFLQIMNVSRDLTVDEILDMFIIYLRKSRKDMDYYKDESIEKTLQRHEKELQDFIVSIFGKPIPEHNIYREVASGDTIEDRPVIQEVLSLIEEDRVKGVVCIEIERLARGNTMDQGIIAQAFQYSNTKIITPMKIYNLDNEDDLSYFEDGLYQARKYLKYTKRILARGRLRSVKDGKYVGSVLPYGYNKQKIPNEKGYVLVENESESKVVKLLADLFLNGLNTTYTVKENEIISDIAKLFGAHKKDIITCNLDLKVDQEIRLTVNSKSLPYKIKENDTLESIAANYNIDINNIHIPHNFFKPGENIKIILNDMRATNIAHYLNYLKIKPRKSKEWTANMVRNILQGYTIYGYLTWDRRKTTKTLVNGHIVKKNPNNDDFTLVRGKHEAILSEDIKQQIEAKFLSNRLKTVPDNKEMKNPLLGLVVCGYCGNNMTRRPYYLRKDAKPTAKRIYDIDKPKLRLLLREHKGNYSLNDIARALHVSKNYVDHWFSSNDEKFCIPHADKWDDLKKLLNIETNEFDKAITTIEESITSPHTDTLMCSRPRCKCVSSELELVEDKILKSLKIIISEYKNYVNNYEEAVKKEICTNKEMIEAIDHEIDKIKSQIEKACELVETGAYSQDLFIKRTNTLNEQLETLLNQKKELSKSKDRTKDLYSKKKAIPILEDVISKYSKDMTAEEKNALLLAIIKQVIYKKEKGGRYLKENFSLKIILLSF

SEQ ID NO: 63 - protein, 719 aa, Unknown
  Description of Unknown: Integrase B64 sequence
  PTHR30461:SF3,cd00338,SM00857,IPR036162,IPR036779, G3DSA:3.40.50.1390,IPR006119,PF07508,IPR018392,IPR011109, SSF53041,cd00118,PTHR30461,G3DSA:3.10.350.10,PF01476, PS51736,Coil,PF00239
MNLDTFLQIMNVSRDLTVDEILDMFIIYLRKSRKDMDYYKDESIEKTLQRHEKELQDFIISIFGKPIPEHNIYREVASGDTIEDRPVIQEVLSLIEEDRVKGVVCIEIERLARGNTMDQGIIAQAFQYSNTKIITPMKIYNLDNEDDLSYFEDGLYQARKYLKYTKRILARGRLRSVKDGKYVGSVLPYGYNKQKIPNEKGYVLVENESESKVVKLLADLFLNGLNTTYTVKENEIILDIAKLFGAHKKDIITCNLDLKVDQEIRLTVNSKSLPYKIKENDTLESIAANYNIDINNIHIPHNFFKPGENIKIILNDMRATNIAHYLNYLKIKPRKSKEWTANMVRNILQGYTIYGYLTWDRRKTTKTLVNGHIVKKNPNNDDFTLVRGKHEAILGEDIKQQIEAKFLSNRLKTVPDNKEMKNPLLGLVVCGYCGNNMTRRPYYLRKDAKPTAKRIYDIDKPKLRLLLRKHKGNYSLNDIARALHVSKNSVDHWFSSNDEKFCIPHADKWEDLKKLLNIETNEFDKAITTIEESITPPHTDTLMCSRPRCKCVSSELELVEDKILKSLKIIMSEYKNYVNNYEEAVKKEICTNKEMIEAIDHEIDKIKSQIEKACELVETGAYTQDLFIKRTNTLNEQLETLLNQKTELSKSKDRTKDLYSKKKAIPILEDVISKYSKDMTAEEKNALLSTIIKQVIYKKEKGGRYLKENFSLKIILLSF

SEQ ID NO: 64 - protein, 719 aa, Unknown
  Description of Unknown: Integrase B65 sequence
  PTHR30461:SF3,IPR036162,IPR036779,IPR011109,PTHR30461, PF01476,PF00239,IPR006119,SSF53041,cd00338, SM00857,SM00257,cd00118,PS51736,G3DSA:3.40.50.1390, PF07508,IPR018392,G3DSA:3.10.350.10,Coil
MNLDTFLQIMNVSRDLTVDEILDMFIIYLRKSRKDMDYYKDESIEKTLQRHEKELQDFIVSIFGKPIPEHNIYREVASGDTIEDRPVIQEVLSLIEEDRVKGVVCIEIERLARGNTMDQGIIAQAFQYSNTKIITPMKIYNLDNEDDLSYFEDGLYQARKYLKYTKRILARGRLRSVKDGKYVGSVLPYGYNKQKIPNEKGYVLVENESESKVVKLLADLFLNGLNTTYTVKENEIISDIAKLFGAHKKDIITCNLDLKVDQEIRLTVNSKSLPYKIKENDTLESIAANYNIDINNIHIPHNFFKPGENIKIILNDMRATNIAHYLNYLKIKPRKSKEWTANMVRNILQGYTIYGYLTWDRRKTTKTLVNGHIVKKNPNNDDFTLVRGKHEAILGEDIKQQIEAKFLSNRLKTVPDNKEMKNPLLGLVVCGYCGNNMTRRPYYLRKDAKPTAKRIYDIDKPKLRLLLREHKGNYSLNDIARALHVSKNSVDHWFSSNDDKFCIPHADKWEDLKKLLNIETNEFDKAITTIEESITPPHTDTLMCSRPRCKCVSSELELVENKILKSLKIIMSEYKNYVNNYEEAVKKEICTNKEMIEAIDHEIDKIKSQIEKACELVETGAYTQDLFIKRTNTLNEQLETLLNQKTELSKSKDRTKDLYSKKKAIPILEDVISKYSKDMTAEEKNALLSTIIKQVIYKKEKGGRYLKENFSLKIILLSF

SEQ ID NO: 65 - protein, 719 aa, Unknown
  Description of Unknown: Integrase B66 sequence
  PTHR30461:SF3,IPR036162,IPR036779,IPR011109,PTHR30461, PF01476,PF00239,IPR006119,SSF53041,cd00338, SM00857,SM00257,cd00118,PS51736,G3DSA:3.40.50.1390, PF07508,IPR018392,G3DSA:3.10.350.10,Coil
MNLDTFLQIMNVSRDLTVDEILDMFIIYLRKSRKDMDYYKDESIEKTLQRHEKELQDFIVSIFGKPIPEHNIYREVASGDTIEDRPVIQEVLSLIEEDRVKGVVCIEIERLARGNTMDQGIIAQAFQYSNTKIITPMKIYNLDNEDDLSYFEDGLYQARKYLKYTKRILARGRLRSVKDGKYVGSVLPYGYNKQKIPNEKGYVLVENESESKVVKLLADLFLNGLNTTYTVKENEIISDIAKLFGAHKKDIITCNLDLKVDQEIRLTVNSKSLPYKIKENDTLESIAANYNIDINNIHIPHNFFKPGENIKIILNDMRATNIAHYLNYLKIKPRKSKEWTANMVRNILQGYTIYGYLTWDRRKTTKTLVNGHIVKKNPNNDDFTLVRGKHEAILGEDIKQQIEAKFLSNRLKTVPDNKEMKNPLLGLVVCGYCGNNMTRRPYYLRKDAKPTAKRIYDIDKPKLRLLLREHKGNYSLNDIARALHVSKNSVDHWFSSNDEKFCIPHADKWEDLKKLLNIETNEFDKAITTIEESITPPHTDTLMCSRPRCKCISSELELVEDKILKSLKIIMSEYKNYVNNYEEAVKKEICTNKEMIEAIDHEIDKIKSQIEKACELVETGAYTQDLFIKRTNTLNEQLETLLNQKTELSKSKDRTKDLYSKKKAIPILEDVISKYSKDMTAEEKNALLSTIIKQVIYKKEKGGRYLKENFSLKIILLSF

SEQ ID NO: 66 - protein, 719 aa, Unknown
  Description of Unknown: Integrase B67 sequence
  PTHR30461:SF3,IPR036162,IPR036779,IPR011109,PTHR30461, PF01476,PF00239,IPR006119,SSF53041,cd00338, SM00857,SM00257,cd00118,PS51736,G3DSA:3.40.50.1390, PF07508,IPR018392,G3DSA:3.10.350.10,Coil
MNLDTFLQIMNVSRDLTVDEILDMFIIYLRKSRKDMDYYKDESIEKTLQRHEKELQDFIVSIFGKPIPEHNIYREVASGDTIEDRPVIQEVLSLIEEDRVKGVVCIEIERLARGNTMDQGIIAQAFQYSNTKIITPMKIYNLDNEDDLSYFEDGLYQARKYLKYTKRILARGRLRSVKDGKYVGSVLPYGYNKQKIPNEKGYVLVENESESKVVKLLADLFLNGLNTTYTVKENEIISDIAKLFGAHKKDIITCNLDLKVDQEIRLTVNSKSLPYKIKENDTLESIAANYNIDINNIHIPHNFFKPGENIKIILNDMRATNIAHYLNYLKIKPRKSKEWTANMVRNILQGYTIYGYLTWDRRKTTKTLVNGHIVKKNPNNDDFTLVRGKHEAILGEDIKQQIEAKFLSNRLKTVPDNKEMKNPLLGLVVCGYCGNNMTRRPYYLRKDAKPTAKRIYDIDKPKLRLLLREHKGNYSLNDIARALHVSKNSVDHWFSSNDEKFCIPHADKWEDLKKLLNIETNEFDKAITTIEESITPPHTDTLMCSRPRCKCVSSELELVEDKILKSLKIIMSEYKNYVDNYEEAVKKEICTNKEMIEAIDHEIDKIKSQIEKACELVETGAYTQDLFIKRTNTLNEQLETLLNQKTELSKSKDRTKDLYSKKKAIPILEDVISKYSKDMTAEEKNALLSTIIKQVIYKKEKGGRYLKENFSLKIILLSF

SEQ ID NO: 67 - protein, 719 aa, Unknown
  Description of Unknown: Integrase B68 sequence
  PTHR30461:SF3,IPR036162,IPR036779,IPR011109,PTHR30461, PF01476,PF00239,IPR006119,SSF53041,cd00338, SM00857,SM00257,cd00118,PS51736,G3DSA:3.40.50.1390, PF07508,IPR018392,G3DSA:3.10.350.10,Coil
MNLDTFLQIMNVSRDLTVDEILDMFIIYLRKSRKDMDYYKDESIEKTLQRHEKELQDFIVSIFGKPIPEHNIYREVASGDTIEDRPVIQEVLSLIEEDRVKGVVCIEIERLARGNTMDQGIIAQAFQYSNTKIITPMKIYNLDNEDDLSYFEDGLYQARKYLKYTKRILARGRLRSVKDGKYVGSVLPYGYNKQKIPNEKGYVLVENESESKVVKLLADLFLNGLNTTYTVKENEIISDIAKLFGAHKKDIITCNLDLKVDQKIRLTVNSKSLPYKIKENDTLESIAASYNIDINNIHIPHNFFKPGENIKIILNDMRATNIAHYLNYLKIKPRKSKEWTANMVRNILQGYTIYGYLTWDRRKTTKTLVNGHIVKKNPNNDDFTLVRGKHEAILSEDIKQQIEAKFLSNRLKTVPDNKEMKNPLLGLVVCGYCGNNMTRRPYYLRKDAKPTAKRIYDIDKPKLRLLLRKHKGNYSLNDIARALHVSKNSVDHWFSSNDDKFCIPHADKWEDLKKLLNIETNEFDKAITTIEESITPPHTDTLMCSRPRCKCVSSELELVENKILKSLKIIMSEYKNYVNNYEEAVKKEICTNKEMIEAIDHEIDKIKSQIEKACELVETGAYTQDLFIKRTNTLNEQLETLLNQKTELSKSKDRTKDLYSKKKAIPILEDVISKYSKDMTAEEKNALLSTIIKQVIYKKEKGGRYLKENFSLKIILLSF

SEQ ID NO: 68 - protein, 718 aa, Unknown
  Description of Unknown: Integrase B69 sequence
  PTHR30461:SF3,IPR036162,PS51737,G3DSA:1.10.260.40,IPR011109, PTHR30461,PF00239,PF01381,G3DSA:1.10.10.2600,PS50943, IPR006119,SSF53041,IPR010982,SSF47413,SM00857, IPR025827,IPR038109,PS51736,cd00093,cd03768,SM00530,PF13408,
  CONT. FROM ABOVE: G3DSA:3.40.50.1390,PF07508,IPR001387,Coil
MKAAIYSRKSKFTGKGDSIENQIQLCMDYSKSIGIKEFLVYEDEGFSGGNIDRPQFKKMMQDAKDKKFDCLVCYRLDRISRNVSDFSTLIEKLNKLEISFISIKEQFDTSTPMGRAMMFISSVFAQLERETIAERIKDNMYELARSGRWLGGKTPHGFTSKKISFLDENLKERSMYQLEVNDEQMEIVKLIFNKYLELRSLSQLYKYVYHNGIKGPRGGKFDPSSLSGILRNPAYVKANEDILDYLRSLGMEVVGVPDGQCGILTYAKNTSNSIAAIAKHHGVIEPDVWLEVQSILNENKDKIPRISTGKTALLSGLLKCGKCGSNMRIMYKGKRNDEDLKYYYVCGTKRSLGVEGCNCKNLNGPLVENLVIDKIKNCNIESVINAFNSNNAKVDTVFSDVRSKINLLKNSISEKEKLISNLVMELAKNTGSVASEYIISQIEGLNGEIDSLKSKVSELESSSVDINSASLNLDIIVSNLKKFNYEVDDASLDDKRLLLSTIVDSIVWDDASGNLSIVYMGAKMDDLVSLSDGSHFCSDGRCTIYKSATSENDIINSPKQNIDSSSELKDVDSVDINYTDLTTPELKKNTFGQRLRKSRLELGLSVKDVADICKITPSVVNGYELERFYPSKEILDLLSSTFNVNYLCSDGYTNLILNYDIFIENLKIWISDNNFTTQIAADKLGVSRSLLRFWFNGGTMRISLYNKIKGNLAHYNLI

SEQ ID NO: 69 - protein, 709 aa, Unknown
  Description of Unknown: Integrase B70 sequence
  PTHR30461:SF3,SM00857,G3DSA:1.10.10.2600,IPR036162,PF13408, PS51737,G3DSA:3.40.50.1390,IPR025827,IPR006119,IPR038109, PF07508,SSF53041,IPR011109,PTHR30461,Coil, PS51736,cd00338,PF00239
MREVEILKKKQLKCYLYTRVSTSMQVDGYSLDAQRDKLRKYAAYEDMIVAGEYSDEGFSGKNIQGRQDFQRMLNDIQDGKDDVSYVLVFKLSRFGRNAADVLNSLQLMQDFGVNLICVEDGIDSSKDAGKLMISVLSAVAEIERENIRTQTMAGREQKAREGKWNGGFAPYGYKLEDGNLVIAEDEVEVIRVIYDRYIHTNEGVAGVAKYLNRNGYVKKLRQNNTIPGFSRDFVKNVLYNPVYMGKIAYGRRRTEKKQGTRNEMHVVEQSEFPVYEGQHEAIISEEDWHLAQEKRKINSFKREKVNNPDHAHILSGILKCPCCGKSMYGNIAKAHSKDKKTRYYYYCKNTVTPTGHECSFRLNIEQTEINKFVAKIISAMVNNPRFVEAIQAKIGTAVDTEDMEKQIAVLQGQLKQAFGTKSRLERQMDTLDINDVHYDRKILDLQRRYDEQYDTIEEIEVQIGELQSQIRNIQQEKISGDNIYRLLLAFDEVYHSATEAEQKEFMKAFIERIEMFPEKRKDGSWIKKIVFNFPVPVDGEEVKELPLETETTVETFQYKDYADRYSDAYELYGYDAEALFNHYETVGKAENRVGRFKKTPEEDDRHPYVWDADEPLDPLPPLDFHAQPDWFDARTLPENLSNVRIIKEYEKLEAFIEKDEWIGDPVLVRKEELLNEMSSRARNYRGRRGGADYLRAISQDIDVLLDFMG

SEQ ID NO: 70 - protein, 709 aa, Unknown
  Description of Unknown: Integrase B71 sequence
  PTHR30461:SF3,SM00857,G3DSA:1.10.10.2600,IPR036162,PF13408, IPR025827,G3DSA:3.40.50.1390,PS51737,IPR006119,IPR038109, PF07508,SSF53041,IPR011109,PTHR30461,Coil, PS51736,cd00338,PF00239
MREVEILKKKQLKCYLYTRVSTSMQVDGYSLDAQRDKLRKYAAYEDMIVAGEYSDEGFSGKNIQGRQDFQRMLNDIQDGKDDVSYVLVFKLSRFGRNAADVLNSLQLMQDFGVNLICVEDGIDSSKDAGKLMISVLSAVAEIERENIRTQTMAGREQKAREGKWNGGFAPYGYKLENGNLVIAEDEVEVIRVIYDRYIHTNEGVAGVAKYLNRNGYVKKLRQNNTIPGFSRDFVKNVLYNPVYMGKIAYGRRRTEKKQGTRNEMHVVEQSEFPVYEGQHEAIISEEDWYLAQEKRKINSFKREKVNNPDHAHILSGILKCPCCGKSMYGNIAKAHSKDKKTRYYYYCKNTVTPTGHECSFRLNIEQTEINKFVAKIISAMVNNPRFVEAIQAKIGTAVDTEDMEKQIAVLQGQLKQAFGTKSRLERQMDTLDINDAHYDRKILDLQRRYDEQYDTIEEIEVQIGELQSQIRSIQQEKISGDNIYRLLLAFDEVYHSATEAEQKEFMKAFIERIEMFPEKRKDGSWIKKIVFNFPVPIDGEEVKELPLETETTVETFQYKDYADRYSDAYELYGYDAEALFNHYETVGKAENRVGRFKKTPEEDDRHPYVWDADEPLDPLPPLDFHAQPDWFDARTLPENLSNVRIIKEYEQLEAFIEKDEWIGDPVLVRKEELLTEMSSRVRNYDGRRGGADYLRAISQDIDVLLDFMG

SEQ ID NO: 71 - protein, 706 aa, Unknown
  Description of Unknown: Integrase B72 sequence
  IPR036162,PS51737,cd00065,IPR011109,PTHR30461, PF00239,G3DSA:1.10.10.2600,IPR006119,PF14287,SSF53041, IPR025378,SM00857,IPR025827,cd03770,IPR038109, PS51736,PF13408,G3DSA:3.40.50.1390,PF07508,Coil
MSRTSKITALYERLSRDDDLNGESNSITNQKKYLEDYARRNGFENIRHFTDDGFSGVNFNRPGFQSLIKEVEAGNVGTLIVKDMSRLGRNYLQVGFYTEILFPQKDVRFLAINNSIDSNNASDNDFAPFLNIMNEFYAKDTSNKIKAVFDARMKDGKRCSGSIPYGYNRLPSDKQTLVVDPVASEVVKRIFLLANEGKSPRAIAEILTEEKVLIPAAYAKEYHPEQYNGIKFADPYIWGISAIRTILSRQEYLGHTVLRKSVSTNFKLHKRKTTDEDEQYVFYNTHEPIISQELWDSVQKRKKRVNRAAARGTHTNRLSGYLYCADCGRRMTLQTHYSKKDGSVQYSYRCGGYASRVNSCTSHTISADNVEALILSAVKRFSRFVLNDEKAFALELQSLWKDKQEEKPKHNQSELKRCQKRYDELSTLIRGLYENLISGLLPERQYKQLMKQYDDEQAELEAKMETMKKELSEEKDSTMDIQHFISLIRKYKNPTEVSDLMFTELIDKIVVYEAEGVGKAKTQKVDIYFNYVGQVDIAYTEEELAEIKEQEEQEEKKRLEKQRQREKAYREKRKAKKLAENGGEIVKTKVCPHCGKEFTPTSNRQIFCSKDCCYQARQDKTKADREAEKGSHYYRQRVCAVCGSTYWPTHSQQKFCSEECKKVNHNKKTLEFYYKKQKEKELCKDLLQTKEQVSDTNSSEITIIPA

SEQ ID NO: 72 - protein, 706 aa, Unknown
  Description of Unknown: Integrase B73 sequence
  PTHR30461:SF3,IPR036162,PS51737,IPR011109,PTHR30461, PF00239,G3DSA:1.10.10.2600,IPR006119,PF14287,SSF53041, IPR025378,SM00857,IPR025827,cd03770,IPR038109, PS51736,mobidb-lite,PF13408,G3DSA:3.40.50.1390,PF07508,Coil
MSRSSKITALYERLSRDDDLNGESNSITNQKQYLEDYARRNGFTNIRHFTDDGFSGVNFNRPSFQELIKEVEAGNVATIIVKDMSRLGRNYLQVGFYTEVLFQQKDVRFLAINNSIDSNNASDNDFAPFLNIMNEWYAKDTSNKIKAVFDARMKDGKRCSGSIPYGYNRLATDKQTLVVDPVASAVVKRIFLLANEGKSPRAIAELLTEEKVLIPAAHAKEYHPEQYNGTKFSDPYLWGMSTIRAILSRQEYLGHTVLRKSVSTNFKLHKRKNTDEDEQYVFYNTHEPIISQELWDSVQKRKKRANRTAARGTHSNRLSGYLYCADCGRRMTLQTHYSKKDRSVQYSYRCGGYASKVNSCSAHSISADNVEALILSAVKRLSRFVLNDEEAFAKELQALWNEKQTEKPKHNKSELHRFQKRYDELSKLIRGLYENLVSGLLPERQYKQLMKQYDDEQAELETKIEEMEKELTEEKVNAVDIKHFISLIRKCKEPTEISDLMFAELIDKIVVYEAEGVGKARTQKVDIYFNYVGQVDIAYTEEELAEIKAQEEQEEKKRMDKQREREKAYREKRKAKKIAENGGEIVKTKVCPHCQKEFVPTSNRQIFCSRDCCYQARQDRKKADREAEKGNHYYRQRVCAVCGSTYWPTHSQQKLCSEECQKQNHNEKSLEFYHKKQKEKSECNDLLQTKELVSSTNSSEIITIPA

SEQ ID NO: 73 - protein, 696 aa, Unknown
  Description of Unknown: Integrase B74 sequence
  PTHR30461:SF3,cd00338,SM00857,G3DSA:1.10.10.2600,IPR036162, PF13408,IPR025827,PS51737,G3DSA:3.40.50.1390,IPR006119, IPR038109,PF07508,SSF53041,IPR011109,PTHR30461, PS51736,Coil,PF00239
MKKKQPNTRHGRAAIYARYSSHNQREASIEQQVKACRELAVRLGLDVVETYEDKAISGKSDRRPSFQRLLRDAEKGYFDCVLAWKSNRMGRNMLQAMTNEARLKDWGVRTFYAEEDFDDTAAGRFALRNMMNVNQFYSENMAEDITRGMMDNASKCLSNGALPLGYKAGENGRIVLDKAQAAVVQEIYTRVACREPFVDIAADLNRRGIKTKRGGPWTKSSFYTICRNERYRGIYIYDDVRVEGGVPRIVSDGLFYRVQEVLKVKKTPQSARHHTGAEDYLLTGKLFCGKCGRPMTGVSGTSRSGEMHYYYTCQKRRREHACDKKNVIREQIEKSVAQAIKQYMLTDEMIQHMADATMAYNARQEKDLHLQDLQGQLAAVKTSAANLLKAIEMGVITETTKARMVELEQEQGRLNAQIENARAELVPITRDNFVSLLHIYRDGDINDSKYLASLFETFLVRVDLYDDHFLIWFNPLGQKTPADIPITSIENGNVDEFFDECRSENVFDWGGKWSTKIKAPAVPRRVFLFWCFVSCRGVEQSGGTAVPARWPMRNADAVRSSSSVESLSLYQWFAQCLNALRTACLPLIQGRHKKHGACASCFQQMLVRPLRRNFHAGQNVHVKTQPVLARADVIHLELFRAGHCGQHGQHQNKQLLYFLHCVFLKMGMKKPRCVCIVVEVLVGYSGNSPKSFRIEV

SEQ ID NO: 74 - protein, 693 aa, Unknown
  Description of Unknown: Integrase B75 sequence
  IPR036162,PS51737,IPR011109,PTHR30461,PF00239, G3DSA:1.10.10.2600,PF14287,IPR006119,SSF53041,IPR025378, SM00857,IPR025827,cd03770,IPR038109,mobidb-lite, PF13408,G3DSA:3.40.50.1390,PF07508,Coil
MSVKQTEGKITALYERLSRDDDQTGDSNSIVNQKKYLESYAHQKGYTNCQHYTDDGWSGGNFERPAWKQLIADIEAGKVAHVIVKDMSRAGRDYLQTGFYTEVFFRQHHVHFVAIANSVDSDDQNSNEFAPFLNIMNEWYLRDLSRKQKTAIRVKGESGKPTTNCAIYGYKKMPGDKYSWYIDEEAAAVVRRIFRLTIEGNGPYDIARILYDDKVETPAVYAAKQGRGVWKSKEEFPNPYNWSGYIVGQILSKPEYMGHTVNFRSHKQSYKDKNPVMNPQEDWLIFENTHEAIVDKEMWELAQKLRKTPRRHDTLGEANPLTGLLFCADCGAKMTNHRSKGGTKSNPYPSDFYDCSAYTLAHQKRTHACSGHYIRTKAVRELVLETIRTASAFAIANQDEFMKKVRSASQIRQAEVAKDTKRKLNKDRRRIAELDTIIKKLYESFAIGRITDERFDTLLAEYEAEQKALVTSVSDAESHLSSFEEDTDRAEQFLSLAKKYTDFSELTTPMINEFIEKIIVHAPEKIDGDRVQEVEIYLKFIGRFELPEPDLTPEEIKRQEQLRRHRIKSRERYQKIKAGEHAVGQPFQLICKCCGEEFESKRSNTLFCSPKCRTKFYRQEAAENRKRECVCENCGKTFTATRRDVKYCCDDCRTEANRRMQKERNVAKQIKKNEPVLLDAPPIKENGQKQKTA

SEQ ID NO: 75 - protein, 690 aa, Unknown
  Description of Unknown: Integrase B76 sequence
  PTHR30461:SF3,IPR036162,PS51737,IPR011109,PTHR30461, PS00397,PF00239,G3DSA:1.10.10.2600,IPR006119,SSF53041, cd00338,SM00857,IPR025827,IPR038109,PS51736, IPR006118,PF13408,G3DSA:3.40.50.1390,PF07508,Coil
MQSAFFFIPFFGSWRKGLFMAYVRNKKKILKFWSKKKAALYVRVSTRYQVDKDSLPFQRKKLKEYCKFLGIEDFVIFEDDGYSAKNTDRPHFQEMMSRVRDGEFSHLIVWKVDRVSRNLLDFAAMYQELKDHKVTFISMNEQFDTSTAIGEAMLKIILIFAELERNMTSERVTGIMLDRAEQGLWNGARMPVGYRWNPEIKFPEPDPEETKIVQFIFDEYERVRSTTKIARYLNHNQIASKRGGQWTSKLIRDIIRSPFYIGTYRYNLRESGRGPLKPESEWIVRENNHPAIITKEQFDRCNAIMDENGTSRDTSELRVRKYVHTFSGRLVCGKCGANMIASKDRARANGWRPSMYRCAQRSRMMDCDNSKTVNESYIGPFIFNYAANLARIQKNFKNIKTLEQLEKELLKGPEFENMKVSKESLRRTFDALAFQEVGKGAYLPDINLSDGDDDYTAAEQLSILKRELDKCKTAIDRLTDLYLYDPDSMTKEEFAKKKRDLVNKIAGYEKQIEVSQATGDKDDLADLADLEFIRKASAFLVAQRIVSKKHVDYIQMALDLDNEILKDFVDQVIDRIEILEGRVRSIRFVNGLVHEFTYSTPADLPVCQKCGGRIGSTCGCRTRAFDFAGKPYRRIKVGDPGDKFHGVTGAVCPECSAQAGRWHHWKCGIERCPICGEQLIACEHGPNGKD

SEQ ID NO: 76 - protein, 689 aa, Unknown
  Description of Unknown: Integrase B77 sequence
  PTHR30461:SF3,IPR036162,PS51737,IPR011109,PTHR30461, PS00397,PF00239,G3DSA:1.10.10.2600,IPR006119,SSF53041, cd00338,SM00857,IPR025827,IPR038109,PS51736, IPR006118,PF13408,G3DSA:3.40.50.1390,PF07508,Coil
MARKNPKIPDATHPLSCVLYIRVSTKLQVEKGESIDAQRFELTRYAENHDMRVLGEYVDAGFSGKNVQGRPQFRQMMDDIIKAQPSKRPAYVLVFKLSRFGRNAADTWNSLQTLQDYGVELCCVKDGIDSGTSMGKAMLSIAAVFAEMERDNIRTQTMSGREEKARKGYWNGGQAPFGYRLVDKGNKFKELEVDEDEAKVVRRIFEMYAYENKGSMAIATWLNNHGIKKKPRGNACMDTFSSGTVQRMITNPVYIGKIAYGRRRTETIEGTRGETHVVKSDGYEMHDGQHDAIIDDATWAAAQALVGTRKPNMKTHDDGHVNMLNGLLVCPVCGRKMSSKPNRGKLKKDGTRGKTTWAYYCPHTSKARGASCTFKSQYPQECVDAEVVQLVSLASRSDAFVDALRRRIDDATDIEQLKEDIERIEGEKAANDKRMRMLMTQIDSLDPADRSYERKFNDLQRRLDDLYDRDAGLSDALEEAQAKMTTAEKRMDGERRLLEELDRIPELLEGADEQTRFDLIHEAVSEVHILPDKNPRKERVVANVTFKCPVRFFWEEIPGVANGYTPMTPDSLGENNFRDDEAHVETVAVLSRKSASKSFIPVSISPKDMGLSEEKEQPTYANICDYVQKTHGMKVSSLYVAQMKAECGLETQADRSGDKKQPKCPPEKREAILDAFRHFGLIGEDGTEK

SEQ ID NO: 77 - protein, 688 aa, Unknown
  Description of Unknown: Integrase B78 sequence
  PTHR30461:SF3,IPR036162,PS51737,G3DSA:1.10.260.40,IPR011109, PTHR30461,PF00239,PF01381,G3DSA:1.10.10.2600,PS50943, IPR006119,SSF53041,IPR010982,SSF47413,SM00857, IPR025827,IPR038109,PS51736,cd00093,cd03768,SM00530,PF13408,
  CONT. FROM ABOVE: G3DSA:3.40.50.1390,PF07508,IPR001387,Coil
MNTIAIYTRKSKFTGKGESIENQIEKCKKFIEFKFNIDSENVNIFIDEGFSGKNENRPQYQLMMEKIKKKEIDSIVIYQLNRLGRNARDIHNTMQLCDDLGVIIYSATEGFDSSTSFGRAVIGILASLAQLEREQLAERVKDNMYTLAKMGRWLGGQSPLGFDGSREYYIDETGKERSITKLKKNEEELKLVKLLYDKYLEEKSLSQVGKWALINHLTGKNGGNLNKNAINVILQNPVYVKSSKEVFEYLSNEGYEVCGEPNGNGLLRYGKDDEPIVATAKHKGVIPSDQWIEVQKILKDNAYKAPRMGKTNTALLTGLLRCKCGSTMRISYGQKRKDGTKPFYYICNMKINSGGARCNLKNLNGNLFEKNFIQFLKNYSKETLFTELQKLLNNSKDLESTISSNKIDVEIEKSNKAIKQILNKLKLTDDDELSKILLQEIKVENNKLKALSKQKEELLNDQSEVVITQSEVLAILDDLDNFQKTFDDLNLEDKQKALKSLIESITLTDDKFIVDFNIKKKLDNAIKKLSSLFAKYKSSQLRHPCRSSSFQIAMNINNLLYDDMPIDTLSNRIKKAKLVAGITQKELVKLTGLSRSTINELEAGYRDNITRETLLKLISVLDKDIICDDYLSYILNQERNINLLIDTYGIEKLSSILECHHSAIYRWKVFKYQLPKNKYILIKKLDQK

SEQ ID NO: 78 - protein, 687 aa, Unknown
  Description of Unknown: Integrase B79 sequence
  PTHR30461:SF3,IPR036162,PS51737,IPR011109,PTHR30461, PS00397,PF00239,G3DSA:1.10.10.2600,IPR006119,SSF53041, cd00338,SM00857,IPR025827,IPR038109,PS51736, IPR006118,PF13408,G3DSA:3.40.50.1390,PF07508,Coil
MQSAFFFIPFFGSWRKGLFMAYVRNKKKILKFWSKKKAALYVRVSTRYQVDKDSLPFQRKKLKEYCKFLGIEDFVIFEDDGYSAKNTDRPHFQEMMSRVRDGEFSHLIVWKVDRVSRNLLDFAAMYQELKDHKVTFISMNEQFDTSTAIGEAMLKIILIFAELERNMTSERVTGIMLDRAEQGLWNGARMPVGYRWNPEIKFPEPDPEETKIVQFIFDEYERVRSTTKIARYLNHNQIASKRGGQWTSKLIRDIIRSPFYIGTYRYNLRESGRGPLKPESEWIVRENNHPAIITKEQFDRCNAIMDENGTSRDTSELRARKYVHTFSGRLVCGKCGANMIASKDRARANGWRPSMYRCAQRSRMMDCDNSKTVNESYIGPFIFNYAANLARIQKNFKNIKTLEQLEKELLKGPEFENMKVSKESLRRTFDALAFQEVGKGAYLPDINLSDGDDDYTAAEQLSILKRELDKCKTAIDRLTDLYLYDPDSMTKEEFAKKKRDLVNKIAGYEKQIEASQATGDKDDLADLEFIRKASAFLVAQRIVSKKHVDYIQMALDLDNEILKDFVDQVIDRIEILEGRVQSIRFVNGLVHEFTYSTPADLPVCQKCGGRIGSTCGCRTRTFDFAGKSYRRIKVGDPGDKFHGVAGAVCPECSAQVGRWHHWKCGIERCPICGEQLIACEHGPNGKD

SEQ ID NO: 79 - protein, 687 aa, Unknown
  Description of Unknown: Integrase B80 sequence
  PTHR30461:SF3,IPR036162,PS51737,IPR011109,PTHR30461, PS00397,PF00239,G3DSA:1.10.10.2600,IPR006119,SSF53041, cd00338,SM00857,IPR025827,IPR038109,PS51736, IPR006118,PF13408,G3DSA:3.40.50.1390,PF07508,Coil
MQSAFFFIPFFGSWRKGLFMAYVRNKKKILKFWSKKKAALYVRVSTRYQVDKDSLPFQRKKLKEYCKFLGIEDFVIFEDDGYSAKNTDRPHFQEMMSRVRDGEFSHLIVWKVDRVSRNLLDFAAMYQELKDHKVTFISMNEQFDTSTAIGEAMLKIILIFAELERNMTSERVTGIMLDRAEQGLWNGARMPVGYRWNPEIKFPEPDPEETKIVQFIFDEYERVRSTTKIARYLNHNQIASKRGGQWTSKLIRDIIRSPFYIGTYRYNLRESGRGPLKPESEWIVRENNHPAIITKEQFDRCNAIMDENGTSRDTSELRARKYVHTFSGRLVCGKCGANMIASKDRARANGWRPSMYRCAQRSRMMDCDNSKTVNESYIGPFIFNYAANLARIQKNFKNIKTLEQLEKELLKGPEFENMKVSKESLRRTFDALAFQEVGKGAYLPDINLSDGDDDYTAAEQLSILKRELDKCKTAIDRLTDLYLYDPDSMTKEEFAKKKRDLVNKIAGYEKQIEASQATGDKDDLADLEFIRKASAFLVAQRIVSKKHVDYIQMALDLDNEILKDFVDQVIDRIEILEGRVQSIRFVNGLVHEFTYSTPADLPVCQKCGGRIGSTCGCRTRTFDFSGKPYRRIKVGDPGDKFHGVAGAVCPECSAQAGRWHHWKCGIERCPICGEQLIACEHGLNGKD

SEQ ID NO: 80 - protein, 687 aa, Unknown
  Description of Unknown: Integrase B81 sequence
  PTHR30461:SF3,IPR036162,PS51737,IPR011109,PTHR30461, PS00397,PF00239,G3DSA:1.10.10.2600,IPR006119,SSF53041, cd00338,SM00857,IPR025827,IPR038109,PS51736, IPR006118,PF13408,G3DSA:3.40.50.1390,PF07508,Coil
MQSAFFFIPFFGSWRKGLFMAYVRNKKKILKFWSKKKAALYVRVSTRYQVDKDSLPFQRKKLKEYCKFLGIEDFVIFEDDGYSAKNTDRPHFQEMMSRVRDGEFSHLIVWKVDRVSRNLLDFAAMYQELKDHKVTFISMNEQFDTSTAIGEAMLKIILIFAELERNMTSERVTGIMLDRAEQGLWNGARMPVGYRWNPEIKFPEPDPEEAKIVQFIFDEYERVRSTTKIARYLNHNQIASKRGGQWTSKLIRDIVRSPFYIGTYRYNLRESGRGPLKPESEWIVRENNHPAIITKEQFDRCNAIMDENGTSRDTSELRARKYVHTFSGRLVCGKCGANMIASKDRARANGWRPSMYRCAQRSRMMDCDNSKTVNESYIGPFIFNYAANLARIQKNFKNIKTLEQLEKELLKGPEFENMKVSKESLRRTFDALAFQEVGKGAYLPDIDLSDGDDDYTAAEQLSILKRELDKCKTAIDRLTDLYLYDPDSMTKEEFAKKKRDLVNKIAGYEKQIEASQATGDKDDLADLEFIRKASAFLVAQRIVSKKHVDYIQMALDLDNEILKDFVDQVIDRIEILEGRVQSIRFVNGLVHEFTYSTPADLPVCQKCGGRIGSTCGCRTRTFDFAGKSYRRIKVGDPGDKFQGVSGAVCPECSAQAGRWHHWKCGIERCPICGEQLIACEHGPNGKN

SEQ ID NO: 81 - protein, 687 aa, Unknown
  Description of Unknown: Integrase B82 sequence
  PTHR30461:SF3,IPR036162,PS51737,IPR011109,PTHR30461, PS00397,PF00239,G3DSA:1.10.10.2600,IPR006119,SSF53041, cd00338,SM00857,IPR025827,IPR038109,PS51736, IPR006118,PF13408,G3DSA:3.40.50.1390,PF07508,Coil
MQSAFFFIPFFDSWGKGFFMAYVRNKKKILKFWSKKKAALYVRVSTRYQVDKDSLPFQRKKLKEYCKFLGIEDFVIFEDDGYSAKNTDRPHFQEMMSRVRDGEFSHLIVWKVDRVSRNLLDFAAMYQELKDHKVTFISMNEQFDTSTAIGEAMLKIILIFAELERNMTSERVTGIMLDRAEQGLWNGARMPVGYRWNPEIKFPEPDPEETKIVQFIFDEYERVRSTTKIARYLNHNQIASKRGGQWTSKLIRDIIRSPFYIGTYRYNLRESGRGPLKPESEWIVRENNHPAIITKEQFDRCNAIMDENGTSRDTSELRARKYVHTFSGRLVCGKCGANMIASKDRARANGWRPSMYRCAQRSRMMDCDNSKTVNESYIGPFIFNYVANLARIQKNFKNIKTLEQLEKELLKGPEFENMKVSKESLRRTFDALAFQEVGKGAYLPDIDLSDGDDDYTAAEQLSILKRELDKCKTAIDRLTDLYLYDPDSMTKEEFAKKKRDLVNKIAGYEKQIEASQATGDKDDLADLEFIRKASAFLVAQRIVSKKHVDYIQMALDLDNEILKDFVDQVIDRIEILEGRVRSIRFVNGLVHEFTYSTPADLPVCQKCGGRIGSTCGCRTRTFDFAGKPYRRIKVGDPGDKFHGVTGAVCPECSAQAGRWHHWKCGIERCPICGEQLIACEHGPNGKD

SEQ ID NO: 82 - protein, 687 aa, Unknown
  Description of Unknown: Integrase B83 sequence
  PTHR30461:SF3,IPR036162,PS51737,IPR011109,PTHR30461, PS00397,PF00239,G3DSA:1.10.10.2600,IPR006119,SSF53041, cd00338,SM00857,IPR025827,IPR038109,PS51736, IPR006118,PF13408,G3DSA:3.40.50.1390,PF07508,Coil
MQSAFFFIPFFDSWGKGLFMAYVRNKKKILKFWSKKKAALYVRVSTRYQVDKDSLPFQRKKLKEYCKFLGIEDFVIFEDDGYSAKNTDRPHFQEMMSRVRDGEFSHLIVWKVDRVSRNLLDFAAMYQELKDHKVTFISMNEQFDTSTAIGEAMLKIILIFAELERNMTSERVTGIMLDRAEQGLWNGARMPVGYRWNPEIKFPEPDPEETKIVQFIFDEYERVRSTTKIARYLNHNQIASKRGGQWTSKLIRDIIRNPFYIGTYRYNLRESGRGPLKPESEWIIRENNHPAIITKEQFDRCNAIMDENGTSRDTSELRARKYVHTFSGRLVCGKCGANMIASKDRARANGWRPSMYRCAQRSRMMDCDNSKTVNESYIGPFIFNYVANLARIQKNFKNIKTLEQLEKELLKGPEFENMKVSKESLRRTFDALAFHEVGKGAYLPDIDLSDSDDDYTAAEQLSILKRELDKCKTAIDRLTDLYLYDPDSMTKEEFAKKKRDLVNKIAGYEKQIEASQATGDKDDLADLEFIRKASAFLVAQRIVSKKHVDYIQMALDLDNEILKDFVDQVIDRIEILEGRVRSIRFVNGLVHEFTYSTPADLPVCQKCGGRIGSTCGCRTRTFDFAGKPYRRIRVGNPGDKFHGVAGAVCPECSAQAGRWHHWKCGIERCPICGEQLIACEHGPNGKD

SEQ ID NO: 83 - protein, 687 aa, Unknown
  Description of Unknown: Integrase B84 sequence
  PTHR30461:SF3,IPR036162,PS51737,IPR011109,PTHR30461, PS00397,PF00239,G3DSA:1.10.10.2600,IPR006119,SSF53041, cd00338,SM00857,IPR025827,IPR038109,PS51736, IPR006118,PF13408,G3DSA:3.40.50.1390,PF07508,Coil
MQSAFFFIPFFGSWRKGLFMAYVRNKKKILKFWSKKKAALYVRVSTRYQVDKDSLPFQRKKLKEYCKFLGIEGFVIFEDDGYSAKNTDRPHFQEMMSRVRDGEFSHLIVWKVDRVSRNLLDFAAMYQELKDHKVTFISMNEQFDTSTAIGEAMLKIILIFAELERNMTSERVTGIMLDRAEQGLWNGARMPVGYRWNPEIKFPEPDPEETKIVQFIFDEYERVRSTTKIARYLNHNQIASKRGGQWTSKLIRDIIRNPFYIGTYRYNLRESGRGPLKPESEWIVRENNHPAIITKEQFDRCNAIMDENGTSRDTSDLRARKYVHTFSGRLVCGKCGANMIASKDRARANGWRPSMYRCAQRSRMMDCDNSKTVNESYIGPFIFNYVANLARIQKNFKNIKTLEQLEKELLKGPEFENMKVSKESLRRTFDALAFQEVGKGAYLPDIDLSDGDDDYTAAEQLSILKRELDKCKTAIDRLTDLYLYDPDSMTKEEFAKKKRDLVNKIAGYEKQIEASQAAGDKDDLADLEFIRKASAFLVAQRIVSKKHVDYIQMALDLDNEILKDFVDQVIDRIEILEGRVQSIRFVNGLVHEFTYSTPADLPVCQKCGGRIGSTCGCRTRTFDFAGKPYRRIKVGDPGDKFHGVTGAVCPECSAQAGRWHHWKCGIERCPICGEQLIACEHGPNGKD

SEQ ID NO: 84 - protein, 687 aa, Unknown
  Description of Unknown: Integrase B85 sequence
  PTHR30461:SF3,IPR036162,PS51737,IPR011109,PTHR30461, PS00397,PF00239,G3DSA:1.10.10.2600,IPR006119,SSF53041, cd00338,SM00857,IPR025827,IPR038109,PS51736, IPR006118,PF13408,G3DSA:3.40.50.1390,PF07508,Coil
MQSAFFFIPFFGSWRKGLFMAYVRNKKKILKFWSKKKAALYVRVSTRYQVDKDSLPFQRKKLKEYCKFLGIEDFVIFEDDGYSAKNTDRPHFQEMMSRVRDGEFSHLIVWKVDRVSRNLLDFAAMYQELKDHKVTFISMNEQFDTSTAIGEAMLKIILIFAELERNMTSERVTGIMLDRAEQGLWNGARMPVGYRWNPEIKFPEPDPEETKIVQFIFDEYERVRSTTKIARYLNHNQIASKRGGQWTSKLIRDIIRNPFYIGTYRYNLRESGRGPLKPESEWIVRENNHPAIITKEQFDRCNAIMDENGTSRDTSELRARKYVHTFSGRLVCGKCGANMIASKDRARANGWRPSMYRCAQRSRMMDCDNSKTVNESYIGPFIFNYAANLARIQKNFKNIKTLEQLEKELLKGPEFENMKVSKESLRRTFDALAFQEVGKGAYLPDIDLSDGDDDYTAAEQLSILKRELDKCKTAIDRLTDLYLYDPDSMTKEEFAKKKRDLVNKIAGYEKQIEASQATGDKDDLADLEFIRKASAFLVAQRIVSKKHVDYIQMALDLDNEILKDFVDQVIDRIEILEGRVQSIRFVNGLVHEFTYSTPADLPVCQKCGGRIGSTCGCRTRTFDFAGKPYRRIKVGDPGDKFHGVAGAVCPECSAQAGRWHHWKCGIERCPICGEQLIACEHGPNGKD

SEQ ID NO: 85 - protein, 687 aa, Unknown
  Description of Unknown: Integrase B86 sequence
  PTHR30461:SF3,IPR036162,PS51737,IPR011109,PTHR30461, PS00397,PF00239,G3DSA:1.10.10.2600,IPR006119,SSF53041, cd00338,SM00857,IPR025827,IPR038109,PS51736, IPR006118,PF13408,G3DSA:3.40.50.1390,PF07508,Coil
MQSAFFFIPFFGSWRKGLFMAYVRNKKKILKFWSKKKAALYVRVSTRYQVDKDSLPFQRKKLKEYCKFLGIEDFVIFEDDGYSAKNTDRPHFQEMMSRVRDGEFSHLIVWKVDRVSRNLLDFAAMYQELKDHKVTFISMNEQFDTSTAIGEAMLKIILIFAELERNMTSERVTGIMLDRAEQGLWNGARMPVGYRWNPEIKFPEPDPEETKIVQFIFDEYERVRSTTKIARYLNHNQIASKRGGQWTSKLIRDIIRNPFYIGTYRYNLRESGRGPLKPESEWIVRENNHPAIITKEQFDRCNAIMDENGTSRDTSELRARKYVHTFSGRLMCGKCGANMIASKDRARANGWRPSMYRCAQRSRMMDCDNSKTVNESYIGPFVFNYVANLARIQKNFKNIKTLEQLEKELLKGPEFENMKVSKESLRRTFDALAFQEVGKGAYLPDIDISDGDDDYTAAEQLSILKRELDKCKTAIDRLTDLYLYDPDSMTKEEFAKKKRDLVNKIAGYEKQIEANQATGGKDDLADLEFIRKASAFLVAQRIVSKKHVDYIQMALDLDNEILKDFVDQVIDRIEILEGRVQSIRFVNGLVHEFTYSTPADLPVCQKCGGRIGSTCGCRTRTFDFSGKPYRRIKVGDPGDKFQGVSGAVCPECSAQAGRWHHWKCGIERCPICGEQLIACEHGPNGKK

SEQ ID NO: 86 - protein, 687 aa, Unknown
  Description of Unknown: Integrase B87 sequence
  PTHR30461:SF3,IPR036162,PS51737,IPR011109,PTHR30461, PS00397,PF00239,G3DSA:1.10.10.2600,IPR006119,SSF53041, cd00338,SM00857,IPR025827,IPR038109,PS51736, IPR006118,PF13408,G3DSA:3.40.50.1390,PF07508,Coil
MQSAFFFIPFFGSWRKGLFMAYVRNKKKILKFWSKKKAALYVRVSTRYQVDKDSLPFQRKKLKEYCKFLGIEDFVIFEDDGYSAKNTDRPHFQEMMSRVRDGEFSHLIVWKVDRVSRNLLDFAAMYQELKDHKVTFISMNEQFDTSTAIGEAMLKIILIFAELERNMTSERVTGIMLDRAEQGLWNGARMPVGYRWNPEIKFPEPDPEETKIVQFIFDEYERVRSTTKIARYLNDNQIASKRGGQWTSKLIRDIIRSPFYIGTYRYNLRESGRGPLKPESEWIVRENNHPAIITKEQFDRCNAIMDENGTSRDTSELRARKYVHTFSGRLVCGKCGANMIASKDRARANGWRPSMYRCAQRSRMMDCDNSKTVNESYIGPFIFNYAANLARIQKNFKNIKTLEQLEKELLKGPEFENMKVSKESLRRTFDALAFQEVGKGAYLPDINLSDGDDDYTAAEQLSILKRELDKCKTAIDRLTDLYLYDPDSMTKEEFAKKKRDLVNKIAGYEKQIEVSQATGDKDDLADLEFIRKASAFLVAQRIVSKKHVDYIQMALDLDNEILKDFVDQVIDRIEILEGRVQSIRFVNGLVHEFTYSTPADLPVCQKCGGRIGSTCGCRTRTFDFAGKPYRRIKVGDPGDKFHGVTGAVCPECSAQAGRWHHWKCGIERCPICGEQLIACEHGPNGKD

SEQ ID NO: 87 - protein, 687 aa, Unknown
  Description of Unknown: Integrase B88 sequence
  PTHR30461:SF3,IPR036162,PS51737,IPR011109,PTHR30461, PS00397,PF00239,G3DSA:1.10.10.2600,IPR006119,SSF53041, cd00338,SM00857,IPR025827,IPR038109,PS51736, IPR006118,PF13408,G3DSA:3.40.50.1390,PF07508,Coil
MQSAFFFIPFFGSWRKGLFMAYVRNKKKILKFWSKKKAALYVRVSTRYQVDKDSLPFQRKKLKEYCKFLGIEDFVIFEDDGYSAKNTDRPHFQEMMSRVRDGEFSHLIVWKVDRVSRNLLDFAAMYQELKDHKVTFISMNEQFDTSTAIGEAMLKIILIFAELERNMTSERVTGIMLDRAEQGLWNGARMPVGYRWNPEIKFPEPDPEETKIVQFIFDEYERVRSTTKIARYLNHNQIASKRGGQWTSKLIRDIIRSPFYIGTYRYNLRESGRGPLKPESEWIVRENNHPAIITKEQFDRCNAIMDENGTSRDTSELRARKYVHTFSGRLVCGKCGANMIASKDRARANGWRPSMYRCAQRSRMMDCDNSKTVNESYIGPFIFNYAANLARIQKNFKNIKTLEQLEKELLKGPEFENMKVSKESLRRTFDALAFQEVGKGAYLPDINLSDGDDDYTAAEQLSILKRELDKCKTAIDRLTDLYLYDPDSMTKEEFAKKKRDLVNKIAGYEKQIEVSQATGDKDDLADLEFIRKASAFLVAQRIVSKKHVDYIQMAIDLDNEILKDFVDQVIDRIEILEGRVRSIRFVNGLVHEFTYSTPADLPVCQKCGGRIGSTCGCRTRTFDFAGKPYRRIKVGDPGDKFHGVTGAVCPECSAQAGRWHHWKCGIERCPICGEQLIACEHGPNGKD

SEQ ID NO: 88 - protein, 687 aa, Unknown
  Description of Unknown: Integrase B89 sequence
  PTHR30461:SF3,IPR036162,PS51737,IPR011109,PTHR30461, PS00397,PF00239,G3DSA:1.10.10.2600,IPR006119,SSF53041, cd00338,SM00857,IPR025827,IPR038109,PS51736, IPR006118,PF13408,G3DSA:3.40.50.1390,PF07508,Coil
MQSAFFFIPFFGSWRKGLFMAYVRNKKKILKFWSKKKAALYVRVSTRYQVDKDSLPFQRKKLKEYCKFLGIEDFVIFEDDGYSAKNTDRPHFQEMMSRVRDGEFSHLIVWKVDRVSRNLLDFAAMYQELKDHKVTFISMNEQFDTSTAIGEAMLKIILIFAELERNMTSERVTGIMLDRAEQGLWNGARMPVGYRWNPEIKFPEPDPEETKIVQFIFDEYERVRSTTKIARYLNHNQIASKRGGQWTSKLIRDIIRSPFYIGTYRYNLRESGRGPLKPESEWIVRENNHPAIIAKEQFDRCNAIMDENGTSRDTSELRARKYVHTFSGRLVCGKCGANMIASKDRARANGWRPSMYRCAQRSRMMDCDNSKTVNESYIGPFIFNYAANLARIQKNFKNIKTLEQLEKELLKGPEFENMKVSKESLRRTFDALAFQEVGKGAYLPDINLSDGDDDYTAAEQLSILKRELDKCKTAIDRLTDLYLYDPDSMTKEEFAKKKRDLVNKIAGYEKQIEVSQATGDKDDLADLEFIRKASAFLVAQRIVSKKHVDYIQMALDLDNEILKDFVDQVIDRIEILEGRVRSIRFVNGLVHEFTYSTPADLPVCQKCGGRIGSTCGCRTRTFDFAGKPYRRIKVGDPGDKFHGVTGAVCPECSAQAGRWHHWKCGIERCPICGEQLIACEHEPNGKD

SEQ ID NO: 89 - protein, 687 aa, Unknown
  Description of Unknown: Integrase B90 sequence
  PTHR30461:SF3,IPR036162,PS51737,IPR011109,PTHR30461, PS00397,PF00239,G3DSA:1.10.10.2600,IPR006119,SSF53041, cd00338,SM00857,IPR025827,IPR038109,PS51736, IPR006118,PF13408,G3DSA:3.40.50.1390,PF07508,Coil
MQSAFFFIPFFGSWRKGLFMAYVRNKKKILKFWSKKKAALYVRVSTRYQVDKDSLPFQRKKLKEYCKFLGIEDFVIFEDDGYSAKNTDRPHFQEMMSRVRDGEFSHLIVWKVDRVSRNLLDFAAMYQELKDHKVTFISMNEQFDTSTAIGEAMLKIILIFAELERNMTSERVTGIMLDRAEQGLWNGARMPVGYRWNPEIKFPEPDPEETKIVQFIFDEYERVRSTTKIARYLNHNQIASKRGGQWTSKLIRDIIRSPFYIGTYRYNLRESGRGPLKPESEWIVRENNHPAIITKEQFDRCNAIMDENGTSRDTSELRARKYVHTFSGRLVCGKCGANMIASKDRARANGWRPSMYRCAQRSRMMDCDNSKTVNESYIGPFIFNYAANLARIQKNFKNIKTLEQLEKELLKGSEFENMKVSKESLRRTFDALAFQEVGKGAYLPDINLSDGDDDYTAAEQLSILKRELDKCKTAVDRLTDLYLYDPDSMTKEEFAKKKRDLVNKIAGYEKQIEASQATGDKDDLADLEFIRKASAFLVAQRIVSKKHVDYIQMALDLDNEILKDFVDQIIDRIEILEGRVQSIRFVNGLVHEFTYSTPADLPVCQKCGGRIGSTCGCRTRTFDFAGKPYRRIKVGDPGDKFHGVAGAVCPECSSQVGRWHHWKCGIERCPICGEQLIACEHGPNGKD

SEQ ID NO: 90 - protein, 687 aa, Unknown
  Description of Unknown: Integrase B91 sequence
  PTHR30461:SF3,IPR036162,PS51737,IPR011109,PTHR30461, PS00397,PF00239,G3DSA:1.10.10.2600,IPR006119,SSF53041, cd00338,SM00857,IPR025827,IPR038109,PS51736, IPR006118,PF13408,G3DSA:3.40.50.1390,PF07508,Coil
MQSAFFFIPFFGSWGKGLFMAYVRNKKKILKFWSKKKAALYVRVSTRYQVDKDSLPFQRKKLKEYCKFLGIEDFVIFEDDGYSAKNTDRPHFQEMMSRVRDGEFSHLIVWKVDRVSRNLLDFAAMYQELKDHKVTFISMNEQFDTSTAIGEAMLKIILIFAELERNMTSERVTGIMLDRAEQGLWNGARMPVGYRWNPEIKFPEPDPEETKIVQFIFDEYERVRSTTKIARYLNHNQIASKRGGQWTSKLIRDIIRNPFYIGTYRYNLRESGRGPLKPESEWIVRENNHPAIIAKEQFDCCNAIMDENGTSRDTSDLRARKYVHTFSGRLVCGKCGANMIASKDRARANGWRPSMYRCAQRSRMMDCDNSKTVNESYIGPFIFNYVANLARIQKNFKNIKTLEQLEKELLKGPEFENMKVSKESLRRTFDALAFQEVGKGAYLPDIDLSGGDDDYTAAEQLSILKRELDKCKTAIDRLTDLYLYDPDSMTKEEFAKKKRDLVNKIAGYEKQIEASQATGDKDDLADLEFIRKASAFLVAQRIVSKKHVDYIQMALDLDNEILKDFVDQVIDRIEILEGRVQSIRFVNGLVHEFTYSTPADLPVCQKCGGRIGSTCGCRTRTFDFAGKPYRRIKVGDPGDKFHGVAGAVCPECSAQAGRWHHWKCGIERCPICGEQLITCEHGPNGKD

SEQ ID NO: 91 - protein, 686 aa, Unknown
  Description of Unknown: Integrase B92 sequence
  PTHR30461:SF3,SM00857,IPR006118,G3DSA:1.10.10.2600,IPR036162, PS51737,G3DSA:3.40.50.1390,IPR006119,IPR038109,PF07508, IPR011109,SSF53041,PF00239,PTHR30461,PS00397, PS51736,Coil,cd00338
MPFLLKDNGVTDTMAKRELMKNLMSDTFRRVAIYIRVSTNHQVDKDSLPLQREELINYCKYVLGIEDFEIFEDAGFSAKNTDRPGYQKMMKLVRAGLFTHVLVWKLDRISRNLLDFAYMYEELKKLDVAFISKNEQFDTSTAMGEAMLKIILVFAELERKTTSERVAATMISRAINGKWNGGRVPYGYSYDYEQKEFSVNPEEQKVALLMCDLYEASNSLLFVSRKLNEMGYRSRAGNLWSPVQVRKVLVNPFNTGKYVYNQTSLSTGTQLPNKEEDFIVIEDHHPALIPQERQDRLIARLNRNARSRSNANNTTNRKNIHVFSGLIYCENCGNMLTSSVGKKLAGDGWRPSIYLCPSKRKHVSDGCHDTTDSSVGEFVLNFIMNMLNAQRNFQLVRSAADLQRLLLYGKVFDDVDHLDQDSLNDMFTVLSSNLPQNVKAGMKKKMRKPPSNPEVTKLNKEKQRLERAMERLKRLYMYSDDSMTEQEYITEKNRIADAYSEAEARIVEITNYERMERSISDEDFVRQATAFILSKKLSGSSYINYRKLAVSTDPLMLKEFFNSILDSITINTDGKIGSIVFKNGLRHQFIYTSNKKEDKTMLAKCNYCGQVMLEADGCTKTYFTLNGKQYPRIRVGDKYDFEPGTTSRCHDCAAKPGEYHHSGCDAERCPVCHEQLIGCECDFSDL

SEQ ID NO: 92 - protein, 686 aa, Unknown
  Description of Unknown: Integrase B93 sequence
  PTHR30461:SF3,SM00857,G3DSA:1.10.10.2600,IPR036162,PS51737, G3DSA:3.40.50.1390,IPR006119,IPR038109,PF07508,SSF53041, IPR011109,PTHR30461,Coil,cd00338,PF00239
MAILNNEMQVILSTDAEEMSVEMENKVKDLINNDVVVDKETLDKKMDKIAKTVGLANLKRCLFYGRVSTVKKEQTSSILSQHSIASEFEEQYIDKGFIIVREVFERKSAVSAVKRPKFMNIVEQCKNPEYEIDYLVVKTVDRMFRNVTDTINIMESLAKCGVGLLFYWDDLSSLDPADRNKIIDKANAAESYSNNLSTNVKRGKARNVKNGKGRVPGYCFGYDKIKCGDSSKSIINPAEAELVKELFNRFNSGETLGSIVLDWRARGIKTKLGSEPATPALRRMLQNKIYLGLILNDRQTRASIRDEYIQLPESEWKVIVRPDLRIIDDETFEKAQRIFELNAAKHGKMLSMPKEYIFKSMIQCPVCGKNFKQIKNGKNNGKDTKFYVCTTHKLGTKYGRVCDCSNSSAFRKDEMLSAIKVYFLEMLRNRSDIEELVYKATANILEKLNKETEQKDYSEEIKKITKKYERELDLYREGLVNSTSEIKKLKKELEDLKVKQYLADQGSNVKYDVKQYVDKMFTSIEELVDKGVNEETLDPIKFNGLFESIIGLPNNRLVFNLKLSTELSSALSSRKKDLGNLEMYPSSSSSNISPFISPVETDVKEVLMNIDPNEVGIKTSIQTYADIILKEKYCLVNIEQTFNKDRMLKEMQAVKKSIPNGNMIYRYSRRVNGLGAIILDSINIIL

SEQ ID NO: 93 - protein, 678 aa, Unknown
  Description of Unknown: Integrase B94 sequence
  PTHR30461:SF3,IPR036162,PS51737,IPR011109,PTHR30461,PF00239, G3DSA:1.10.10.2600,IPR006119,SSF53041,cd00338,SM00857, IPR025827,IPR038109,mobidb-lite,PS51736,PF13408, G3DSA:3.40.50.1390,PF07508,Coil
MRKKSNLNAATRAVIYARYSSANQRDCSIEQQVAKCRELAARLGLTVIDVYEDRAISGKTDRRPNFQRMMKDADLRQFDVVLAWKSNRMGRNMLQAMTNEERLRDNGIRTVYAEEDFDDTAAGRFALRNMMNVNQFYSENMAEDITRGLMDNAAKCLSNGSLPLGYKPGDDRHVVLDEAEAAIVQEIFTRVSCYEPFIDIARDLNRRGIKTKKGSEWGRSSFHTICRNERYRGIYIYRDVRIEGGMPRIVSDELFYKVQEVLKVKKNPQGRRKRSGYEEYLLTGKLFCGHCGSPMTGIAGTSKTGAMHYYYTCQKRRTDHSCDKKAVRRDQIERAVGVAIQQQLLTDENIQMMADKLMEYNARTETKYRLQGLQDQLNANKTATANILKAIEMGIITDATKARLLELEKEQGQLLVKIDEAKAEMVPISRNDFVKLLYIYKEGEPTDKKYLAALFDNFLVRVDLYDDHLKITFDPTGGRQPIDMPIGAEESPESPGDSSESSDFEASSQDAEKFVLALHNCTKASNLGSRLFCWCVGYGTTRIIKSGKRSFLLDSKEVPWPNEGVGATIGRPPTWRNHALSGKAFFADKRVGASNARPYKSFLTACGEHGLPASLIRYRPPGKAIHIYCGCVQTLHPYKDMLERDGEIYPVRLLHYNIAKLPVTAIIQKASQTKKETT

SEQ ID NO: 94 - protein, 676 aa, Unknown
  Description of Unknown: Integrase B95 sequence
  PTHR30461:SF3,cd00338,SM00857,G3DSA:1.10.10.2600,IPR036162, PF13408,IPR025827,G3DSA:3.40.50.1390,PS51737,IPR006119, IPR038109,PF07508,SSF53041,IPR011109,PTHR30461, PS51736,Coil,PF00239
MSSVDKIAVVYARYSSHGQTEQSIEGQIAAAQKYAEQHGYTIIHIYADRAMTGRNDDREEFQKMLSDTATRQFGVILLWKIDRFGRNREEIAFNRYRCKKNGVRVERVAEDVPDGPEGVILDSVLEGMAEYYSLQLAQNVRRGQRESAKKSQTVGGCKIIGYNVNPDTKRYEVDPKTAPFVTEVFKRYANGETISEIVAWLNAQGVRTTRGGEFTVNSLHRLLKNEKYTGVYIFHDIRNEGGMPALIDRATFDKAQEMLKVNRRAPARVWSKTEYLLTDKLFCGHCGTMMVGESGHGRNGTKHNYYTCWNRKKKKTCDKKPIRQDVIEPLVLRAIGKLLENPATLENIADQVWAAYERSDTSGDTIKALDKQIADVDRALSNVMKAIEMGIINEMTKARMDELTDQKQALSAARAEAGLAGGFKLTRDMILFFLQDMAALDRSNRDSQKRLIKTFVNAIYLYDDHFDIAFNYTDNGNVVVRMREINDAARGEMFGRCAQCPTKKRRASVKFARLFSSFGSFSLVERLAHLAADGILPLVVNLRINCQCRAGLGMTRLSRHCSDTDVRVGEQDTDKGVAKHMRVDFADARFLGHAVNNFAIVVGADGPAEIIDNDKIFPAQLLQGFPVRFPLSVHAGLPSTAHTVLLCKPLVTVGFQIFHKFGCYIYVTDVVLFRGR

SEQ ID NO: 95 - protein, 674 aa, Unknown
  Description of Unknown: Integrase B96 sequence
  SM00857,G3DSA:1.10.10.2600,IPR036162,PF13408,IPR025827, G3DSA:3.40.50.1390,PS51737,mobidb-lite,IPR006119,IPR038109, PF07508,SSF53041,IPR011109,PF00239,PTHR30461, PS51736,Coil,cd00338
MAHKTAVLYARYSSDKQREASIDDQLRVCRDYCEAEDIEVVAEYKDYALSGKTDHRPEFRRMIANAPESDYVVVYMFDRFSRDRYDSATYKKMLRECGVRVLSASEKVEDTPEGGLQEGMLELLSEYYVKDLARKVRRGMEGNALKARDNGYRIFGYSTDPETRCYVINEAEANAVREMFSMHISGNSVNSIAREMASRGWTTTTGKPVDYNWAWRVLNRKAYTGLYSWGGIEVPGGMPQIIDEVTFARSQAVVPRKRRKDENWDVYRLTGKLYCGLCGKPMHGTAGTGKKGKRYHYYACRESDGCRRPWVRRELLEDSIADAVLETCSDERRMRMLARRIVEAYVEPGEEEAEMASIEAQIVSLEREQHNMTQAAMKGFVTDEMVARNDEIKAQLKNLHNRHGVLASQMCEITEDDIVGYMMHGFSRDDEDFIFGSIVREAYLFDDCVLLVFNFRDEVGDLTEIRVALQAQKKCEPGGGFALCSRDRVKSFPNPSAYPAGSASSSRYAAPPKPPGSAETILPRLDDELLTRVDEVRVADAVLGRDGLIGCAELGGDAGKRVAALHGVGGLLALAVDDVLRLLVLSAARLDDGLANRVVAVLSGLDPLGERGRGGVVGVVDEALHLVVAAAAVVPACIAVDVVRDDVVHEVERGAGWRHAPRAMSGRRTGAAAV

SEQ ID NO: 96 - protein, 669 aa, Unknown
  Description of Unknown: Integrase B97 sequence
  PTHR30461:SF3,IPR036162,PS51737,IPR011109,PTHR30461, PF00239,G3DSA:1.10.10.2600,IPR006119,SSF53041,cd00338, SM00857,IPR025827,IPR038109,PS51736,mobidb-lite, PF13408,G3DSA:3.40.50.1390,PF07508,Coil
MPEALNAVIYARYSSDRQTEQSIEGQLRECYAFAKANDIAVIDTYIDRAISGKTDNRPAFQKMIEDSAKRQFQAVIVYRLDRFTRNRYDSAIYKARLKKNGVKVLSAMENLNGSPESIIMESLLEGMAEYYSVELSQKITRGMRENALKGKALGGQRVLGYKVNSDCYFEIDETTAPVVVDIFKLYSSGKTVKEICDILNARGVKTARGGAFNKNSLHTILTNKKYIGIYKTKYGEIVGGIPAIIDKELFEMVALRMEQNKKAPARAKAEINYLLSTKLFCGKCRSAMVGESGTSKTGKKYYYYACVKKKREKACDKSNVKKDWIEDLVIQRTVTDILKDDVIEKIAERLVELQKAEAAESGTMLYLQNSLAEIQVSIKNIMTAIEKGIITESTKTRLTELEDEKRNVEIEIAKESIARRIISREQIIYWISSFKDGDITSEKYRQQLIDTFVHAVFVYDDKIVITYNYSGENNTATISDLDLSSPPNFRNPPRDRWVMGGDFLLFKEKEQDHASADGRNSHESTDHRSAAFSGSGHRVLSDPHQPGEQAVTPAAQKVTPALVAMTSVGVFACASGRVIVGISVKARERRHFFSLSPRSKRNFALFSGTSTGYSPVKQPVQKPSPHSASFVTLSVLRYPRESTPMICAISGIVWLHAMRFSRESTSVPK

SEQ ID NO: 97 - protein, 668 aa, Unknown
  Description of Unknown: Integrase B98 sequence
  PTHR30461:SF3,IPR036162,PS51737,IPR011109,PTHR30461, PS00397,PF00239,G3DSA:1.10.10.2600,IPR006119,SSF53041, cd00338,SM00857,IPR025827,IPR038109,PS51736, IPR006118,PF13408,G3DSA:3.40.50.1390,PF07508,Coil
MAYAKKKKILNFWTKKKAALYVRVSTRYQVDKDSLPFQRKKLKEYCKFLGLEDYVIFEDDGYSAKNTERPHFQEMMSRVRSGEFSHLIVWKVDRVSRNLLDFAAMYQELKDHKVTFISMNEQFDTSTAIGEAMLKIILIFAELERNMTSERVTGIMLDRAEQGLWNGARMPVGYRWNNETKFPEPDPEEVKIVQLIFDKYEEWKSSIKIARYLNNNNFKSKRGGQWTSKLIHDIIRNPFYIGTYRYNLRESGRGPLKPESEWIVRENNHPAIIDKAQFDRCNKIMDQNGSSRDTSDLRARKYVHTFSGHLVCGKCGANMIASKDRARANGWRPSMYRCAQRSRMLDCDNSRTINESYIGPFIFNYIANLARVQKNFKNITTVEKLERELLKGETFDGVAGILPEGLNLTFQALSFRQVGNGTYIPDVDFLGDSDGASDRDQIELLKSEIEKSKNAVTRLTDVYLFDPDSMTKEEFATKKKELAKKIEGMERQLADLLDDSGNDDLADMSFIKKASAFLVAQRIVSKSFVDYVGMAQELDNEILKDFIDQIVDQIVVLDGRVQSITFINGLKHEFRYATPAELPVCQKCGGRIGSTCGCRTRTFDFSGKRYQRIKVGDPRDTLHGKKNPVCPECLVREGRWHHWNCKIETCPICGGRLAECEHGPNGKK

SEQ ID NO: 98 - protein, 668 aa, Unknown
  Description of Unknown: Integrase B99 sequence
  PTHR30461:SF3,IPR036162,PS51737,IPR011109,PTHR30461, PS00397,PF00239,G3DSA:1.10.10.2600,IPR006119,SSF53041, cd00338,SM00857,IPR025827,IPR038109,PS51736, IPR006118,PF13408,G3DSA:3.40.50.1390,PF07508,Coil
MAYAKAKKHLKIWTKKKAALYVRVSTRYQVDKDSLPFQRKKLKEYCKFLGLEDYVIFEDDGYSAKNTERPHFQEMMSRVRSGEFSHLIVWKVDRVSRNLLDFAAMYQELKDHKVTFISMNEQFDTSTAIGEAMLKIILIFAELERNMTSERVTGIMLDRAEQGLWNGARMPVGYRWNNETKFPEPDPEEVKIVQLIFDKYEEWKSSIKMARYLNNNNFKSKRGGQWTSKLIHDIIRNPFYIGTYRYNLRESGRGPLKPESEWIVRENNHPAIIDKAQFDRCNKIMDQNGSSRDTSDLRARKYVHTFSGHLVCGKCGANMIASKDRARANGWRPSMYRCAQRSRMLDCDNSRTINESYIGPFIFNYIANLARVQKNFKNIATPEKLERELLKGETFDGVAGILPEGLNLTFQALSFRQVGNGTYIPDIDFLGDSDGASDRDQIELLKSEIEKSKNAVTRLTDVYLFDPDSMTKEEFATKKKELAKKIEGMERQLADLLDDSGNDDLADMSFIKKASAFLVAQRIVSKSFVDYVGMAQELDNEILKDFIDQIVDQIVVLDGRVQSITFINGLKHEFRYTAPAELPVCKKCGGRIGSTCGCRTRTFDFSGKRYKRIKVGDPRDMLHGKKNPVCPECFAQEGRWHHWNCKIETCPICGERLAECEHGPNGKN

SEQ ID NO: 99 - protein, 668 aa, Unknown
  Description of Unknown: Integrase B100 sequence
  PTHR30461:SF3,IPR036162,PS51737,IPR011109,PTHR30461, PS00397,PF00239,G3DSA:1.10.10.2600,IPR006119,SSF53041, cd00338,SM00857,IPR025827,IPR038109,PS51736, IPR006118,PF13408,G3DSA:3.40.50.1390,PF07508,Coil
MAYVRNKKKILKFWSKKKAALYVRVSTRYQVDKDSLPFQRKKLKEYCKFLGIEDFVIFEDDGYSAKNTDRPHFQEMMSRVRDGEFSHLIVWKVDRVSRNLLDFAAMYQELKDHKVTFVSMNEQFDTSTAIGEAMLKIILIFAELERNMTSERVTGIMLDRAEQGLWNGARMPVGYRWNPEIKFPEPDPEETKIVQFIFDEYERVRSTTKIARYLNHNQIASKRGGQWTSKLIRDIIRSPFYIGTYRYNLRESGRGPLKPESEWIVRENNHPAIITKEQFDRCNAIMDENGTSRDTSELRARKYVHTFSGRLVCGKCGANMIASKDRARANGWRPSMYRCAQRSRMMDCDNSKTVNESYIGPFIFNYAANLARIQKNFKNIKTLEQLEKELLKGPEFENMKVSKESLRRTFDALAFQEVGKGAYLPDINLSDGDDDYTAAEQLSILKRELDKCKTAIDRLTDLYLYDPDSMTKEEFAKKKRDLVNKIAGYEKQIEASQATGDKDDLADLEFIRKASAFLVAQRIVSKKHVDYIQMALDLDNEILKDFVDQVIDRIEILEGRVQSIRFVNGLVHEFTYSTPADLPVCQKCGGRIGSTCGCRTRTFDFSGKPYRRIKVGDPGDKFHGVAGAVCPECSAQAGRWHHWKCGIERCPICGEQLIACEHGPNKKD

SEQ ID NO: 100 - protein, 668 aa, Unknown
  Description of Unknown: Integrase B101 sequence
  PTHR30461:SF3,IPR036162,PS51737,IPR011109,PTHR30461, PS00397,PF00239,G3DSA:1.10.10.2600,IPR006119,SSF53041, cd00338,SM00857,IPR025827,IPR038109,PS51736, IPR006118,PF13408,G3DSA:3.40.50.1390,PF07508,Coil
MAYAKAKKHLKIWTKKKAALYVRVSTRYQVDKDSLPFQRKKLKEYCKFLGLEDHVIFEDDGYSAKNTERPHFQEMMSRVRSGEFSHLIVWKVDRVSRNLLDFAAMYQELKDHKVTFISMNEQFDTSTAIGEAMLKIILIFAELERNMTSERVTGIMLDRAEQGLWNGARMPVGYRWNSETKFPEPDPEEVKIVQLIFDKYEEWKSSIKIARYLNNNNFKSKRGGQWTSKLIHDIIRNPFYIGTYRYNLRESGRGPLKPESEWIVRENNHPAIIDKAQFDRCNKIMDQNGSSRDTSDLRARKYVHTFSGHLVCGKCGANMIASKDRARANGWRPSMYRCAQRSRMLDCDNSRTINESYIGPFIFNYIANLARVQKNFKNIATPEKLERELLKGETFDGVAGILSEGLNLTFQALSFRQVGNGTYIPDIDFLGDSDGASDRDQIELLKSEIEKSKNAVTRLTDVYLFDPDSMTKEEFATKKKELAKKIEGMERQLADLLDNSGNDDLADMSFIKKASAFLVAQRIVSKSFVDYVGMAQELDNEILKDFIDQIVDQIVVLDGRVQSITFINGLKHEFRYTAPAELPVCKKCGGRIGSTCGCRTRTFDFSGKRYQRIKVSDPRDMLHGKKNPVCPECFAQEGRWHHWNCKIETCPICGGRLAECEHGPNSKN

SEQ ID NO: 101 - protein, 668 aa, Unknown
  Description of Unknown: Integrase B102 sequence
  PTHR30461:SF3,IPR036162,PS51737,IPR011109,PTHR30461, PS00397,PF00239,G3DSA:1.10.10.2600,IPR006119,SSF53041, cd00338,SM00857,IPR025827,IPR038109,PS51736, IPR006118,PF13408,G3DSA:3.40.50.1390,PF07508,Coil
MAYAKTKKHLKIWTKKKAALYVRVSTRYQVDKDSLPFQRKKLKEYCKFLGLEDYVIFEDDGYSAKNTERPHFQEMMSRVRSGEFSHLIVWKVDRVSRNLLDFAAMYQELKDHKVTFISMNEQFDTSTAIGEAMLKIILIFAELERNMTSERVTGIMLDRAEQGLWNGARMPVGYRWNDETKFPEPDPEEVKIVQLIFDKYEEWKSSIKIARYLNNNNFKSKRGGQWTSKLIHDIIRNPFYIGTYRYNLRESGRGPLKPESEWIVRENNHPAIIDKAQFDRCNKIMDQNGSSRDTSDLRARKYVHTFSGHLVCGKCGANMIASKDRARANGWRPSMYRCAQRSRMLDCDNSRTINESYIGPFIFNYIANLARVQKNFKNITTVEKLERELLKGETFDGVAGILPEGLNLTFQALSFRQVGNGTYIPDIDFLGDSDGASDRDQIELLKSEIEKSKNAVTRLTDVYLFDPDSMTKEEFATKKKELAKKIEGMERQLADLLDDSGNDDLADMSFIKKASAFLVAQRIVSKSFVDYVGMAQELDNEILKDFIDQIVDQIVVLDGRVQSITFINGLKHEFRYTAPAELPVCKKCGGRIGSTCGCRTRTFDFSGKRYQRIKVGDPRDMLHGKKNPVCPECFAQEGRWHHWNCKIEACPICGERLAECEHGPNGKN

SEQ ID NO: 102 - protein, 668 aa, Unknown
  Description of Unknown: Integrase B103 sequence
  PTHR30461:SF3,IPR036162,PS51737,IPR011109,PTHR30461, PS00397,PF00239,G3DSA:1.10.10.2600,IPR006119,SSF53041, cd00338,SM00857,IPR025827,IPR038109,PS51736, IPR006118,PF13408,G3DSA:3.40.50.1390,PF07508,Coil
MAYAKTKKHLKIWTKKKAALYVRVSTRYQVDKDSLPFQRKKLKEYCKFLGLEDYVIFEDDGYSAKNTERPHFQEMMSRVRSGEFSHLIVWKVDRVSRNLLDFAAMYQELKDHKVTFISMNEQFDTSTAIGEAMLKIILIFAELERNMTSERVTGIMLDRAEQGLWNGARMPVGYRWNNETKFPEPDPEEVKIVQLIFDKYEEWKSSIKIARYLNNNNFKSKRGGQWTSKLIHDIIRNPFYIGTYRYNLRESGRGPLKPESEWIVRENNHPTIIDKAQFDRCNKIMDQNGSGRDTSDLRARKYVHTFSGHLVCGKCGANMIASKDRARANGWRPSMYRCAQRSRMLDCDNSRTINESYIGPFIFNYIANLARVQKNFKNIATPEKLERELLKGETFDGVAGILPEGLNLTFQALSFRQVGNGTYIPDIDFLGDSDGVSDRDQIELLKSEIEKSKNAVTRLTDVYLFDPDSMTKEEFATKKKELAKKIEGMERQLADLLDDSGNDDLADMSFIKKASAFLVAQRIVSKSFVDYVGMAQELDNEILKDFIDQIVDQIVVLDGRVQSITFINGLKHEFRYTAPAELPVCKKCGGRIGSTCGCRTRTFDFSGKRYQRIKVGDPRDMLHGKKNPVCPECFAQEGRWHHWNCKIEACPICGERLAECEHGPNGKN

SEQ ID NO: 103 - protein, 668 aa, Unknown
  Description of Unknown: Integrase B104 sequence
  PTHR30461:SF3,IPR036162,PS51737,IPR011109,PTHR30461, PS00397,PF00239,G3DSA:1.10.10.2600,IPR006119,SSF53041, cd00338,SM00857,IPR025827,IPR038109,PS51736, IPR006118,PF13408,G3DSA:3.40.50.1390,PF07508,Coil
MAYVRNKKKILKFWSKKKAALYVRVSTRYQVDKDSLPFQRKKLKEYCKFLGIEDFVIFEDDGYSAKNTDRPHFQEMMSRVRDGEFSHLIVWKVDRVSRNLLDFAAMYQELKDHKVTFISMNEQFDTSTAIGEAMLKIILIFAELERNMTSERVTGIMLDRAEQGLWNGARMPVGYRWNPEIKFPEPDPEETKIVQFIFDEYERVRSTTKIARYLNHNQIASKRGGQWTSKLIRDIIRNPFYIGTYRYNLRESGRGPLKPESEWIVRENNHPAIITKEQFDRCNAIMDENGTSRDTSELRARKYVHTFSGRLVCGKCGANMIASKDRARANGWRPSMYRCAQRSRMMDCDNSKTVNESYIGPFIFNYAANLARIQKNFKNIKTLEQLEKELLKGPEFENMKVSKESLRRTFDALAFQEVGKGAYLPDINLSDGDDDYTAAEQLSILKRELDKCKTAIDRLTDLYLYDPDSMTKEEFAKKKRDLVNKIAGYEKQIEASQATGDKDDLADLEFIRKASAFLVAQRIVSKKHVDYIQMALDLDNEILKDFVDQVIDRIEILEGRVQSIRFVNGLVHEFTYSTPADLPVCQKCGGRIGSTCGCRTRTFDFSGKPYRRIKVGDPGDKFHGVAGAVCPECSAQAGRWHHWKCGIERCPICGEQLIACEHGPNGKD

SEQ ID NO: 104 - protein, 668 aa, Unknown
  Description of Unknown: Integrase B105 sequence
  PTHR30461:SF3,IPR036162,PS51737,IPR011109,PTHR30461, PS00397,PF00239,G3DSA:1.10.10.2600,IPR006119,SSF53041, cd00338,SM00857,IPR025827,IPR038109,PS51736, IPR006118,PF13408,G3DSA:3.40.50.1390,PF07508,Coil
MAYAKTKKHLKIWTKKKAALYVRVSTRYQVDKDSLPFQRKKLKEYCKFLGLEDYVIFEDDGYSAKNTERPHFQEMMSRVRSGEFSHLIVWKVDRVSRNLLDFAAMYQELKDHKVTFISMNEQFDTSTAIGEAMLKIILIFAELERNMTSERVTGIMLDRAEQGLWNGARMPVGYRWNDEAKFPEPDPEEVKIVQLIFDKYEEWKSSLKISRYLNNNNFKSKRGGQWTSKLIHDIIRNPFYIGTYRYNMRESGRGPLKPESEWIVREDNHPAIIKKAQFDRCNKIMDQNGSSRDTSDLRARKYVHTFSGHLVCGKCGSNMIASKDRARANGWRPSMYRCAQRSRMLDCDNSRTINESYIGPFVFNYIANLARVQKNFKNITTVEKLEKELLKGETFDGVAGILPEGLNLTFQALSFRQVGNGTYIPDIDFLGDSDGTSGRDQIELLKSEIEKSKNAVARLTDVYLFDPDSMTKEEFATKKKELAKKIEGMERQLADLLDDSGSDDLADMSFIKKASAFLVAQRIVSKSFVDYVGMAQELDNEILKDFIDQVVDQIVVLDGRVQSITFINGLKHEFRYTAPAELPVCKKCGGRIGSTCGCRTRTFDFSGKRYQRIKVGDPCDMLHGKKNPVCPECFAQEGRWHHWNCKIEACPICGERLAECEHGPNGKN

SEQ ID NO: 105 - protein, 668 aa, Unknown
  Description of Unknown: Integrase B106 sequence
  PTHR30461:SF3,IPR036162,PS51737,IPR011109,PTHR30461, PS00397,PF00239,G3DSA:1.10.10.2600,IPR006119,SSF53041, cd00338,SM00857,IPR025827,IPR038109,PS51736, IPR006118,PF13408,G3DSA:3.40.50.1390,PF07508,Coil
MAYAKAKKHLKIWTKKKAALYVRVSTRYQVDKDSLPFQRKKLKEYCKFLGLEDYVIFEDDGYSAKNTERPHFQEMMSRVRSGEFSHLIVWKVDRVSRNLLDFAAMYQELKDHKVTFISMNEQFDTSTAIGEAMLKIILIFAELERNMTSERVTGIMLDRAEQGLWNGARMPVGYRWNDETKFPEPDPEEVKIVQLIFDKYEEWKSSIKIARYLNNNNFKSKRGGQWTSKLIHDIIRNPFYIGTYRYNLRESGRGPLKPESEWIVRENNHPAIIDKAQFDRCNKIMDQNGSSRDTSDLRARKYVHTFSGHLVCGKCGANMIASKDRARANGWRPSMYRCAQRSRMLDCDNSRTINESYIGPFIFNYIANLARVQKNFKNIATPEKLERELLKGETFDGVAGILPEGLNLTFQALAFRQVGNGTYIPDIDFLGDSGGASDRDQIELLKSEIEKSKNAVTRLTDVYLFDPDSMTKEEFATKKKELAKKIEGMERQLADLLDDSGNDDLADMSFIKKASAFLVAQRIVSKSFVDYVGMAQELDNEILKDFIDQIVDQIVVLDGRVQSITFINGLKHEFRYTAPAELPVCKKCGGRIGSTCGCRTRTFDFSGKRYQRIKVSDPRDMLHGKKNPVCPECFAQEGRWHHWNCKIETCPICGGRLAECEHGPNGKK

SEQ ID NO: 106 - protein, 668 aa, Unknown
  Description of Unknown: Integrase B107 sequence
  PTHR30461:SF3,IPR036162,PS51737,IPR011109,PTHR30461, PS00397,PF00239,G3DSA:1.10.10.2600,IPR006119,SSF53041, cd00338,SM00857,IPR025827,IPR038109,PS51736, IPR006118,PF13408,G3DSA:3.40.50.1390,PF07508,Coil
MAYAKKKKILNFWTKKKAALYVRVSTRYQVDKDSLPFQRKKLKEYCKFLGLEDYVIFEDDGYSAKNTERPHFQEMMSRVRSGEFSHLIVWKVDRVSRNLLDFAAMYQELKDHKVTFISMNEQFDTSTAIGEAMLKIILIFAELERNMTSERVTGIMLDRAEQGLWNGARMPVGYRWNDEAKFPEPDPEEVKIVQLIFDKYEEWKSSIKIARYLNNNNFKSKRGGQWTSKLIHDIIRNPFYIGTYRYNLRESGRGPLKPESEWIVRENNHPAIIGKAQFDRCNKIMDQNGSSRDTSDLRARKYVHTFSGHLVCGKCGANMIASKDRARANGWRPSMYRCAQRSRMLDCDNSRTINESYIGPFIFNYIANLARVQKNFKNIATPEKLERELLKGETFDGVAGILPEGLNLTFQALAFRQVGNGTYIPDIDFLGDSDGASDRDQIELLKSEIEKSKNAVTRLTDVYLFDPDSMTKEEFATKKKELAKKIEGMERQLADLLDDSGNDDLADMSFIKKASAFLVAQRIVSKSFVDYVGMAQELDNEILKDFIDQIVDQIVVLGGRVQSITFINGLKHEFRYTAPAELPVCKKCGGRIGSTCGCRTRTFDFSGKRYQRIKVSDPRDMLHGKKNPVCPECFAQEGRWHHWNCKIETCPICGGRLAECEHGPNGKK

SEQ ID NO: 107 - protein, 668 aa, Unknown
  Description of Unknown: Integrase B108 sequence
  PTHR30461:SF3,IPR036162,PS51737,IPR011109,PTHR30461, PS00397,PF00239,G3DSA:1.10.10.2600,IPR006119,SSF53041, cd00338,SM00857,IPR025827,IPR038109,PS51736, IPR006118,PF13408,G3DSA:3.40.50.1390,PF07508,Coil
MAYVRNKKKILKFWSKKKAALYVRVSTRYQVDKDSLPFQRKKLKEYCKFLGIEDFVIFEDDGYSAKNTDRPHFQEMMSRVRDGEFSHLIVWKVDRVSRNLLDFAAMYQELKDHKVTFISMNEQFDTSTAIGEAMLKIILIFAELERNMTSERVTGIMLDRAEQGLWNGARMPVGYRWNPEIKFPEPDPEETKIVQFIFDEYERVRSTTKIARYLNHNQIASKRGGQWTSKLIRDIIRSPFYIGTYRYNLRESGRGPLKPESEWIVRENNHPAIITKEQFDRCNAIMDENGTSRDTSELRARKYVHTFSGRLVCGKCGANMIASKDRARANGWRPSMYRCAQRSRMMDCDNSKTVNESYIGPFIFNYVANLARIQKNFKNIKTLEQLEKELLKGPEFENMKVSKESLRRTFDALAFQEVGKGAYLPDIDISDGDDDYTAAEQLSILKRELDKCKTAIDRLTDLYLYDPDSMTKEEFAKKKRDLVNKIAGYEKQIEASQATGDKDDLADLEFIRKASAFLVAQRIVSKKHVDYIQMALDLDNEILKDFVDQVIDRIEILEGRVQSIRFVNGLVHEFTYSTPADLPVCQKCGGHIGSTCGCRTRTFDFAGKPYRRIKVGDPGDKFHGVAGAVCPECSAQAGRWHHWKCGIERCPICGEQLIACEHGPNGKD

SEQ ID NO: 108 - protein, 668 aa, Unknown
  Description of Unknown: Integrase B109 sequence
  PTHR30461:SF3,IPR036162,PS51737,IPR011109,PTHR30461, PS00397,PF00239,G3DSA:1.10.10.2600,IPR006119,SSF53041, cd00338,SM00857,IPR025827,IPR038109,PS51736, IPR006118,PF13408,G3DSA:3.40.50.1390,PF07508,Coil
MAYAKVKKHLKIWTKKKAALYVRVSTRYQVDKDSLPFQRKKLKEYCKFLGLEDYVIFEDDGYSAKNTERPHFQEMMSRVRSGEFSHLIVWKVDRVSRNLLDFAAMYQELKDHKVTFISMNEQFDTSTAIGEAMLKIILIFAELERNMTSERVTGIMLDRAEQGLWNGARMPVGYRWNDETKFPEPDPEEVKIVQLIFDKYEEWKSSIKIARYLNNNNFKSKRGGQWTSKLIHDIIRNPFYIGTYRYNMRESGRGPLKPESEWIVRENNHPAIIDKAQFDRCNKIMDQNGSSRDTSDLRARKYVHTFSGHLVCGKCGANMIASKDRARANGWRPSMYRCAQRSRMLDCDNSRTINESYIGPFIFNYIANLARVQKNFKNIATPEKLERELLKGETFDGVAGILPEGLNLTFQALSFRQVGNGTYIPDIDFLGDSDGASDRDQIELLKSEIEKSKNAVTRLTDVYLFDQDSMTKEEFATKKKELAKKIEGMERQLADLLDDSGNDDLADMSFIKKASAFLVAQRIVSKSFVDYVGMAQELDNEILKDFVDQIVDQIVVLDGRVQSITFINGLKHEFRYTAPVELPVCKKCGGRIGSTCGCRTRTFDFSGKRYQRIKVGDPRDMLHGKKNPVCPECFAQEGRWHHWNCKIEACPICGGRLAECEHGPNGKN

SEQ ID NO: 109 - protein, 668 aa, Unknown
  Description of Unknown: Integrase B110 sequence
  PTHR30461:SF3,IPR036162,PS51737,IPR011109,PTHR30461, PS00397,PF00239,G3DSA:1.10.10.2600,IPR006119,SSF53041, cd00338,SM00857,IPR025827,IPR038109,PS51736, IPR006118,PF13408,G3DSA:3.40.50.1390,PF07508,Coil
MAYVRNKKKILKFWSKKKAALYVRVSTRYQVDKDSLPFQRKKLKEYCKFLGIEDFVIFEDDGYSAKNTDRPHFQEMMSRVRDGEFSHLIVWKVDRVSRNLLDFAAMYQELKDHKVTFISMNEQFDTSTAIGEAMLKIILIFAELERNMTSERVTGIMLDRAEQGLWNGARMPVGYRWNPEIKFPEPDPEETKIVQFIFDEYERVRSTTKIARYLNHNQIASKRGGQWTSKLIRDIIRSPFYIGTYRYNLRESGRGPLKPESEWIVRENNHPAIITKEQFDRCNAIMDENGTSRDTSELRARKYVHTFSGRLVCGKCGANMIASKDRARANGWRPSMYRCAQRSRMMDCDNSKTVNESYIGPFIFNYAANLARIQKNFKNIKTLEQLEKELLKGPEFENMKVSKESLRRTFDALAFQEVGKGAYLPDINLSDGDDDYTAAEQLSILKRELDKCKTAVDRLTDLYLYDPDSMTKEEFAKKKRDLVNKIAGYEKQIEASQATGDKDDLADLEFIRKASAFLVAQRIVSKKHVDYIQMALDLDNEILKDFVDQIIDRIEILEGRVQSIRFVNGLVHEFTYSTPADLPVCQKCGGRIGSTCGCRTRTFDFAGKPYRRIKVGDPGDKFHGVAGAVCPECSAQVGRWHHWKCGIERCPICGEQLIACEHGPNGKD

SEQ ID NO: 110 - protein, 668 aa, Unknown
  Description of Unknown: Integrase B111 sequence
  PTHR30461:SF3,IPR036162,PS51737,IPR011109,PTHR30461, PS00397,PF00239,G3DSA:1.10.10.2600,IPR006119,SSF53041, cd00338,SM00857,IPR025827,IPR038109,PS51736, IPR006118,PF13408,G3DSA:3.40.50.1390,PF07508,Coil
MAYAKAKKHLKIWTKKKAALYVRVSTRYQVDKDSLPFQRKKLKEYCKFLGLEDHVIFEDDGYSAKNTERPHFQEMMSRVRSGEFSHLIVWKVDRVSRNLLDFAAMYQELKDHKVTFISMNEQFDTSTAIGEAMLKIILIFAELERNMTSERVTGIMLDRAEQGLWNGARMPVGYRWNGETKFPEPDPEEVKIVQLIFDKYEEWKSSIKIARYLNNNNFKSKRGGQWTSKLIHDIIRNPFYIGTYRYNLRESGRGPLKPESEWIVRENNHPAIIDKAQFDRCNKIMDQNGSRRDTSDLRARKYVHTFSGHLVCGKCGANMIASKDRARANGWRPSMYRCAQRSRMLDCDNSRTINESYIGPFIFNYIANLARVQKNFKNIATPEKLERELLKGETFGGVAGILPEGLNLTFQALSFRQVGNGTYIPDIDFLGDSDGASDRDQIELLKSEIEKSKNAVTRLTDVYLFDPDSMTKEEFATKKKELAKKIEGMERQLADLLDDSGNDDLADMSFIKKASAFLVAQRIVSKSFVDYVGMAQELDNEILKDFIDQIVDQIVVLDGRVQSITFINGLKHEFRYTAPAELPVCKKCGGRIGSTCGCRTRTFDFSGKRYQRIKVGDPRDMLHGKKNPVCPECFAQEGRWHHWNCKVETCPICGGRLAECEHGPDNKN

SEQ ID NO: 111 - protein, 668 aa, Unknown
  Description of Unknown: Integrase B112 sequence
  PTHR30461:SF3,IPR036162,PS51737,IPR011109,PTHR30461, PS00397,PF00239,G3DSA:1.10.10.2600,IPR006119,SSF53041, cd00338,SM00857,IPR025827,IPR038109,PS51736, IPR006118,PF13408,G3DSA:3.40.50.1390,PF07508,Coil
MAYAKAKKHLKIWTKKKAALYVRVSTRYQVDKDSLPFQRKKLKEYCKFLGLEDHVIFEDDGYSAKNTERPHFQEMMSRVRSGEFSHLIVWKVDRVSRNLLDFAAMYQELKDHKVTFISMNEQFDTSTAIGEAMLKIILIFAELERNMTSERVTGIMLDRAEQGLWNGARMPVGYRWNSETKFPEPDPEEVKIVQLIFDKYEEWKSSIKIARYLNNNNFKSKRGGQWTSKLIHDIIRNPFYIGTYRYNLRESGRGPLKPESEWIVRENNHPAIIDKAQFERCNKIMDQNGSSRDTSDLRARKYVHTFSGHLVCGKCGANMIASKDRARANGWQPSMYRCAQRSRMLDCDNSRTINESYIGPFIFNYIANLARVQKNFKNIATPEKLERELLKGETFDGVAGILPEGLNLTFQALSFRQVGNGTYIPDIDFLGDSDGASDRDQIELLKSEIEKSKNAVTRLTDVYLFDPDSMTKEEFATKKKGLAKKIEGMERQLADLLDDSGNDDLADMSFIKKASAFLVAQRIVSKSFVDYVGMAQELDNEILKDFIDQIVDQIVVLDGRVQSITFINGLKHEFRYTAPAELPVCKKCGGRIGSTCGCRTRTFDFSGKRYQRIKVGDPRDALHGKKNPVCPECFAQEGRWHHWNCKIEACPICGERLAECEHGPNGKN

SEQ ID NO: 112 - protein, 668 aa, Unknown
  Description of Unknown: Integrase B113 sequence
  PTHR30461:SF3,IPR036162,PS51737,IPR011109,PTHR30461, PS00397,PF00239,G3DSA:1.10.10.2600,IPR006119,SSF53041, cd00338,SM00857,IPR025827,IPR038109,PS51736, IPR006118,PF13408,G3DSA:3.40.50.1390,PF07508,Coil
MAYAKVKKHLKIWTKKKAALYVRVSTRYQVDKDSLPFQRKKLKEYCKFLGLEDYVIFEDDGYSAKNTERPHFQEMMSRVRSGEFSHLIVWKVDRVSRNLLDFAAMYQELKDHKVTFISMNEQFDTSTAIGEAMLKIILIFAELERNMTSERVTGIMLDRAEQGLWNGARMPVGYRWNNETKFPEPDPEEVKIVQLIFDKYEEWKSSIKIARYLNNNNFKSKRGGQWTSKLIHDIIRNPFYIGTYRYNLRESGRGPLKPESEWIVRENNHPAIIDKAQFDRCNKIMDQNGSSRDTSDLRARKYVHTFSGHLVCGKCGANMIASKDRARANGWRPSMYRCAQRSRMLDCDNSRTINESYIGPFIFNYIANLARVQKNFKNITMVEKLERELLKGETFDGVAGILPEGLNLTFQALSFRQVGNGTYIPDIDFLGDSDGASDHNQIELLKSEIEKSKNAVTRLTDVYLFDPDSMTKEEFATKKKELAKKIEGMERQLADLLDDSGNDDLADMSFIKKASAFLVAQRIVSKSFVDYVGMAQELDNEILKDFIDQIVDQIVVLDGRVQSITFINGLKHEFRYATPAELPVCQKCGGHIGSTCGCRTRTFDFSGKRYQRIKVGDPRDMLHGKKNPVCPECFAQEGRWHHWNCKVETCPICGGRLAECEHGPNGKN

SEQ ID NO: 113 - protein, 668 aa, Unknown
  Description of Unknown: Integrase B114 sequence
  PTHR30461:SF3,IPR036162,PS51737,IPR011109,PTHR30461, PS00397,PF00239,G3DSA:1.10.10.2600,IPR006119,SSF53041, cd00338,SM00857,IPR025827,IPR038109,PS51736, IPR006118,PF13408,G3DSA:3.40.50.1390,PF07508,Coil
MAYAKAKKHLKIWTKKKAALYVRVSTRYQVDKDSLPFQRKKLKEYCKFLGLEDYVIFEDDGYSAKNTERPHFQEMMSRVRSGEFSHLIVWKVDRVSRNLLDFAAMYQELKDHKVTFISMNEQFDTSTAIGEAMLKIILIFAELERNMTSERVTGIMLDRAEQGLWNGARMPVGYRWNNETKFPEPDPEEVKIVRLIFDKYEEWKSSIKIARYLNNNNFKSKRGGQWTSKLIHDIIRNPFYIGTYRYNLRESGRGPLKPESEWIVRENNHPAIIDKAQFDRCNKIMDQNGSSRDTSDLRARKYVHTFSGHLVCGKCGANMIASKDRARANGWRPSMYRCAQRSRMLDCDNSRTINESYIGPFIFNYIANLARVQKNFKNITTVEKLERELLKGETFDGVAGILPEGLNLTFQALSFRQVGNGTYIPDVDFLGDSDGASDRDQIELLKSEIEKSKNAVTRLTDVYLFDPDSMTKEEFATKKKELAKKIEGMERQLADLLDDSGNDDLADMSFIKKASAFLVAQRIVSKSFVDYVGMAQELDNEILKDFIDQIVDQIVVLDGRVQSITFINGLKHEFRYATPAELPVCQKCGGRIGSTCGCRTRTFDFSGKRYQRIKVGDPRDTLHGKKNPVCPECFAHEGRWHHWNCKIETCPICGGRLAECEHGPNGKK

SEQ ID NO: 114 - protein, 668 aa, Unknown
  Description of Unknown: Integrase B115 sequence
  PTHR30461:SF3,IPR036162,PS51737,IPR011109,PTHR30461, PS00397,PF00239,G3DSA:1.10.10.2600,IPR006119,SSF53041, cd00338,SM00857,IPR025827,IPR038109,PS51736, IPR006118,PF13408,G3DSA:3.40.50.1390,PF07508,Coil
MAYAKKKKILNFWTKKKAALYVRVSTRYQVDKDSLPFQRKKLKEYCKFLGLEDYVIFEDDGYSAKNTERPHFQEMMSRVRSGEFSYLIVWKVDRVSRNLLDFAAMYQELKDHKVTFISMNEQFDTSTAIGEAMLKIILIFAELERNMTSERVTGIMLDRAEQGLWNGARMPVGYRWNNETKFPEPDPEEVKIVQLIFDKYEEWKSSIKIARYLNNNNFKSKRGGQWTSKLIHDIIRNPFYIGTYRYNLRESGRGPLKPESEWIVRENNHPAIIDKAQFDRCNKIMDQNGSSRDTSDLRARKYVHTFSGHLVCGKCGANMIASKDRARANGWRPSMYRCAQRSRMLDCDNSRTINESYIGPFIFNYIANLARVQKNFKNITTVEKLERELLKGETFDGVAGILPEGLNLTFQALSFRQVGNGTYIPDVDFLGDSGGASDRDQIELLKSEIEKSKNAVTRLTDVYLFDPDSMTKEEFATKKKELAKKIEGMERQLADLLDDSGNDDLADMSFIKKASAFLVAQRIVSKSFVDYVGMAQELDNEILKDFIDQIVDQIVVLDGRVQSITFINGLKHEFRYAAPAELPVCKKCGGRIGSTCGCRTRTFDFSGKRYQRIKVGDPRDMLHGKKNPVCPECFAQEGRWHHWNCKIETCPICGERLAECEHGPNGKN

SEQ ID NO: 115 - protein, 668 aa, Unknown
  Description of Unknown: Integrase B116 sequence
  PTHR30461:SF3,IPR036162,PS51737,IPR011109,PTHR30461, PS00397,PF00239,G3DSA:1.10.10.2600,IPR006119,SSF53041, cd00338,SM00857,IPR025827,IPR038109,PS51736, IPR006118,PF13408,G3DSA:3.40.50.1390,PF07508,Coil
MAYAKAKKHLKIWTKKKAALYVRVSTRYQVDKDSLPFQRKKLKEYCKFLGLEDYVIFEDDGYSAKNTERPHFQEMMSRVRSGEFSHLIVWKVDRVSRNLLDFAAMYQELKDHKVTFISMNEQFDTSTAIGEAMLKIILIFAELERNMTSERVTGIMLDRAEQGLWNGARMPVGYRWNNETKFPEPDPEEVKIVQLIFDKYEEWKSSIKIARYLNNNNFKSKRGGQWTSKLIHDIIRNPFYIGTYRYNLRESGRGPLKPESEWIVRENNHPAIIDKAQFDRCNKIMDQNGSSRDTSDLRARKYVHTFSGHLVCGKCGVNMIASKDRARANGWRPSMYRCAQRSRMLDCDNSRTINESYIGPFIFNYIANLARVQKNFKNITTVEKLERELLKGETFDGVAGILPEGLNLTFQALSFRQVGNGTYIPDVDFLGDSDGASDRDQIELLKSEIEKSKNAVTRLTDVYLFDPDSMTKEEFATKKKELAKKIEGMERQLADLLDDSGNDDLADMSFIKKASAFLVAQRIVSKSFVDYVGMAQELDNEILKDFIDQIVDQIVVLDGRVQSITFINGLKHEFRYIVPAELPVCQKCGGRIGSTCGCRTRTFDFSGKRYQRIKVGDPRDMLHGKKNPVCPECFAQEGRWHHWNCKIETCPICGGRLAECEHGPDNKN

SEQ ID NO: 116 - protein, 668 aa, Unknown
  Description of Unknown: Integrase B117 sequence
  PTHR30461:SF3,IPR036162,PS51737,IPR011109,PTHR30461, PS00397,PF00239,G3DSA:1.10.10.2600,IPR006119,SSF53041, cd00338,SM00857,IPR025827,IPR038109,PS51736, IPR006118,PF13408,G3DSA:3.40.50.1390,PF07508,Coil
MAYAKAKKHLKIWTKKKAALYVRVSTRYQVDKDSLPFQRKKLKEYCKFLGLEDYVIFEDDGYSAKNTERPHFQEMMSRVRSGEFSHLIVWKVDRVSRNLLDFAAMYQELKDHKVTFISMNEQFDTSTAIGEAMLKIILIFAELERNMTSERVTGIMLDRAEQGLWNGARMPVGYRWNNETKFPEPDPEEVKIVQLIFDKYEEWKSSIKIARYLNNNNFKSKRGGQWTSKLIHDIIRNPFYIGTYRYNLRESGRGPLKPESEWIVRENNHPAIIDKAQFDRCNKIMDQNGSSRDTSDLRARKYVHTFSGHLVCGKCGANMIASKDRARANGWRPSMYRCAQRSRMLDCDNSRTINESYIGPFIFNYIANLARVQKNFKNITTVEKLERELLKGETFDGVAGILPEGLNLTFQALSFRQVGNGTYIPDVDFLGDSDGASDRDQIELLKSEIEKSKNAVTRLTDVYLFDPDSMTKEEFATKKKELAKKIEGMERQLADLLDDSGNDDLADMSFIKKASAFLVAQRIVSKSFVDYVGMAQELDNEILKDFIDQIVDQIVVLDGRVQSITFINGLKHEFRYATPAELPVCQKCGGRIGSTCGCRTRTFDFSGKRYQRIKVGDPRDTLHGKKNPVCPECFAQEGRWHHWNCKIETCPICGGRLAECEHGPNGKK

SEQ ID NO: 117 - protein, 668 aa, Unknown
  Description of Unknown: Integrase B118 sequence
  PTHR30461:SF3,IPR036162,PS51737,IPR011109,PTHR30461, PS00397,PF00239,G3DSA:1.10.10.2600,IPR006119,SSF53041, cd00338,SM00857,IPR025827,IPR038109,PS51736, IPR006118,PF13408,G3DSA:3.40.50.1390,PF07508,Coil
MAYVRNKKKILKFWSKKKAALYVRVSTRYQVDKDSLPFQRKKLKEYCKFLGIEDFVIFEDDGYSAKNTDRPHFQEMMSRVRDGEFSHLIVWKVDRVSRNLLDFAAMYQELKDHKVTFISMNEQFDTSTAIGEAMLKIILIFAELERNMTSERVTGIMLDRAEQGLWNGARMPVGYRWNTEIKFPEPDPEETKIVQFIFDEYERVRSTTKIARYLNHNQIASKRGGQWTSKLIRDIIRNPFYIGTYRYNLRESGRGPLKPESEWIVRENNHPAIITKEQFDRCNAIMDENGTSRDTSELRARKYVHTFSGRLVCGKCGANMIASKDRARANGWRPSMYRCAQRSRMMDCDNSKTVNESYIGPFIFNYVANLARIQKNFKNIKTLEQLEKELLKGPEFENMKVSKESLCRTFDALAFQEVGKGAYLPDIDLSDGDDDYTAAEQLSILKRELDKCKTAIDRLTDLYLYDPDSMTKEEFAKKKRDLVNKIAGYEKQIEASQATGGKDDLADLEFIRKASAFLVAQRIVSKKHVDYIQMAFDLDNEILKDFVDQVIDRIEILEGRVQSIRFVNGLVHEFTYSTPADLPVCQKCGGRIGSTCGCRTRTFDFAGKPYRRIKVGDPGDKFHGVTGAGCPECSAQAGRWHHWKCGIERCPICGEQLIACEHGPNGKD

SEQ ID NO: 118 - protein, 668 aa, Unknown
  Description of Unknown: Integrase B119 sequence
  PTHR30461:SF3,IPR036162,PS51737,IPR011109,PTHR30461, PS00397,PF00239,G3DSA:1.10.10.2600,IPR006119,SSF53041, cd00338,SM00857,IPR025827,IPR038109,PS51736, IPR006118,PF13408,G3DSA:3.40.50.1390,PF07508,Coil
MAYAKAKKHLKIWTKKKAALYVRVSTRYQVDKDSLPFQRKKLKEYCKFLGLEDHVIFEDDGYSAKNTERPHFQEMMSRVRSGEFSHLIVWKVDRVSRNLLDFAAMYQELKDHKVTFISMNEQFDTSTAIGEAMLKIILIFAELERNMTSERVTGIMLDRAEQGLWNGARMPVGYRWNDETKFPEPDPEEVKIVQLIFDKYEEWKSSIKIARYLNNNNFKSKRGGQWTSKLIHDIIRNPFYIGTYRYNLRESGRGPLKPESEWIVRENNHPAIIDKAQFDRCNKIMDQNGSSRDTSDLRARKYVHTFSGHLVCGKCGANMIASKDRARANGWRPSMYRCAQRSRMLDCDNSRTINESYIGPFIFNYIANLARVQKNFKNIATPEKLERELLKGETFDGVAGILPEGLNLTFQALSFRQVGNGTYIPDIDFLGDSDGASDNNQIELLKSEIEKSKNAVTRLTDVYLFDPDSMTKEEFATKKKELAKKIEGMERQLADLLDDSGNDDLADMSFIKKASAFLVAQRIVSKSFVDYVGMAQELDNEILKDFIDQIVDQIVVLDGRVQSITFINGLKHEFRYATPAELPVCQKCGGRIGSTCGCRTRTFDFSGKRYQRIKVGDPRDTLHGKKNPVCPECFAQEGRWHHWNCKVETCPICGGRLAECEHGPNGKK

SEQ ID NO: 119 - protein, 668 aa, Unknown
  Description of Unknown: Integrase B120 sequence
  PTHR30461:SF3,IPR036162,PS51737,IPR011109,PTHR30461, PS00397,PF00239,G3DSA:1.10.10.2600,IPR006119,SSF53041, cd00338,SM00857,IPR025827,IPR038109,PS51736, IPR006118,PF13408,G3DSA:3.40.50.1390,PF07508,Coil
MAYVRNKKKILKFWSKKKAALYVRVSTRYQVDKDSLPFQRKKLKEYCKFLGIEDFVIFEDDGYSAKNTDRPHFQEMMSRVRDGEFSHLIVWKVDRVSRNLLDFAAMYQELKDHKVTFISMNEQFDTSTAIGEAMLKIILIFAELERNMTSERVTGIMLDRAEQGLWNGARMPVGYRWNPEIKFPEPDPEEAKIVQFIFDEYERVRSTTKIARYLNHNQIASKRGGQWTSKLIRDIIRSPFYIGTYRYNLRESGRGPLKPESEWIVRENNHPAIIAKEQFDRCNAIMDENGTSRDTSDLRARKYVHTFSGRLVCGKCGANMIASKDRARANGWRPSMYRCAQRSRMMDCDNSKTVNESYIGPFIFNYVANLARIQKNFKNIKTLEQLEKELLKGPEFENMKVSKESLRRTFDALAFQEVGKGAYLPDIDLSDGDDDYTAAEQLSILKRELDKCKTAIDRLTDLYLYDPDSMTKEEFAKKKRDLVNKIAGYEKQIEASQVTGDKDDLADLEFIRKASAFLVAQRIVSKKHVDYIQMALDLDNEILKDFVDQVIDRIEILEGRVQSIRFVNGLVHEFTYSTPADLPVCQKCGGRIGSTCGCRTRTFDFAGKPYRRIKVGDPGDKFHGVTGAVCPECSAQAGRWHHWKCGIERCPICGEQLIACEHGPNGKD

SEQ ID NO: 120 - protein, 668 aa, Unknown
  Description of Unknown: Integrase B121 sequence
  PTHR30461:SF3,IPR036162,PS51737,IPR011109,PTHR30461, PS00397,PF00239,G3DSA:1.10.10.2600,IPR006119,SSF53041, cd00338,SM00857,IPR025827,IPR038109,PS51736, IPR006118,PF13408,G3DSA:3.40.50.1390,PF07508,Coil
MAYAKVKKHLKIWTKKKAALYVRVSTRYQVDKDSLPFQRKKLKEYCKFLGLEDYVIFEDDGYSAKNTERPHFQEMMSRVRSGEFSHLIVWKVDRVSRNLLDFAAMYQELKDHKVTFISMNEQFDTSTAIGEAMLKIILIFAELERNMTSERVTGIMLDRAEQGLWNGARMPVGYRWNNETKFPEPDPEEVKIVQLIFDKYEEWKSSIKIARYLNNNNFKSKRGGQWTSKLIHDIIRNPFYIGTYRYNLRESGRGPLKPESEWIVRENNHPAIIDKAQFDRCNKIMDQNGSSRDTSDLRARKYVHTFSGHLVCGKCGANMIASKDRARANGWRPSMYRCAQRSRMLDCDNSRTINESYIGPFIFNYIANLARVQKNFKNITTVEKLERELLKGETFDGVAGILPEGLNLTFQALSFRQVGNGTYIPDIDFLGDSDGASDHNQIELLKSEIEKSKNAVTRLTDVYLFDPDSMTKEEFATKKKELAKKIEGMERQLADLLDDSGNDDLADMSFIKKASAFLVAQRIVSKSFVDYVGMAQELDNEILKDFIDQIVDQIVVLDGRVQSITFINGLKHEFRYATPAELPVCQKCGGHIGSTCGCRTRTFDFSGKRYQRIKVGDPRDMLHGKKNPVCPECFAQEGRWHHWNCKVETCPICGGRLAECEHGPNGKN

SEQ ID NO: 121 - protein, 668 aa, Unknown
  Description of Unknown: Integrase B122 sequence
  PTHR30461:SF3,IPR036162,PS51737,IPR011109,PTHR30461, PS00397,PF00239,G3DSA:1.10.10.2600,IPR006119,SSF53041, cd00338,SM00857,IPR025827,IPR038109,PS51736, IPR006118,PF13408,G3DSA:3.40.50.1390,PF07508,Coil
MAYVRNKKKILKFWSKKKAALYVRVSTRYQVDKDSLPFQRKKLKEYCKFLGIEDFVIFEDDGYSAKNTDRPHFQEMMSRVRDGEFSHLIVWKVDRVSRNLLDFAAMYQELKDHKVTFISMNEQFDTSTAIGEAMLKIILIFAELERNMTSERVTGIMLDRAEQGLWNGARMPVGYRWNPEIKFPEPDPEETKIVQFIFDEYERVRSTTKIARYLNHNQIASKRGGQWTSKLIRDIIRNPFYIGTYRYNLRESGRGPLKPESEWIVRENNHPAIIAKEQFDRCNAIMDENGTSRDTSDLRARKYVHTFSGRLVCGKCGANMIASKDRARANGWRPSMYRCAQRSRMMDCDNSKTVNESYIGPFIFNYVANLARIQKNFKNIKTLEQLEKELLKGPEFENMKVSKESLRRTFDALAFQEVGKGAYLPDIDLSGGDDDYTAAEQLSILKRELDKCKTAIDRLTDLYLYDPDSMTKEEFAKKKRDLVNKIAGYEKQIEASQATGDKDDLADLEFIRKASAFLVAQRIVSKKHVDYIQMALDLDNEILKDFVDQVIDRIEILEGRVRSIRFVNGLVHEFTYSTPADLPVCQKCGGRIGSTCGCRTRTFDFAGKPYRRIKVGDPGDKFHGVTGAVCPECSAQVGRWHHWKCGIERCPICGEQLIACEHGPNGKD

SEQ ID NO: 122 - protein, 668 aa, Unknown
  Description of Unknown: Integrase B123 sequence
  PTHR30461:SF3,IPR036162,PS51737,IPR011109,PTHR30461, PS00397,PF00239,G3DSA:1.10.10.2600,IPR006119,SSF53041, cd00338,SM00857,IPR025827,IPR038109,PS51736, IPR006118,PF13408,G3DSA:3.40.50.1390,PF07508,Coil
MAYVRNKKKILKFWSKKKAALYVRVSTRYQVDKDSLPFQRKKLKEYCKFLGIEDFVIFEDDGYSAKNTDRPHFQEMMSRVRDGEFSHLVVWKVDRVSRNLLDFAAMYQELKDHKVTFISMNEQFDTSTAIGEAMLKIILIFAELERNMTSERVTGIMLDRAEQGLWNGARMPVGYRWNPEIKFPEPDPEETKIVQFIFDEYERVRSTTKIARYLNHNQIASKRGGQWTSKLIRDIIRSPFYIGTYRYNLRESGRGPLKPESEWIVRENNHPAIITKEQFDRCNAIMDENGTSRDTSELRARKYVHTFSGRLVCGKCGANMIASKDRARANGWRPSMYRCAQRSRMMDCDNSKTVNESYIGPFIFNYAANLARIQKNFKNIKTLEQLEKELLKGPEFENMKVSKESLRRTFDALAFQEVGKGAYLPDINLSDGDDDYTAAEQLSILKRELDKCKTAIDRLTDLYLYDPDSMTKEEFAKKKRDLVNKIAGYEKQIEASQATGDKDDLADLEFIRKASAFLVAQRIVSKKHVDYIQMALDLDNEILKDFVDQVIDRIEILEGRVRSIRFVNGLVHEFTYSTPADLPACQKCGGRIGSTCGCRTRTFDFAGKPYRRIKVGDPGDKFQGVSGAVCPECSAQAGRWHHWKCGIERCPICGEQLIACEHGPNGKD

SEQ ID NO: 123 - protein, 668 aa, Unknown
  Description of Unknown: Integrase B124 sequence
  PTHR30461:SF3,IPR036162,PS51737,IPR011109,PTHR30461, PS00397,PF00239,G3DSA:1.10.10.2600,IPR006119,SSF53041, cd00338,SM00857,IPR025827,IPR038109,PS51736, IPR006118,PF13408,G3DSA:3.40.50.1390,PF07508,Coil
MAYVRNKKKILKFWSKKKAALYVRVSTRYQVDKDSLPFQRKKLKEYCKFLGIEDFVIFEDDGYSAKNTDRPHFQEMMSRVRDGEFSHLIVWKVDRVSRNLLDFAAMYQELKDHKVTFISMNEQFDTSTAIGEAMLKIILIFAELERNMTSERVTGIMLDRAEQGLWNGARMPVGYRWNQEIKFPEPDPEETKIVQFIFDEYERVRSTTKIARYLNHNQIASKRGGQWTSKLIRDIIRNPFYIGTYRYNLRESGRGPLKPESEWIVRENNHPAIIAKEQFDRCNAIMDENGTSRDTSELRARKYVHTFSGRLVCGKCGANMIASKDRARANGWRPSMYRCAQRSRMMDCDNSKTVNESYIGPFIFNYVANLARIQKNFKNIKTLEQLEKELLKGPEFENMKVSKESLRRTFDALAFQEVGKGAYLPDIDLSDGDDDYTAAEQLSILKRELDKCKTAIDRLTDLYLYDPDSMTKEEFAKKKRDLVNKIAGYEKQIEASQATGDKDDLADLEFIRKASAFLVAQRIVSKKHVDYIQMALDLDNEILKDFVDQVIDRIEILEGRVRSIRFVNGLVHEFTYSTPADLPVCQKCGGRIGSTCGCRTRTFDFAGKPYRRIKVGDPGDKFHGVTGAVCPECSAQAGRWHHWKCGIERCPICGEQLIACEHGPNGKD

SEQ ID NO: 124 - protein, 668 aa, Unknown
  Description of Unknown: Integrase B125 sequence
  PTHR30461:SF3,IPR036162,PS51737,IPR011109,PTHR30461, PS00397,PF00239,G3DSA:1.10.10.2600,IPR006119,SSF53041, cd00338,SM00857,IPR025827,IPR038109,PS51736, IPR006118,PF13408,G3DSA:3.40.50.1390,PF07508,Coil
MAYVRNKKKILKFWSKKKAALYVRVSTRYQVDKDSLPFQRKKLKEYCKFLGIEDFVIFEDDGYSAKNTDRPHFQEMMSRVRDGEFSHLIVWKVDRVSRNLLDFAAMYQELKDHKVTFISMNEQFDTSTAIGEAMLKIILIFAELERNMTSERVTGIMLDRAEQGLWNGARMPVGYRWNPEIKFPEPDPEEAKIVQFIFDEYERVRSTTKIARYLNHNQIASKRGGQWTSKLIRDIIRSPFYIGTYRYNLRESGRGPLKPESEWIVRENNHPAIITKEQFDRCNAIMDENGTSRDTSELRARKYVHTFSGRLVCGKCGANMIASKDRARANGWRPSMYRCAQRSRMMDCDNSKTVNESYIGPFIFNYVANLARIQKNFKNIKTLEQLEKELLKGPEFENMKVSKESLRRTFDALAFQEVGKGAYLPDIDISDGDDDYTAAEQLSILKRELCKCKTAIDRLTDLYLYDPDSMTKEEFAKKKRDLVNKIAGYEKQIEASQATGDKDDLADLEFIRKASAFLVAQRIVSKKHVDYIQMALDLDNEILKDFVDQVIDRIEILEGRVQSIRFVNGLVHEFTYSTPADLPVCQKCGGRIGSTCGCRTRTFDFAGKPYRRIKVGDPGDKFHGVAGAVCPECSAQAGRWHHWKCGIERCPICGEQLIACEHGPNKKD

SEQ ID NO: 125 - protein, 668 aa, Unknown
  Description of Unknown: Integrase B126 sequence
  PTHR30461:SF3,IPR036162,PS51737,IPR011109,PTHR30461, PS00397,PF00239,G3DSA:1.10.10.2600,IPR006119,SSF53041, cd00338,SM00857,IPR025827,IPR038109,PS51736, IPR006118,PF13408,G3DSA:3.40.50.1390,PF07508,Coil
MAYVRNKKKILKFWSKKKAALYVRVSTRYQVDKDSLPFQRKKLKEYCKFLGIEDFVIFEDDGYSAKNTDRPHFQEMMSRVRDGEFSHLIVWKVDRVSRNLLDFAAMYKELKDHKVTFISMNEQFDTSTAIGEAMLKIILIFAELERNMTSERVTGIMLDRAEQGLWNGARMPVGYRWNPEIKFPEPDPEETKIVQFIFDEYERVRSTTKIARYLNHNQIASKRGGQWTSKLIRDIIRNPFYIGTYRYNLRESGRGPLKPESEWIVRENNHPAIIAKEQFDRCNAIMDENGTSRDTSDLRARKYVHTFSGRLVCGKCGANMIASKDRARANGWRPSMYRCAQRSRMMDCDNSKTVNESYIGPFIFNYVANLARIQKNFKNIKTLEQLEKELLKGPEFENMKVSKESLRRTFDALAFQEVGKGAYLPDIDLSDGDDDYTAAEQLSILKRELDKCKTAIDRLTDLYLYDPDSMTKEEFAKKKRDLVNKIAGYEKQIEASQATGDKDDLADLEFIRKASAFLVAQRIVSKKHVDYIQMALDLDNEILKDFVDQVIDRIEILEGRVQSIRFVNGLVHEFTYSTPADLPVCQKCGGRIGSTCGCRTRTFDFAGKPYRRIKVGDPGDKFHGVTGAVCPECSAQAGRWHHWKCGIERCPICGEQLIACEHGPNGKD

SEQ ID NO: 126 - protein, 668 aa, Unknown
  Description of Unknown: Integrase B127 sequence
  PTHR30461:SF3,cd00338,SM00857,IPR006118,G3DSA:1.10.10.2600, IPR036162,PS51737,G3DSA:3.40.50.1390,IPR006119,IPR038109, PF07508,IPR011109,SSF53041,PTHR30461,PS00397, PS51736,Coil,PF00239
MAYVKAKKHLKIWTKKKAALYVRVSTRYQVDKDSLPFQRKKLKEYCKFLGLEDYVIFEDDGYSAKNTERPHFQEMMSRVRSGEFSHLIVWKVDRVSRNLLDFAAMYQELKDHKVTFISMNEQFDTSTAIGEAMLKIILIFAELERNMTSERVTGIMLDRAEQGLWNGARMPVGYRWNDETKFPEPDPEEVKIVQLIFDKYEEWKSSIKIARYLNNNNFKSKRGGQWTSKLIHDIIRNPFYIGTYRYNLRESGRGPLKPESEWIVRENNHPAIIDKAQFDRCNKIMDQNGSSRDTSDLRARKYIHTFSGHLVSGMCGANMIASKDRARANGWRPSMYRCAQRSRMLDCDNSRTINESYIGPFIFNYIANLARVQKNFKNITTVEKLERELLKGETFDGVAGILPEGLNLTFQALSFRQVGNGTYIPDVDFLGDSDGASDRDQIELLKSEIEKSKNAVARLTDVYLFDPDSMTKEEFATKKKELAKKIEGMERQLADLLDDSGNDELADMSFIKKASAFLVAQRIVSKSFVDYVGMAQELDNEILKDFIDQIVDQIVVLDGRVQSITFINGLKHEFRYATPVELPVCQKCGGRIGSTCGCRTRTFDFSGKRYQRIKVGDPRDTLHGKKNPVCPECFAQEGRWHHWNCKIETCPICGGRLAECEHGPNGKN

SEQ ID NO: 127 - protein, 668 aa, Unknown
  Description of Unknown: Integrase B128 sequence
  PTHR30461:SF3,IPR036162,PS51737,IPR011109,PTHR30461, PS00397,PF00239,G3DSA:1.10.10.2600,IPR006119,SSF53041, cd00338,SM00857,IPR025827,IPR038109,PS51736, IPR006118,PF13408,G3DSA:3.40.50.1390,PF07508,Coil
MAYAKAKKHLKIWTKKKAALYVRVSTRYQVDKDSLPFQRKKLKEYCKFLGLEDHVIFEDDGYSAKNTERPHFQEMMSRVRSGEFSHLIVWKVDRVSRNLLDFAAMYQELKDHKVTFISMNEQFDTSTAIGEAMLKIILIFAELERNMTSERVTGIMLDRAEQGLWNGARMPVGYRWNDETKFPEPDPEEVKIVQLIFDKYEEWKSSIKIARYLNNNNFKSKRGGQWTSKLIHDIIRNPFYIGTYRYNMRESGRGPLKPESEWIVRENNHPAIIDKAQFDRCNKIMDQNGSSRDTSDLRARKYVHTFSGHLVCGKCGANMIASKDRARANGWRPSMYRCAQRSRMLDCDNSRTINESYIGPFIFNYIANLARVQKNFKNIATPEKLERELLKGETFDGVAGILPEGLNLTFQALSFRQVGNGTYIPDIDFLGDSDGASDRDQIELLKSEIEKSKNAVTRLTDVYLFDPDSMTKEEFATKKKELAKKIEGMERQLADLLDDSGNDDLADMSFIKKASAFLVAQRIVSKSFVDYVGMAQELDNEILKDFIDQIVDQIVVLDGRVQSITFINGLKHEFRYATPAELPVCQKCGGHIGSTCGCRTRTFDFSGKRYQRIKVGDPRDMLHGKKNPVCPECFAQEGRWHHWNCKVETCPICGGRLAECEHGPNGKN

SEQ ID NO: 128 - protein, 668 aa, Unknown
  Description of Unknown: Integrase B129 sequence
  PTHR30461:SF3,IPR036162,PS51737,IPR011109,PTHR30461, PS00397,PF00239,G3DSA:1.10.10.2600,IPR006119,SSF53041, cd00338,SM00857,IPR025827,IPR038109,PS51736, IPR006118,PF13408,G3DSA:3.40.50.1390,PF07508,Coil
MAYAKVKNHLKIWTKKKAALYVRVSTRYQVDKDSLPFQRKKLKEYCKFLGLEDYVIFEDDGYSAKNTERPHFQEMMSRVRSGEFSHLIVWKVDRVSRNLLDFAAMYQELKDHKVTFISMNEQFDTSTAIGEAMLKIILIFAELERNMTSERVTGIMLDRAEQGLWNGARMPVGYRWNNETKFPEPDPEEVKIVQLIFDKYEEWKSSIKIARYLNNNNFKSKRGGQWTSKLIHDIIRNPFYIGTYRYNLRESGRGPLKPESEWIVRENNHPAIIDKAQFDRCNKIMDRNGSSRDTSDLRARKYVHTFSGHLVCGKCGANMIASKDRARANGWRPSMYRCAQRSRMLDCDNSRTINESYIGPFIFNYIANLARVQKNFKNITTVEKLERELLKGETFDGVAGILPEGLNLTFQALSFRQVGNGTYIPDIDFLGDSDGASDHNQIELLKSEIEKSKNAVTRLTDVYLFDPDSMTKEEFATKKKELAKKIEGMERKLADLLDDSGNDDLADMSFIKKASAFLVAQRIVSKSFVDYVGMAQELDNEILKDFIDQIVDQIVVLDGRVQSITFINGLKHEFRYATPAELPVCQKCGGHIGSTCGCRTRTFDFSGKRYQRIKVGDPRDMLHGKKNPVCPECFAQEGRWHHWNCKVETCPICGGRLAECEHGPNGKN

SEQ ID NO: 129 - protein, 667 aa, Unknown
  Description of Unknown: Integrase B130 sequence
  PTHR30461:SF3,IPR036162,PS51737,IPR011109,PTHR30461, PF12158,IPR021994,PF00239,G3DSA:1.10.10.2600,IPR006119, SSF53041,cd00338,SM00857,IPR025827,IPR038109, PS51736,PF13408,G3DSA:3.40.50.1390,PF07508,Coil
MKKFPIDLSCLTEEEISQFQEDPYTLYNGDQDVALYLRYSSTGQSDQSIEGQLRDCRTFCKANHYRIVAIYVDRATTARKDVEKRVHLMEMVADSAKQNWEYVIVWKLDRFARNRNDSAIMKMRLRKNGVKVLSATEHLTDSPESIILESVLEGMAEFFSAELSQKVTRGMRESALKCHSVGGHIPLGYKVENHKLVVDPDTAHIVQEAFSLYANGESVADICRKFNSAGYKTAKNTEFNRSSFKAMFRNTRYIGTYTYKDIVIENGIPAIIDKELFETVQRRLSKTATAPARGKAKVDYLLSGKLFCGHCGASMNGESGAGRHGKVYHYYSCYTKKRKLGCDKRPLKKDYIEGIVARDALNLLTDQLIDEIADMAIRQSEQDLINDTHIPQLTAQLSEVEKSITNITTAIEKGIASETLMNRLVQLEHEKKTLNKEIKAEEKFVYRIDRDQIVFWLSQFKYGNIEDEDFRRRLIDLLVNSVTVWDEPDGYKITTAYNLTSCKTKTFRVEKNPAAEEATGFDFGESECTNGTVIGYSAVSYGGEGSAVHLPVARYTVEGQEYRVTGPRYRGYVTRTVSTPFAENTCRCYEKNGVLHIERSRNSIIGVSRNPMAEQYPVGTVLPVWFDPQRPQRSYVLRCVDNRWVFWMLLLLGAVLLAGCIGVITLL

SEQ ID NO: 130 - protein, 659 aa, Unknown
  Description of Unknown: Integrase B131 sequence
  PTHR30461:SF3,SM00857,G3DSA:1.10.10.2600,IPR036162,PF13408, PS51737,G3DSA:3.40.50.1390,IPR025827,IPR006119,IPR038109, PF07508,SSF53041,IPR011109,PF00239,PTHR30461, PS51736,Coil,cd00338
MRKKVYIYTRVSTSMQVDGYSLDAQKDKIRKYAEAFDYDIAGEYEDAGKSGKSIEGRAEFRKMLEDIETCKDDVSYVMVFKLSRFGRNAADVLNSLQLMQDYGVNLICVEDGIDSSKDAGKLMISVLSAVAEIERENILVQTMEGRKQKAREGKWNGGFAPYGYKLVNGELIINEEEAQAIRIIFDKYVNSTMGCNGIAKYLQQQGINKVERQNGKNPYFAASLIKQILKNPVYCGKIAFGRRKNEKVQGTRDTYHIVAQSEYLIADGIHEAIIDDELWQKAQDKLAAQAKKYEHVNKGKDEKIHLLSGILKCPICGAGMYGNKSTKNRNGIHYKDYFYYGCKHRGGERGHKCTYRKQLQEEKIDGAVAEIISKLISNPKFATMMQQKINMEVDTTEIDKELSNYQKMLGQFIGTKRSLEKQIDSLNVSDKHYERKLLDLQDRLDAMYDKIEEEEAKLEECKAKKRVIESDKMTADNIYKVLIYFDKLYAVMDDADKRALLYSLIDEIQVFEEEQANGQWLKSIKFKLPIIDGDMNLSLDKDSHIETVVLLSHKKPDGHINVKVEFGKGEGKVPLDNIAKRAEGYKPKERVTYKMIKEYIEAKYGFKVHTAYIAKVKRDLGLPMYDAPNAVEELKQPRKHPTAEKVEAIKDALKHFEVI

SEQ ID NO: 131 - protein, 659 aa, Unknown
  Description of Unknown: Integrase B132 sequence
  PTHR30461:SF3,IPR036162,PS51737,G3DSA:1.10.260.40,IPR011109, PTHR30461,PF00239,PF01381,PS50943,IPR006119, SSF53041,IPR010982,SSF47413,SM00857,IPR025827, PS51736,cd00093,cd03768,SM00530,PF13408,G3DSA:3.40.50.1390,
  CONT. FROM ABOVE: PF07508,IPR001387,Coil
METVGIYSRKSKFTGKGESIENQVQMCKEYINQRLGKNIKIVIYEDEGFSGSTTDRPKFKEMIKDIKLKKINILICYRLDRISRNVADFSNTLEILQENNCSFISIREQFDTSTPMGRAMIYIASVFAQLERETIAERVKDNMLELAKTGRWTGGKIPLGFISERVKYTDDAGLQREYSILKIDKEEIKFVEFLYEKYLELGSLHKLEVYITQNQLKSRNGIMFEKSSLKLILQNPIYVKANYEVITYLKENNWIVYGEPDNKHSLLSYNKTEQSFKNGKHTKVKKSENERFVAISNIEGFIDPNLWLQVQRQFDKNRSKFPRLGKTHNALLVGKLICGQCKEYMLVQHGRVSKTTGKKLFYYTCSLKRKSHKKLCDNNNAKADYVENLVINSLKLLSKSKKKFINQLKISYKNKLKSTKASIEKLSLEKSLSEKKNQIDNLVLALSKSSEIEDILLGKIKSLKNDCIQIENKIKYINSSAEEQKLNNINLDLIDSIIDECSIIDKLTRDKQKRIIDTLIDTIYWYGSGNGKGKIKIKFIGADEDTKEIVLSEEELQPKMLQFYSHSTCKVNKTATFKKIFKTIESNESVAYSSLPEDTIAEKIYKLRMIKGCTQREFAKICSIGYSSLCKYELGFNPSIKNLNKISSKFNIDIGYFLK

SEQ ID NO: 132 - protein, 658 aa, Unknown
  Description of Unknown: Integrase B133 sequence
  PTHR30461:SF3,IPR036162,PS51737,G3DSA:1.10.260.40,IPR011109, PTHR30461,PF00239,PF01381,G3DSA:1.10.10.2600,PS50943, IPR006119,SSF53041,IPR010982,cd00338,SSF47413, SM00857,IPR025827,IPR038109,PS51736,cd00093,SM00530,PF13408,
  CONT. FROM ABOVE: G3DSA:3.40.50.1390,PF07508,IPR001387,Coil
MKRVAVYSRKSKFTGKGDSIENQIEMCKEYITNNISKDVEFTIYEDEGFSGGNLDRPKFKKLIAAIKNKKFDILVCYRLDRISRNVADFSSTLEVLQSNNCSFVSIKEQFDTSSPMGRAMIYIASVFAQLERETIAERVKDNMIEIAKNGKWTGGKIPVGFNSEKIEYVDENGLTRVAPNLVINNKEMELVKFLYEKYLELGSLHKLEVYIHENNIRSRNDILYEKSSLKTILQNPIYVKANNAVINYLKNSKWNVYGDPDNIHSLLTYNKTEQIKKDGKYTKSKKDLSERFAAVSSIKGYIEPDLWLAVQRQFEKNKNTFPRLGKTHNALLVGKLRCGKCKEYMLVSHGRISKVTGQKLFYYTCSLKRKSHKKLCNNGNAKAGDIENLVLLSLKQLSLNKKKFILNLRNRYKSNASDENMDLEKLSLLKSLKEKKSQINNLVTKLSLCDSIDDILLHRIKLLKDECIAIEKNINNLESKALNLKNSLLNLDLIDELLDKCAIIDTLDRSQQKLIIDNLIDTIYWYSDNTGKGNIEIKFVGIEDEQKEFKFTSEEMKQLMLHFYSDSTCYENKKATFSEVFKPIENSQSNIYIMLPESNNKEKIYKLRMINGLTQKQFALRTGIGYSSLCKYEIGYAISKKNISKICSYFNISENYFD

SEQ ID NO: 133 - protein, 654 aa, Unknown
  Description of Unknown: Integrase B134 sequence
  PTHR30461:SF3,cd00338,SM00857,G3DSA:1.10.10.2600,IPR036162, PF13408,IPR025827,G3DSA:3.40.50.1390,PS51737,IPR006119, IPR038109,PF07508,IPR011109,SSF53041,PTHR30461, PS51736,Coil,PF00239
MCAKKKPAMLEPDMQDAVIYTRYSSHNQRDCSIEQQVADCEIFARQNNLRVVKVYADRHLSGTTDNRPQFQQMLKDAAHGHWAYVICWKIDRFARNRYDSATYKFRLKKAGVRVLYAKESIPDGPEGILLESVLEGSAEYYSAALAQNIRRGMKYNAEQCKVNSGSIPFGYCKGPDGRFAIHEANAEVVREIFRKAAAGMSFVDIANDLNSRGLKTSRGGRWNKGSFRLLMNEAYIGVYHFSDTRIEGGMPALIDQGTFWAANERLKANSSVRGRHQDGGDYLLTGKLKCAHCGSYMIGFSGTGKSGELHYYYGCQKRRRERACKKANVPREWIERVVVKAALDYVLRPDVMEWIADAVMEYQEREAASAQLAALTAELEENQKATDNVMKAIEAGIITSTTKQRLLDLEAKAQDLKRAIELEKLSHVRLERDQVLFWLDCFRGGSLQSQEFRRKVIDTFVSVVYLSDDHLRIAFNYSGGSNAEADFDLVMDAEAAAGELSKKFVQGHVASTMKKERHFVRNWRSFLYYGNVFGNTIKFSDCSHQRIIQHLNELYRAGRTGQRIACQLLHILRVCEPCTFSCPAYSALNRFWLTSSAVGDRGIDIFLNGLQAVFLLTDQLKTLAQDTVGAQIACDAHRAQQIIDLSGQFGNDHS

SEQ ID NO: 134 - protein, 654 aa, Unknown
  Description of Unknown: Integrase B135 sequence
  PTHR30461:SF3,cd00338,SM00857,G3DSA:1.10.10.2600,IPR036162, PF13408,PS51737,IPR025827,G3DSA:3.40.50.1390,IPR006119, IPR038109,PF07508,IPR011109,SSF53041,PTHR30461, PS51736,Coil,PF00239
MCAKKKPAMLEPDMQDAVIYTRYSSHNQRDCSIEQQVADCEIFARQNNLRVVKVYADRHLSGTTDNRPQFQQMLKDAAHGHWAYVICWKIDRFARNRYDSATYKFRLKKAGVRVLYAKESIPDGPEGILLESVLEGSAEYYSAALAQNIRRGMKYNAEQCKVNSGSIPFGYRKGPDGRFAIHEANAEVVREIFRKAAAGMPFVDIANDLNSRGLKTSRGGRWNKGSFRLLMNEAYIGVYHFSDTRIEGGMPALIDQGTFWAANERLKANSSVRGRHQDGGDYLLTGKLKCAHCGSYMIGFSGTGKSGELHYYYGCQKRRRERACKKANVPREWIERVVVKAALDYVLRPDVMEWIADAVMEYQEREAASAQLAALTAELEENQKATDNVMKAIEAGIITSTTKQRLLELEAKAQDLKRAIELEKLSHVRLERDQVLFWLDRFRGGSLQSQEFRRKVIDAFVSVVYLSDDHLRIAFNYSGGSNAEADFDLVMDAEAAAGELSKKFAQGHVASTMKKERHFVRNWRSFLCHGNVFGNTIKFSDCSHQCIIQHLNELHRAGRTGQRIACQLLHILRVCEPCTFSCPADSALNRFWLTSSAVGDRGIDIFLHGLQAVFLLTDQLKTLAQDTVGAQIACDAHRAQQIIDLSGQFGNDHS

SEQ ID NO: 135 - protein, 653 aa, Unknown
  Description of Unknown: Integrase B136 sequence
  SM00857,G3DSA:1.10.10.2600,IPR036162,PS51736,PS51737, G3DSA:3.40.50.1390,IPR006119,IPR038109,PF07508,SSF53041, IPR011109,PTHR30461,mobidb-lite,cd00338,PF00239
MKENSGQDRKQKIRDKYKGTDASEIEIIPAKPTADFMESGGIRRVAAYVRVSTDNDEQTSSYELQKNYYTEYITGHPGWELVGIYADEGISGTSIAHRKGMLQMIEDCKAGKIDLIMTKSIARFARNIVDCLSVIDLLKNLEPPVGVQFEADNIYTLDNNGRMILTILASVAEEESHSKSVIMNWSIERRFRKGLFLTPELLGYDRDEDGDLIVNEDEAETVKAIYYLYLNGVSFSDIAELLKAYKRKTKQGSYEWSASTLAEIVANERHCGDIRAWKTFTPNFLTHKAKKNNGERTQFRRKNHHEAIVSRTVYEAANFLRASRAYAKKARPLPVLSVVDNGILRGYVPLDKDWTGFSTDEYQKASESVMSELEDTRQIEYKAGLDMRGYEVVRSQYFSTTQNPAMTIADGKLNFNTACLKKFENVEYVELLLNSVNRCIAVRPCDGNNPNAIHWGKLREGRWCALSKSCRGLAKTLFDIMDWDQDLKYRFRGDFIENDDQKVMLFQLDEPEMVKTENIVLPPKEAETDDRAEIAGRTVKQIIYILPPEWEDTFGRPITSIGEINLLEQRHYAADWDVLRPAKELAEYSTLTSEDLEELLQEAEKIIEGWPIPDEHGTGETADNGDGESADVGTVCGSDVGEGTEENRDRADL

SEQ ID NO: 136 - protein, 653 aa, Unknown
  Description of Unknown: Integrase B137 sequence
  PTHR30461:SF3,cd00338,SM00857,G3DSA:1.10.10.2600,IPR036162, PF13408,PS51737,G3DSA:3.40.50.1390,IPR025827,IPR006119,IPR038109, PF07508,IPR011109,SSF53041,PTHR30461,PS51736, Coil,PF00239
MARKKNIAAGLDAVIYARYSSHNQREVSIEQQIAECTKHAAALGLRIVGTYEDRAISGKTDNRPRFQQMMRDAEKGKFQAVVAWKSNRIGRNMLQAMVNEAKLDDYGVKVFYAEEDFDDTAAGRFALRNMMNVNQFYSENMAEDITRGLYDNANKCMANGRQPLGYKRGADGKVMLDEPAAAVVREIFTRVAAGDLFVDIARDLNAKGIKTSKGAAWNKGSFQSICQNERYKGIYIYGDVRIVDGIPRIVSDELWYRVQEAMRMKKNPVGTRHRVGAEDYLLTGKLRCGHCGSYMTGVSGTSRNGELHYYYTCQKRRTEHACNKKNVRRDVIEPAIAQAIKMYCLTDDVIEWMADQTVQYWEKHDNDLQIEALEQQLAENKKATSNMLKAIEMGIITEATRSRMVELETENSKLTAQLSAAKRDVVKINREDLIDELHVLRSKDIQDREVQAELFKDFLVAAYIYDDNRLKLVFSFMGKDNSVEIPLETGEDPPDGEDSPDAKMFVLTPDCSTIQFVLEPDSLRKRVRVRFLFIGGSAEGLLGTVNEQRQGIAMIVVSCLLFCGIKFALCELGRPPYMARLGVIAAYVRTGRACTPLARCKHTRLCSKVCVPRGIAPLESLRSVYARTQENGKISLYRGCSFIGEYGILGLAQ

SEQ ID NO: 137 - protein, 651 aa, Unknown
  Description of Unknown: Integrase B138 sequence
  PTHR30461:SF3,SM00857,G3DSA:1.10.10.2600,IPR036162,PF13408, IPR025827,PS51737,G3DSA:3.40.50.1390,IPR006119,IPR038109, PF07508,IPR011109,SSF53041,PF00239,PTHR30461, PS51736,Coil,cd00338
MKNKKIKCDIYTRVSTTMQVDGYSLDAQKEKLKRYAEFQNMEIVNEYSDEGKSGKSVEGRPEFQRMLDNIENGTDEVQFVLVFKLSRFGRNAADVLNSLQRMQDFGVNLICVEDGIDSSKDSGKLMISVLSAVAEIERENILVQTMEGRKQKAREGKWNGGFAPYGYELVNGELQIAEDEAEIIRLTYDKFIHTNMGISAIAAWLNQHGYKKKKRQNNTLDAFAASFIKGVLDNPVYCGKLAYGRRKNEKVSGTRNEYRIVKQENYMLHDGIHEGIISETDWELAHQKREKTGVKYEKTHSLDHEHILSGILRCPLCGSGMYGNVNRKKKKDGTLYKDYFYYACKHRRLVDGHKCGYRKQWSEEKINNAVEEVIRKLVKNPKFEEAILNKIGSRIDTEEIEKEIEGLEKQHRQLTGAKARLGQQMDSLDIMDKFYEKKYQDMETRLYRLYDEIEGVENSIEEVKNRLPNIRQQKISEENVYQFLLYFDKLYDKFTDLEKKEFLNSFVEQVDIYEQEQPDGRFLKHIKFRFPVYFGDRETQELCWDNESTVETVVKLSLKKDTPKIEVTMEPDEESNYTPQEKATYSKIKEYVKDKYGVNVHTSYIAQVKRMCGLDMSENYNKSKKEKPEVKQCPQEKVEYIKDALRHFKLI

SEQ ID NO: 138 - protein, 650 aa, Unknown
  Description of Unknown: Integrase B139 sequence
  PTHR30461:SF3,cd00338,SM00857,G3DSA:1.10.10.2600,IPR036162, PF13408,IPR025827,G3DSA:3.40.50.1390,PS51737,IPR006119, IPR038109,PF07508,IPR011109,SSF53041,PTHR30461, PS51736,Coil,PF00239
MKKTKTKCYLYTRVSTSMQVDGYSLDAQRDKLRKYAEYEDMVVAGEYSDEGFSGKNIQGRHEFQRMLQDIQDCKDGVEYVLVFKLSRFGRNAADVLNSLQLMQDFGVNLICVEDGIDSSKDSGKLMISVLSAVAEIERENIRTQTMAGREQKAREGKWNGGFAPYGYRLEKGELLIAEDEVDVIRTIFDRYIHTNDGVSGVAKYLNRQGFVKKLRQNGTIPGFSASFVKSIIDNPVYMGKIAYGRRRTEKKIGTRNEMHVVEQSEFPVYEGKHEAIISEEDWNLAQEKRKINAYRREKVNDPTHAHILSGILKCPCCGKSLYGNIAKAHSKDKKTRYYYYCKNTVTPTGHECTFRLNIEQMEMNRMVASIISAMVSDPRFADAIKAKIGSAVDTNDLEKQLEALQAQLRQTLGTKARLERQMDGLDVNDPYYDRKISDLQRRYDEQYGAIDEIEVQIDDVQSQIRSIRQEKISGDNIYRLLLAFDQVYEAASEVERKEFMRAFIERIELFPEKQPDGNWIRKIIFNFPVPVNGTEVKELPLENETIVETVCLLSKLKSANHIEVELNMDELDLTDAEKKATYEEIKAYVLENTGLKVSHLYIAQVKQKYGIIERENYNKPKSENSRQPQCPPEKEAAITDALKHFGMIPD

SEQ ID NO: 139 - protein, 650 aa, Unknown
  Description of Unknown: Integrase B140 sequence
  SM00857,G3DSA:1.10.10.2600,IPR036162,G3DSA:3.40.50.1390,IPR006119 ,IPR038109,PF07508,SSF53041,IPR011109,PTHR30461, PS51736,cd00338,PF00239
MAKDENKESEIRGDEQEIVDQRLPVWRPQDADREYYRYETKKRIQHYTVPPQTIFRPAKPTPTIRDAEHKRVAVYARVSTKSKEQVSSIENQTKYYTEKIAKTPNWDLAEIYSDEGKSGTSKKWRPEFKRMLEDASKKKMDLIVCASVSRFARNISDLIEEVRKLRTTNPSNPVGVYFETEDLYTLDPNINERLQMQGLFAEWESGNKSRRMILSYDQRICTGQFPLSDLLGLRHTIEGGFIIEEEEAKTVKYIFLATLCGYTAEEIAEVLTDKQRPTLRGRTEWTASMVKAIMENERRWGDLEVRKRVVIDYKEKVTAKNDGLREGAYIPHYHEGIVSPEIARAAHMMRASRYKFGSVPDVYVIDSGALKGFVSISPTWSGIDNRAFQDISRQVYNEDEFCELQRRANIMNGRTHSNVVSMTLNDYRVAPGVMFMTRSDPQLTFSQRSMKLNAVCWEKLGQQKYVEFLYHPVLEVIAVRSCNATNPNAVLWDETKKSGLQLCTSAFSNAVYDKLDWMRKYKFRFRGVTRVRGGERIIFFFLDEPQILVGKDKKHLDAMDTSDSTVKYIPYKESECGEAAGLTAGIAYPENWQEQVGVSYEIKQQRGRVLDAVSSADIRNHGTKVVNPFIGVIPTHGELEDELEQIYEAM

SEQ ID NO: 140 - protein, 650 aa, Unknown
  Description of Unknown: Integrase B141 sequence
  PTHR30461:SF3,cd00338,SM00857,G3DSA:1.10.10.2600,IPR036162, PS51737,G3DSA:3.40.50.1390,IPR006119,IPR038109,PF07508, IPR011109,SSF53041,PTHR30461,PS51736,Coil,PF00239
MTDYIGNYKNRPRRVVFYGRVSTEHEEQLSALGNQMEWYTDLALRNPNWTVVAQYIDEGITGTQMKKRPSFMRMIEHAKEHRFDLIVTRELSRFARNTVDALNATRELKQYGVEVYFVNDGIWTMDGDGEVRLTIMASIAQDESRKTSERVKAGQKMSREKGVLYGSGNIIGYDRVDGTYVINEEQAATVRRIFNLYAEGHGETTVAKMLIEENRKDGCGGLSWTASKVSRVLRKPTYKGYMTYNKSHIDDFLSHNRINHNEEDFVLVKGNFEPIVSEELWETCNQIRSKRAAFVKGKDGRAHKFGVSFPQNKWTKILFCDCGMRFQIEGYDKTANGGKNMRLICARSKMFKKKDAARTLNGIPCPAPYASEWKLELMAREVFRTVWKENAEDILGLLRTLDANLNTTGTPNDGNQLENKLSALNEELDDLVSQRASRSITMDDFLSKSTEINNEIINVEGLLQSSIQEQRPKARLDMHSIEAALSDDASFPDGKIEPGFLDRYTNRIVKSNNRYIWMLQLMNVQQIMPIQSERQPIAMVTYKSGVPYDIEQEQIGKQDKESAGPDCATICRPQDFFLNMSRTKRKRKLVEWLESCQENQVSVLDEKIPLLSFAVDFVTAYEYQKARGIKIHPGLWKDMRVDIFLVKKEN

SEQ ID NO: 141 - protein, 650 aa, Unknown
  Description of Unknown: Integrase B142 sequence
  PTHR30461:SF3,SM00857,G3DSA:1.10.10.2600,IPR036162,PF13408, IPR025827,PS51737,G3DSA:3.40.50.1390,IPR006119,IPR038109, PF07508,IPR011109,SSF53041,PTHR30461,Coil, PS51736,cd00338,PF00239
MKKQQKCYIYTRVSISMQVDGYSLDAQKDKLRKYAEYQEMSIVGEYSDEGKSGKSVEGRPQFKQMLADVESGKDNVDYVLVFKLSRFGRNAADVLSSLQKMQDYGVNLICVEDGIDSSKDARKLMISVLSAVAEIERENILVQTMEGRRQKAREGRWNGGFAPYGYQLVNGELIIAEDEAEIIRIIYDKFVNTTMGMAAIATFLNNSGYKKKLRQNNTIEDFSTSFVKGVLDNPIYCGKLAFGRRKNEKISGTRNEYHIVKQKEYMLSDGIHEAIISEEMWNQAHRKRQETGVLQVKTHSLEHEHILSGIIKCPVCGSGIYGNVNRKKHPYGGYYKDYFYYACKHRKLVDGHRCTYKRQWNEDRINAAVEEIIRKFVKNPKFEQEIRKQIGSSIDTSELDKEYDGLKDRLSQTTGAKNRLADQMDHLSVSDKNYDKKYNDMQERLDKLYDEITDIEDAMEEVETRLYNIRQDKISEDNVYQFLLFFDKLYDKFTDLEKKTFLRSFLSDVFIYEEEQKDGRILKGLQFKFPIYMNGRNVLGVDWDNESTDETVVKLSLKKDTPRIEVTMKPDEESNYTPKEKATYPKIKEYVKNKYGVNVHTSYIAQIKRMCGLDMGENYNKSKKENPEVKQCPQEKVEYIKDALKHFKLI

SEQ ID NO: 142 - protein, 649 aa, Unknown
  Description of Unknown: Integrase B143 sequence
  SM00857,G3DSA:1.10.10.2600,IPR036162,PS51736,PS51737, G3DSA:3.40.50.1390,IPR006119,IPR038109,PF07508,IPR011109, SSF53041,PTHR30461,mobidb-lite,cd00338,PF00239
MKENSGQDRKQKIRDKYKGTDVSEIEIIPAKPIVDFTESGGIRRVAAYVRVSTDNDEQTLSYELQKNYYTEYITGHPGWEFVGIYADEGISGTSITHRKGMLQMIEDCKAGKIDLILTKSIARFARNIVDCLSVIDLLKNLEPPVGVQFEADNIYTLDNNGRMILTILASVAEEESHSKSVIMNWSIERRFRKGLFLTPELLGYDRDEEGDLIVNDDEAETVRAIYYLYLNGVSFSEIAELLKAYKRKTKQGSYEWSASTLAEIVANERHCGDIRAWKTFTPNFLTHKAKKNNGARTQFRRKNHHEAIVSRTVYDAANYLRASRSYAKKARPLPVLSVVDNGILRGYVPLDKDWTGFSKDEYQKASESVMSELENIRQIEYKVGLDMRGYEVVRSQYFATMKNPAMTIADGKLGFNTSCLKKFENVEYVELLLNSVNRCIAVRPCDQNNPNAIHWGRLREGRWCALSKSCRGLAKTLFDIMDWDKDLKYRFRGDFIEKDDQKVILFQLDEPEMVKTENIVLPPKDAESDNEAEITGRTVKQTIYILPPEWENTFGRQITSIVEVNLLEQRHYAADWDVLRPAKELAEYSALTSEDLEELLYEARTIIERWPIPDEHGTGKSTDDGTEESADAATECGTDVGAGAEENGD

SEQ ID NO: 143 - protein, 648 aa, Unknown
  Description of Unknown: Integrase B144 sequence
  PTHR30461:SF3,SM00857,G3DSA:1.10.10.2600,IPR036162,PF13408, IPR025827,G3DSA:3.40.50.1390,PS51737,IPR006119,IPR038109,PF07508, IPR011109,SSF53041,PF00239,PTHR30461,PS51736, Coil,cd00338
MSLALELAQTQIARAKPAEDQVPKTARVAIYARYSSHKQQELSIEGQLREIQEYCQKKDLKIVRAYIDRAKSGRTSTKRTEFRRMLEDAKQGEFDTIVVYKFNRFFRNLTEQVITMEDLRKVSVTMQSVHDVVPEGSGGVYMRAIYGADAEVYSLGVSEDTKRGMRDAAADYRTPGSLPMWLMADANKKIVLNEPAARVMRQAAVMYDEGATLRQCCEYINAAGYKTRQGHKWNPTTLSASFRNVRLMGVFRFKDEILKEGIFPAAVEPDLWRRINAKLDGKHMPQRARALEEYYLTPRLFCGLCGAPMYGAIAYGAMSHGVKNVYRYYRCDNRLKNHSCKQKLVRKEIVEDAVFRAVIGTLTDENIARIALQAEKLSAETATTGAEKLRLLDELAAVNTEINNISRAIAAGIITDTTRDMLIDAERRRTGIQQRIEDAEAKEKETVRAEDVAAWLYCFREGAKKDEELKAQILRRLVARAELFEDGPHDGHVVVWCKLADAETAITEFFERTPAGGAKKEHRFYRCSFYISGQTPGLAPERLYQQHHGAAKLIPHTGYVQHGCGRGGFPHAAHVKAVLPKRLQISGEGAVVFCHLFPKKHGRARPFFIIMVYREMQDAAVLAVHPLLRALCGEHGVLSAEHKPAAGT

SEQ ID NO: 144 - protein, 648 aa, Unknown
  Description of Unknown: Integrase B145 sequence
  PTHR30461:SF3,IPR036162,PS51737,G3DSA:1.10.260.40,IPR011109, PTHR30461,PF00239,IPR006119,SSF53041,IPR010982, cd00338,SSF47413,SM00857,IPR025827,PS51736, cd00093,PF13408,G3DSA:3.40.50.1390,PF07508,IPR001387,Coil
MKTVAIYSRKSRFTGKGDSIENQIEMCKEHIKKFVSPKVEFLIYEDEGFSGGNTNRPAFQRLINDIKYGNIDLLICYRLDRISRNVADFSSVLNVLQEYKVDFISIKEQFDTSSPMGRAMIYIASVFAQLERETIAERIKDNMLEMAKKGKWTGGKLPLGFTSKKIAYIDEEGKKRFKVTLEHDSKDLEFVKFLYEKYLELGSLHKLETYTHENNIRSASGKIFEKSTLKIILQNPIYVKADENVFNYFENKGWSVYGEPDGLHSLLSYNKTETAKKDGKLTKKTKDESESLVAVSDIKGFIDSSLWLKVQYQFKKNKNTFPRLGKTHNALLVGKLFCGNCGTRMIIQHGRTSPKTGIKTFYYVCSLKKTSKKKLCSAHNVKTDFLENLVLDSLEKLYYKKDFINDSLKINLKENKDNIKEINTTKKLIELNKNKINSLIEKLSLDFDNVLSDILIPQIKKIKIENDVLESKLEELKLKKQESEMNRIEIDLITSLLNKCKNIKELTRTEQKQIIDCLVDSIYYYSNDNGNDKIKIKFINDIDSINTLLSDEEKRQFEKLSFYSHSMYSMNKKTTINDILSNKELSIIDILPNETIGDKIKILRLSTGLNYNDFARKAKLGTMTIYRWEISKRIPNEKYLKQLKSQIK

SEQ ID NO: 145 - protein, 647 aa, Unknown
  Description of Unknown: Integrase B146 sequence
  IPR036162,PS51737,PS00398,IPR011109,PTHR30461, PF00239,G3DSA:1.10.10.2600,IPR006119,SSF53041,cd00338, SM00857,IPR025827,IPR038109,PS51736,IPR006118, PF13408,G3DSA:3.40.50.1390,PF07508,Coil
MLRPISYERVSTFQQVEMGKGLVDQRSSLTAFLDKNADKFTNERIFITDEGVSAFKNANISPESNLGKFLQDVRDRKYGKGDALIVTSLDRLSRRSSWSENTIQFIVAAGIVIYDISTDVVLRDDDSFSKILMEIILQRSHNESVMKSVRAKVAWQNKVMRAAANGEVVSNRMPFWLENIDNKYSVKEDQAALIVKCFELYKSGFSTGEIVKRIDDPKWQMVRVSRLIRDRRLLGEHKRYNDEVISNVYPKIIDDELFLTANRMMDTVMTDKKKPAEDLLLEPSVVKQIFSLSESGLGSGAIVKRLPKGWSTVNVLRVLRDKKVVEMKIIDNLTFERVNAKLTANGVANRIRKDVTIAQDDYITNLFPRILKCGCCGGNIAIHYNHVRTKYVICRTREEKKRCDAKSIQYTRIEKNILSVVMNVDFGKVLSEDSTKKDKVLEALKVELSALRKEENTYQLKIDERKKSGKKTSLPLMEGLTDVQDRIEETFEQISRSSTINELPTFDYDINCLLDPMNVELRAKVRKELKHVISKVTYQVIDKYILVRLHYYTDVLSHVLIIDNKRGGGDIISQIAIYTKDSTTIYTTPSFALTTSNNEIPRIHFMGNVPLNQIDYELLLISADYVECSDSVTSWMRHNHNFLFANN

SEQ ID NO: 146 - protein, 647 aa, Unknown
  Description of Unknown: Integrase B147 sequence
  SM00857,IPR036162,PF13408,IPR025827,G3DSA:3.40.50.1390, IPR006119,PF07508,SSF53041,IPR011109,PTHR30461, Coil,cd00338,PF00239
MKAAFLIRCSTKYQDLDRQVSDLTRLAKSMGYEYDLDNLVYGEKITGKDDVTKRNRASIDRLLKGAKEQKFDVVLVSEVSRMSRDPASGRIYVRLLINMEIPVYFRDIDIWTIDPITKKKVPNAEITIGGAFDAAWKYLKSMKTQIASARRNYLDKGAIALGTVKFGYRWNGGKDKHTKTKWVADEVESLIVPEIFTEYLREGSTLKSTALAISARFGDKTTYKFTVASIHHILTYDSYATGVKPINLADPDREEVEVFDVEIPKLIPMELYEAVREKLSNNRVKGEPYPSQATHLLSKLIKCPCCGYSLTPRAKGSDSTPDGRGANGAYRIINGKKAMSWVCMSGVNNSTKCPNRMSIANEKLEPIIWELVKNELIAFADVNNEDRLAKIEDLEGQISLQNSNIVNFQKELDKLAKRQTAAFQVATSAAMMAGDNEDMKAMAMEEFSKTSKAISKEKATYEGSIAAAKKEIERLTILRDYYSSPTLPKDIIEKAEANPTEQRNLVKQLITKIVPHKITTFRKQRREKGKESRKAYNATDIITVKNGAVLVEVHAINGVYYIFYNANGKEAVRYAYYLSADVVYTGSEHATDYIKGLGEELFYIVSPYLYFDDERANDEDAVININEFVEIAKAQNQVLEYQYKPEA

SEQ ID NO: 147 - protein, 646 aa, Unknown
  Description of Unknown: Integrase B148 sequence
  PTHR30461:SF3,IPR036162,PS51737,IPR011109,PTHR30461,PF00239 ,G3DSA:1.10.10.2600,IPR006119,PF14287,SSF53041,IPR025378,SM00857 ,IPR025827,cd03770,IPR038109,PS51736,mobidb-lite,PF13408, G3DSA:3.40.50.1390,PF07508,Coil
MAKSNQGKITALYERLSRDDELQGESNSILNQKKYLEDYARKNGFNNIQHFTDDGYSGTNFNRPGFQSMIAEIEAGHIATVIVKDMSRFGRNYLEVGFYTEIQFPSKGVRFIAINNNVDSANPTDNDFTPFLNIMNEWYAKDTSNKIRAVFKSRMQDGKRCSGSIPYGYKRVPGDKQTLHVDEEAASVVRRIFDMAASGASLAQIGQTLSDEKVLIPSAYEERYHPESARHHSYHDPYRWNTTTLTYILDRQEYLGHTVLCKSIRENFKLKKRRAATPEERIVFKNTHEAIIDQETWDKAQRLRKRNPKKLPSGTYSHRLAGMVFCADCGSRMSFSSPESKHRDSDVVYDSDSSWQCSKYRNMYVSCTSHFIKTSTIEATILNAIKAMTKEIIENEDEFAEQLQAAWENQNTQVSSESKKELHSVQKRMDELDALIRSLYENSVLGKIPERQYQRLMAQYDEEQAVCEARIAELKKELDNAETTKVDLKRFIRLIRKYKDCETLTDEMLYELVEKVVIHSASGGRTIYRQQQIDIYFNFIGDTFPSQIEISHGDKKNLTEQQLAKRKKYQKTSGENRKKKRAALREAAKTDPQAAAEYEALLQKGRERCRKYAQNKKLAQQEPADTVPIQFEPSFETPEEMKGESA

SEQ ID NO: 148 - protein, 646 aa, Unknown
  Description of Unknown: Integrase B149 sequence
  PTHR30461:SF3,cd00338,SM00857,IPR006118,G3DSA:1.10.10.2600, IPR036162,PS51737,G3DSA:3.40.50.1390,IPR006119,IPR038109, PF07508,IPR011109,SSF53041,PTHR30461,PS00397, PS51736,Coil,PF00239
MDSKNQEEKRIAGIYIRVSTEDQAREGFSLGEQEEKLKQLCAFKEYQVYKVYQDRGISAKDMEHRPGFQEMMDDMRKGKINYIVAYKLDRVTRSVRDLELLIAELEKYDCYLICERDDVNTSTANGRFFVRMLTVLSQLEIEVVSERTKFGMSGAIKAGHLPGTCPLGYYRDTDKVVKLDPNTKGIVRRIFNMYLEGKSYYQISCILDEEKVLYPEHNKWTEAAVRTIINNRIYVGDYVRNKTSKDASKEEVYPDVVAPIITRAEWEEVQIQKEKNMQSFSRDRVYIFFQKLICPKCGKLMLCKGAGGKKKKYMYYNCGDCHLYFREDKIEDVLLNFILSLVEYDEVVKKYFYPILAEKEKVNTENIDKEIAELEKQRNRIKKAFMSGIVEMEDFAEDYKSIENKLNKLEQDKMKNMEIDTEKFSLMKIMADRDFEIESRLNSDSFVEDIKTEWNAKTKLEKQEFISKFIESMVLEKDEENDSFKIIKINFRSRYLDELKKLNKADCIDLAKPTEDMQGISVIKSTPRITKSELNEYIENLKEHYDVKYYEDVYDWTRSYIQEDTMITMPREKGNEKLMRAVFVDNNKNFPIKDSKGKVRGKLGAVSYREKGTTDKNELDDYYEAISDLVLYKKEQTEDEEKSSKD

SEQ ID NO: 149 - protein, 644 aa, Unknown
  Description of Unknown: Integrase B150 sequence
  SM00857,IPR006118,IPR036162,PF13408,IPR025827, G3DSA:3.40.50.1390,PS00398,IPR006119,PF07508,SSF53041, IPR011109,PF00239,PTHR30461,PS51736,Coil, cd00338
MLRPICYERVSSIQQIEGGGGLDDQRSALEGYLDRNSDKFSNDRIFIQDRGVSAFKNSNISSESQLGIFLQDVQNRKYGEGDALIVMSLDRISRRSSWAEDTIRFIVNSGIEVHDISASTVLRKDNPHSKLIMELIQMRSHNESLMKSVRAKAAWDRKIIEAVQNGTVISNKMPMWLKNVDNRYQVIQEKADLIIRCFEWYRDGFSTGEIVKRIADPKWQMVTVSRLVRDRRLLGEHKRYNDEIIHNVYPKVIDDDLFLTANRMMDRVMLEKNKPAEDLLLESDVVQEIFQLYESGLGSGAIVKRLPKGWSTVNVLRVLRDKNVVTQKIIDNLTFERVNQKLSMNGVANRIRKDITIAQDDYITNLFPKILKCGCCGGNIAIHYNHVRTKYVICRNREERKICDAKSIQYIRIEKNILKCVKNVDFQKLMIESTGSETSVLDGLREELSSLRREESSYNDKINERKLAGKRVGIHLNDGLTEVQDRIEEIEKEIISAQTVREIPKFDFDMDEVLDPMNIELRAKVRKQLRLVLKAVKYWMFDKRIFIQLEYFNDVLSHMLVIDNKRGGGEVMYEMSIEEKKGERIYTVHENGYAVFIASVTIGTELWSLALSRTRTIDSVGNYLSLLAREGFEIFVNEDQIDWF

SEQ ID NO: 150 - protein, 644 aa, Unknown
  Description of Unknown: Integrase B151 sequence
  SM00857,IPR006118,IPR036162,PF13408,IPR025827, G3DSA:3.40.50.1390,PS00398,IPR006119,PF07508,SSF53041, IPR011109,PF00239,PTHR30461,PS51736,Coil, cd00338
MLRPICYERVSSIQQIEGGGGLDDQRSALEGYLDRNSDKFSNDRIFIQDRGVSAFKNSNISSESQLGIFLQDVQNRKYGEGDALIVMSLDRISRRSSWAEDTIRFIVNSGIEVHDISASTVLRKDDPHSKLIMELIQMRSHNESLMKSVRAKAAWDRKIIEAVQNGTVISNKMPMWLKNVDNRYQVIQEKADLIIRCFEWYRDGFSTGEIVKRIADPKWQMVTVSRLVRDRRLLGEHKRYNDEIIHNVYPKVIDDDLFLTANRMMDRVMLEKNKPAEDLLLESDVVQEIFQLYESGLGSGAIVKRLPKGWSTVNVLRVLRDKNVVTQKIIDNLTFERVNQKLSMNGVANRIRKDITIAQDDYITNLFPKILKCGYCGGNIAIHYNHVRTKYVICRNREERKICDAKSIQYIRIEKNILKCVKNVDFQKLMIESTGSETSVLDGLREELSSLRREESSYNDKINERKLAGKRVGIHLNDGLTEVQDRIEEIEKEIISAQTVREIPKFDFDMDEVLDPMNIELRAKVRKQLRLVLKAVKYWMFDKRIFIQLEYFNDVLSHMLVIDNKRGGGEVMYEMSIEEKKGERIYTVHENGYVVFIASVTIGTELWSLALSRTRTIDSVGNYLSLLAREGFEIFVNEDQIDWF

SEQ ID NO: 151 - protein, 643 aa, Unknown
  Description of Unknown: Integrase B152 sequence
  PTHR30461:SF3,SM00857,G3DSA:1.10.10.2600,IPR036162,PS51737, G3DSA:3.40.50.1390,IPR006119,IPR038109,PF07508,SSF53041, IPR011109,PTHR30461,Coil,PS51736,cd00338, PF00239
MVDEKKKCGLYMRVSTEDQAREGFSLPEQKERLEAYCKFKGYEIVDYYEDAGVSAKTGNYRAEFERLKDDIKSKKINTIISLKLDRFTRSIYDWEELITFLDENEAYIDCVNDDINTTTANGKMISRLLVSVSQNEIERTSERTKIGLAGAIKQGHIPHIAPLGYKHENKTLVIDYSTKDIVVRIFELYFNGYSYQKISTLFNEEKVLGKDNWRDSTIQNILQNEIYKGDFVHGKRTKSPTYYENVVEPIISKEMWEDCQVQKKKNSRSYQRTLTYLYLQKIKCPKCNRILGGKATTKKNGKPYFYYYCNDCKITIKENAINEYFNQFINELVEYDSVVNQFFLPMIRQRFDEPKEKLQKEIDEQNAKLERIRKAYINGAFDLDVYTSETAVIEKAINNLKEELEATDCVEELRFTPKDILLKRDIDFLNKMIMNKQYKERTKTWKDYTREEQAELIMKYVDEIKLTLIGSEVIVKEINFRDSICKPCQELYDKGYIDTTKPVLLGNVLGNVRFSNYLPEEEFGEIIMRLQQYYDVHYTEAIYYLQKQVFYFNFVEDNSAIVRVFPLEDYYKLDPNNKMEEYRFGIIYINGDNYDDFEITEADNIEPFFNAIPDDNETTIKFENGERSEIVVKPVKFSEEDTK

SEQ ID NO: 152 - protein, 642 aa, Unknown
  Description of Unknown: Integrase B153 sequence
  SM00857,G3DSA:1.10.10.2600,IPR036162,PS51736,PS51737, G3DSA:3.40.50.1390,IPR006119,IPR038109,PF07508,IPR011109, SSF53041,PTHR30461,mobidb-lite,cd00338,PF00239
MSNSTKKAAEQAEREKVKRRYANRREPDIIYPAKKQVDFYDDAVHQRVAVYVRVSTDNLGQETSYELQKNYYEEFVLKHPNWALVKIYADKGISGTSTRHRDELNQMLTDCRSGKIDLIITKSVSRLARNTVDCITMVRNLAELRNPVGVFFESECIFSLNEDTSMPLSFLASIAENESRIRSRSMEVSLAQRLNGGLPLTPKLLGYSHNAEGKLVINPDEAPTVRLIFYMYLSGYSSSHIARTLEELGKTTYLGNTKWTSGAVIQVLRNERHCGDVLTRKTWTPDVISHKSKKNRGERQQSLYKDDHEAIISRDDFIAVQHMINNAKYGGKSILPELRVIGSGLLKGYVTISPKWAGFKAMDYLQASMSVYKDEDEYYGQSQEADATFEVSAGDFDLRGFEVTNAALFDTNKRPYVVLQNKKIKFSTDCVRRFGKDNKVELLIHPGLRKLAVRRAAKDCRHFVQWSRSDDGKYYTKDIPCSAFGDTLFELLDWGTEYKFKAYGRYIEGDGESVFLFDLSEPEIFIQSYLMTGTDTPAGGRGDLSPLSISGKRIRAVPKKLADRFGSDFYSHRLASSSMEPQSEDAWKLWLEGQLFETGEKLQVTGFDEMHRFIIEQLSSAKPKEEMPANEREERSTCLSES

SEQ ID NO: 153 - protein, 642 aa, Unknown
  Description of Unknown: Integrase B154 sequence
  PTHR30461:SF3,SM00857,G3DSA:1.10.10.2600,IPR036162,PS51737, G3DSA:3.40.50.1390,IPR006119,IPR038109,PF07508,IPR011109, SSF53041,PTHR30461,Coil,PS51736,cd00338,PF00239
MKDEKKKCGLYMRVSTEDQAREGFSLPEQKERLESFCKFKGYEIIDYYQDAGISAKTGNHRPEFERLKDDIKTKRINTIVALKLDRITRSIYDWENLMTFLDENDAYLDCVNDEINTTSANGKMISRLLMSVSQNEIERTSERTKVGLAGAIKCGHIPHIAPLGYKHEDKKLVIDYATKDVIVRIFDLYYNGYSYQKISNLFNEEKVLGKDNWRDSTIQNILENEIYKGDFIHGKRTKNPTYYEDVVEPIISKEMWADCQVQKKKNSRSYQRTLTYLYLQKLKCPKCNRILGGKATTKKNGKTYFYYYCNDCKIQFKENVINEYFEQFIDELTEYDSVVNQFFLPMIKQKFDEPKEQLEKEINNQKSKLERIKKAYINGAFELKEYNEEKHIVEKIIVELEEKLNITDCTEELKFTPKDILLKRDIDFINKIKLDKEYQEKTKTWKDYTREEKADLIMRYVEDIELALVGNEVILKQINFRDSICKPCQKLYDKGYIDITKPMILGNVLGSVRFSNYLPDEEVCEIIMRLQQYYDVHFTEATYYLQKQMFYFNFVEDNSAIIRVFPLEDYYKLDPNNKMEKYRFGILYINEEDKFEMQDINTAFDYIPDESNDSVIYMKEPVPISVGVKPVKFCEDNTEEKN

SEQ ID NO: 154 - protein, 642 aa, Unknown
  Description of Unknown: Integrase B155 sequence
  SM00857,G3DSA:1.10.10.2600,IPR036162,PS51736,PS51737, G3DSA:3.40.50.1390,IPR006119,IPR038109,PF07508,SSF53041, IPR011109,PTHR30461,mobidb-lite,cd00338,PF00239
MSNSTKKAAEQAEREKVKKRYANRREPDIIYPAKKQVDFYDDAVHQRVAVYVRVSTDNLGQETSYELQKNYYEEFVLKHPNWALVKIYADKGISGTSTKHRDELNQMLTDCRAGKIDLIITKSVSRLARNTVDCITMVRNLAELRNPVGVFFESECIFSLNEDTSMPLSFLASIAENESRIRSRSMEVSLAQRLNGGLPLTPKLLGYSHNAEGKLVINPDEAPTVRLIFYMYLSGYSSSHIARTLEELGKTTYLGNTKWTSNAVIQVLRNERHCGDVLTRKTWTPDVISHKSKKNRGERQQSLYKDDHEAIVSRDDFIAVQHMINNAKYGGKSILPELRVIGSGLLKGYVTISPKWAGFKAMDYLQASMSVYADEDAYYGQPQGTETTFEVTAGDFDLRGFEVTNAALFDSNKRPYVLLQNKKIKFSTDCVRRFGKDNKVELLIHPGMRRLAVRRAAKDCRHFVQWSRSVDGKYYTKDIPCSAFGDTLFELLDWGTEYKFKAYGRHIESDGESVFLFDLSEPEIFIQSYLMTGTDIPNGEHGGLSPLSISGKRIRAVPKKLADRFGSDFYSHRLASSAMEPQSEDAWKLWLEGQLFETGEKLQVTRFDEMQRFIIEQLSSAKPKEGMSVNEREKRDPLLSES

SEQ ID NO: 155 - protein, 641 aa, Unknown
  Description of Unknown: Integrase B156 sequence
  PTHR30461:SF3,SM00857,IPR006118,G3DSA:1.10.10.2600,IPR036162, PS51737,PS00397,G3DSA:3.40.50.1390,IPR006119,IPR038109,PF07508, IPR011109,SSF53041,PTHR30461,Coil,PS51736, cd00338,PF00239
MNNEKKKCGLYLRVSTDDQAREGFSLPEQKERLEMFCKLKNYEIIDYYEDAGISAKTGNNRPEFERLKRDIQAKRINTIVSLKLDRVTRSIYDWENLMTFLDENDAFIDCVNDEVNTTNANGKMISRLLMSVSQNEIERTSERTKIGLAGAIKQGHIPHVAPLGYKHEDKKLVIDYATKDIVVRIYDLYYNGNSYQTISNIFNEEQVLGKTNWRDSTIVTILENEIYKGDFVHGKRTKNPIYYENVVEPIVSKEMWEDCQVQKKKNSRSYKRTLTYLYLQKLKCPKCNRILGGKATTKKNGKAYFYYYCNDCKIEFKENIVTEYFSQFIDELTEYDSVVNQFFLPMIKQKFDEPKEQLEKEIKNQKAKLERITTAYINGSFELDEYNKRKKIVENAIKELESELQATDCAEEIRFTPKDILLKRDIDFLNKLKLNKEYHERTKTWKDYTREEQAELIMKYVDDIELDMLGEVIAVKQINFRESICKPCQELYDNGYIDTLKPMILGNVLGNVRFSNYLPEEEYGEIIMRLRQYYDVRYMEATYYVKDQVFYFDFAEDNSAIVRVFPLEDYYKLDPDNKMETYQFGIIYIDEEDRFEMQDINTAFDYIPDESNDSIIYMKDPTPISIGVKPVKFSEEDTEEK

SEQ ID NO: 156 - protein, 641 aa, Unknown
  Description of Unknown: Integrase B157 sequence
  PTHR30461:SF3,SM00857,IPR006118,G3DSA:1.10.10.2600,IPR036162, PS51737,G3DSA:3.40.50.1390,IPR006119,IPR038109,PF07508, SSF53041,IPR011109,PF00239,PTHR30461,PS00397, PS51736,Coil,cd00338
MESKVKNLCGLYLRVSTEDQAREGFSLPEQKERLETFCKFKSYEIVDYYEDAGISAKTGNYRPEFERLKEDIKSKRINTIIALKLDRITRSIFDWEKLMTFLDENDAYIDCANDEVNTTNANGKMVSRLLMSVSQNEIERTSERTKVGLAGAIKQGHLPSQAPLGYKHENKKLVIDYSTKDVVIRIFELYYNGNSYQIISNILNEEQVLGKTNWRDSTITAILENEVYKGDFVHGKRTKHPTYYENVVEPLVSKEMWEDCQAQKKKNSRAYQRTLTYLFLQKIRCPRCNNLMGGKATKKKNGNVYYYYYCNDCKFNLKENVIEEYFENFINEIVEYDSVVNQFFLPMIKQKFDELKELLEKELDKQNAKLDRIRKAYISGAFDLEEYNAEKKIVDEAISKIQSELNTTNITEELKFTPQDILLKRDIDFINKVKLKDEYKERTKTWKDYTREEKSDLIMKYVDDITLLEKNKVMIVDEVRFRESICRPCNELVQAGYIDIKTPTLFSNLVGQLRFSNYLPEEEVGKHIMRLRQYYDVGFEEAIYYVEDRVFYFNFLQDNRAIVRIFPMEDYCKIDPDIKMKEYRYGIIYIRETDEFQMQDIDSAFDYIPDETNDSVIYMRETIPIEIGVKPVKKELLSIEK

SEQ ID NO: 157 - protein, 640 aa, Unknown
  Description of Unknown: Integrase B158 sequence
  PTHR30461:SF3,IPR012347,IPR036162,PS51737,IPR011109, PTHR30461,IPR009078,PF00239,G3DSA:1.10.10.2600,IPR006119, SSF53041,G3DSA:1.20.1260.10,cd00338,SM00857,IPR025827, IPR038109,PF05067,PS51736,SSF47240,PF13408,IPR007760,
  CONT. FROM ABOVE: G3DSA:3.40.50.1390,PF07508,Coil
MYCIYLRKSRADMEAEARGEGETLARHKRILTELAQRRDLEIGEIYQEVVSGESLAARAEAQRMLSDVQAGMWEGVLVMEIERLARGDTIDQGIVMNTIKYSGTKIITPTKTYDPNNEFDEEYVEFSLFMSRREYKTIARRMNAGRIASVKEGNYIGSRPPYGYDKVKDDKSFTLAPNPAESDIVRSIFSWYVHGCINENGELERIGISKIARKLNDMHAPTRKGGAWVTATIRDMIKNPVYIGKIRWNWRKGVTQFKDGKKTVARPHSPEDSWLLVDGRHVPLVDEDTWNAAQSIIADNRPATVPGNREMQNPLAGLMVCGKCGRKMVRRPYSNREQPPSLICSCNACDNVSAALHLVEERIIEALAFWLKNNAIKYESAKPAATDEEQAAISILNAEITELEKQRKNLFGFLERGIYSEAEFRERRADIDAQITALREDVKTLGDKIILKETYNEAIRNEVPKIRTVVETYSSLSSARAKNDMLKEVLSKVVYTRDKGGRWSGLCDNFVLDLYHKIPTPSPELLQRWDNHIQVVGTDEIAHWEMIGTMIHQCLRDATLKDIEAAGLMGYYTMHSKGVYPADPNGVPFTAAYLQCTGDPIADITEDMAADAAMSKRQHFAQKKKNCPAWQCFFLRCINK

SEQ ID NO: 158 - protein, 640 aa, Unknown
  Description of Unknown: Integrase B159 sequence
  PTHR30461:SF3,IPR036162,PS51737,IPR011109,PTHR30461, PF00239,G3DSA:1.10.10.2600,IPR006119,SSF53041,cd00338, SM00857,IPR025827,IPR038109,mobidb-lite,PS51736, PF13408,G3DSA:3.40.50.1390,G3DSA:3.40.50.300,PF07508,Coil
MKKRINTNSAARAVIYARYSSANQRDCSIEQQVEKCRELAAREGVTVIEIYADRAVSGKTDRRPNFQRMMKDASLRQFDVVLAWKSNRMGRNMLQAMMNEEQLRSNGIRTIYAEEDFDDTAAGRFALRNMMNVNQFYSENMAEDISRGLMDNASKCMSNGSLPLGYKTGKDQKVVLDEAEAAIVQEIFTRVSCYEPFIDIARDLNRRGIKTKKGAEWGRSSFHTICRNERYRGIYIYRDIRVEGGMPRIVSDELFYKVQEVLKVKKNPQGRRKRSGYEEYLLTGKLYCGHCGSTMTGIAGTSKTGAMHYYYTCQKRRTDHSCDKKAVRRDQIEKAVAIAIQQQLLTDENIQMMADETMAYNARTEIKYRLQSLQQQLYSNETSTANIMKAIEMGIITDTTKARLLALEQEHGQLLAKIDTAKAEMVPINREDFVSLLDIYRTGDVNNKKYLAALFDTFLVRVDLYDDHFKITFDPTGGKMPVDIPIGAEDSPESPGDSPESSDFEASPQDAEKFVLALHNRTKECLTRKCRAFFCCSILRRHDLVQRRRYSNRAAARSAVRNATVRRSFQCPDANILPGQIKNNMNIRICGRADTTLSTIIIGDGRAAEQIPHDAQGRFLMEDGTVFQAYYFNDDTISKW

SEQ ID NO: 159 - protein, 640 aa, Unknown
  Description of Unknown: Integrase B160 sequence
  PTHR30461:SF3,cd00338,SM00857,G3DSA:1.10.10.2600,IPR036162, PS51737,G3DSA:3.40.50.1390,IPR006119,IPR038109,PF07508, SSF53041,IPR011109,PTHR30461,PS51736,Coil, PF00239
MGILNNDIKVRAGLYMRVSTEDQAREGFSLPEQKERLEAYCKLNNFEIVDYYEDAGISAKKGNYRPEWERLKEDIKSKKINTMIALKQDRITRSIYDWENILSFLEENEAYLDFVYDDINTTTSNGRMISRIMMSVSQNEIERTSERTKVGLAGAIKQGHIPHQAPIGYKHVDKMLVPDESTKDIVIRIFNLYHNGLSYQKIANLFKEEKVLGKENWRDNTILHIIENEIYKGDFIHGKRTKNPTYYENVVEPIISKELWEECQHQKRNNSRAYSRTLTYIFLQKCLCPKCGRILGGKACKKKGNEYFYYYCRDCKLNIKESEIERGFKEVVDQLTEYDSIVNQFFVPMVIKNFDEPRDKIYKEINTQKQRLERAKLAYVDGAFTLDDYKENAKIIEDTIKSLEEKINTADKFEVFNYSAKDILISRDIAFINSKLHPDEYQERIKTWNKRTREEKATLVMNYVDTIELELVGKECFVKNINFRESIAKPCNELYDKGYIDRPTPAVFGNVVGELRFSNYLPEEEVVEIVMRLKNFYNVSYTEATYYVKNQVFFFNFIKDNSAIVRVFPLEDYYKKDPEVKMEEYRFGIIYIKEDNIVVTKNKDELDKLFNYIPTETSFTPLRDLKDVPSKPIKMELIKK

SEQ ID NO: 160 - protein, 640 aa, Unknown
  Description of Unknown: Integrase B161 sequence
  PTHR30461:SF3,IPR036162,PS51737,IPR011109,PTHR30461, PF00239,G3DSA:1.10.10.2600,IPR006119,SSF53041,cd00338, SM00857,IPR025827,IPR038109,PS51736,mobidb-lite, PF13408,G3DSA:3.40.50.1390,PF07508,Coil
MYEDIKTACLYVRFSSHNQTEQSIEGQTRVCRDFCKRHNIRIVEIYADRATSASKDIEKRVQFLKMIKDSEKGLFDAVIVYKLDRFARSRYDSATYKYRLKRNGVQLISATENISNDPEGIILESVLEGMAEFYSAELSQKINRGMRESAYKHNSIGGAIPLGYKIEDKKLVIDPKTAPIVKEAFEKYADGETVAEICRQFNARGYKTSKGTAFGKSSFTKIFRNERYIGVYSFHDYRAEDAIPAIIDKDLWDRVQLRVGKIKNAPARNKAKVVYLLSGKIFCGHCGSKMNGNCNAGNYYYYQCYGKKNGNVDCKKKNIRKEFIERLVAQDALSLLTDEYIEQIATIACEKNQHEIELDSALPTIRDRIHQVDLSLNNLLKAIESGSAPDMLVKRMGELEKEKKDLQVQAKKESEDIVELDKAQVIYWLEQFRGGSIEDEEFCRMLIDLFVNSVTVWDEDDNTYKVTVAYNLTSLPTKTYRLNKGGTLSDFTSNAPASAPPEPHKETVSLRHSQPIFEKFLQPQHKLIHHDGRHRKHEDGRHHEVHVEHLRPVDDQIAETGFGDQKFAHDDTDPRQADVHAQRIEERGVVGRDDQPPQDLMPGRTERLHQADLLPVRGQEADMHIQDRDKDRDCDRHGDD

SEQ ID NO: 161 - protein, 640 aa, Unknown
  Description of Unknown: Integrase B162 sequence
  PTHR30461:SF3,IPR036162,PS51737,IPR011109,PTHR30461, PF00239,G3DSA:1.10.10.2600,IPR006119,PF14287,SSF53041, IPR025378,SM00857,IPR025827,cd03770,IPR038109, PS51736,PF13408,G3DSA:3.40.50.1390,PF07508,Coil
MNNRQSQEKITAIYCRLSRDDDLAGDSNSIIHQKDMLTRYARERNFPNVSVYSDDGWSGTNFDRPDWKRLIADIEAGKVGIVLVKDLSRVGRDYLRVGFYTEVTFPQNGVRFIAVNNGVDSANQSENDFAPFLNIMNDFYARDTSKKVSAVYRAKGNKGEHTGNHPIYGYLKDPENKQRWIIDEEAAAVVRRIFRMVIDGKGVYQIADILSEEKVLCPSAYLAAKGVGNRRNNKFEDPYRWWGTTVSYILARVEYMGHTVNFKTFKTCYRDKHRKQAPKEDWKIFENTHEAIIDKTTWETAQKLRRTIRRGDRNREPNPLTGLLYCGECGAKMYNERSDGDAYHKTPKDNYVCASYRKKTTSCTIHFIRSEIVRDLILDALRNVATYARANKEDFEQLVMQTTSDARKRSLQSGRTELDRIMRRTNELDTLLQKLYEDYALGRLPEKRHAKLSAQYEAEQAQLEQRSAELMEQMNAEQEESVNVDRFMELVDRYTDFTELTTPMLNEFIDKVIVYERRKINRYQYDQQIEIYFNFIGKVTLPEEETEASPEAPKTLHVASNSSFAPIGDYLSAQGEEAIALPFSKVEELTGKPLCKSAYKYASYWYPAQDRPLSNTIYNAGYDVDRVDLAAGIVYLTKAA

SEQ ID NO: 162 - protein, 639 aa, Unknown
  Description of Unknown: Integrase B163 sequence
  SM00857,G3DSA:1.10.10.2600,IPR036162,PF13408,IPR025827, PS51737,G3DSA:3.40.50.1390,PS51736,IPR006119,IPR038109, PF07508,IPR011109,SSF53041,PTHR30461,Coil, mobidb-lite,cd00338,PF00239
MSPRKKLADQQERYSGTAVIYARYSSHNQRDVSIEQQVKQCQEFAQQNSFQIIEIYADRAISGKTDKRPNFQRMMRDAEKKKFKYVIAWKSNRMGRNMLQAMMNEAKLNDLGIRVLYAEEDFDDTAAGRFALRSMMNVNQFYSENMAEDIKRGLYDNAAKCKIANGGLPLGYKKGDDLRYALDPPNDEIVREIFSRTACGDSFADIAADLNARGIKTSRGKAWGKNSFHALLTNERYTGVYIYGDIRIEGGVPQIVDKGLFFRVQEVLKTKKNPQGRHRINGDYLLTGKLFCGHCKSPMAGISGTGKNGKLHHYYICQKRRMEKSCDKANIRRDKIEHEVAVAIRNYIMRDDVLEWIADSAMTFAKEYRNQTCIGSLETQLAENKQATKNLLTAIEHGIITSTTKDRLLELEREQAILVSRLDEEQASLLHYSRDDIISAMSLYKNGNIEDKAFQAKLFDTFLIAVYLYDDHLKIEFSVTGKKTFVNLPLDTSVIDNIESFAAEECSFSLSLGPPKKCPLWIPSAEMPMVSGFSGGGPPQISQLKQKIQTGGSQKLAGSEPQNSIEIHSVLFEMRFFKKGAVFIFRKRALKLQRKENHCYAGDKCQLLLEDIRRQIERNVPNPRERMRQSDQNEINMSL

SEQ ID NO: 163 - protein, 639 aa, Unknown
  Description of Unknown: Integrase B164 sequence
  PTHR30461:SF3,IPR036162,PS51737,IPR011109,PTHR30461, SSF82771,PS50164,PF00239,G3DSA:1.10.10.2600,IPR006119, SSF53041,cd00338,PF01541,SM00857,IPR025827, IPR038109,PS51736,PF13408,G3DSA:3.40.50.1390,IPR035901,PF07508,
  CONT. FROM ABOVE: IPR000305,cd10456,G3DSA:3.40.1440.10,Coil
MKKFPIDLSCLTEEEISQFQEDPYTLYNGDQDVTLYLRYSSTGQSDQSIEGQLRDCRAFCKANHYRIVAIYVDRATTARKDVEKRVHLMEMIADSAKQNWEYVIVWKLDRFARNRNDSAIMKMRLRKNGVKVLSATEHLTDSPESIILESVLEGMAEFFSAELSQKVTRGMRESALKCHSVGGHIPLGYKVENHKLVVDPDTAHIVQEAFSLYANGESVAAICRKFNSAGYKTAKNTEFNRSSFKAMFRNTRYIGTYTYKDIVIENGIPAIIDKELFETVQRRLSKTATAPARGKAKVDYLLSGKLFCGHCGASMNGESGAGRHGKVYHYYSCYTKKRKLGCDKRPLKKDYIEGIVARDALNLLTDQLIDEIADMAIRQSEQDLINDTHIPQLTAQLSEVEKSITNITAAIEKGIASETLMNRLVQLEHEKKTLNKELKAEEKFVYRIDRDQIVFWLSQFKYGNIEDEDFRRRLIDLLVNSVTVWDEPDGYKITTAYNLTSCKTKTFRVEKNPAAEEATGFDFGESECAIPPQAIHCGGFFIICWRVECAVSWWVYVLECRDGTLYTGCTDDIPRRLEAHNAGRGAKYTRGRGPVTLRYREETLDKPAALRREAAIKRLSRTGKQALIDVYNKENKDEI

SEQ ID NO: 164 - protein, 638 aa, Unknown
  Description of Unknown: Integrase B165 sequence
  PTHR30461:SF3,IPR036162,PS51737,IPR011109,PTHR30461, PF00239,G3DSA:1.10.10.2600,IPR006119,PF14287,SSF53041, IPR025378,SM00857,IPR025827,cd03770,IPR038109, PF13408,G3DSA:3.40.50.1390,PF07508,Coil
MALPYVVHNLNCKENYVDAGGMHMNEYNKITALYSRLSVGDEDRDGGESNSIVNQKAFLERYAQQQRLTNIRHYIDDDESGRFFDRSAYSRMMEDVENGKIGVCIMKDLTRWGRDYLQVGNAMEVFRRNNVRFIAVNNGIDSDNPDTLEFAPFINIMSEWYAKDISKKVKTGIRTKGASGKPIATEAPYGYMKDPNNKDFWIIDEEAAEVVRLIFRLFIGGKNRNQIAVYLKNEQILTPTFYLKQHDRGTAKSRPLNEENRYKWNKATLTKILTRQEYCGDVVNFKTTKHFRDKRNHYVDKSEWQITENVHEPIIDRADFETVQRILENAPVRRPNGDGEIHPLSGLMFCKDCGAKMHIRIDYRNGGKRHVAFCSEYHKGKAKNPKCNSPHIIDADLVMQTIADVLKKVAEYSISNREEFEALVRKNLDMQQTDKSKKQQKRIPQITTRLEQIDKVLNKLYEDNALGAIPQDRYEQMSQKYSEEYYTLKAELAELKEQLSAFEDAGGWAHKFLKLIERYAAFTDLTPAILNEFISRIEVHERDKKRAKQAVQHIGIYFSYIGKFENELTQLAEPTEEEIRQMREKIEEAQKEKSRAYHRNYSKEYRAKNLEKRREYERIKAREYRAKRKAQAAALPVS

SEQ ID NO: 165 - protein, 638 aa, Unknown
  Description of Unknown: Integrase B166 sequence
  PTHR30461:SF3,IPR036162,PS51737,IPR011109,PTHR30461, PF00239,G3DSA:1.10.10.2600,IPR006119,PF14287,SSF53041, IPR025378,SM00857,IPR025827,cd03770,IPR038109, PF13408,G3DSA:3.40.50.1390,PF07508,Coil
MALLYVVHNLNCKENYVDAGGMHMNEYNKITALYSRLSVGDEDRDGGESNSIVNQKAFLERYAQQQRLTNIRHYIDDDESGRFFDRSAYSRMMEDVENGKIGVCIMKDLTRWGRDYLQVGNAMEVFRRNNVRFIAVNNGIDSDNPDTLEFAPFINIMSEWYVKDISKKVKTGIRTKGASGKPIATEAPYGYMKDPNNKDFWIIDEEAAEVVRLIFRLFIGGKNRNQIAVYLKNEQILTPTFYLKQHDRGTAKSRPLNEENRYKWNKATLTKILTRQEYCGDVVNFKTTKHFRDKRNHYVDKSEWQITENVHEPIIDRADFETVQRILENAPVRRPNGDGEIHPLSGLMFCKDCGAKMHIRIDYRNGGKRHVAFCSEYHKGKAKNPKCNSPHIIDADLVMQTIADVLKKVAEYSISNREEFEALVRKNLDMQQTDKSKKQQKRIPQITTRLEQIDKVLNKLYEDNALGAIPQDRYEQMSQKYSEEYYTLKAELAELKEQLSAFEDAGGWAHKFLKLIERYAAFTDLTPAILNEFISRIEVHERDKKRAKQAVQHIGIYFSYIGKFENELTQLAEPTEEEIRQMREKIEEAQKEKSRAYHRNYSKEYRAKNLEKRREYERIKAREYRAKRKAQAAALPVS

SEQ ID NO: 166 - protein, 637 aa, Unknown
  Description of Unknown: Integrase B167 sequence
  PTHR30461:SF3,cd00338,SM00857,IPR006118,G3DSA:1.10.10.2600, IPR036162,PS51737,G3DSA:3.40.50.1390,IPR006119,IPR038109, PF07508,IPR011109,SSF53041,PTHR30461,PS00397, PS51736,Coil,PF00239
MKNKKKGNDLLMSEEKKIAGIYIRVSTEDQAREGFSLPEQEKRLRAMCEFKGYEIYKIYKDAGISAKTGNHRPAFEELKEDIRKKKCNTIVVLKLDRLTRSVYDMEDIMKFLDEKNAYLDCANDDINTTNANGRMVARLLTTVSQNEIERTSERTKIGLAGAIKVGNIPNKAPFGYKRNNKKLVPDPLTKDQVIRIFNLYYEGNSYQTIANIYNDEKVFGKTNWCDSTILKILTNEIYKGDFVHGRKTNNPTYYSNVVEPLVSKELWEECQVQKRKNSRNYKRDKEYLFLQKLRCPKCNRILGGNATRKKNGKVYYYYQCNNCKITIKEPKIEETIKTILGDILEYDNVVNEFFLPVLKSKVEDPKEELGKELKSLNTKKERIKKAYIDSLFTEKEFKEETKIIEEQIELINSKLLENEQTEQLNFTVSDILLKRDMDFINKVKLPISYYAFNDNWDLLDRDIKADIIMRYVDDIELEMINNTYEIKQVNFRSTFYSDFEELYKQGYIDRKRPFTYDFNGICVDSEVRYSEYLPIKEVMQHFYRLNECYEVNFYKGTLYKETRKLDIGPLLKNEVPIRVFPLQANDNGNKDWVSMGMFATKNNPNDIKVNIRDLFEVIPDNVTEEDFLNNDENSSQE

SEQ ID NO: 167 - protein, 637 aa, Unknown
  Description of Unknown: Integrase B168 sequence
  PTHR30461:SF3,SM00857,G3DSA:1.10.10.2600,IPR036162,PF13408, PS51737,IPR025827,G3DSA:3.40.50.1390,IPR006119,IPR038109, PF07508,IPR011109,SSF53041,PF00239,PTHR30461, PS51736,Coil,cd00338
MRKKCYIYTRVSTAVQVDGYSLEAQAEKLRKYAEYKDMEVTREYCDAGRSGISIKGRPAFMEMLDDVSSEKDEISCVLVFKLSRFGRNAADILKSLQLLMDFDVDLICVEDAIDSSTQGGRLTLAILSAVAEMEHENITVQFTTARMQKLMNGGWPGGGVPYGYVSVNKELMVVPEAADLVRMIYQKYLEPDMMLNTVVGWMNENGYKRVVKGEDKVITSDFVSSVLGNPIYYGMIVYNRRTNSEEIKKNPKEVISIRGRHEAIIPEDVWMRVQEKRKSLRRPQKKVDDPERISLLSGLVKCPVCGTGLVTKKNKRKNSNRGGYYKIVYSYGCRNYRKSAGRVCDCWRTYNQEKLDKAVMEIVGKVTETREFRQAVMDVVGDRSSLDACEADLKRTRKELHSQEHLKYKLGMELDNLDILAEDYDGEYEAVQAKIDGAYDQIECLEEKIRKLKKKMEALKKGVRSSDNIRKILDNFDLLFERMSCEERRELCRQFIERIDVFSEEREDGRILKKIVFRFPVYYESDGKRKVNDEPDEMVTFAVDCTEHQVTASEAKATYVEIRAYVKEKYGMNIPTLYIAQVKRKYGLDMGKAYNKPAKNKNHVPVCPVEKEKAILDALKHFRMLDEDVEYRKESAE

SEQ ID NO: 168 - protein, 635 aa, Unknown
  Description of Unknown: Integrase B169 sequence
  SM00857,G3DSA:1.10.10.2600,IPR036162,PS51737,G3DSA:3.40.50.1390, IPR006119,IPR038109,PF07508,SSF53041,IPR011109, PTHR30461,PS51736,cd00338,PF00239
MLDTESKRRKEQQKQKVKKRYNVTIDPENYLFIPAKKQTDYYDNDVNQRVAIYVRVSTDDVRQTTSYELQKKYYEEFVTRHPNWTLVKIYADEGISGTSLKKRDEFNRMIADCRAGKIDMIITKSVSRFARNVEDFIGTVRNLAELKPRVGVFFESEAIFSLNDDSQMALTFQATMAEEESHTRSRSMETSLRMRLDHGIPLTPKLFGYTHDEEGELQVNPEEAPTVKLMFYMYLYGYSTQQIADTLIAQERLSYFGKLCWTASGVASVLRNERHCGDVLTRKTYTENYRTHRTLKNCGEKPQSWYFNHHTAIVSRDDFNAVQRMLDNAKYGNKSILPELRVIDSGVLKGFVTINPRWAGFKEADYMNAAQSVYIEDDNVPSESQEPEEMTIQVEAGDFDLRGFEITRTEFFGGYTYPTVTFQDRKIKFSTECIKKFGTKNFVELLINPVEMKFAVRPTDASNRNGVLISKTCGGRPKPRDIPSAAFSDTVFSLFGWNTECKYRMTGFLFEGEGELAYIFDAKDSEAFFKSYVLPTKESGEGGASSVQPLTPIGKHIRAIPAQWTRTFGKEFYLHEQPFSSLASMTKSDWELRIKGQLFETGKKLNVTGFDELKQYITHELGGVMPQEVSNGNLE

SEQ ID NO: 169 - protein, 635 aa, Unknown
  Description of Unknown: Integrase B170 sequence
  SM00857,IPR036162,G3DSA:3.40.50.1390,IPR006119,PF07508,SSF53041 ,IPR011109,PTHR30461,Coil,PS51736,cd00338,PF00239
MPQLYSYIRWSSDRQEKGTTRNRQVAAAKAYADEAGLEMVEIIEPGVSAFRGKNRAGKLGDFIDAVKNNAIPSDSWLYCENLDRLSRDQVDEALRLFLELIGLGLTIVTGMDRKVYNRESIRQNPTDLMISILMFIRGNEESETKSNRTVGNVVALVERHKKGLSVNIKSVGRHPFWIDDSGSQYEAVKEHPVYWSIAREAIDMFLAGDGIYTVKRYLDQKYPNGLKGKEWDYQVLKKMRDNRALIGERTINVAGATYKLDNYYPWLCKDEAEFLTLAERKQQNNYKGKKDKVEEIKLLSGLQVLRCSKCGGTMHSFMNHGSARYICTNGVHLQKNCSGWSISAQLVEHCTMISLLIAYMDKSHKDGIDTTVIEEDISRKETLISDLESRIANMAQAIAIAPDVSALAVQLNAFDMERKNTILEIDKLKERLYSLKGKGSFGVDVTEFLVLIQWAVFTNMEDTDRNKIRKIISSIIESVVVDKTDGCITIKIKYYHKDEWLVFGGVNRKPYWAFTVEYSTDDEMGIEGKNSSDFISNPLFQKAVEQLDSIEQSYLNLFETANTMLGVVGYSEIRGSSFWPNTGQYERVNVEYEGVTYSIALNGRVPKIIASALEATGLSRKDFIARFKVCKAEKR

SEQ ID NO: 170 - protein, 634 aa, Unknown
  Description of Unknown: Integrase B171 sequence
  SM00857,G3DSA:1.10.10.2600,IPR036162,PS51737,G3DSA:3.40.50.1390, IPR006119,IPR038109,PF07508,SSF53041,IPR011109, PTHR30461,PS51736,cd00338,PF00239
MHNSEARRRKERQKEQIKQRYNVVIDPENYEYIPAKKQADYYDNDVNQRVAIYVRVSTDDVRQTTSYELQKKYYEEFVTRHPNWTLVNIYADEGISGTSLKHRDEFNRMIADCKAGKIDMIVTKSVSRFARNVEDFIGTVRSLAERRPPVGVFFESEAIFSLNDDSQMALTFQATMAEEESHTRSRSMEASLRMRLDHGVPLTPKLFGYTHDEDGHLQINPDEAPTVKLIFYMYLYGYSAQQIADTLTNQARSTYFGKSCWPSSGIVSILRNERHCGDVLTRKTVTENYRTHRTLKNRGEKPQSRYYNHHDAIIRRDDFNAVQRMLDNAKYGNKSILPELRVIHDGLLKGFVSINPRWSGFKEGDYLSASRSAYTDIPTAGAPSQIPADATFAVNAGDFDLRGFEITRTEFLGTHSQPFVTFADKKVKFSAACVRHFGAKRYVELLINPLEMKFAVRPTDSSNRSGVIISSNYSGKPQPREISAAAFSDTIFHLFGWNTACKYRINGILCEDAGQLVYIFDVADSETFIRSQELSVRAASTNEETIHPLSTLGKHVRAIPEQWVGTFGKEFYLHECSLSALEHMTRSNWSLNLQGQLFETGKKLHVTDFDELRQYIMKELGGTMPQEDRNGNME

SEQ ID NO: 171 - protein, 634 aa, Unknown
  Description of Unknown: Integrase B172 sequence
  PTHR30461:SF3,cd00338,SM00857,G3DSA:1.10.10.2600,IPR036162, PF13408,IPR025827,G3DSA:3.40.50.1390,PS51737,IPR006119, IPR038109,PF07508,SSF53041,IPR011109,PTHR30461,PS51736, Coil,PF00239
MARKKNIAAGLDAVIYARYSSHNQREVSIEQQIAECTKHAAALGLRIVGTYEDRAISGKTDNRPRFQQMMRDAEKGKFQAVVAWKSNRIGRNMLQAMVNEAKLDDYGVKVFYAEEDFDDTAAGRFALRNMMNVNQFYSENMAEDITRGLYDNANKCMANGRQPLGYKRGADGKVMLDEPAAAVVREIFTRVAAGDLFVDIARDLNAKGIKTSKGAAWNKGSFQSICQNERYKGIYIYGNVHIVDGIPRIVSDELWYKVQEAMRMKKNPVGTRHRVGAEDYLLTGKLRCGHCGSYMTGISGTSRNGELHYYYTCQKRRTEHACNKKNVRRDVIEPAIAQAIKMYCLTDDVIEWMADQTVQYWEKHDNDLQIEALEQQLAENKKATSNMLKAIEMGIITEATRSRMVELETENSKLTAQLSAAKRDVVKINREDLIDELHILRSKDIHDREVQAELFKDFLVAAYIYDDNRLKLVFSFMDKDNSVEIPLETGEDPPDGGDSPDAKMFVLPLECSTKKALYFVGSMVLFFLPKPIFGGCIASPAPFSGFCRRFRYNPQRLTLHRFQTGKRFEPSIRKKRKILIPTWVYSCCVRHEENRSESCRIVFPHMDVSRMGYGHCNIIYGQIRQKSLIFFVYL

SEQ ID NO: 172 - protein, 634 aa, Unknown
  Description of Unknown: Integrase B173 sequence
  SM00857,G3DSA:1.10.10.2600,IPR036162,PS51736,PS51737, G3DSA:3.40.50.1390,IPR006119,IPR038109,PF07508,IPR011109, SSF53041,PTHR30461,mobidb-lite,cd00338,PF00239
MNQNEAKLSKEEQKAKIRERYRGHVSSDTVVIPGKPQADLYDDTETKRVAVYARVSTDNVQQTSSYELQKNYYEDQVKRHPNWTLVGIYPDEGISGTSLQHRAKFNQMIADCRAGKIDLIITKSVSRFARNIVDCISLVRELASLNPPVGVFFESENIFTLKDNTEMSLSFVATMAQEESHIKSTIMNASIEMRFGREIYLTPVLLGYDHDEDGNLVINEEEANTVRLIFFMYLYGYTCQEIADTLTQLGRKTKKGNFTWSASSVLQQLRNERHCGALLARKTFTPHYLDHKSKKNTGERTQYYKKHHHEGIISYDDFIAVQHLIDNARYGNKGILPELQVIPEGALKGFVVINPRWAGFQAADYEVASESVYENEVFVPKSLRDVEAQSGDFDLRGYEIARVQFFNTQNRISVSLSNDYLLFSTACIRKFDNAQYVELLIHPHEHLLAVRKCDKDARNAIKWAKLDDNGNYGPRHISGAAFISTIFELFDWRLDCKYRVRGVRRQKDNEAVLVFDMRETEMFVPSSAPNQEGGSAAHAEDGLRPLIPAKNSIVAFPSAWADNFGSNFYRHAQARELAAIDQNGEWQIGEEAQPYSTQPELNVTTPEEAAFHIERIIRDMRQGGEMNGTIQPVE

SEQ ID NO: 173 - protein, 634 aa, Unknown
  Description of Unknown: Integrase B174 sequence
  SM00857,G3DSA:1.10.10.2600,IPR036162,PS51737,G3DSA:3.40.50.1390, IPR006119,IPR038109,PF07508,IPR011109,SSF53041,PTHR30461,PS51736 ,cd00338,PF00239
MNQNEAKLSKEEQKAKIRERYRGHVSSDTVVIPGKPQADIYDDSEMKRVAVYARVSTDNVQQTSSYELQKNYYEDQVQRHPNWVLVGIYPDEGISGTSLKHRDHFNQMIADCRAGKIDLIITKSVSRFARNIVDCISLVRELASLNPPVGVFFESENIFTLKDNTEMSLSFVATMAQEESHIKSTIMNASIEMRFGREIYLTPVLLGYDHDEDGNLVINEEEANTVRLIFFMYLYGYTCQEIADTLMQLGRKTKKGNVAWSASTVLQQLRNERHCGALLARKTFTPHYLDHKSKKNMGERTQYYKKHHHEGIISYDDFIAVQHLIDNARYGNKGILPELQVIPEGALKGFVLINPRWAGFQAADYEVASESVYEDEVFVPQSLRDVEAQSGDFDLRGYEIARVQFFDTQNRISVSLSNDYLLFSTACIRKFDNAQYVEMLIHPHEHLLAVRKCEKDARNAIKWAKLDDNGNYGPRHISGAAFISTIFELFDWRLDCKYRVRGVRRQKDNEAVLVFDMRETEMFVPNAAPDPDDGSAAPAEDGLRPLVPSKNSIVAFPSAWADNFGSNFYRHAQARELAAIDQNGEWQIGEEAQPYSTQPELNVTTPEEAAFHIERIIRDMHRGGEMNGTIQPVE

SEQ ID NO: 174 - protein, 633 aa, Unknown
  Description of Unknown: Integrase B175 sequence
  PTHR30461:SF3,SM00857,IPR006118,G3DSA:1.10.10.2600,IPR036162, PS51737,G3DSA:3.40.50.1390,Coil,IPR006119,IPR038109, PF07508,IPR011109,SSF53041,PTHR30461,PS00397, PS51736,cd00338,PF00239
MEYNEQNNTEKKNVAGIYIRVSTEDQVREGFSLGEQKEKLEALCKYKGYEIYKVYKDAGISAKDMTHRPQFQQMIEDMKSGKINYIVAYKLDRVTRSVRDLEILISTLEQYHCYLICDRDDVNTSTANGRFFIRMLTVLSQLEIEIVSERTKFGLGGAIKAGHIPGVCPFGYYRDTDKTIKIDNSTKDIVIRIYQMYLEGKSYQQIANILNDEKVPSPVKTKWGDSTIEKIINNRVYMGDFERYKKDKTRESEIYMNVVPPIISRAMWEDTQNQKGKNQRAYSRHRIYIFFQKLICPKCGRIMTGKGAGGKKSKYMYYTCEKCKIYFNEDDVEGTLINHILDFIEYDYHVNKFFYPLLAEKKDDESKEIEKEISKLTAQKDRLKKAYMNGIVEMDDFAEDFKVIDERLSILETKRINSIDLQEECYNPAHLIAQRDIEKETLIEGQMYKDVILNLWTMKSKEEKQAFISKFIESVALNKNEDGSINIEKVNLRSSFIEQVDKLYKKGVIDIPSTMETDGNLQNVRTSINLSAKQVNEYLDEIKKEMNINYLDLGEYHFNGEEFDETEGLKNEIATYKDKVVSFKIKKYEKPIRFFAIKEMKNFLAKPDGNVHLSVVTHVIPPESTKKKKSKNK

SEQ ID NO: 175 - protein, 633 aa, Unknown
  Description of Unknown: Integrase B176 sequence
  cd00338,SM00857,G3DSA:1.10.10.2600,IPR036162,PS51737, G3DSA:3.40.50.1390,mobidb-lite,IPR006119,IPR038109,PF07508, IPR011109,SSF53041,PTHR30461,PS51736,Coil, PF00239
MIDLDKRRLKEQQKARQRQRMQGRLDPDNYEYIPAKKPIDFYDNDVHQRVGIYARVSTDDVRQTTSYELQKKYYEDFVVRHPNWTLVRIYADEGISGTSLRKRDEFNQMISDCRAGKLDIIITKSVSRFARNVMICIGMVRELAELKPPVGVFFESECIFSLNDESQMALSFQATMAEEESHIRSRSMETSLRMRLDNGIPLTPKLLGYTHDMDGNLIVNEQEAPTVKLAFFMYLYGYSTQQIADVFIALGRRSYLGNIKWTSNSIVQILRNERHCGDVLTRKTFTPNFHDHLSKKNRGERPQSRYYNHHEPIVSRDDFIAVQRLLDNAKYRGKSVLPELRVIDSGMLKGYVSVNPRWAGFKSDDYIMASQSAYAEDEAEETYAKSEDKVIEIEVEPGDFDLRGFEVARSELFNPLNRATVVLSDQKIKFNTTCVRKFGNKNRVEILINPLERKLAVRPTDKANRNSVIFSKKEDGTYLPREIPASAFIGTLFELFGWKLDCKYRIIGSLYETDTEMAYVFDAVNTEAFFKSYVLPVQQLSPEGTALIEPLTTSGKRIRAIPKEWVNEFGELFYLQERSLAALESQSEEDWKLYMEGRMFESGKQLKVTSFDELQRYIKQELSVLTRPEVNHE

SEQ ID NO: 176 - protein, 633 aa, Unknown
  Description of Unknown: Integrase B177 sequence
  PTHR30461:SF3,cd00338,SM00857,G3DSA:1.10.10.2600,IPR036162, PF13408,PS51737,G3DSA:3.40.50.1390,IPR025827,IPR006119, IPR038109,PF07508,IPR011109,SSF53041,PTHR30461, PS51736,Coil,PF00239
MTVKKFPIDLSCLTEEEISQFQEDPYTLYNGDQDVALYLRYSSTGQSDQSIEGQLRDCRAFCKANHYRIVAIYVDRATTARKDVEKRVHLMEMVADSAKQNWEYVIVWKLDRFARNRNDSAIMKMRLRKNGVKVLSATEHLTDSPESIILESVLEGMAEFFSAELSQKVTRGMRESALKCHSVGGHIPLGYKVENHKLVVDPDTAHIVQEAFSLYANGESVADICRKFNSAGYKTAKNTEFNRSSFKAMFRNTRYIGTYTYKDIVIENGIPAIIDKELFETVQRRLSKTATAPARGKAKVDYLLSGKLFCGHCGASMNGESGAGRHGKVYHYYSCYTKKRKLGCDKRPLKKDYIEGIVAHDALNLLTDQLIDEIADMAIRQSEQDLINDTHIPQLTAQLSEVEKSIMNITAAIEKGIASEALMNRLVQLEHEKKTLNKEIKAEEKFVYRIDRDQIVFWLSQFKYGNIEDENFRRRLIDLLVNSVTVWDEPDGYKITTAYNLTSCKTKTFRVDKNPAAEEATGFDFGESECTTANLLISMGSRFLFYLRISFIHLFSNVFLTSFIQAFCQLICKALLSGCIQMPVDIGSRLNVAVSHPFLYVFQAATVIQQQTGATMTEFMESNVWHSIPFKHF

SEQ ID NO: 177 - protein, 632 aa, Unknown
  Description of Unknown: Integrase B178 sequence
  SM00857,IPR036162,G3DSA:3.40.50.1390,IPR006119,PF07508, SSF53041,IPR011109,PTHR30461,cd00338,PF00239
MPQLYSYIRWSSDRQEKGTTKNRQVAAAKAYAEEAGLEMVEILEPGTSAYRGKNRAGKLGDFIDAVKNNAIPSDSWLYCENLDRLSRDQVDEALRLFLELIGLGLTIVTGMDRKVYNRESIRQNPTDLMISILMFIRGNEESETKSNRTIGNVVALVERHKAGLPVNIKSVGRHPFWIDDSGSQYEAVKEHPVYWSIAREAIDMFLDGNGIYTVKRHLDKKYPNGLKGKEWDYQVLKKMRDNRALIGERTINAGGATYKLDNYYPWLCKDEAEYLTLAERKQQNNFKAKKDKVEEIKLLSGLQVLRCSKCGGTMHSFMNHGSARYICTNGVHLQKNCSGWSISAQLVEHCTIISLLIGYMNKRLKDGIDTTVIEEDLSRKETLITDLESRITNMAQAIAIAPNVSALAVQLNAFDMERKKTVLEVDKLKERLYSLKGKGSLEVDINEFMILIQWAVFTNMQDTDRNKIRKVISSIIESVIVDKTDGCITIKIKYHFKDEWLVFGGTDRKPHWAFKVEFSSVDNVSIRDEGFLTTSNLPLFNKAVEQLDKIEQSYLDLFNTANEMLEVVGYSEISGASFWPNTGKYDRVDIVYEGNTYSIALNGRVPKDIATALESTGLTRKEFIERYRIDQI

SEQ ID NO: 178 - protein, 631 aa, Unknown
  Description of Unknown: Integrase B179 sequence
  PTHR30461:SF3,SM00857,G3DSA:1.10.10.2600,IPR036162,PF13408, IPR025827,PS51737,G3DSA:3.40.50.1390,IPR006119,IPR038109,PF07508, IPR011109,SSF53041,PF00239,PTHR30461,PS51736, Coil,cd00338
MKKFPIDLSCLTEEEISQFQEDPYTLYNGDQNVAIYLRYSSTGQSDQSIEGQLRDCRTFCKANHYRIVAIYVDRATTARKDVEKRVHLMEMVADSAKQNWEYVIVWKLDRFARNRNDSAIMKMRLRKNGVKVLSATEHLTDSPESIILESVLEGMAEFFSAELSQKVTRGMRESALKCHSVGGHIPLGYKVENHKLVVDPDTAHIVQEAFSLYANGESVADICRKFNSAGYKTAKNTEFNRSSFKAMFRNTRYIGTYTYKDIVIENGIPAIIDKELFETVQRRLSKTATAPARGKAKVDYLLSGKLFCGHCGASMNGESGAGRHGKVYHYYSCYTKKRKLGCDKRPLKKDYIEGIVARDALNLLTDQLIDEIADMAIRQSEQDLINDTHIPQLTAQLTEVEKSITNITAAIEKGIASETLMNRLVQLEHEKKTLNKEIKAEEKFVYRIDRDQIVFWLSQFKYGNIEDEDFRRRLIDLLVNSVTVWDEPDGYKITTAYNLTSCKTKTFRVEKNPAAEEATGFDFGESECTTANLLISMGLRFLFYLRISFIHLFSNVFLTSFIQAFCQLICKALLSGGIQMPVDIGSRLNVAVSHPFLYVFQAATVIQQQTGATMTEFMESNVWHSIPFKHF

SEQ ID NO: 179 - protein, 631 aa, Unknown
  Description of Unknown: Integrase B180 sequence
  PTHR30461:SF3,SM00857,G3DSA:1.10.10.2600,IPR036162,PF13408, IPR025827,PS51737,G3DSA:3.40.50.1390,IPR006119,IPR038109, PF07508,IPR011109,SSF53041,PF00239,PTHR30461, PS51736,Coil,cd00338
MKKFPIDLSCLTEEEISQFQEDPYTLYNGDQDVALYLRYSSTGQSDQSIEGQLRDCRAFCKANHYRIVAIYVDRATTAHKDVEKRVHLMEMVADSAKQNWEYVIVWKLDRFARNRNDSAIMKMRLRKNGVKVLSATEHLTDSPESIILESVLEGMAEFFSAELSQKVTRGMRESALKCHSVGGHIPLGYKVENHKLVVNPDTAHIVQEAFSLYANGESVADICRKFNSVGYKTAKNTEFNRSSFKAMFRNTRYIGTYTYKDIVIENGIPAIIDKELFETVQRRLSKTATAPARGKAKVDYLLSGKLFCGHCGASMNGESGAGRHGKVYHYYSCYTKKRKLGCDKRPLKKDYIEGIVARDALNLLTDQLIDEIADMAIRQSEQDLINDTHIPQLTTQLSEVEKSIMNITAAIEKGIASETLMNRLVQLEHEKKTLNKEIKAEEKFVYRIDRDQIVFWLSQFKYGNIEDEDFRRRLIDLLVNSVTVWDEPDGYKITTAYNLTSCKTKTFRVEKNPAAEEATGFDFGESECTTANLLISMGSRFLFYLRISFIHLFSNVFLTSFIQAFCQLICKALLSGCIQMPVDIGSRLNVAVSHPFLYVFQAATVIQQQTGATMTEFMESNVWHSIPFKHF

SEQ ID NO: 180 - protein, 631 aa, Unknown
  Description of Unknown: Integrase B181 sequence
  PTHR30461:SF3,IPR036162,PS51737,IPR011109,PTHR30461, PF00239,G3DSA:1.10.10.2600,IPR006119,PF14287,SSF53041, IPR025378,SM00857,IPR025827,cd03770,IPR038109, mobidb-lite,PS51736,PF13408,G3DSA:3.40.50.1390,PF07508,Coil
MIRQTTQLAPVTALYARLSKDDELQGESNSISNQKQMLEDFARRNGLPNPTHFTDDGISGTRFDRPGFLAMMEEVEAGRVEAIVIKDMSRLGRDYLKVGQVMEVLRQRGVRLIAINDGVDSLKGDDDFTPFRNIMNEFYARDTSRKIRSVFKSKGMSGKHLTGTVIYGYLWDEKREHWLVDKEAAEVVRRIFSLTLEGYGPYQIACKLSTDRIEIPVVHLARFNEGVNRSKPVKDPYGWGSSTIVNILKKREYLGHTINFKTRKHFKDKKSHYVSEDEWTIFENTHEAIIDQQTFDLAQKIRSNVRRYPNGWGEAAPLTGLLYCADCGGKMYVHRTNNGKRISQYTCSNYTKVPCGTLCPTQHRINESAVLTLVSDTLRAIAEYSRNGRTEFIHTVQETQVAQQSADISKKRRRLAAAQKRAGELEKLICKIYEDNALGKLPDARYKALDAQYAKEQDALEIEIAELEKAVTGYEQSQKSAEKFIALIDKYENFDTLTNTMLNEFVEKILVHERARKGSQDTTQEIEIYFNFLGRYIPPSLQPVPLTPEEQEELRKKEERKDRLHQNYLKRKASGAQKRYENKIKAKKKAEMDAKKALIRAEDMKKGVFSTIGQLPKEEPRKGSIAASAAV

SEQ ID NO: 181 - protein, 630 aa, Unknown
  Description of Unknown: Integrase B182 sequence
  SM00857,G3DSA:1.10.10.2600,IPR036162,PS51736,PS51737, G3DSA:3.40.50.1390,IPR006119,IPR038109,PF07508,IPR011109, SSF53041,PTHR30461,mobidb-lite,cd00338,PF00239
MSKSTKKAADQAEREKVHKRYSNRREPDVIYPARKQVDFYDADVHQRVAVYVRVSTDNLGQETSYELQKNYYEEFVLKHPNWSLVKIYADKGISGTSTKHRVALNQMLTDSRAGKIDLIITKSVSRLARNTVDCITMVRNLAELRNPVGVFFESECIFSLNEDTSMPLSFLASIAENESRIRSRSMEVSLAQRLNGGLPLTPKLLGYSHDTDGKLVINPDEAPTVKLIFYMYLSGYSSAYIAKTLEELGKTTFLGNTKWTSSTVIQILRNERHCGDVLTRKTWTPDVISHKSKKNRGECQQSLYRGEHEAIVSRDDYIAVQHMINNAKYGGKSILPELRVIESGILKGFVTISPKWAGFKAADYLQASMSVYTDDTYYGQPAEGDATFEVAAGDFDLRGFEVTNASLFDANKRPYVLFQSKQIKFSTDCVRQFGKDNKVELLIHPGLRKLAVRRASKDSRQFVQWSRPDDGKYYVKEIPCSAFGETLFELLGWETAYKFKAYGSLLESDGDSVFLFDLSEPAIFIQSYLMTGTDAPGSGNSGLSPLSVSGKRIRAVPKKLADRFGSDFYSHRLTASSLELQSEDAWKLWLEGQLFETSEKLHVTKFDEMQRFINEQLSASKQLEGADYNA

SEQ ID NO: 182 - protein, 630 aa, Unknown
  Description of Unknown: Integrase B183 sequence
  SM00857,G3DSA:1.10.10.2600,IPR036162,PS51737,G3DSA:3.40.50.1390, mobidb-lite,IPR006119,IPR038109,PF07508,IPR011109,SSF53041, PTHR30461,PS51736,cd00338,PF00239
MSKSAKKAADQAEREKVHKRYSNRREPDVIYPAKKQVDFYDADVHQRVAVYVRVSTDNLGQETSYELQKNYYEEFVLKHPNWKLVKIYADKGISGTSTKHRAELNQMLTDSRAGKIDLIITKSVSRLARNTVDCITMVRNLAELRNPVGVFFESECIFSLNEDTNMPLSFLASIAENESRIRSRSMEVSLAQRLNGGLPLTPKLLGYSHDADGKLVINPDEAPTVKLIFYMYLSGYSSSHIAKTLEALGKRTFLGNSKWTSGTVIQVLRNERHCGDVLTRKTFTPDVISHKSKKNRGERQQSLYKGEHEAIVSRDDYIAVQHMINNAKYGGKSILPELRVIGSGVLKGFVTISPKWAGFKAADYLQASMSVYTDDTYYGQPAEGDATFEVAAGDFDLRGFEVTNSSLFDANKRPYVLFQSKQIKFSTDCVRQFGKDNKVELLIHPGLRKLAVRRASKDSRQCVQWSRPDDGKYYAKEIPCTAFGGTLFELLDWETDFKFRAYGRLLQNEGDSVFLFDLSEPEIFIQSYLMTGTDSPISGDGELSPLSVSGKRIRAVPKKLADRFGSDFYSHRLTSSSPELQSEDAWKLWLEGQLFETGEKLQVTKFDEMQRFIAEQLAPIKQMEEVDFNA

SEQ ID NO: 183 - protein, 630 aa, Unknown
  Description of Unknown: Integrase B184 sequence
  SM00857,G3DSA:1.10.10.2600,IPR036162,PS51737,G3DSA:3.40.50.1390, mobidb-lite,IPR006119,IPR038109,PF07508,IPR011109, SSF53041,PTHR30461,PS51736,cd00338,PF00239
MSKSAKKAADQAEREKVHKRYSNRREPDVIYPAKKQVDFYDADIHQRVAVYVRVSTDNLGQETSYELQKNYYEEFVLKHPNWKLVKIYADKGISGTSTKHRVELNQMLTDSRAGKIDLIITKSVSRLARNTVDCITMVRNLAELRNPVGVFFESECIFSLNEDTNMPLSFLASIAENESRIRSRSMEVSLAQRLNGGLPLTPKLLGYSHDADGKLVINPDEAPTVKLIFYMYLSGYSSSHIAKTLEALGKRTFLGNSKWTSGTVIQVLRNERHCGDVLTRKTFTPDVISHKSKKNRGERQQSLYKGEHEAIVSRDDYIAVQHMINNAKYGGKSILPELRVIGSGVLKGFVTISPKWAGFKAADYLQASMSVYTDDTYYGQPAEGDATFEVAAGDFDLRGFEVTNSSLFDANKRPYVLFQSKQIKFSTDCVRQFGKDNKVELLIHPGLRKLAVRRASKDSRQCVQWSRPDDGKYYAKEIPCTAFGGTLFELLDWETDFKFRAYGRLLQNEGDSVFLFDLSEPEIFIQSYLMTGTDSPISGNGELSPLSVSGKRVRAVPKKLADRFGSDFYSHRLTSSSPELQSEDAWKLWLEGQLFETGEKLRVTKFDEMQRFIAEQLAPIKQMEEVDFNA

SEQ ID NO: 184 - protein, 630 aa, Unknown
  Description of Unknown: Integrase B185 sequence
  SM00857,G3DSA:1.10.10.2600,IPR036162,PS51736,PS51737,G3DSA:3. 40.50.1390,IPR006119,IPR038109,PF07508,IPR011109,SSF53041, PTHR30461,mobidb-lite,cd00338,PF00239
MSKSAKKAADQAEREKVHKRYSNRREPDVIYPAKKQVDFYDADIHQRVAVYVRVSTDNLGQETSYELQKNYYEEFVLKHPNWKLVKIYADKGISGTSTKHRVELNQMLADSSAGKIDLIITKSVSRLARNTVDCITMVRNLAELRNPVGVFFESECIFSLNEDTNMPLSFLASIAENESRIRSRSMEVSLAQRLNGGLPLTPKLLGYSHDTDGKLVINPDEAPTVKLIFYMYLSGYSSSHIAKTLEALGKRTFLGNSKWTSGTVIQVLRNERHCGDVLTRKTFTPDVISHKSKKNRGERQQSLYKGEHEAIVSRDDYIAVQHMINNAKYGGKSILPELRVIESGVLKGFVTISPKWAGFKAADYLQASMSVYTDDTYYGQPAEGDATFEVAAGDFDLRGFEVTNASLFDANKRPYVLFQSKQIKFSTDCVRQFGKDNKVELLIHPGLRKLAVRRASKDSRQCVQWSRPDDGKYYAKEIPCTAFGGTLFELLDWETDFKFRAYGRLLQNEGDAVFLFDLSEPEIFIQSYLMTGTDSPISGDGELSPLSVSGKRVRAVPKKLADRFGSDFYSHRLTSSSPELQSEDAWKLWLEGQLFETGEKLRVTQFDEMQRFIAEQLAPIKQMEEVDFNA

SEQ ID NO: 185 - protein, 630 aa, Unknown
  Description of Unknown: Integrase B186 sequence
  SM00857,G3DSA:1.10.10.2600,IPR036162,PS51736,PS51737, G3DSA:3.40.50.1390,IPR006119,IPR038109,PF07508,IPR011109, SSF53041,PTHR30461,mobidb-lite,cd00338,PF00239
MSKSAKKAADQAEREKVHKRYSNRREPDVIYPAKKQVDFYDADIHQRVAVYVRVSTDNLGQETSYELQKNYYEEFVLKHPNWKLVKIYADKGISGTSTKHRVELNQMLADSRAGKIDLIITKSVSRLARNTVDCITMVRNLAELRNPVGVFFESECIFSLNEDTNMPLSFLASIAENESRIRSRSMEVSLAQRLNGGLPLTPKLLGYSHDTDGKLVINPDEAPTVKLIFYMYLSGYSSSHIAKTLEALGKRTFLGNSKWTSGTVIQVLRNERHCGDVLTRKTFTPDVISHKSKKNRGERQQSLYKGEHEAIVSRDDYIAVQHMINNAKYGGKSILPELRVIESGVLKGFVTISPKWAGFKAADYLQASMSVYTDDTYYGQPAEGDATFEVAAGDFDLRGFEVTNSSLFDANKRPYVLFQSKQIKFSTDCVRQFGKDNKVELLIHPGLRKLAVRRASKDSRQCVQWSRPDDGKYYAKEIPCTAFGGTLFELLDWETDFKFRAYGRLLQNEGDSVFIFDLSEPEIFIQSYLMTGTDSPISGDGELSPLSVSGKRVRAVPKKLADRFGSDFYSHRLTSSSPELQSEDAWKLWLEGQLFETGEKLRVTKFDEMQRFIAEQLAPIKQKDEVDFNA

SEQ ID NO: 186 - protein, 630 aa, Unknown
  Description of Unknown: Integrase B187 sequence
  SM00857,G3DSA:1.10.10.2600,IPR036162,PS51736,PS51737,G3DSA:3. 40.50.1390,IPR006119,IPR038109,PF07508,IPR011109,SSF53041, PTHR30461,mobidb-lite,cd00338,PF00239
MSKSAKKAADQAEREKVHKRYSNRREPDVIYPAKKQVDFYDADIHQRVAVYVRVSTDNLGQETSYELQKNYYEEFVLKHPNWKLVKIYADKGISGTSTKHRVELNQMLTDSSAGKIDLIITKSVSRLARNTVDCITMVRNLAELRNPVGVFFESECIFSLNEDTNMPLSFLASIAENESRIRSRSMEVSLAQRLNGGLPLTPKLLGYSHDADGKLVINPDEAPTVKLIFYMYLSGYSSSHIAKTLEALGKTTFLGNTKWTSGTVIQVLRNERHCGDVLTRKTFTPDVISHKSKKNRGERQQSLYKGEHEAIVSRDDYIAVQHMINNAKYGGKSILPELRVIGSGVLKGFVTISPKWAGFKAADYLQASMSVYTDDTYYGQPAEGDATFEVAAGDFDLRGFEVTNSSLFDANKRPYVLFQSKQIKFSTDCVRQFGKDNKVELLIHPGLRKLAVRRAAKDSRQCVQWSRPDDGKYYAKEIPCTAFGGTLFELLDWETDFKFRAYGRLLQNEGDSVFLFDLSEPEIFIQSYLMTGTDSPISGDGELSPLSVSGKRIRAVPKKLADRFGSDFYSHRLTSSSPELQSEDAWKLWLEGQLFETGEKLRVTKFDEMQRFIAEQLAPIKQMEEVDFNA

SEQ ID NO: 187 - protein, 629 aa, Unknown
  Description of Unknown: Integrase B188 sequence
  PTHR30461:SF3,SM00857,IPR036162,PF13408,IPR025827, G3DSA:3.40.50.1390,IPR006119,PF07508,SSF53041,IPR011109, PTHR30461,Coil,cd00338,PF00239
MPQLYSYIRWSTDRQDKGTTRNRQLAAAKAYADENGLEMVEILEPGVSAFRGKNRTEKLGGFIDAVKNNAIPSDSYLYCENLDRISRDQVDKALSLFLELIGLGLTIITGMDRKVYNRDTIRQNPTDLMISILMFIRGNEESETKSNRTVGNVVALVERHKEGLPVNIKSVGRHPFWIDDTGSQYEAVKKHPFYWNIAREIIDMFLSGNGVYSVKKYLDEKYPNGLKGREWDYQVLKKMRDNRALIGERTINLRGVPYKLENYYPWLCKDEAEFFLLEKRKQQNNYKSKKEGADTIKLLSGLSILRCSKCGGTMHSFMNHGKARYICTNGVHLQKNCSGWSITAQLVEHCTMIALLIGYMDKSRKNGSDTTLIEEELNEKEKFIKALDSKISNLVTAIAIAPDVNSLAHSLNEINSKRKELVLSVEKLKERLVSFQGKGSFEVDIMEFLILIQWAVFTNMEDNDRDKIRKIIDAIIEYIVVDKTNDCITIKIKYYGNDEVLVFGGVDRKPHWRFSIDFDTGKEGALTVLENDLKDVPEIQKAVSYLHKLEKGYLAMYDSAVTMLAEVGYPEIKGTQFWPNTGKHEKVTVAFDGVEHTISFNGRLPKAIASAIEKTGLTRQQFIEKFKIQ

SEQ ID NO: 188 - protein, 629 aa, Unknown
  Description of Unknown: Integrase B189 sequence
  PTHR30461:SF3,SM00857,G3DSA:1.10.10.2600,IPR036162,PF13408, PS51737,G3DSA:3.40.50.1390,IPR025827,IPR006119,IPR038109, PF07508,SSF53041,IPR011109,PTHR30461,Coil,PS51736,cd00338,PF00239
MTAVIYARYSSDNQREESIEGQIRECTAYAEKNDITIVKHYIDRAISAKTDNRPQFQQMIKDSDKKLFDIVLVWKLDRFARNRYDSARYKTQLKKNGVKLMSATEIISEGPEGIILESVLEGYAEYYSADLAEKVVRGQTENILKGRCNGGRGTFGYTLDSERKFHIDPLASSFVLESFKKYDEGSTMKEIRDWLNENGIKNPVGGAFTYNSVEHMLKNRRYIGELKFRDVVVPDAIPPIIPLELFEDVQEKIAKNKKAPARRKAEDDYLLTTKLHCGYCGALMFGESGTSRTGEVHRYYKCATAKKHKGCKKKTVRKQWLEDLVVNETMKLVEDDASMNAIIAKVMELQNQESTDLPIYEKQLKETETGITNMLNAIQMGILTSSTKERLEALEEQRKELQARIAEERLAKPKMKEEFVRFWLLRFRKLDMTQPEQRQALVDTFINAIYLYDDKVLITFNYKEGTETVAFGEAVKAEKSSDMSARGAPRKTSTLCVLVFLFRCERGLEKGGGALRRKQSPSGVLLSLRFPTRRNIYREDCRKNRKSEPFLDRRRVRIFCFRVEYIPWRAARVTPSGWLPAALGIALRFSSYRVGHLWRSALPPTHKWTPPQRPYRSCKWTGPCFRCFP

SEQ ID NO: 189 - protein, 628 aa, Unknown
  Description of Unknown: Integrase B190 sequence
  SM00857,G3DSA:1.10.10.2600,IPR036162,PF13408,IPR025827, G3DSA:3.40.50.1390,PS51737,IPR006119,IPR038109,PF07508, SSF53041,IPR011109,PTHR30461,Coil,cd00338, PF00239
MKAAFLIRCSTKNQDLNRQTRDLTRLAKSMGYEYDLENLVYGEKITGKDDVTKKNRDSIDRLLRAAKEQRFNVVLVSEVSRMSRDPASGRIYVRLLINMNIPVYFKDIDLWTINPETGKKVRDAELVIGAAFDAAWKYLKSMKTQIASARRNELDNNRISIGQPYFGYKRYEGTDKSKKNQIVVNEEEAEVVQAVYNEYLKEGATLKSTALAITNMYGEKLNRKFSLGTIEHILTYESYATGIKKVNLKDPDTDEVEVFDVSTPIIIDKELYEAATNKRKKNRVKDEPYPNQQVYLLSKLIKCPDCGYTLTPRRKAGEFGQTYRLVNGKPAVSWFCMSGINNITNCTNRTSIANEKLEPIIWELVKKELIGYANMNDEKREEQIRECEEKIEYQNYSIQNFTKEIDKLKKRLSTAYQFSINAAEMAGDDEDMRTMAMEEFNRTAKGVRQEMKNFEKSIEQAKGELEKLRDLKTFYSQPTLPKDYLEQIEGNFTEKRNLVKQLITKIVPYRITTFKKKERESGVKTCNKMITVKNGAVLLEVYTIGGVYNVFYNANSKFQVKTAYYVHGEYATFQNGIRKYPAYNEGEYFVISNANMVMETDDIDEVVTVNEFVDIAIANNWVIEYQYI

SEQ ID NO: 190 - protein, 628 aa, Unknown
  Description of Unknown: Integrase B191 sequence
  SM00857,G3DSA:1.10.10.2600,IPR036162,PF13408,IPR025827, PS51737,G3DSA:3.40.50.1390,IPR006119,IPR038109,PF07508, SSF53041,IPR011109,PTHR30461,Coil,cd00338, PF00239
MKAAFLIRCSTKNQDLNRQTRDLTRLAKSMGYEYDLENLVYGEKITGKDDVTKKNRDSIDRLLRAAKEQRFDVVLVSEVSRMSRDPASGRIYVRLLINMNIPVYFKDIDLWTINPETGKKVRDAELVIGAAFDAAWKYLKSMKTQIASARRNELDNNRISIGQPYFGYKRYEGTDKSKKNQIVVNEEEAEVVQAVYNEYLKEGATLKSTALAITDKYGEKLNRKFSLGTIEHILTYESYATGIKKVNLKDPDTDEVEVFDVSTPIIIDKELYEAAANKRKKNRVKDEPYPNQQVYLLSKLIKCPDCGYTLTPRRKAGEFGQTYRLVNGKPAVSWLCMSGINNITDCTNRTSIANEKLEPIIWELVKKELIGYANMNDEKREEQIRECEEKIEYQNYSIQNFTKEIDKLKKRLSTAYQFSINAAEMAGDDEDMRTMAMEEFNRTAKGVRQEMKNFEKSIEQAKGELEKLRDLKTFYSQPTLPKDYLEQIEGNFTEKRNLVKQLITKIVPYRITTFKKKERESGVKTCNKMITVKNGAVLLEVYTIGGVYNVFYNANSKFQVKTAYYVHGEYATFQNGIRKYPAYDEGEYFVISNANMVMETDDIDEVVTVNEFVDIAIANNWVIEYQYQ

SEQ ID NO: 191 - protein, 628 aa, Unknown
  Description of Unknown: Integrase B192 sequence
  cd00338,SM00857,G3DSA:1.10.10.2600,IPR036162,PF13408, IPR025827,G3DSA:3.40.50.1390,PS51737,IPR006119,IPR038109, PF07508,IPR011109,SSF53041,PTHR30461,Coil, PF00239
MKAAFLIRCSTKNQDLNRQTRDLTRLAKSMGYEYDLENLVYGEKITGKDDVTKKNRDSIDRLLRAAKEQRFDVVLVSEVSRMSRDPASGRIYVRLLINMNIPVYFKDIDLWTINPETGKKVRDAELVIGAAFDAAWKYLKSMKTQIASARRNELDNNRISIGQPYFGYKRYEGTDKSKKNQIVVNEEEAEVVQAVYNEYLKEGATLKSTALAITDKYGEKLNRKFSLGTIEHILTYESYATGIKKVNLKDPDTDEVEVFDVSTPIIIDKELYEAATNKRKKNRVKDEPYPNQQVYLLSKLIKCPDCGYTLTPRRKAGEFGQTYRLVNGKPAVSWLCMSGINNITDCTNRTSIANEKLEPIIWELVKKELIGYANMNDEKREEQIRECEEKIEYQNYSIQNFTKEIDKLKKRLSTAYQFSINAAEMAGDDEDMRTMAMEEFNRTAKGVRQEMKNFEKSIEQAKGELEKLRDLKTFYSQPTLPKDYLEQIEGNFTEKRNLVKQLITKIVPYRITTFKKKERESGVKTCNKMITVKNGAVLLEVYTIGGVYNVFYNANSKFQVKTAYYVHGEYATFQNGIRKYPAYDEGEYFVISNANMVMETDDIDEVVTVNEFVDIAIANNWVIEYQYQ

SEQ ID NO: 192 - protein, 628 aa, Unknown
  Description of Unknown: Integrase B193 sequence
  SM00857,G3DSA:1.10.10.2600,IPR036162,PF13408,PS51737, G3DSA:3.40.50.1390,IPR025827,IPR006119,IPR038109,PF07508, IPR011109,SSF53041,PTHR30461,Coil,cd00338, PF00239
MKAAFLIRCSTKYQDLDRQVSDLTRLAKSMGYEYDLENLVYGEKITGKDDVTKKNRDSIDRLLRAAKEQRFDVVLVSEVSRMSRDPASGRIYVRLLINMNIPVYFKDIDLWTINPETGKKVRDAELVIGAAFDAAWKYLKSMKTQIASARRNELDNNRISIGQPYFGYKRYEGTDKSKKNQIVVNEEEAEVVQAVYNEYLKEGATLKSTALAITDKYGEKLNRKFSLGTIEHILIYESYATGIKKVNLKDPDTDEVEVFDVSTPIIIDKELYEAAANKRKNNRVKDEPYPNQQVYLLSKLIKCPDCGYTLTPRRKAGEFGQTYRLVNGKPAVSWLCMSGINNITDCTNRTSIANEKLEPIIWELVKKELIGYANMNDEKREEQIRECEEKIEYQNYSIQNFTKEIDKLKKRLSTAYQFSINAAEMAGDDEDMRTMAMEEFNRTAKGVRQEMKNFEKSIEQAKGELEKLRDLKTFYSQPTLPKDYLEQIEGNFTEKRNLVKQLITKIVPYRITTFKKKERESGVKTCNKMITVKNGAVLLEVYTIGGVYNVFYNANSKFQVKTAYYVHGEYATFQNGIRKFPAYDEGEYFVISNANMVMETDNIDEVVTVNEFVDIAIANNWVIEYQYI

SEQ ID NO: 193 - protein, 628 aa, Unknown
  Description of Unknown: Integrase B194 sequence
  SM00857,G3DSA:1.10.10.2600,IPR036162,PF13408,IPR025827, G3DSA:3.40.50.1390,PS51737,IPR006119,IPR038109,PF07508, SSF53041,IPR011109,PTHR30461,Coil,cd00338, PF00239
MKAAFLIRCSTKNQDLNRQTRDLTRLAKSMGYEYDLENLVYGEKITGKDDVTKKNRDSIDRLLRAAKEQRFNVVLVSEVSRMSRDPASGRIYVRLLINMNIPVYFKDIDLWTINPETGKKVRDAELVIGAAFDAAWKYLKSMKTQIASARRNELDNNRISIGQPYFGYKRYEGTDKSKKNQIVVNEEEAEVVQAVYNEYLKEGATLKSTALAITNMYGEKLNRKFSLGTIEHILTYESYATGIKKVNLKDPDTDEVEVFDVSTPIIIDKELYEAATNKRKKNRVKDEPYPNQQVYLLSKLIKCPDCGYTLTPRRKAGEFGQTYRLVNGKPAVSWFCMSGINNITNCTNRTSIANEKLEPIIWELVKKELIGYANMNDEKREEQIRECEEKIEYQNYSIQNFTKEIDKLKKRLSTAYQFSINAAEMAGDDEDMRTMAMEEFNRTAKGVRQEMKNFEKSIEQAKGELEKLRDLKTFYSQPTLPKDYLEQIEGNFTEKRNLVKQLITKIVPYRITTFKKKERESGVKTCNKVITVKNGAVLLEVYTIGGVYNVFYNANSKFQVKTAYYVHGEYATFQNGIRKFPAYDEGEYFVISNANMVMETDDIDEVVTVNEFVDIAIANNWVIEYQYI

SEQ ID NO: 194 - protein, 628 aa, Unknown
  Description of Unknown: Integrase B195 sequence
  PTHR30461:SF3,SM00857,G3DSA:1.10.10.2600,IPR036162,PF13408, IPR025827,PS51737,G3DSA:3.40.50.1390,IPR006119,IPR038109, PF07508,SSF53041,IPR011109,PTHR30461,Coil, cd00338,PF00239
MKAAFLIRCSTKNQDLNRQTRDLTRLAKSMGFEYDLENLVYGEKITGKDDVTKKNRDSIDRLLRAAKEQRFDVVLVSEVSRMSRDPASGRIYVRLLINMNIPVYFKDIDLWTINPETGKKVRDAELVIGAAFDAAWKYLKSMKTQIASARRNELDNNRISIGQPYFGYKRYEGIDKSKKNQIVVNETEAEVVLAVYNEYLKEGATLKSTALAITDKYGEKLNRKFSLGTIEHILTYENYATGIKKVNLKDPDTDEVEVFDVSTPIIIDKELYEAATNKRKKNRVKDEPYPNQQVYLLSKLIKCPDCGYTLTPRRKAGEFGQTYRLVNGKPAVSWLCMSGINNASDCTSRTAIANEKLEPIIWELVKKELIGYANMNDEKREEQIRECEEKIEYQNYSIQNFTKEIEKLKKRLSTAYQFSINAAEMAVDDEDMRTMAMEEFNRTAKGVRQEMKNFEKSIEQAKGELEKLRDLKTFYSQPTLPKDYLERIEGNFTEKRNLVKQLITQIVPYRINTFKKKERESGAKTCNKMITVKNGAVLLEVYTIGGVYNVFYNANSKFQVKTAYYVHGEYATFQNGIRKYPAYDEGEYFVISNANMVMETDDIDEVVTVNEFVDIAIANNWVIEYQYQ

SEQ ID NO: 195 - protein, 628 aa, Unknown
  Description of Unknown: Integrase B196 sequence
  SM00857,G3DSA:1.10.10.2600,IPR036162,PF13408,IPR025827, G3DSA:3.40.50.1390,PS51737,IPR006119,IPR038109,PF07508, SSF53041,IPR011109,PTHR30461,Coil,cd00338, PF00239
MKAAFLIRCSTKNQDLNRQTRDLTRLAKSMGYEYDLENLVYGEKITGKDDVTKKNRDSIDRLLRAAKEQRFDVVLVSEVSRMSRDPASGRIYVRLLINMNIPVYFKDIDLWTINPETGKKVRDAELVIGAAFDAAWKYLKSMKTQIASARRNELDNNRISIGQPYFGYKRYEGIDKSKKNQIVVNEEESEVVQAVYNEYLKEGATLKSTALAITDKYGEKLNRKFSLGTIEHILTYESYATGIKKVNLKDPDTDEVEVFDVSTPIIIDKELYEAAANKRKNNRVKDEPYPNQQVYLLSKLIKCPDCGYTLTPRRKAGEFGQTYRLVNGKPAVSWLCMSGINNITDCTNRTSIANEKLEPIIWELVKKELIGYANMNDEKRGEQIRECEEKIEYQNYSIQNFIKEIEKLKKRLSTAYQFSINAAEMAGDDEDMRTMAMEEFNRTAKGVRQEMKNFEKSIEQAKGELEKLRDLKTFYSQPTLPKDYLEQIEGNFTEKRNLVKQLITKIVPYRITTFKKKERESGVKTCNKMITVKNGAVLLEVYTIGGVYNVFYNANSKFQVKTAYYVHGEYATFQNGIRKYPAYDEGEYFVISNANMVMETDDIDEVVTVNEFVDIAIANNWVIEYQYI

SEQ ID NO: 196 - protein, 628 aa, Unknown
  Description of Unknown: Integrase B197 sequence
  PTHR30461:SF3,SM00857,G3DSA:1.10.10.2600,IPR036162,PF13408, PS51737,G3DSA:3.40.50.1390,IPR025827,IPR006119,IPR038109, PF07508,SSF53041,IPR011109,PTHR30461,Coil, cd00338,PF00239
MKAAFLIRCSTKNQDLNRQTRDLTRLAKSMGYEYDLENLVYGEKITGKDDVTKKNRDSIDRLLRAAKEQRFDVVLVSEVSRMSRDPASGRIYVRLLINMNIPVYFKDIDLWTINPETGKKVRDAELVIGAAFDAAWKYLKSMKTQIASARRNELDNNRISIGQPYFGYKRYEGTDKSKKNQIVVNEEEAEVVQAVYNEYLKEGATLKSTALAITDKYGEKLNRKFSLGTIEHILTYESYATGIKKVNLKDPDTDEVEVFDVSTPIIIDKELYEAAANKRKKNRVKDEPYPNQQVYLLSKLIKCPDCGYTLTPRRKAGEFGQTYRLVNGKPAVSWLCMSGINNITDCTNRTSIANEKLEPIIWELVKKELIGYANMNDEKREEQIRECEEKIEYQNYSIQNFTKEIDKLKKRLSTAYQFSINAAEMAGDDEDMRTMAMEEFNRTAKGVRQEMKNFEKSIEQAKGELEKLVDLKTFYSQPTLPKDYLEQIEGNFTEKRNLVKQLITKIVPYRITTFKKKERESGVKTCNKMITVKNGAVLLEVYTIGGVYNVFYNANSKFQVKTAYYVHGEYATFQNGIRKYPAYDEGEYFVISNANMVMETDDIDEVVTVNEFVDIAIANNWVIEYQYI

SEQ ID NO: 197 - protein, 628 aa, Unknown
  Description of Unknown: Integrase B198 sequence
  SM00857,G3DSA:1.10.10.2600,IPR036162,PF13408,IPR025827, G3DSA:3.40.50.1390,PS51737,IPR006119,IPR038109,PF07508, SSF53041,IPR011109,PTHR30461,Coil,cd00338, PF00239
MKAAFLIRCSTKNQDLNRQTRDLTRLAKSMGYEYDLENLVYGEKITGKDDVTKKNRDSIDRLLRAAKEQRFDVVLVSEVSRMSRDPASGRIYVRLLINMNIPVYFKDIDLWTINPETGKKVRDAELVIGAAFDAAWKYLKSMKTQIASARRNELDNNRISIGQPYFGYKRYEGTDKSKKNQIVVNEEEAEVVQAVYNEYLKEGATLKSTALAITDKYGEKLNRKFSLGTIEHILTYESYATGIKKVNLKDPDTDEVEVFDVNTPIIIDKELYEAATNKRKKNRVKDEPYPNQQVYLLSKLIKCPDCGYTLTPRRKAGEFGQTYRLVNGKPAVSWLCMSGINNITDCTNRTSIANEKLEPIIWELVKKELIGYANMNDEKREEQIRECEEKIEYQNYSIQNFTKEIDKLKKRLSTAYQFSINAAEMAGDDEDMRTMAMEEFNRTAKGVRQEMKNFEKSIEQAKGELEKLRDLKTFYSQPTLPKDYLEQIEGNFTEKRNLVKQLITKIVPYRITTFKKKERESGVKTCNKMITVKNGAVLLEVYTIGGVYNVFYNANSKFQVKTAYYVHGEYATFQNGIRKFPAYDEGEYFVINNANMVMETDDIDEVVTVNEFVDIAIANNWVIEYQYI

SEQ ID NO: 198 - protein, 628 aa, Unknown
  Description of Unknown: Integrase B199 sequence
  PTHR30461:SF3,SM00857,G3DSA:1.10.10.2600,IPR036162,PF13408, IPR025827,PS51737,G3DSA:3.40.50.1390,IPR006119,IPR038109, PF07508,SSF53041,IPR011109,PTHR30461,Coil, PS51736,cd00338,PF00239
MHGAYILARYSTDRQNEDSIEVQVSACRKWCDERSLPVLDVFADEATSGMKDTRPEYARMMRQLDRGGADTVVIYDQSRMFRKMSAWFDFRDRLARQGVRVVSVTQPMIGGDLRDPANFVAEGSMALFNQMWVLQTRQKVVEKMRFMARQGLHTGGTPPLGFRVEGKRLVIDEAEAETVRLIFGRYAAGWTYREIIRQLNAEGRHTKTGGEFGTNSLHDMLKNPKYVGDLVYGKVEKRPDGSRNSHAVADNQIMIEGALPAIVDRETWDKVQAKMKENKREAVGRPASAREYPLKGKVFCRECKSAMVVTASNRGGKKYFYYACAAKHRKGLCDNSPIPVGGLEALVADAVRQRLGQPESVEGLIRILREERSKLSGSAVQRLCELQKRDREIAKQLDAAVNAVLGGLHSPTLAAKVNALEAERAKIAHDMQQLRAQVSGAEIDEPHLRELLALAMQDDAAVLSIVVRVEVGKDEIAVWTLLDADPNGDFDFAEDGVPITPSEVSPSYNNSGCPATGTSVRRSKHRSVSALRRKLHYVSSFFLLNCDPLCWARSLVFMFRCISIQNLSAAALPAVGVFHAVYLIWLAVAAHQVTDVLVEQVVFVVIASYRLPDCLQRFQTHFAGCRGI

SEQ ID NO: 199 - protein, 628 aa, Unknown
  Description of Unknown: Integrase B200 sequence
  SM00857,G3DSA:1.10.10.2600,IPR036162,PF13408,IPR025827, G3DSA:3.40.50.1390,PS51737,IPR006119,IPR038109,PF07508, IPR011109,SSF53041,PTHR30461,Coil,cd00338, PF00239
MKAAFLIRCSTKNQDLNRQTRDLTRLAKSMGYEYDLENLVYGEKITGKDDVTKKNRDSIDRLLRAAKEQRFDVVLVSEVSRMSRDPASGRIYVRLLINMNIPVYFKDIDLWTINPETGKKVRDAELVIGAAFDAAWKYLKSMKTQIASARRNELDNNRISIGQPYFGYKRYEGIDKSKKNQIVVNEEESEVVQAVYNEYLKEGATLKSTALAITDKYGEKLNRKFSLGTIEHILTYESYATGIKKVNLKDPDTDEVEVFDVSTPIIIDKELYEAAANKRKNNRVKDEPYPNQQVYLLSKLIKCPDCGYTLTPRRKAGEFGQTYRLVNGKPAVSWLCMSGINNITDCTNRTSIANEKLEPIIWELVKKELIGYANMNDEKRGEQIRECEEKIEYQNYSIQNFTKEIEKLKKRLSTAYQFSINAAEMAGDDEDMRTMAMEEFNRTAKGVRQEMKNFEKSIEQAKGELEKLRDLKTFYSQPTLPKDYLEQIEGNFTEKRNLVKQLITKIVPYRIITFKKKERESGVKTCNKMITVKNGAVLLEVYTIGGVYNVFYNANSKFQVKTAYYVHGEYATFQNGIRKYPAYDEGEYFVISNANMVMETDDIDEVVTVNEFVDIAIANNWVIEYQYI

SEQ ID NO: 200 - protein, 628 aa, Unknown
  Description of Unknown: Integrase B201 sequence
  SM00857,G3DSA:1.10.10.2600,IPR036162,PF13408,IPR025827, G3DSA:3.40.50.1390,PS51737,IPR006119,IPR038109,PF07508, SSF53041,IPR011109,PTHR30461,Coil,cd00338, PF00239
MKAAFLIRCSTKNQDLNRQTRDLTRLAKSMGYEYDLENLVYGEKITGKDDVTKKNRDSIDRLLRAAKEQRFDVVLVSEVSRMSRDPASGRIYVRLLINMNIPVYFKDIDLWTINPETGKKVRDAELVIGAAFDAAWKYLKSMKTQIASARRNELDNNRISIGQPYFGYKRYEGTDKSKKNQIVVNEEEAEVVQAVYNEYLKEGATLKSTALAITDKYGEKLNRKFSLGTIEHILTYESYATGIKKVNLKDPDTDEVEVFDVNTPIIIDKELYEAATNKRKKNRVKDEPYPNQQVYLLSKLIKCPDCGYTLTPRRKAGEFGQTYRLVNGKPAVSWLCMSGINNITDCTNRTSIANEKLEPIIWELVKKELIGYANMNDEKREEQIRECEEKIEYQNYSIQNFTKEIDKLKKRLSTAYQFSINAAEMAGDDEDMRTMAMEEFNRTAKGVRQEMKNFEKSIEQAKGELEKLRDLKTFYSQPTLPKDYLEQIEGNFTEKRNLVKQLITKIVPYRITTFKKKERESGVKTCNKMITVKNGAVLLEVYTIGGVYNVFYNANSKFQVKTAYYVHGEYATFQNGIRKFPAYDEGEYFVISNANMVMETDDIDEVVTVNEFVDIAIANNWVIEYQYI

SEQ ID NO: 201 - protein, 628 aa, Unknown
  Description of Unknown: Integrase B202 sequence
  SM00857,G3DSA:1.10.10.2600,IPR036162,PF13408,IPR025827, G3DSA:3.40.50.1390,PS51737,IPR006119,IPR038109,PF07508, IPR011109,SSF53041,PTHR30461,Coil,cd00338, PF00239
MKAAFLIRCSTKNQDLNRQTRDLTRLAKSMGYEYDLENLVYGEKITGKDDVTKKNRDSIDRLLRAAKEQRFNVVLVSEVSRMSRDPASGRIYVRLLINMNIPVYFKDIDLWTINPETGKKVRDAELVIGAAFDAAWKYLKSMKTQIASARRNELDNNRISIGQPYFGYKRYEGTDKSKKNQIVVNEEEAEVVQAVYNEYLKEGATLKSTALAITDKYGEKLNRKFSLGTIEHILTYESYATGIKKVNLKDPDTDEVEVFDVNTPIIIDKELYEAATNKRKKNRVKDEPYPNQQVYLLSKLIKCPDCGYTLTPRRKAGEFGQTYRLVNGKPAVSWLCMSGINNITDCTNRTSIANEKLEPIIWELVKKELIGYANMNDEKREEQIRECEEKIEYQNYSIQNFTKEIDKLKKRLSTAYQFSINAAEMAGDDEDMRTMAMEEFNRTAKGVRQEMKNFEKSIEQAKGELEKLRDLKTFYSQPTLPKDYLEQIEGNFTEKRNLVKQLITKIVPYRITTFKKKERESGVKTCNKMITVKNGAVLLEVYTIGGVYNVFYNANSKFQVKTAYYVHGEYATFQNGIRKYPAYDEGEYFVISNANMVMETDNIDEVVTVNEFVDIAIANNWVIEYQYI

SEQ ID NO: 202 - protein, 628 aa, Unknown
  Description of Unknown: Integrase B203 sequence
  SM00857,G3DSA:1.10.10.2600,IPR036162,PF13408,IPR025827, G3DSA:3.40.50.1390,PS51737,IPR006119,IPR038109,PF07508, SSF53041,IPR011109,PTHR30461,Coil,cd00338, PF00239
MKAAFLIRCSTKNQDLNRQTRDLTRLAKSMGYEYDLENLVYGEKITGKDDVTKKNRDSIDRLLRAAKEQRFDVVLVSEVSRMSRDPASGRIYVRLLINMNIPVYFKDIDLWTINPETGKKVRDAELVIGAAFDAAWKYLKSMKTQIASARRNELDNNRISIGQPYFGYKRYEGTDKSKKNQIVVNEEEAEVVQAVYNEYLKEGATLKSTALAITDKYGEKLNRKFSLGTIEHILIYESYATGIKKVNLKDPDTDEVEVFDVSTPIIIDKELYEAAANKRKNNRVKDEPYPNQQVYLLSKLIKCPDCGYTLTPRRKAGEFGQTYRLVNGKPAVSWLCMSGINNITDCTNRTSIANEKLEPIIWELVKKELIGYANMNDEKREEQIRECEEKIEYQNYSIQNFTKEIDKLKKRLSTAYQFSINAAEMAGDDEDMRTMAMEEFNRTAKGVRQEMKNFEKSIEQAKGELEKLRDLKTFYSQPTLPKDYLEQIEGNFTEKRNLVKQLITKIVPYRITTFKKKERESGVKTCNKMITVKNGAVLLEVYTIGGVYNVFYNANSKFQVKTAYYVHGEYATFQNGIRKFPAYDEGEYFVISNANMVMETDDIDEVVTVNEFVDIAIANNWVIEYQYI

SEQ ID NO: 203 - protein, 628 aa, Unknown
  Description of Unknown: Integrase B204 sequence
  SM00857,G3DSA:1.10.10.2600,IPR036162,PF13408,PS51737, G3DSA:3.40.50.1390,IPR025827,IPR006119,IPR038109,PF07508, IPR011109,SSF53041,PTHR30461,Coil,cd00338, PF00239
MKAAFLIRCSTKNQDLNRQTRDLTRLAKSMGYEYDLENLVYGEKITGKDDVTKKNRDSIDRLLRAAKEQRFDVVLVSEVSRMSRDPASGRIYVRLLINMNIPVYFKDIDLWTINPETGKKVRDAELVIGAAFDAAWKYLKSMKTQIASARRNELDNNRISIGQPYFGYKRYEGIDKSKKNQIVVNEEEAEVVQAVYNEYLKEGATLKSTALAITDKYGEQLNRKFSLGTIEHILTYESYATGIKKVNLKDPDTDEVEVFDVSTPIIIDKELYEAAANKRKNNRVKDEPYPNQQVYLLSKLIKCPDCGYTLTPRRKAGEFGQTYRLVNGKPAVSWLCMSGINNITDCTNRTSIANEKLEPIIWELVKKELIGYANMNDEKREEQIRECEEKIEYQNYSIQNFTKEIEKLKKRLSTAYQFSINAAEMAGDDEDMRTMAMEEFNRTAKGVRQEMKNFEKSIEQAKGELEKLRDLKTFYCQPTLPKDYLEQIEGNFTEKRNLVKQLITKIVPYRIITFKKKERESGVKTCNKMITVKNGAVLLEVYTIGGVYNVFYNANSKFQVKTAYYVHGEYATFQNGIRKYPAYDEGEYFVISNANMVMETDDIDEVVTVNEFVDIAIANNWVIEYQYI

SEQ ID NO: 204 - protein, 628 aa, Unknown
  Description of Unknown: Integrase B205 sequence
  SM00857,G3DSA:1.10.10.2600,IPR036162,PF13408,IPR025827, G3DSA:3.40.50.1390,PS51737,IPR006119,IPR038109,PF07508, SSF53041,IPR011109,PTHR30461,Coil,cd00338, PF00239
MKAAFLIRCSTKNQDLNRQTRDLTRLAKSMGYEYDLENLVYGEKITGKDDVTKKNRDSIDRLLRAAKEQRFDVVLVSEVSRMSRDPASGRIYVRLLINMNIPVYFKDIDLWTINPETGKKVRDAELVIGAAFDAAWKYLKSMKTQIASARRNELDNNRISIGQPYFGYKRYEGIDKSKKNQIVVNEEEAEVVQAVYNEYLKEGATLKSTALAITDKYGEKLNRKFSLGTIEHILTYESYATGIKKVNLKDPDTDEVEVFDVSTPIIIDKELYEAAANKRKNNRVKDEPYPNQQVYLLSKLIKCPDCGYTLTPRRKAGEFGQTYRLVNGKPAVSWLCMSGINNITDCTNRTSIANEKLEPIIWELVKKELIGYANMNDEKRGEQIRECEEKIEYQNYSIQNFTKEIEKLKKRLSTAYQFSINAAEMAGDDEDMRTMAMEEFNRTAKGVRQEMKNFEKSIEQAKGELEKLRDLKTFYSQPTLPKDYLEQIEGNFTEKRNLVKQLITKIVPYRIITFKKKERESGVKTCNKMITVKNGAVLLEVYTIGGVYNVFYNANSKFQVKTAYYVHGEYATFQNGIRKYPAYDEGEYFVISNANMVMETDDIDEVVTVNEFVDIAIANNWVIEYQYI

SEQ ID NO: 205 - protein, 628 aa, Unknown
  Description of Unknown: Integrase B206 sequence
  PTHR30461:SF3,SM00857,G3DSA:1.10.10.2600,IPR036162,PF13408, PS51737,G3DSA:3.40.50.1390,IPR025827,IPR006119,IPR038109, PF07508,SSF53041,IPR011109,PTHR30461,Coil, cd00338,PF00239
MKAAFLIRCSTKNQDLNRQTRDLTRLAKSMGYEYDLENLVYGEKITGKDDVTKKNRDSIDRLLRAAKEQRFDVVLVSEVSRMSRDPASGRIYVRLLINMNIPVYFKDIDLWTINPETGKKVRDAELVIGAAFDAAWKYLKSMKTQIASARRNELDNNRISIGQPYFGYKRYEGTDKSKKNQIVVNEEEAEVVLAVYNEYLKEGATLKSTALAITDKYGEKLNRKFSLGTIEHILTYESYATGIKKVNLKDPDTDEVEVFDVSTPIIIDKELYEAAANKRKNNRVKDEPYPNQQVYLLSKLIKCPDCGYTLTPRRKAGEFGQTYRLVNGKPAVSWLCMSGINNITDCTNRTSIANEKLEPIIWELVKKELIGYANMNDEKREEQIRECEEKIEYQNYSIQNFTKEIDKLKKRLSTAYQFSINAAEMAGDDEDMRTMAMEEFNRTAKGVRQEMKNFEKSIEQAKGELEKLRDLKTFYSQPTLPKDYLEQIEGNFTEKRNLVKQLITKIVPYRITTFKKKERESGVKTCNKMITVKNGAVLLEVYTIGGVYNVFYNANSKFQVKTAYYVHGEYATFQNGIRKYPAYDEGEYFVISNANMVMETDDIDEVVTVNEFVDIAIANNWVIEYQYI

SEQ ID NO: 206 - protein, 628 aa, Unknown
  Description of Unknown: Integrase B207 sequence
  SM00857,G3DSA:1.10.10.2600,IPR036162,PF13408,IPR025827, G3DSA:3.40.50.1390,PS51737,IPR006119,IPR038109,PF07508, SSF53041,IPR011109,PTHR30461,Coil,cd00338, PF00239
MKAAFLIRCSTKNQDLNRQTRDLTRLAKSMGYEYDLENLVYGEKITGKDDVTKKNRDSIDRLLRAAKEQRFDVVLVSEVSRMSRDPASGRIYVRLLINMNIPVYFKDIDLWTINPETGKKVRDAELVIGAAFDAAWKYLKSMKTQIASARRNELDNNRISIGQPYFGYKRYEGTDKSKKNQIVVNEEEAEVVQAVYNEYLKEGATLKSTALAITDKYGEKLNRKFSLGTIEHILTYESYATGIKKVNLKDPDTDEVEVFDVNTPIIIDKELYEAATNKRKKNRVKDEPYPNQQVYLLSKLIKCPDCGYTLTPRRKAGEFGQTYRLVNGKPAVSWFCMSGINNITNCTNRTSIANEKLEPIIWELVKKELIGYANMNDEKREEQIRECEEKIEYQNYSIQNFTKEIDKLKKRLSTAYQFSINAAEMAGDDEDMRTMAMEEFNRTAKGVRQEMKNFEKSIEQAKGELEKLRDLKTFYSQPTLPKDYLEQIEGNFTEKRNLVKQLITKIVPYRITTFKKKERESGVKTCNKMITVKNGAVLLEVYTIGGVYNVFYNANSKFQVKTAYYVHGEYATFQNGIRKFPAYDEGEYFVINNANMVMETDDIDEVVTVNEFVDIAIANNWVIEYQYI

SEQ ID NO: 207 - protein, 628 aa, Unknown
  Description of Unknown: Integrase B208 sequence
  SM00857,G3DSA:1.10.10.2600,IPR036162,PF13408,IPR025827, G3DSA:3.40.50.1390,PS51737,IPR006119,IPR038109,PF07508, SSF53041,IPR011109,PTHR30461,Coil,cd00338, PF00239
MKAAFLIRCSTKNQDLNRQTRDLTRLAKSMGYEYDLENLVYGEKITGKDDVTKKNRDSIDRLLRAAKEQRFDVVLVSEVSRMSRDPASGRIYVRLLINMNIPVYFKDIDLWTINPETGKKVRDAELVIGAAFDAAWKYLKSMKTQIASARRNELDNNRISIGQPYFGYKRYEGTDKSKKNQIVVNEEEAEVVQAVYNEYLKEGATLKSTALAITDKYGEKLNRKFSLGTIEHILIYESYATGIKKVNLKDPDTDEVEVFDVSTPIIIDKELYEAATNKRKKNRVKDEPYPNQQVYLLSKLIKCPDCGYTLTPRRKAGEFGQTYRLVNGKPAVSWLCMSGINNITDCTNRTSIANEKLEPIIWELVKKELIGYANMNDEKREEQIRECEEKIEYQNYSIQNFTKEIDKLKKRLSTAYQFSINAAEMAGDDEDMRTMAMEEFNRTAKGVRQEMKNFEKSIEQAKGELEKLRDLKTFYSQPTLPKDYLEQIEGNFTEKRNLVKQLITKIVPYRITTFKKKERESGVKTCNKMITVKNGAVLLEVYTIGGVYNVFYNANSKFQVKTAYYVHGEYATFQNGIRKFPAYDEGEYFVISNANMVMETDDIDEVVTVNEFVDIAIANNWVIEYQYI

SEQ ID NO: 208 - protein, 628 aa, Unknown
  Description of Unknown: Integrase B209 sequence
  SM00857,G3DSA:1.10.10.2600,IPR036162,PF13408,IPR025827, G3DSA:3.40.50.1390,PS51737,IPR006119,IPR038109,PF07508, IPR011109,SSF53041,PTHR30461,Coil,cd00338, PF00239
MKAAFLIRCSTKNQDLNRQTRDLTRLAKSMGYEYDLENLVYGEKITGKDDVTKKNRDSIDRLLRAAKEQRFNVVLVSEVSRMSRDPASGRIYVRLLINMNIPVYFKDIDLWTINPETGKKVRDAELVIGAAFDAAWKYLKSMKTQIASARRNELDNNRISIGQPYFGYKRYEGIDKSKKNQIVVNEEEAEVVQAVYNEYLKEGATLKSTALAITDKYGEQLNRKFSLGTIEHILTYESYATGIKKVNLKDPDTDEVEVFDVSTPIIIDKELYEAATNKRKKNRVKDEPYPNQQVYLLSKLIKCPDCGYTLTPRRKAGEFGQTYRLVNGKPAVSWLCMSGINNITDCTNRTSIANEKLEPIIWELVKKELIGYANMNDEKREEQIRECEEKIEYQNYSIQNFTKEIEKLKKRLSTAYQFSINAAEMAGDDEDMRTMAMEEFNRTAKGVRQEMKNFEKSIEQAKGELEKLRDLKTFYSQPTLPKDYLEQIEGNFTEKRNLVKQLITKIVPYRITTFKKKERESGVKTCNKMITVKNGAVLLEVYTIGGVYNVFYNANSKFQVKTAYYVHGEYATFQNGIRKYPAYDEGEYFVISNANMVMETDNIDEVVTVNEFVDIAIANNWVIEYQYQ

SEQ ID NO: 209 - protein, 628 aa, Unknown
  Description of Unknown: Integrase B210 sequence
  SM00857,G3DSA:1.10.10.2600,IPR036162,PF13408,IPR025827, G3DSA:3.40.50.1390,PS51737,IPR006119,IPR038109,PF07508, SSF53041,IPR011109,PTHR30461,Coil,cd00338, PF00239
MKAAFLIRCSTKNQDLNRQTRDLTRLAKSMGYEYDLENLVYGEKITGKDDVTKKNRDSIDRLLRAAKEQRFNVVLVSEVSRMSRDPASGRIYVRLLINMNIPVYFKDIDLWTINPETGKKVRDAELVIGAAFDAAWKYLKSMKTQIASARRNELDNNRISIGQPYFGYKRYEGTDKSKKNQIVVNEEEAEVVQAVYNEYLKEGATLKSTALAITNMYGEKLNRKFSLGTIEHILTYESYATGIKKVNLKDPDTDEVEVFDVSTPIIIDKELYEAATNKRKKNRVKDEPYPNQQVYLLSKLIKCPDCGYTLTPRRKAGEFGQTYRLVNGKPAVSWLCMSGINNITDCTNRTSIANEKLEPIIWELVKKELIGYANMNDEKREEQIRECEEKIEYQNYSIQNFTKEIDKLKKRLSTAYQFSINAAEMAGDDEDMRTMAMEEFNRTAKGVRQEMKNFEKSIEQAKGELEKLRDLKTFYSQPTLPKDYLEQIEGNFTEKRNLVKQLITKIVPYRITTFKKKERESGVKTCNKMITVKNGAVLLEVYTIGGVYNVFYNANSKFQVKTAYYVHGEYATFQNGIRKFPTYDEGEYFVISNANMVMETDNIDEVVTVNEFVDIAIANNWVIEYQYI

SEQ ID NO: 210 - protein, 628 aa, Unknown
  Description of Unknown: Integrase B211 sequence
  SM00857,G3DSA:1.10.10.2600,IPR036162,PF13408,PS51737, G3DSA:3.40.50.1390,IPR025827,IPR006119,IPR038109,PF07508, SSF53041,IPR011109,PTHR30461,Coil,cd00338, PF00239
MKAAFLIRCSTKNQDLNRQTRDLTRLAKSMGYEYDLENLVYGEKITGKDDVTKKNRDSIDRLLRAAKEQRFDVVLVSEVSRMSRDPASGRIYVRLLINMNIPVYFKDIDLWTINPETGKKVRDAELVIGAAFDAAWKYLKSMKTQIASARRNELDNNRISIGQPYFGYKRYEGTDKSKKNQIVVNEEEAEVVQAVYNEYLKEGATLKSTALAITDKYGEKLNRKFSLGTIEHILTYESYATGIKKVNLKDPDTDEVEVFDVSTPIIIDKELYEAAANKRKKNRVKDEPYPNQQVYLLSKLIKCPDCGYTLTPRRKAGEFGQTYRLVNGKPAISWLCMSGINNITDCTNRTSIANEKLEPIIWELVKKELIGYANMNDEKREEQIRECEEKIEYQNYSIQNFTKEIDKLKKRLSTAYQFSINAAEMAGDDEDMRTMAMEEFNRTAKGVRQEMKNFEKSIEQAKGELEKLRDLKTFYSQPTLPKDYLEQIEGNFTEKRNLVKQLITKIVPYRITTFKKKERESGVKTCNKMITVKNGAVLLEVYTIGGVYNVFYNANSKFQVKTAYYVHGEYATFQNGIRKFPAYDEGEYFVISNANMVMETDDIDEVVTVNEFVDIAIANNWVIEYQYI

SEQ ID NO: 211 - protein, 628 aa, Unknown
  Description of Unknown: Integrase B212 sequence
  SM00857,G3DSA:1.10.10.2600,IPR036162,PF13408,IPR025827, G3DSA:3.40.50.1390,PS51737,IPR006119,IPR038109,PF07508, SSF53041,IPR011109,PTHR30461,Coil,cd00338, PF00239
MKAAFLIRCSTKNQDLNRQTRDLTRLAKSMGYEYDLENLVYGEKITGKDDVTKKNRDSIDRLLRAAKEQRFDVVLVSEVSRMSRDPASGRIYVRLLINMNIPVYFKDIDLWTINPETGKKVRDAELVIGAAFDAAWKYLKSMKTQIASARRNELDNNRISIGQPYFGYKRYEGTDKSKKNQIVVNEEEAEVVQAVYNEYLKEGATLKSTALAITDKYGEKLNRKFSLGTIEHILTYESYATGIKKVNLKDPDTDEVEVFDVNTPIIIDKELYEAATNKRKKNRVKDEPYPNQQVYLLSKLIKCPDCGYTLTPRRKAGEFGQTYRLVNGKPAVSWLCMSGINNITDCTNRTSIANEKLEPIIWELVKKELIGYANMNDEKREEQIRECEEKIEYQNYSIQNFTKEIDKLKKRLSTAYQFSINAAEMAGDDEDMRTMAMEEFNRTAKGVRQEMKNFEKSIEQAKGELEKLRDLKTFYSQPTLPKDYLEQIEGNFTEKRNLVKQLITKIVPYRITTFKKKERESGVKTCNKMITVKNGAVLLEVYTIGGVYNVFYNANSKFQVKTAYYVHGEYATFQNGIRKFPTYDEGEYFVISNANMVMETDNIDEVVTVNEFVDIAIANNWVIEYQYI

SEQ ID NO: 212 - protein, 628 aa, Unknown
  Description of Unknown: Integrase B213 sequence
  cd00338,SM00857,G3DSA:1.10.10.2600,IPR036162,PF13408, IPR025827,G3DSA:3.40.50.1390,PS51737,IPR006119,IPR038109, PF07508,IPR011109,SSF53041,PTHR30461,Coil, PF00239
MKAAFLIRCSTKNQDLNRQTRDLTRLAKSMGYEYDLENLVYGEKITGKDDVTKKNRDSIDRLLRAAKEQRFDVVLVSEVSRMSRDPASGRIYVRLLINMNIPVYFKDIDLWTINPETGKKVRDAELVIGAAFDAAWKYLKSMKTQIASARRNELDNNRISIGQPYFGYKRYEGTDKSKKNQIVVNEEEAEVVQAVYNEYLKEGATLKSTALAITDKYGEQLNRKFSLGTIEHILTYESYATGIKKVNLKDPDTDEVEVFDVSTPIIIDKELYEAATNKRKKNRVKDEPYPNQQVYLLSKLIKCPDCGYTLTPRRKAGEFGQTYRLVNGKPAVSWLCMSGINNITDCTNRTSIANEKLEPIIWELVKKELIGYANMNDEKREEQIRECEEKIEYQNYSIQNFTKEIDKLKKRLSTAYQFSINAAEMAGDDEDMRTMAMEEFNRTAKGVRQEMKNFEKSIEQAKGELEKLRDLKTFYSQPTLPKDYLEQIEGNFTEKRNLVKQLITKIVPYRITTFKKKERESGVKTCNKMITVKNGAVLLEVYTIGGVYNVFYNANSKFQVKTAYYVHGEYATFQNGIRKYPAYDEGEYFVISNANMVMETDDIDEVVTVNEFVDIAIANNWVIEYQYI

SEQ ID NO: 213 - protein, 628 aa, Unknown
  Description of Unknown: Integrase B214 sequence
  SM00857,G3DSA:1.10.10.2600,IPR036162,PF13408,IPR025827, G3DSA:3.40.50.1390,PS51737,IPR006119,IPR038109,PF07508, SSF53041,IPR011109,PTHR30461,Coil,cd00338, PF00239
MKAAFLIRCSTKNQDLNRQTRDLTRLAKSMGYEYDLENLVYGEKITGKDDVTKKNRDSIDRLLRAAKEQRFDVVLVSEVSRMSRDPASGRIYVRLLINMNIPVYFKDIDLWTINPETGKKVRDAELVIGAAFDAAWKYLKSMKTQIASARRNELDNNRISIGQPYFGYKRYEGTDKSKKNQIVVNEEEAEVVQAVYNEYLKEGATLKSTALAITDKYGEKLNRKFSLGTIEHILTYESYATGIKKVNLKDPDTDEVEVFDVSTPIIIDKELYEAATNKRKKNRVKDEPYPNQQVYLLSKLIKCPDCGYTLTPRRKAGEFGQTYRLVNGKPAVSWLCMSGINNITDCTNRTSIANEKLEPIIWELVKKELIGYANMNDEKREEQIRECEEKIEYQNYSIQNFTKEIDKLKKRLSTAYQFSINAAEMAGDDEDMRTMAMEEFNRTAKGVRQEMKNFEKSIEQAKGELEKLRDLKTFYSQPTLPKDYLEQIEGNFTEKRNLVKQLITKIVPYRITTFKKKERESGVKTCNKMITVKNGAVLLEVYTIGGVYNVFYNANSKFQVKTAYYVHGEYATFQNGIRKFPTYDEGEYFVISNANMVMETDDIDEVVTVNEFVDIAIANNWVIEYQYI

SEQ ID NO: 214 - protein, 628 aa, Unknown
  Description of Unknown: Integrase B215 sequence
  SM00857,G3DSA:1.10.10.2600,IPR036162,PF13408,IPR025827, G3DSA:3.40.50.1390,PS51737,IPR006119,IPR038109,PF07508, SSF53041,IPR011109,PTHR30461,Coil,cd00338, PF00239
MKAAFLIRCSTKNQDLNRQTRDLTRLAKSMGYEYDLENLVYGEKITGKDDVTKKNRDSIDRLLRAAKEQRFNVVLVSEVSRMSRDPASGRIYVRLLINMNIPVYFKDIDLWTINPETGKKVRDAELVIGAAFDAAWKYLKSMKTQIASARRNELDNNRISIGQPYFGYKRYEGTDKSKKNQIVVNEEEAEVVQAVYNEYLKEGATLKSTALAITNMYGEKLNRKFSLGTIEHILTYESYATGIKKVNLKDPDTDEVEVFDVSTPIIIDKELYEAATNKRKKNRVKDEPYPNQQVYLLSKLIKCPDCGYTLTPRRKAGEFGQTYRLVNGKPAVSWFCMSGINNITNCTNRTSIANEKLEPIIWELVKKELIGYANMNDEKREEQIRECEEKIEYQNYSIQNFTKEIDKLKKRLSTAYQFSINAAEMAGDDEDMRTMAMEEFNRTAKGVRQEMKNFEKSIEQAKGELEKLRDLKTFYSQPTLPKDYLEQIEGNFTEKRNLVKQLITKIVPYRITTFKKKERESGVKTCNKMITVKNGAVLLEVYTIGSVYNVFYNANSKFQVKTAYYVHGEYATFQNGIRKYPAYNEGEYFVISNANMVMETDDIDEVVTVNEFVDIAIANNWVIEYQYI

SEQ ID NO: 215 - protein, 628 aa, Unknown
  Description of Unknown: Integrase B216 sequence
  SM00857,G3DSA:1.10.10.2600,IPR036162,PF13408,IPR025827, G3DSA:3.40.50.1390,PS51737,IPR006119,IPR038109,PF07508, SSF53041,IPR011109,PTHR30461,Coil,cd00338, PF00239
MKAAFLIRCSTKNQDLNRQTRDLTRLAKSMGYEYDLENLVYGEKITGKDDVTKKNRDSIDRLLRAAKEQRFDVVLVSEVSRMSRDPASGRIYVRLLINMNIPVYFKDIDLWTINPETGKKVRDAELVIGAAFDAAWKYLKSMKTQIASARRNELDNNRISIGQPYFGYKRYEGTDKSKKNQIVVNEEEAEVVQAVYNEYLKEGATLKSTALAITDKYGEKLNRKFSLGTIEHILTYESYATGIKKVNLKDPDTDEVEVFDVNTPIIIDKELYEAATNKRKKNRVKDEPYPNQQVYLLSKLIKCPDCGYTLTPRRKAGEFGQTYRLVNGKPAVSWLCMSGINNITDCTNRTSIANEKLEPIIWELVKKELIGYANMNDEKREEQIRECEEKIEYQNYSIQNFTKEIDKLKKRLSTAYQFSINAAEMAGDDEDMRTMAMEEFNRTAKGVRQEMKNFEKSIEQAKGELEKLRDLKTFYSQPTLPKDYLEQIEGNFTEKRNLVKQLITKIVPYRITTFKKKERESGVKTCNKMITVKNGAVLLEVYTIGGVYNVFYNANSKFQVKAAYYVHGEYATFQNGIRKYPAYNEGEYFVISNANMVMETDDIDEVVTVNEFVDIAIANNWVIEYQYI

SEQ ID NO: 216 - protein, 628 aa, Unknown
  Description of Unknown: Integrase B217 sequence
  SM00857,G3DSA:1.10.10.2600,IPR036162,PS51737,G3DSA:3.40.50.1390, IPR006119,IPR038109,PF07508,IPR011109,SSF53041, PF00239,PTHR30461,PS51736,Coil,cd00338
MKENEEKLSSAAAQKEKIRQRYKGISENELDVIPALPQENFYEDQHEKRVAVYARVSTDDPRQTSSYELQKNHYQDVVSRHAGWKLIDIYADEGISGTSLQHRDAFIRMIADCQAGKIDLIVTKSVSRFARNVLDCIGHVRQLKAMKPPIGVFFETENIYTLNENSEMSLSFISTLAQEESHNKSEIMNASIEMRFRRGIFLTPPLLGYDQDEDGNLVINEEEAETVRLIFFMYLYGYTCQEIANTLTKTGRRTKLGNTTWSPSSVLSVLTNERHCGDVLARKTWTPSYLDHKSKKNRQDRNQYRQRNHHEAIISRDDFIAVQRLISNAKYGNKGILPELHVINDGVLRGCVTVNPKWAGFKADDYKRASESVYDELIRDKSMEVQVKSGDLDLRGYEIARAQFFDTLNKVCVTLSSDTMNFSTECVRKFNSQFIEILVHPSERFIAIRPSTKDSRNSVQWSKKHNGLIVPRQISGAAFLPNIFDLFNWDTECRYRIIGVKRQNNDESIILFYLEDTEMLIPNATIVAAEEDTDIPKPSFDDDIKPIGTRGSILAYPEEWIHTFGSDYYRQAQANELQTYNETGKWNTQSEGTPFNLDEVPLQVTSVQEIEETLENILNNQNQEETNE

SEQ ID NO: 217 - protein, 628 aa, Unknown
  Description of Unknown: Integrase B218 sequence
  SM00857,G3DSA:1.10.10.2600,IPR036162,PF13408,IPR025827,G3DSA:3. 40.50.1390,PS51737,IPR006119,IPR038109,PF07508,SSF53041,IPR011109 ,PTHR30461,Coil,cd00338,PF00239
MKAAFLIRCSTKNQDLNRQTRDLTRLAKSMGYEYDLENLVYGEKITGKDDVTKKNRDSIDRLLRAAKEQRFDVVLVSEVSRMSRDPASGRIYVRLLINMNIPVYFKDIDLWTINPETGKKVRDAELVIGAAFDAAWKYLKSMKTQIASARRNELDNNRISIGQPYFGYKRYEGTDKSKKNQIVVNEEEAEVVQAVYNEYLKEGATLKSTALAITDKYGEKLNRKFSLGTIEHILTYESYATGIKKVNLKDPDTDEVEVFDVSTPIIIDKELYEAATNKRKKNRVKDEPYPNQQVYLLSKLIKCPDCGYTLTPRRKAGEFGQTYRLVNGKPAVSWLCMSGINNITDCTNRTSIANEKLEPIIWELVKKELIGYANMNDEKREEQIRECEEKIEYQNYSIQNFTKEIDKLKKRLSTAYQFSINAAEMAGDDEDMRTMAMEEFNRTAKGVRQEMKNFEKSIEQAKGELEKLRDLKTFYSQPTLPKDYLEQIEGNFTEKRNLVKQLITKIVPYRITTFKKKERESGVKTCNKMITVKNGAVLLEVYTIGGVYNVFYNANSKFQVKTAYYVHGEYATFQNGIRKFPTYDEGEYFVISNANMVMETDNIDEVVTVNEFVDIAIANNWVIEYQYI

SEQ ID NO: 218 - protein, 628 aa, Unknown
  Description of Unknown: Integrase B219 sequence
  SM00857,G3DSA:1.10.10.2600,IPR036162,PF13408,IPR025827, G3DSA:3.40.50.1390,PS51737,IPR006119,IPR038109,PF07508, SSF53041,IPR011109,PTHR30461,Coil,cd00338, PF00239
MKAAFLIRCSTKNQDLNRQTRDLTRLAKSMGYEYDLENLVYGEKITGKDDVTKKNRDSIDRLLRAAKEQRFDVVLVSEVSRMSRDPASGRIYVRLLINMNIPVYFKDIDLWTINPETGKKVRDAELVIGAAFDAAWKYLKSMKTQIASARRNELDNNRISIGQPYFGYKRYEGIDKSKKNQIVVNEEESEVVQAIYNEYLKEGATLKSTALAITDKYGEKLNRKFSLGTIEHILTYESYATGIKKVNLKDPDTDEVEVFDVSTPIIIDKELYEAATNKRKKNRVKDEPYPNQQVYLLSKLIKCPDCGYTLTPRRKAGEFGQTYRLVNGKPAVSWLCMSGINNITDCTNRTSIANEKLEPIIWELVKKELIGYANMNDEKREEQIRECEEKIEYQNYSIQNFTKEIDKLKKRLSTAYQFSINAAEMAGDDEDMRTMAMEEFNRTAKGVRQEMKNFEKSIEQAKGELEKLRDLKTFYSQPTLPKDYLEQIEGNFTEKRNLVKQLITKIVPYRIITFKKKERESGVKTCNKMITVKNGAVLLEVYTIGGVYNVFYNANSKFQVKTAYYVHGEYATFQNGIRKYPAYDEGEYFVISNANMVMETDDIDEVVTVNEFVDIAIANNWVIEYQYQ

SEQ ID NO: 219 - protein, 628 aa, Unknown
  Description of Unknown: Integrase B220 sequence
  SM00857,G3DSA:1.10.10.2600,IPR036162,PF13408,PS51737, G3DSA:3.40.50.1390,IPR025827,IPR006119,IPR038109,PF07508, SSF53041,IPR011109,PTHR30461,Coil,cd00338, PF00239
MKAAFLIRCSTKNQDLNRQTRDLTRLAKSMGYEYDLENLVYGEKITGKDDVTKKNRDSIDRLLRAAKEQRFDVVLVSEVSRMSRDPASGRIYVRLLINMNIPVYFKDIDLWTINPETGKKVRDAELVIGAAFDAAWKYLKSMKTQIASARRNELDNNRISIGQPYFGYKRYEGTDKSKKNQIVVNEEEAEVVQAVYNEYLKEGATLKSTALAITDKYGEKLNRKFSLGTIEHILTYESYATGIKKVNLKDPDTDEVEVFDVSTPIIIDKELYEAATNKRKKNRVKDEPYPNQQVYLLSKLIKCPDCGYTLTPRRKAGEFGQTYRLVNGKPAISWLCMSGINNITDCTNRTSIANEKLEPIIWELVKKELIGYANMNDEKREEQIRECEEKIEYQNYSIQNFTKEIDKLKKRLSTAYQFSINAAEMAGDDEDMRTMAMEEFNRTAKGVRQEMKNFEKSIEQAKGELEKLRDLKTFYSQPTLPKDYLEQIEGNFTEKRNLVKQLITKIVPYRITTFKKKERESGVKTCNKMITVKNGAVLLEVYTIGGVYNVFYNANSKFQVKTAYYVHGEYATFQNGIRKYPAYDEGEYFVISNANMVMETDDIDEVVTVNEFVAIAIANNWVIEYQYI

SEQ ID NO: 220 - protein, 628 aa, Unknown
  Description of Unknown: Integrase B221 sequence
  cd00338,SM00857,G3DSA:1.10.10.2600,IPR036162,PS51737, G3DSA:3.40.50.1390,IPR006119,IPR038109,PF07508,SSF53041, IPR011109,PTHR30461,PS51736,Coil,PF00239
MTNTIFKNNTKIGNPYDFLDRNRHRKMVFYGRVSTEHEAQMAALENQIEWYDDQAKYHPNWEVLNKYIDEGITGTQAKKRPAFLQMIEDAKKGKFDLIVTREVCRFARNTVDTLVTTRELKNIGVEVYFVEDNIWTMDGDGELRLTIMATLAQEESRKTSERVKAGQHISRQQGMVYGRGNILGYNRKAKSTYTINPEQAETVRMIFDMYLQGEMGASKIANELTRLGRKNASGLVKWSPCVITRIVNNPTYMGYQAYGKSYSNNYLEQKRILNNDFSTYMLVKSDYEPIITEEEWYRCQEIKQRRVTKTIGVSTDGKKKQPNHGKNETKDLWATKLKCRCGASFRRNRWHKNNNAPWSYGYLCYNRLNNGSAQKRRDAGLDDTGYCDQTEIPDWKLEMMGKMIMEQVWRTRAEDIKLACEILQECYKPDSKAPQQNKSVMLANIEKLKSKKDILLDMRSDGEITKEEFLKKKEDIDKKISQLTAEYEKDDCPTESDEAGLELGKIEAALNELIDFSQLVLPREIYQKFVSKVTPYSKTHYRWYLNLDGTGTQMADVKVNGRKSNATVAFCDEGEIPPVHFKEIIFFNILKQEIKNKKSFFVATLHRLLLLRCNSVIFVLMGKTIYQP

SEQ ID NO: 221 - protein, 628 aa, Unknown
  Description of Unknown: Integrase B222 sequence
  SM00857,G3DSA:1.10.10.2600,IPR036162,PF13408,IPR025827, G3DSA:3.40.50.1390,PS51737,IPR006119,IPR038109,PF07508, SSF53041,IPR011109,PTHR30461,Coil,cd00338,PF00239
MKAAFLIRCSTKNQDLNRQTRDLTRLAKSMGYEYDLENLVYGEKITGKDDVTKKNRDSIDRLLRAAKEQRFDVVLVSEVSRMSRDPASGRIYVRLLINMNIPVYFKDIDLWTINPETGKKVRDAELVIGAAFDAAWKYLKSMKTQIASARRNELDNNRISIGQPYFGYKRYEGTDKSKKNQIVVNEEEAEVVQAVYNEYLKEGATLKSTALAITDKYGEKLNRKFSLGTIEHILTYESYATGIKKVNLKDPDTDEVEVFDVNTPIIIDKELYEAATNKRKKNRVKDEPYPNQQVYLLSKLIKCPDCGYTLTPRRKAGEFGQTYRLVNGKPAVSWLCMSGINNITDCTNRTSIANEKLEPIIWELVKKELIGYANMNDEKREEQIRECEEKIEYQNYSIQNFTKEIDKLKKRLSTAYQFSINAAEMAGDDEDMRTMAMEEFNRTAKGVRQEMKNFEKSIEQAKGELEKLRDLKTFYSQPTLPKDYLEQIEGNFTEKRNLVKQLITKIVPYRITTFKKKERESGVKTCNKMITVKNGAVLLEVYTIGGVYNVFYNANSKFQVKTAYYVHGEYATFQNGIRKYPAYNEGEYFVISNANMVMETDDIDEVVTVNEFVDIAIANNWVIEYQYI

SEQ ID NO: 222 - protein, 628 aa, Unknown
  Description of Unknown: Integrase B223 sequence
  SM00857,G3DSA:1.10.10.2600,IPR036162,PF13408,IPR025827, G3DSA:3.40.50.1390,PS51737,IPR006119,IPR038109,PF07508, IPR011109,SSF53041,PTHR30461,Coil,cd00338, PF00239
MKAAFLIRCSTKNQDLNRQTRDLTRLAKSMGYEYDLENLVYGEKITGKDDVTKKNRDSIDRLLRAAKEQRFNVVLVSEVSRMSRDPASGRIYVRLLINMNIPVYFKDIDLWTINPETGKKVRDAELVIGAAFDAAWKYLKSMKTQIASARRNELDNNRISIGQPYFGYKRYEGTDKSKKNQIVINEEEAEVVQAVYNEYLKEGATLKSTALAITDKYGEKLNRKFSLGTIEHILTYESYATGIKKVNLKDPDTDEVEVFDVSTPIIIDKELYEAATNKRKKNRVKDEPYPNQQVYLLSKLIKCPDCGYTLTPRRKASEFGQTYRLVNGKPAVSWLCMSGINNASNCTSRTSIANEKLEPIIWELVKKELIGYANMNDEKREEQIRECEEKIEYQNYSIQNFTKEIDKLKKRLSTAYQFSINAAEMAGDDEDMRTMAMEEFNRTAKGVRQEMKNFEKSIEQAKGELEKLRDLKTFYSQPTLPKDYLEQIEGNFTEKRNLVKQLITKIVPYRITTFKKKERESGAKTCNKMITVKNGAVLLEVYTIGGVYNVFYNANSKFQVKTAYYVHGEYATFQNGIRKFPAYDEGEYFVISNANMVMETDDIDEVVTVNEFVDIAIANNWVIEYQYQ

SEQ ID NO: 223 - protein, 628 aa, Unknown
  Description of Unknown: Integrase B224 sequence
  PTHR30461:SF3,SM00857,G3DSA:1.10.10.2600,IPR036162,PF13408, IPR025827,G3DSA:3.40.50.1390,PS51737,IPR006119,IPR038109, PF07508,SSF53041,IPR011109,PTHR30461,Coil, cd00338,PF00239
MKAAFLIRCSTKNQDLNRQTRDLTRLAKSMGYEYDLENLVYGEKITGKDDVTKKNRDSIDRLLRAAKEQRFNVVLVSEVSRMSRDPASGRIYVRLLINMNIPVYFKDIDLWTINPETGKKVRDAELVIGAAFDAAWKYLKSMKTQIASARRNELDNNRISIGQPYFGYKRYEGTDKSKKNQIVVNEEEAEVVQAVYNEYLKEGATLKSTALAITNMYGEKLNRKFSLGTIEHILTYESYATGIKKVNLKDPDTDEVEVFDVSTPIIIDKELYEAATNKRKKNRVKDEPYPNQQVYLLSKLIKCPDCGYTLTPRRKAGEFGQTYRLVNGKPAVSWLCMSGINNITDCTNRTSIANEKLEPIIWELVKKELIGYANMNDEKREEQIRECEEKIEYQNYSIQNFTKEIDKLKKRLSTAYQFSINAAEMAGDDEDMRTMAMEEFNRTAKGVRQEMKNFEKSIEQAKGELEKLRDLKTFYSQPTLPKDYLEQIEGNFTEKRNLVKQLITKIVPYRITTFKKKERESGVKTCNKMITVKNGAVLLEVYTIGGVYNVFYNANSKFQVKTAYYVHGEYATFQNGIRKYPAYDEGEYFVISNANMVMETDDIDEVVTVNEFVDIAIANNWVIEYQYQ

SEQ ID NO: 224 - protein, 627 aa, Unknown
  Description of Unknown: Integrase B225 sequence
  PTHR30461:SF3,SM00857,G3DSA:1.10.10.2600,IPR036162,PF13408, IPR025827,PS51737,G3DSA:3.40.50.1390,IPR006119,IPR038109, PF07508,IPR011109,SSF53041,PF00239,PTHR30461, PS51736,Coil,cd00338
MARKKNIAAGLDAVIYARYSSHNQREVSIEQQIAECTKHAAALGLRVVGTYEDRAISGKTDNRPRFQQMMRDAEKGKFQAVVAWKSNRIGRNMLQAMVNEAKLDDYGVKVFYAEEDFDDTAAGRFALRNMMNVNQFYSENMAEDITRGLYDNANKCMANGRQPLGYKRGADGKVMLDEPAAAVVREIFTRVATGDLFVDIARDLNAKGIKTSKGAAWNKGSFQSICQNERYKGIYIYGNVRIVDGIPRIVSDELWYRVQEAMRMKKNPVGTRHRVGAEDYLLTGKLRCGHCGSYMTGVSGTSRNGELHYYYTCQKRRTEHACNKKNVRRDVIEPAIAQAIKMYCLTDDVIEWVADRTVEYWEKHDNDLHIEALEQQLEENKKATSNMLKAIEMGIITDATRSRMIELETEQSKLAVQLNAAKADVVKIDRDDLIDELQIFRDMDVNNRSVQAELFKDFLVAAYLYDDNRLKLVFSFMGKEKNVEIPLETGEDPPDGGDSPDTKMFVFAPDCSTKKALYFVGSMVLFFFVPAKRSGVHRSPCRRASDTPDLHNSRHLPCRFNRGFRGQHGAGPTAPAPAWQALAGARAVRQRGRRRKKKFLRRKVCVAAVVSPGKMTRRFTSFWERSI

SEQ ID NO: 225 - protein, 627 aa, Unknown
  Description of Unknown: Integrase B226 sequence
  PTHR30461:SF3,IPR036162,PS51737,IPR011109,PTHR30461, PF00239,G3DSA:1.10.10.2600,PF14287,IPR006119,SSF53041, IPR025378,SM00857,IPR025827,cd03770,IPR038109, mobidb-lite,PS51736,PF13408,G3DSA:3.40.50.1390,PF07508,Coil
MTEKQGFMTALYERLSRDDELNGESNSISNQKKLLEQYAKEHGFTNLVHFTDDGISGTRFDRPGFLAMMKEVESGKVGTILIKDMSRMGRDYLKVGQYMELLRQKNVRLIAVNENVDSFREDDDFTPFRNIMNEWYARDTSKKIKSTFKAKGKSGKHVASTTPYGYLKDKDDPNVWIVDEEAAVVVRRIFHMTMDGYGPYQIAKALKEDKVEIPAVHMAKKDAGLWKGRVEEIKDPYGWGSSTVAGILKKREYLGHTVNFKTRKHFKDKKSHYVSEDNWTVFENTQEAIIDQETFDNVQRIRSNVRRYPDGWGEAHPLTGLMYCADCGSKMYVHRVNNGKRVPQYTCSAYSKVPVGTLCQTQHRINADVVMELIKELLKAVAEYSQLNREEFLETVKKAQTSQQSSEITRLKSRLAEAKKRVQELEKLICRIYEDNILGKLPDERYAILDGQYSKEQKDLSAEIADMEAELSGYEEGRRSAEKFIALVDKYQNFEELTTYMLNEFVEKIVVHERDRKGSVETTQEVEIYFNFIGRYLPPHFGEVKMTPEEIEEMEKREARKDRLHQNYLRRKANGKQQEYYERTKAKKKAELDAKKEEIRQEDIAKGVFIPLSLLPPAEPKKGVASA

SEQ ID NO: 226 - protein, 626 aa, Unknown
  Description of Unknown: Integrase B227 sequence
  PTHR30461:SF3,IPR036162,PS51737,IPR011109,PTHR30461, PF00239,G3DSA:1.10.10.2600,IPR006119,PF14287,SSF53041, IPR025378,SM00857,IPR025827,cd03770,IPR038109, PS51736,mobidb-lite,PF13408,G3DSA:3.40.50.1390,PF07508,Coil
MRNEKITPLYERLSRDDELQGESNSISNQKQMLEDFARRNGLPNPTHFTDDGISGTRFDRPGFLAMMEEVEAGRVEAIVIKDMSRLGRDYLKVGQVMEVLRQRGVRLIAINDGVDSLKGDDDFTPFRNIMNEFYARDTSRKIRSVFKSKGMSGKHLTGTVIYGYLWDEKREHWLVDEEAAEVVRRIFSLTLEGYGPYQIACKLSADRIEIPVVHLARFNEGVNRSKPVKDPYGWGSSTIVNILKKREYLGHTINFKTRKHFKDKKSHYVSEDEWTIFENTHEAIIDQQTFDLAQKIRSNVRRYPNGWGEAAPLTGLLYCADCGGKMYVHRTNNGKRISQYTCSNYTKVPCGTLCPTQHRINESAVLTLVSDTLRAIAEYSRNDRTEFIHTVQETQVAQQSADISKKRRRLAAAQKRAGELEKLICKIYEDNALGKLPDARYRALDAQYAKEQDALEIEIAELEKAVTGYEQSQKSAEKFIALIDKYENFDTLTNTMLNEFVEKILVHERARKGSQDTTQEIEIYFNFLGRYIPPSLQPVPLTPEEQEELRKKEERKDRLHQNYLKRKASGAQKRYEDKIKAKKKAEMDAKKALIRAEDMKKGVFSTIGQLPKEEPRKGSIAASAAV

SEQ ID NO: 227 - protein, 625 aa, Unknown
  Description of Unknown: Integrase B228 sequence
  PTHR30461:SF3,cd00338,SM00857,G3DSA:1.10.10.2600,IPR036162, PF13408,PS51737,G3DSA:3.40.50.1390,IPR025827,IPR006119, IPR038109,PF07508,IPR011109,SSF53041,PTHR30461, PS51736,Coil,PF00239
MSSVDKIAVVYARYSSHGQTEQSIEGQIAAAQKYAEQHGYTIIHVYADRAMTGRNDDREEFQRMLSDTATHQFGVILLWKIDRFGRNREEIAFNRYRCKKNGVRVERVAEDVPDGPEGVILDSVLEGMAEYYSLQLAQNVRRGQRESAKKSMSIGGNKMLGYIVNPETKRYESDPKTASYVTEIFKRYANGETISEIVAWLNAQGIRTTRGSEFTVNSLHRLLKNEKYTGVYIFHDIRNEGGMPALTDRTTFDKVQEMLKVNRRAPARVWSKTEYLLTDKLFCGHCGAMMVGESGHGRNGIKHSYYTCLNRKKKKSCDKKPVRQDVIESLVLRAIGKLLENPATLENIADQVWAAYERSDTSGDAIKALDKQIADVDRALSNVMKAIEMGIINEMTKTRMDELTNQKQALSTARAEAGLAEGFKLTRDMILFFLQEISALDMADRDSQKRLIKTFVNAIYLYDDHFDIAFNYTDNGNVVVRMREINDAARGEMFGRCAQCPTKKDPQLRLRVLFCAGAGRIRTGRPSADGKKQSCGLFFRPRLANPPAPTKKLWQEYCRSFFSLVYRAKSAKAMTDFQSAFYRDVQLLPGGWIFSGCRKTLVGASIARPRPFALQETIPENALLR

SEQ ID NO: 228 - protein, 625 aa, Unknown
  Description of Unknown: Integrase B229 sequence
  PTHR30461:SF3,IPR036162,PS51737,IPR011109,PTHR30461, PS00028,PS00397,PF00239,G3DSA:1.10.10.2600,IPR006119, SSF53041,IPR013087,cd00338,SM00857,IPR038109, PS51736,IPR006118,G3DSA:3.40.50.1390,PF07508,Coil
MAKHAITIPQNPKAALYIRVSTDMQADKDSLPLQESDLRKLADLNGINDTEVFCDAGFSGKNLNRPAFRSMMDRIRAREFSHLYVWKLDRISRNLLDFLELYDELKCYGVAFASKNECFDTQSPGGEAMLKILLIFAELERKTIAERVTAVMLGRANENKWNGGRVPFGYMPGPVTTDANGKKCKSWPVPDPIEAPIVRAIFELYLREKALKKVAKALNAAGYRSRKGTLWSDTTVRCILKNHFYKGEYVYNRQNPNAGRREDFYRSENDWVVVTGQHEAIIPEETWRRCNEMLSKNRSWLAPIGSLVSAQDKYIFGGLLQCAECGYTMNSKDRTGAHDHIHSSYYYCTGRWKAPAVCTGEHSGYASDRTLLPQTLKLIARMIEACANAIKFASAEQLVSYLLNDNLIPGAIGIEESQRIFMIVRSHVKHVYGVDQADQFNPNALLVEQSQKEKEKQERALSRLKRAYLFDDGDMSEAEYFEQKAAIEDTIAKLEKQIKSLSGNDIGADEAYLAQLSKLIMIKKLQDTNSDFDYYKLAKAIGRKPIHDFLSEIISRIIIGKKNRIIKIIFKNSVPITFQYAKKKIPSHKAIMTGYRLFICVLLLDALRIPYARQLVSSGPYGRQN

SEQ ID NO: 229 - protein, 625 aa, Unknown
  Description of Unknown: Integrase B230 sequence
  PTHR30461:SF3,cd00338,SM00857,G3DSA:1.10.10.2600,IPR036162, PF13408,IPR025827,G3DSA:3.40.50.1390,PS51737,IPR006119, IPR038109,PF07508,IPR011109,SSF53041,PTHR30461, PS51736,Coil,PF00239
MSSVDKIAVVYARYSSHGQTEQSIEGQIAAAQKYAEQHGYTIIHVYADRAMTGRNDDREQFQKMLSDTAMHQFGVILLWKIDRFGRNREEIAFNRYRCKKNGVRVERVAEDVPDGPEGVILDSVLEGMAEYYSLQLAQNVRRGQRESAKKSMSIGGNKMLGYIVNPETKRYESDPKTASYVTEIFKRYANGETISEIVVWLNAQGIRTTRGSEFTVNSLHRLLKNEKYTGVYIFHDIRNEGGMPALTDRATFDKVQEMLKVNRRAPVRVWSKTEYLLTDKLFCGHCGAMMVGESGHGRNGIKHSYYTCLNRKKKKSCDKKPVRQDVIEPLVLKSIGKLLENPATLENIADQVWAAYERSDTSGDTIKALDKQIADVNKALSNVMKAIEMGIINEMTKTRMDELTDQKQALSAARAEAGLAGGFKLTRDMILFFLQEIAALDMADRDSQKRLIKTFVNAIYLYDDHFDIAFNYTDNGKMVVRMQEINDAVRGEVFGRCAQSPTKKDPQLRLRVLFCAGAGRIRTGRPSADSKKQSCGLFFRPRLANPPAPTKKLRQRYCRSFFSLLYRTKQAKAVSDFQSAFYRDVQLLPGGWIFSGCRKTLVGASIARLRPFALQETIPENALLR

SEQ ID NO: 230 - protein, 624 aa, Unknown
  Description of Unknown: Integrase B231 sequence
  PTHR30461:SF3,IPR036162,PS51737,IPR011109,PTHR30461, PF00239,G3DSA:1.10.10.2600,IPR006119,PF14287,SSF53041, IPR025378,SM00857,IPR025827,cd03770,IPR038109, PS51736,PF13408,G3DSA:3.40.50.1390,PF07508,Coil
MSKSEKITALYERLSRDDDMDGESNSISNQKRQLEDYAAQHNLPNIVHFTDDGISGTRFDRPGFLALMKEVEAGNVEYLCLKDMSRLGRDYLKVGQIMEILRQQGVRLIAINDGVDTARGDDDFTPFRNIMNEYYARDTSRKIRSTFQAKGKTGKHLTGLVIYGYLWNETRDQWLVDEYSAEVVKRIFSMTIEGMGPYQIANRLKEEKVLIPSAYLAQFNEGVNKNKTFKDVYGWGSSTICNILDKREYLGHTINFKTRKHFKDKKSHYVPEDEWTIFENTHEAIIDQETFDLAQKVRSKVRRYPDGWGDVAPLTGLLYCADCGGKMYVHRFNNGKRISQYTCSKYSKIPVGTLCKTQHRINESVVLELVKDLLKAIAEYAKHERAEFVRVVQEAQSSQQTAEVKKQRTRLATAKQRISELEVLLCKIYEDNILGKLSDSRYATLDAQYEKEQKELTAEISTLEKAISDYEKHEKDADRFIALIDKYENFDELTITMLNEFVEKILVHERDRKGSIQTTQEVEIYFNFVGRFVPPKFAEVELTPEELEEIRKREERKDRLHQNYLKRKASGWQRQYEDRTKAKKKAEMDAKKNALRAEDIAKGVFIPVSNMPKLEPKIAPQKGA

SEQ ID NO: 231 - protein, 624 aa, Unknown
  Description of Unknown: Integrase B232 sequence
  cd00338,IPR036390,SM00857,IPR036162,PF13408, IPR025827,G3DSA:3.40.50.1390,IPR006119,PF07508,IPR011109, SSF53041,PTHR30461,SSF46785,Coil,PF00239
MSELSKFSPQTRVAIYNRVSTEKKVQMEALDVQVAYTRKLVEDNHLTIVDQYIEPETGTEAEHRLEYQRMIRDIKADRIDLVVVKCSDRLCRDQAEWHNFVKLHLQKKFQLYFYLDDHIYDHERDDIKYSVQAIVDAEQSKITSKKIRDIHSNRQIYATGSKALHICRPLYGWDRNVEFIDENTKRVWWTVNEKEATELRYALSLVEQGIGFYRLANIMYDRGVRSKGTTGYHKMPSVRIAANTWKKMLTSPMLHGDCILHKEVSNFYTKERVKLPQEDWIYKENVIPPIVSREYHEKIVQIIDARRFQMGCCKGLAGTYKWSNRLVCANCKKPYYRMHYKLNSEKVITWKCSEQFQRTRSACDNMVIAEKELEKQLAAALKEKYAYLFHISSGLINDTIHTIEKALCNSDNGKKLKALENQRELLIRNKDVLFHKLMNGVISDEDFGIYKDRLETELRELEEKIEGQKDGEKSLADQYRRLQQIRDTIENKNYNEQAILEILYGCVEVIEIHNNGDMDVTMSRELMRSKFELYSIVESDYSLFYFSFTYKKETIYDRNRKAYNEKVLELIRSEKYITIPQMAERLGNTYSYTWHSIQQLKEQGRIVYIKEKFEHSECYWEVVE

SEQ ID NO: 232 - protein, 624 aa, Unknown
  Description of Unknown: Integrase B233 sequence
  IPR036390,SM00857,IPR036162,PF13408,IPR025827, G3DSA:3.40.50.1390,IPR006119,PF07508,SSF53041,IPR011109, PTHR30461,Coil,SSF46785,cd00338,PF00239
MSELSKFSPQTRVAIYNRVSTEKKVQMEALDVQVAYTRKLVEDNHLTIVDQYIEPETGTEAEHRLEYQRMIRDIKADRIDLVVVKCSDRLCRDQAEWHNFVKLHLQKKFQLYFYLDDHIYDHERDDIKYSVQAIVDAEQSKITSKKIRDIHSNRQIYATGSKALHICRPLYGWDRNVEFIDENTKRVWWTVNEKEATELRYALSLVEQGIGFYRLANIMYDRGVRSKGTTGYHKMPSVRIAANTWKKMLTSPMLHGDCILHKEVSNFYTKERVKLPQEDWIYKENVIPPIVSREYHEKIVQIIDARRFQMGCCKGLAGTYKWSNRLVCANCKKPYYRMHYKLHSEKVITWKCSEQFQRTRSACDNMVIAEKELEKQLAAALKEKYAYLFHISSGLINDTIHTIEKALCNSDNGKKLKALETQRELLLRNKDVLFHKLMNGVISDEDFGIYKDRLEKELRELEEKIEGQKDGEKSLADQYRRLQQIRDTIENKNYNEQAILEILYGCVEVIEIHNNGDMDVTMSRELMRSKFELYSIVESDYSLFHFSFTYKKETIYDRNRKAYNEKVLELIRSEKYITIPQMAEQLGNTYSYTWHSIQQLKEQGRIVYIKEKFEHSECYWEVVE

SEQ ID NO: 233 - protein, 624 aa, Unknown
  Description of Unknown: Integrase B234 sequence
  IPR036390,SM00857,IPR036162,PF13408,IPR025827, G3DSA:3.40.50.1390,IPR006119,PF07508,SSF53041,IPR011109, PTHR30461,Coil,SSF46785,cd00338,PF00239
MSELSKFSPQTRVAIYNRVSTEKKVQMEALDVQVAYTRKLVEDNHLTIVDQYIEPETGTEAEHRLEYQRMIRDIKADRIDLVVVKCSDRLCRDQAEWHNFVKLHLQKKFQLYFYLDDHIYDHERDDIKYSVQAIVDAEQSKITSKKIRDIHSNRQIYATGSKALHICRPLYGWDRNVEFIDENTKRVWWTVNEKEATELRYALSLVEQGIGFYRLANIMYDRGVRSKGTTGYHKMPSVRIAANTWKKMLTSPMLHGDCILHKEVSNFYTKERVKLPQEDWIYKENVIPPIVSREYHEKIVQIIDARRFQMGCCKGLAGTYKWSNRLVCANCKKPYYRMHYKLHSEKVITWKCSEQFQRTRSACDNMVIAEKELEKQLAAALKEKYAYLFHISSGLINDTIHTIEKALCNSDNGKKLKALETQRELLLRNKDVLFHKLMNGVISDEDFGIYKDRLEKELRELEEKIEGQKDGEKSLADQYRRLQQIRDTIENKNYNEQAILEILYGCVEVIEIHNNGDMDVTMSKELMRSKFELYSIVESDYSLFYFSFTYKKETIYDRNRKAYNEKVLELIRGEKYITIPQMAERLGNTYSYTWHSIQQLKEQGRIVYIKEKFEHSECYWEVVE

SEQ ID NO: 234 - protein, 624 aa, Unknown
  Description of Unknown: Integrase B235 sequence
  IPR036390,SM00857,IPR036162,PF13408,IPR025827, G3DSA:3.40.50.1390,IPR006119,PF07508,SSF53041,IPR011109, PF00239,PTHR30461,PF13412,SSF46785,Coil,cd00338
MSELSKFSPQTRVAIYNRVSTEKKVQMEALDVQVAYTRKLVEDNHLTIVDQYIEPETGTEAEHRLEYQRMIRDIKADRIDLVVVKCSDRLCRDQAEWHNFVKLHLQKKFQLYFYLDDHIYDHERDDIKYSVQAIVDAEQSKITSKKIRDIHSNRQIYATGSKALHICRPLYGWDRNVEFIDENTKRVWWTVNEKEATELRYALSLVEQGIGFYRLANIMYDRGVRSKGTTGYHKMPSVRIAANTWKKMLTSPMLHGDCILHKEVSNFYTKERVKLPQEDWIYKENVIPPIVSREYHEKIVQIIDARRFQMGCCKGLAGTYKWSNRLVCANCKKPYYRMHYKLNSEKVITWKCSEQFQRTRSACDNMVIAEKELEKQLAAALKEKYAYLFHISSGLINDTIHTIEKALCNSDNGKKLKALETQRELLLRNKDVLFHKLMNGVISDEDFGIYKDRLEKELRELEEKIEGQKDGEKSLADQYRRLQQIRDTIENKNYNEQAILEILYGCVEVIEIHNNGDMDVTMSKELMRSKFELYSIVESDYRLFYFSFTYKKETIYDRNRKAYNEKILELIRSEKYITIPQMAERLGNTYSYTWHSIQQLKEQGRIVYIKEKFEHSECYWEVVE

SEQ ID NO: 235 - protein, 624 aa, Unknown
  Description of Unknown: Integrase B236 sequence
  IPR036390,SM00857,IPR036162,PF13408,IPR025827, G3DSA:3.40.50.1390,IPR006119,PF07508,SSF53041,IPR011109, PTHR30461,Coil,PF13412,SSF46785,cd00338, PF00239
MSELSKFSPQTRVAIYNRVSTEKKVQMEALDVQVAYTRKLVEDNHLTIVDQYIEPETGTEAEHRLEYQRMIRDIKADRIDLVVVKCSDRLCRDQAEWHNFVKLHLQKKFQLYFYLDDHIYDHERDDIKYSVQAIVDAEQSKITSKKIRDIHSNRQIYATGSKALHICRPLYGWDRNVEFIDENTKRVWWTVNEKEATELRYALSLVEQGIGFYRLANIMYDRGVRSKGTTGYHKMPSVRIAANTWKKMLTSPMLHGDCILHKEVSNFYTKERVKLPQEDWIYKENVIPPIVSREYHEKIVQIIDARRFQMGCCKGLAGTYKWSNRLVCANCKKPYYRMHYKLHSEKVITWKCSEQFQRTRSTCDNMVIAEKELEKQLAAALKEKYAYLFHISSGLINDTIHTIEKALCNSDNGKKLKALETQRELLLRNKDVLFHKLMNGVISDEDFGIYKDRLEKELRELEEKIEGQKDGEKSLADQYRRLQQIRDTIENKNYNEQAILEILYGCVEVIEIHNNGDMDVTMSKELMRSKFELYSIVESDYRLFYFSFTYKKETIYDRNRKAYNEKILELIRSEKYITIPQMAERLGNTYSYTWHSIQQLKEQGRIVYIKEKFEHSECYWEVVE

SEQ ID NO: 236 - protein, 624 aa, Unknown
  Description of Unknown: Integrase B237 sequence
  IPR036390,SM00857,IPR036162,PF13408,IPR025827, G3DSA:3.40.50.1390,IPR006119,PF07508,SSF53041,IPR011109, PTHR30461,Coil,SSF46785,cd00338,PF00239
MSELSKFSSQTRVAIYNRVSTEKKVQMEALDVQVAYTRKLVEDNHLTIVDQYIEPETGTEAEHRLEYQRMIRDIKADRIDLVVVKCSDRLCRDQAEWHNFVKLHLQKKFQLYFYLDDHIYDHERDDIKYSVQAIVDAEQSKITSKKIRDIHSNRQIYATGSKALHICRPLYGWDRNVEFIDENTKRVWWTVNEKEATELRYALSLVEQGIGFYRLANIMYDRGVRSKGTTGYHKMPSVRIAANTWKKMLTSPMLHGDCILHKEVSNFYTKERVKLPQEDWIYKENVIPPIVSREYHEKIVQIIDERRFRMGCCKGLAGTYKWSNRLVCANCKKPYYRMHYKLNSEKVITWKCSEQFQRTRSACDNIVIAEKELEKQLAAALKEKYAYLFHISSGLINDTIHTIEKALCNSDNGKKLKALETQRELLLRNKDVLFHKLMNGVISDEDFGIYKDRLEKELRELEEKIEGQKDGEKSLADQYRRLQQIRDTIENKNYNEQAILEILYGCVEVIEIHNNGDMDVIMSKELMRSKFELYSIVESDYRLFHFSFTYKKETIYDRNRKAYNEKVLELIRSEKYITIPQMAERLGNTYSYTWHSIQQLKEQGRIVYIKEKFEHNECYWEVVE

SEQ ID NO: 237 - protein, 623 aa, Unknown
  Description of Unknown: Integrase B238 sequence
  SM00857,G3DSA:1.10.10.2600,IPR036162,PS51737,G3DSA:3.40.50. 1390,IPR006119,IPR038109,PF07508,IPR011109,SSF53041,PTHR30461 ,PS51736,cd00338,PF00239
MKETEKLGNAQSQKEKIRERYKGIDTDQLDVIPALPQDSFYEDKREKRVAVYARVSTDDPRQTSSYELQKNHYQDVVTRHPGWRLIEIYADEGISGTSLQHRDAFIRMINDCHSGKIDLIVTKSVSRFARNVLDCIGYVRQLAALNPPIGIFFETENIYTLNSNSEMSLSFISTLAQEESHTKSEIMNASIEMRFRRAIFLTPPLLGFDLDEDGNLVINEEEAKTVRLIFFMYLYGYTCQEIAETLTSLGRKTKLNNTVWSAGSVLQQLQNERHCGDVLARKTWTPSYLDHKSKKNKQDRNQYRQKNHHEAIISRDDFIAVQRLISNAKYGNRGFLPDLHVFTSGALRGFVSVNPRWAGFKAADYKRASESVYTPAIVLPTKQTYEVNSGDFDLRGFEVARAQFFSSANRVYVTFSNNGIRFSTECVRKLDSHFVEMMIHPGNGIIAFKPAAKDNRNSMEWSRQINGAKVPKPVSGAAFLPNLYNLFGWDSSCKYRIMGFKKHNNDNTLVLFSLADAEILIPNSTIEGDDEEPISLFEEDVKPLGTKTTTFGYPEEWVYSFGNNFYRQAQANELAAFNESDWSVEEEKTSYNPDPPLQVTAQEEIEENIKSMIDGMRQEANNE

SEQ ID NO: 238 - protein, 623 aa, Unknown
  Description of Unknown: Integrase B239 sequence
  PTHR30461:SF3,IPR036162,PS51737,IPR011109,PTHR30461, cd18714,PF00239,G3DSA:1.10.10.2600,IPR006119,PF14287, SSF53041,IPR025378,SM00857,IPR025827,cd03770, IPR038109,PS51736,PF13408,G3DSA:3.40.50.1390,PF07508,Coil
MDTRMITALYERLSRDDDLEGESNSISNQKRQLEDYARSQGFPNPVHFTDDGISGTCFDRPGFLAMMKEVEAERVEYLLIKDMSRLGRDYLKVGQIMEILRQKGVRLIAINDGVDSARGDDDFTPFRNIMNEYYARDTSRKIRSTFQSKGKSGKHVTGTVIYGYLWNETRDQWLVDEYSAGIVKRIFAMTIEGMGPYQIANRLKEEKVLIPSAYLATHNEGVNKNKTFKDVYGWGSSTIVNILDKREYLGHTVNFKTRKHFKDKKSHYVPEDEWTIFENTHEAIIEQETFDLAQKVRSKVRRYPDGWGEVAPLTGLMYCADCGGKMYVHRTNNGKRISQYTCSQYTKVPCGTLCKTQHRINESVVLELISDLLKAIAEYAQHDREEFVRVVQKAQDSHFASDVKKKRNRLTAAQNRLNELEVLLCKIYEDNILGKLPDARYATLDAQYGKEQAELKSEVKALEEFLESHEKNKKSAERFISLIEKYENFDNLTIAMLNEFIDKILVHERDRKGSIQTTQEIEIYFNFVGKFVPPQFMEVELTPEELEEIRKREERKDRLHQNYLKRKASGAQKRYEDKIKAKKKAEMDAKKNALRAEDVAKGVFVPVSNMPKLEPKIAPQKGA

SEQ ID NO: 239 - protein, 623 aa, Unknown
  Description of Unknown: Integrase B240 sequence
  PTHR30461:SF3,IPR036162,PS51737,G3DSA:3.60.15.10,IPR011109, PTHR30461,PF00239,G3DSA:1.10.10.2600,IPR006119,SSF53041, cd00338,SM00857,IPR025827,IPR038109,PS51736, IPR036866,PF13408,G3DSA:3.40.50.1390,PF07508,SSF56281,Coil
MNRYGKRCVLYPRVSTEMQVDGYSLEGQKTMLTRFADREEMVIVDTYEDAGKSGKSIEGRPAFQKMLRDIEEGLDIDYVLVYKLSRFGRNAADILNSLELIQSYGVNLICIEEGIDSSQTSGKLLISVLSAVAEIERENIIEQTMNGRREKARQGGWNGGFAPYGYALVDNKLVIAEAEAVAIRRIFELYTSSEIGLGGVANQLNLEGIRKIPRQNGTLEDWTGHFIKLILDNPVYYGKIAYGRRTKEKVKGTKNDYQMKRNDDYILTDGQHEGIVSEEVWEKAHAKRLRTGVKQPSKIGRDRVHLLSGLLKCPVCGSPMYTNKHAWTNKDGTYKEVYYYVCSRNRMVRGKHCEYKAMLKKTDIEPMVIEAIREIVRNKEYAQAIKKRIGVQIDTKAVDKELEGYRAKLKEVDLNKSRLEREIDNLPIDTKYRERKLHDMTLRLDSLYDIIVELEEKIEDAMMRRDAIAQQAITLEGIYKIMVNFDCVYNIISDEEKRAVVTALIKEIELYRNDESECPLKRIGLNFPVFKDGKEVSELLWDKGNTVETYDLPDIEVLLVGHHGSKYSTGTTLLESVTPEVGVISVGDNSYGHPTEEALLRLTDAGLTVYRTDMQGNILITVD

SEQ ID NO: 240 - protein, 623 aa, Unknown
  Description of Unknown: Integrase B241 sequence
  PTHR30461:SF3,IPR036162,PS51737,IPR011109,PTHR30461, PF00239,G3DSA:1.10.10.2600,IPR006119,PF14287,SSF53041, IPR025378,SM00857,IPR025827,cd03770,IPR038109, PS51736,PF13408,G3DSA:3.40.50.1390,PF07508,Coil
MSKQPEMVIARNPRATRNNDTTLNLDNQMYQQPVTSFQRVSNDAPLSEETKTAIQNTVLQFYVHSQPQEEAEGITACYERLSQEDKLDGESNSISNQKRILEKYCREHGYTAIRHYDEDDGYSGTNFNRPGFQRMLADIKAGKIKRVVVKDMSRFGRNYLQVGMYTEMLFPEYGVHFIAVNDGVDSVRGDSEFTAIRNVFNEMYAKDTSKKIRATWQSKGRSGEHLTTIPPYGYKKDPENKKRWIVDEEAAAVVQKIFALCMDGMGPTQIAKWLQENKVLSPVAYCYENDLPTTSKRPTDPYKWATKTVVHILERLDYLGHTVNFKTSKQSFKSKKVLWNDPADWVIFENTQEPIIEESVFLIVQKIRQGRRRPTKMGDMGMFSGLLFCADCGGKMYLCRANHFKPEQEYYLCSTYRKDRTLCSTHSIRRVVLEEIVLRNLREAIQYVTQYEDDFVQRAADQSLRERDKELAQKKDTLAQSQKRIAELDVIIKRLYEDNISGKLSDERFIKLSRDYELEQTNLTNLVEHLRQEVKEQEKQKVNVRQFIAAVRKYTDMQQLDAYILREFVDKIYISEVYTPDENEPRIKVREIEIVYNFIGAFDFEEAREQSQAAQKEKKTGVA

SEQ ID NO: 241 - protein, 623 aa, Unknown
  Description of Unknown: Integrase B242 sequence
  PTHR30461:SF3,IPR036162,PS51737,IPR011109,PTHR30461, PF00239,G3DSA:1.10.10.2600,PF14287,IPR006119,SSF53041, IPR025378,SM00857,IPR025827,cd03770,IPR038109, PF13408,G3DSA:3.40.50.1390,PF07508,Coil
MDAQEVMHMTDYSKITALYSRLSVGDEDRDGGESNSIQNQKIFLENYARGQHLTNIRHYIDDDESGRFFDRSAYSRMMDDVENGKIGVCIMKDLTRWGRDYLQVGNAMEIFRRNNVRFIAVNNGIDSEKPDTLEFAPFINIMSEWYAKDISKKVKTGIKTKGMSGKPIATEAPYGYVKDPDNKDFWIIDEEAAEVVRLIFRLFIDGKNRNQIAVYLTQEQIPTPTFYMKDRGRGTCKNRALNEDNRYKWNKATLTHILTRQEYCGDVVNFKTTKHFRDKRNHYVDRSQWQITENVHEPIVDRTDFETAQRILENAPVKRPNGDGEIHPLSGLLFCKDCGAKMHIRIDYRNGGKRHVAYCSEYHKGKAKNPKCHSPHIMDADLLMQTIAEVLKKIEDYSISNRAEFEALVKKNLAMQQTDQTKKQQKRIPQITTRLEQIDKVLNKLYEDNALGTIPQDRYEQMSQKYSEEYYTLKTELATLQEQLSAYENAGGRAQKFLKLTERHAAFTDLTPAILNEFISRIEVHERDQKRARYAIQHISIYFNYIGRFENEVTQLAEPTEQEIRQMREEIEEAQREKSRAYHRQYSREYRARNLEKRREYERIKAREYRARRKAQAAAAPTQ

SEQ ID NO: 242 - protein, 623 aa, Unknown
  Description of Unknown: Integrase B243 sequence
  PTHR30461:SF3,cd00338,SM00857,IPR036162,PF13408, IPR025827,G3DSA:3.40.50.1390,IPR006119,PF07508,IPR011109, SSF53041,PTHR30461,Coil,PF00239
MKAAFLIRCSTKNQDLDRQTRDLTRLAKSLGYEYDIENLVFGEKITGKDDVTIKNRESIDKLLRAAKEQKFDVVLVAEVSRMSRDPASGRVYVRQLINMSIPVYFRDIDTWTINPDNGKRVRDAEQVIGAAFDAAWKYLRSLKTQVASGRRNELDNNQISVGQPFFGYTRYGGKDKSKKNCWIVDEVAAEVVVFVFNEYIKDGSTLKSTALATTAKYGELLGRKFSVGSIEHILTYESYHTGIKKISLTDPDTEEIEVFDVKVPILVDTELFEKATAKRKNNRVKSEPYPKQTTYILSKLLKCPYCGYTMTPRAKGNDSRGKTTNERYRIINGKKALSWLCMSGINNATSCNNRISVANEKAEPIIWELIKKELIVFANLNNEERELKVEELTEKITHLASNIDNYNAHKSSLQKQLSKAYTVATMADESVLAMAMTEFNKTARNIRKEMSDCDSAIEQIKGEIDNLVNLKIFYSQPNLPSDIIEKAETDEAEKRKLVKELINKIVPYKITTFKKQHRDRGLVTLNFGVVLLEVYTVNGIYYVFYNANDRGDIRQAYYISGVFAKFQNSINKFDAYKEGEYFVISNADMVMETEEIDELITVNQMVEIAINNGWVLSYCYKQK

SEQ ID NO: 243 - protein, 623 aa, Unknown
  Description of Unknown: Integrase B244 sequence
  SM00857,G3DSA:1.10.10.2600,IPR036162,PF13408,PS51737, G3DSA:3.40.50.1390,IPR025827,IPR006119,cd03770,PF07508, PF14287,IPR011109,SSF53041,IPR038109,PTHR30461, Coil,IPR025378,PF00239
MKKKKVKEIGITALYERLSRDDDGDGDSNSIVHQKQMLEAYAKEHGFVNLRHYTDDGWSGASFDRPAWNELVAGVKAEEITTVIVKDLSRVGRDHLQVGFFTDILFREKEVHFIAIGNGIDSNDQQSSEFAPFLNIMNEWYVRDTSKKIKSVLKARGMSGSAHTSNCACYGYKKDPENPDKWVIDEEAASVVREIFQMCVDGKGPYEIARCLAERKVERPSYYLAKRGLGNHQSDCDYSNPYTWRGHTVATILERPEYTGCTVNFRTYKNSYKDKKIKKADKSDWVIFEGTQEPIIDKETWSIVQNLRKHTRRTDSLGEANPLTGKVFCGECGSLMYNHRRKNGRVRVYYTSKGERRESYSKPEDCYACSKHILTRQTYKAACSGHHIRTSALRSIVLECIRKTCSYVQSNPEEFLELYNQISESQNQSHLRELRSRITKAEHRTKDIDALIRKIYEDNIAGRLSDKMLENLLEGYEKEKNELEEEQKDCQQQLDSAEKQADNTNHFIELAKKYTDFSELTPAMVNEFVSKIIVHRPFELNGTRAVQVEVYLNYIGKFDVPEEPMILSEEELATQKIREEKLEKHRIASRKYMAKYRKRLKEMKKAGTILPENLPAETKGEWL

SEQ ID NO: 244 - protein, 622 aa, Unknown
  Description of Unknown: Integrase B245 sequence
  PTHR30461:SF3,IPR036162,PS51737,IPR011109,PTHR30461, PF00239,G3DSA:1.10.10.2600,IPR006119,PF14287,SSF53041, IPR025378,SM00857,IPR025827,cd03770,IPR038109, PS51736,PF13408,G3DSA:3.40.50.1390,PF07508,Coil
MSKQKITALYERLSRDDELQGESNSISNQKKLLEEYAAQQGFTNCVHFTDDGISGTCFDRPGFLDMMRQVEAGNVDYLCIKDMSRLGRDYLKVGQIMEILRQRGVRLIAINDGVDSARGDDDFTPFRNIMNEYYARDTSRKIKSTFKTKGMTGKHLTGTVIYGYLWNETRDQWIVDEYAAEVVKRIFAMTIDGYGPYQIANRLKEDKILIPSAYLAQHNEGVNKNKTFKDVYGWGSSTIVNLLEKREYLGHTVNFKTRKHFKDKKSHYVPEDEWTIFENTHEAIIEQETFDLAQKIRSKVRRYPDGWGEAAPLTGLLYCADCGGKMYVHRTNNGKRISQYTCSQYTKVPCGTLCKTQHRINEDVVLSLVSDMLRAIAEYAKHDRAEFVRVVQEAQSSQQTSEVKKQRTRLATAKQRVSELEVLLCKIYEDNVLGKLPDARYAVLDAQYAKEQASLTAEIATLEKAVGDYEKHEKSADRFIALIDKYQNFDKLTNTMLNEFVDKILVHERARKGSRETTQEVEIFFNFVGRFVPPAFAEVELTPEELEEIRKREERKDKLHQNYLKRKASGAQKRYEDKIKAAKKAEMDEKKNAIRAEDIARGVFIPVSNLPKREPQKGAITA

SEQ ID NO: 245 - protein, 622 aa, Unknown
  Description of Unknown: Integrase B246 sequence
  SM00857,G3DSA:1.10.10.2600,IPR036162,PS51737,G3DSA:3.40.50.1390, IPR006119,IPR038109,PF07508,IPR011109,SSF53041, PTHR30461,PS51736,cd00338,PF00239
MIDKTKRLEKEQAKAKTKKRIYVEVDPENYDYFPETRQADYYDNDVPQRVAIYVRVSTDDVRQTTSFELQKKYYEDFVIKHPHWTLVKIYADEGISGTSLNKREQFLQMISDAKRGKIDMIITKSVSRFARNIYDFIGIVRDLAERNPPVGVFFESEGIFSLNDDSQLALSFQATMAEEESHTRSRSMETSLRMRLDNGIPLTPKLLGYMHDADGTLIPNPDEAPTVKLAFYMYLYGYSSQQIADAFNALGRKSYLGNINWTSNGIVQILRNERHCGDVLTRKTFTPNFRTHKAKKNRGQRPQSRYRNHHPGIVSRDDYIAVQRMLDNAKYGNKSILPEIRVVEDGVLKGFVTINPRWAGFKEGDYYLASKSVYSSPEEEPHPEEEIQFEVEAGDFDLRGFEIARGEFFDAPRQPHAIIYHKFIKFSTACVRKFGTQNYIEILINPISRKLAIRPTTKENRNSVMASKPEKGILYPRLIPTAAFSETMFNLLGWNIEYKYRILGTLYEQDGVVAYIFDTVDSEAYFKPNVLSKENGEEDCTNVQPLMPSGKRIRAIPESWTSSFGKQFYAQEKSVTELQRQSEEDWMLRLEGQLFETGNKLHVTGFEELKSFITQELQGVDI

SEQ ID NO: 246 - protein, 622 aa, Unknown
  Description of Unknown: Integrase B247 sequence
  PTHR30461:SF3,SM00857,G3DSA:1.10.10.2600,IPR036162,PF13408, PS51737,G3DSA:3.40.50.1390,IPR025827,IPR006119,IPR038109, PF07508,IPR011109,SSF53041,PTHR30461,Coil,PS51736,cd00338,PF00239
MQQALNAVIYARYSSHSQQEQSIEGQLRDCYAYAQREGLQVVGEYIDRAISGKTDERPDFQRMIADASKKQFQRVIVWKLDRFARNRYDSAHYKAKLKKYGVKVVSATENISDEPEGIILEGLLESMAEYYSANLSKHVRRGQRESIINGTYLGGVPPIGYKVENKRLVIDERTAPTIRYMFEQYAKGVPKREIIAELNARGIRNKKGKPLTLSSMQAALRNEKYIGIYRYSGQEVMGGCEALIDEATFRKVQERLDKVKHAPAAAKAKIDYLLQGKAFCGYCGSRMVGESGRGKMGNTYHYYACGKRKKEHTCAKKNEKKDFIEWYVVEQTVEYVLTPDRMDYIAAALVAQYEKDFGDNRIKDYEKQLERINGEIRSLVDTLAVCPPSARQPIFDKMELLDVQKTDLEIDIAKLRVAARVQLTEEQIKVWLKQFCKGDLDDMEFRERIIDVFINSVYLYDDKTVIYYNIEGGKQVSYMEMLDSTEEPPFADDPQGSSGVRISNDTPQLLFAVLQQRTVNIAANQSDVHGCYSLSVFSYFTTVFRCGKAPARLLCPSPVPRSALRLVVHTGHIINRNKGLWVLAVDKVHQLLILVFVHDGNDLVVLFKVVCADGLVHGGTAV

SEQ ID NO: 247 - protein, 622 aa, Unknown
  Description of Unknown: Integrase B248 sequence
  SM00857,G3DSA:1.10.10.2600,PS51736,IPR036162,PS51737, G3DSA:3.40.50.1390,IPR006119,IPR038109,PF07508,IPR011109, SSF53041,PTHR30461,Coil,mobidb-lite,cd00338, PF00239
MKEYEERTETIEQQKALIRERYKGINPDELDVIPALPKPDIFKTSSMLRVAVYARVSTDDPRQTSSYELQKNHYQDVVDRNPNWNLVKIYADEGISGTSLQHREAFKQMVQDCEDGKIDLILTKSVSRFARNVVDCIGYVRELLSLRPPVGVFFETEHLNTLDPKSEMILSFMSTLAQEESHTKSEIMNASIEMRFRRGIFLTPPLLGYDQDENGELKINEHEAKIVKLIFYMYLNGNTCQEIADTLTELGCKTKKNNEVWSSGSVLQILQNERHCGDVLARKTWTPNYLDHKSRKNNQDRNQYRKREHHEAIISRDDFIAVQKLISNAKYGNKALLPELHVIPDGALKGFITVNPRWAGFKPDDYRAASSSIPDSEITLSDTIPITAQLGSFDLRGYEIAHGQFFETTGKISATLSYEKLNFSTEALRKFGKIKTVELLIHPSSYLLAVRPCTLEDNRNKVQWARLRNGVLVPRYIYGAAFLPTLYELFGWNPNCKYRVLGVAHQKGSENVLIFNMKETEVRIPNEAPATTDKDSPNKSTEASSTPKTILGYPAEWMNSFGNNYYSQTHARELAAFTNNKNWKTTSEGQPYKESELHTTPKADLTKGIVEIMEEIKENRND

SEQ ID NO: 248 - protein, 622 aa, Unknown
  Description of Unknown: Integrase B249 sequence
  PTHR30461:SF3,IPR036162,PS51737,IPR011109,PTHR30461, PF00239,G3DSA:1.10.10.2600,IPR006119,PF14287,SSF53041, IPR025378,SM00857,IPR025827,cd03770,IPR038109, PS51736,PF13408,G3DSA:3.40.50.1390,PF07508,Coil
MSKQKITALYERLSRDDELQGESNSISNQKKLLEEYAAQQGFTNCVHFTDDGISGTCFDRPGFLDMMRQVEAGNVDYLCIKDMSRLGRDYLKVGQIMEILRQRGVRLIAINDGVDSARGDDDFTPFRNIMNEYYARDTSRKIKSTFKTKGMTGKHLTGTVIYGYLWNETRDQWIVDEYAAEVVKRIFAMTIDGYGPYQIAKKLSEDKILIPSAYLAQHNEGVNKNKTFKDVYGWGSSTIVNLLDKREYLGHTVNFKTRKHFKDKKSHYVPEDEWTIFENTHEAIISQETFDLAQKIRSKVRRYPDGWGEAAPLTGLLYCADCGGKMYVHRTNNGKRISQYTCSQYTKVPCGTLCKTQHRINEDVVLSLVSDMLRAIAEYAKHERAEFVRVVQEAQSSQQTSEVKKQRTRLATAKQRVSELEVLLCKIYEDNVLGKLPDARYAVLDAQYAKEQAALTAEIATLEKAVGDYEKHEKSADRFIALIDKYQNFDKLTNTMLNEFVDKILVHERARKGSRETTQEVEIFFNFVGRFVPPAFAEVELTPEELEEIRKREERKDKLHQNYLKRKASGAQKRYEDKIKAAKKAEMDEKKNAIRAEDIARGVFIPVSNLPKREPQKGAITA

SEQ ID NO: 249 - protein, 621 aa, Unknown
  Description of Unknown: Integrase B250 sequence
  PTHR30461:SF3,SM00857,IPR036162,PF13408,IPR025827, G3DSA:3.40.50.1390,IPR006119,PF07508,SSF53041,IPR011109, PF00239,PTHR30461,Coil,cd00338
MKAAFLIRCSTKKQDYNRQVKDLSRLADRMGYSYDASTIYGEHITGKDDATKQDRASIRHLKDDAEAGRFDVVLVAEVSRLSRDPMSGRVYVRELSNMNIPVYFRDIDKWTIDPATGKKVPNAETEIGANFDGAWKYLKSLKTQIASGRRDELDNNCMSIGQPFFGYKRFGGRDKTKKNSWVIDEDAKEVVIEVFNRYLQDDATLKSVALSITKDYGDKFGKKFSLGSIEHILTFEPYYTGIKIVSLRDPDADEVEQFEVQIPAIITETTYKNAENKRKTNRVKSDPYPMQVERTLSKLVKCPCCGHSLTPRKRAGDGAGQKYRMTNGKLGISWFCMSRINNMADCTATVSINNEKLEPIIWELVKKELISFANLNTEDRLQKVEEYKKKIANVEADMANYQEQKDSLAKKVNRAYQAYIDAPDEIVEDAKNMYLQTQTSCKKEMLECQSKIEGFQQKKETYLMYKKALEQPEVPDDAIKKAEADPKEKRRLVKELIEKIVPYSVSTYQVKERYGTGMRTLKQGVLLIEVYAICGTYNILFNGNQRGKEQYAYYIGGNFATYQKGLRKFDAYEEGEYFVISNASLVMNTDDVDECVTMNEFQEIAEENQWVLSFEYNCKKK

SEQ ID NO: 250 - protein, 621 aa, Unknown
  Description of Unknown: Integrase B251 sequence
  PTHR30461:SF3,SM00857,IPR036162,PF13408,IPR025827, G3DSA:3.40.50.1390,IPR006119,PF07508,SSF53041,IPR011109, PTHR30461,Coil,cd00338,PF00239
MKAAFLIRCSTKKQDYNRQVKDLSRLADRMGYSYDASTIYGEHITGKDDATKQDRASIRHLKEDAEAGRFDVVLVAEVSRLSRDPMSGRVYVRELSNMNIPVYFRDIDKWTIDPATGKKVPNAETEIGANFDGAWKYLKSLKTQIASGRRDELDNNCMSIGQPFFGYKRFGGRDKTKKNSWVIDEDAKEVVIEVFNRYLQDDATLKSVALSITKDYGDKFGKKFSLGSIEHILTFEPYYTGIKIVSLRDPDADEVEQFEVQIPAIITETTYKNAENKRKTNRVKSDPYPMQVERTLSKLVKCPCCGHSLTPRKRAGDGAGQKYRMTNGKLGISWFCMSRINNMADCTATVSINNEKLEPIIWELVKKELISFANLNTEDRLQKVEEYKQKIANVEADMANYNEQKESLAKKVNRAYQAYIDAPDEIVEDAKNMYLQTQASCKKEMLECQSKIEGFQQKKETYLMYKKALEQPEVPDDAIKKAEADPKEKRRLVKELIEKIVPYSVSTYQVKERYGTGMRTLKQGVLLIEVYAICGTYNILFNGNQRGKEQYAYYIGGNFATYQKGLRKFDAYEEGEYFVISNASLVMNTDDVDECVTMNEFQDIAEENQWVLSFEYNCKKK

SEQ ID NO: 251 - protein, 621 aa, Unknown
  Description of Unknown: Integrase B252 sequence
  PTHR30461:SF3,cd00338,SM00857,G3DSA:1.10.10.2600,IPR036162, PS51737,G3DSA:3.40.50.1390,IPR006119,IPR038109,PF07508, SSF53041,IPR011109,PTHR30461,Coil,PF00239
MNIKNMTITPIFEEIDLMLLRKSRTDDTKEPIEITLKRHEEQLQELSIKTTGKPIKEENIYREIVSGGENIKDRPDFLRLLRRLENGNIKRVWCMDPERLSRSGIYGAGDVLKIFDITNTLIATIEQIYDLKNPMDKKYLEMRMIQSAEYRNYSKDVMNRGRHKSVRDGYYIGSSAPFGYKRKQLPQEKNRFILEPHEDESITVKLMFEMLLEGVGTSNLANHLNKYKYKARKNEYWTPAMVRNIVTSEVYCGYNTWEKFKTVEEIINGEIVKKRKLNEDYYIYKGKHKALISEEEFKHVQEILKSHPSSKCSLNKKPSNPLAGIMICKKCGRHMVRRPYTEKHLKHGYRKYKYDKQELLDFMRKSKEDSKLSLTQIAKKMNVSTDTVKGWFPTKIERFYDGKNLSDNWFKLKEVLNIQETKWDKIITTYKKKVKQNDSLICITPFCDNVSSELQLVEKRLLQALEIQLNDFKYYVDNYEQEIIKEAKDNAKTLNKIEKQIEELKKELKNLRRSYNREEFTYDEYVEDKTDIENELKEIEQTKEEILKDTNQDKIMRYKKGIPILADTLKKYDTLSIQEKNELLKDIFIKVEYEKNEGGRWNKEAIDKFTLTPYLKILTNE

SEQ ID NO: 252 - protein, 620 aa, Unknown
  Description of Unknown: Integrase B253 sequence
  PTHR30461:SF3,cd00338,SM00857,G3DSA:1.10.10.2600,IPR036162, PF13408,PS51737,G3DSA:3.40.50.1390,IPR025827,IPR006119, IPR038109,PF07508,IPR011109,SSF53041,PTHR30461,PS51736, Coil,PF00239
MNPVDKIAVVYARYSSHGQTEQSIEGQIAAAQKYAEQHGYTIIHVYADRAMTGRNDDREQFQKMLSDTAMHQFGVILLWKIDRFGRNREEIAFNRYRCKKNGVRVERVAEDVPDGPEGVILDSVLEGMAEYYSLQLAQNVRRGQRESAKKSMSIGGNKMLGYIVNPETKRYESDPKTASYVTEIFKRYANGETISEIVAWLNAQGIRTTRGSEFTVNSLHRLLKNEKYTGVYIFHDIRNEGGMPALTDRTTFDKVQEMLKVNRRAPVRVWSKTEYLLTDKLFCGHCGAMMVGESGHGRNGIKHSYYTCLNRKKKKSCDKKPVRQDMIEPLVLRAIGKLLENPATLENIADQVWAAYERSDTSGDAIKALDKQIADVDRALSNVMKAIEMGIINEMTKTRMDELTNQKQALSTARAEAGLAEGFKLTRDMILFFLQEISALDMADRDSQKRLIKTFVNAIYLYDDHFDIAFNYTDNGKVVVRMQEINDAVRGEVFGCCAQSPTKKDPQLRLRVLFCAGAGRIRTGRPSADGKKQSCGLFFRPRLANPPAPTKKLWQRCCRSFFSLLYRTKPAKAMTDFQSAFYRDVQLLPGGWTFFVANLYNSKCRYGERGAAAAGAVLEP

SEQ ID NO: 253 - protein, 620 aa, Unknown
  Description of Unknown: Integrase B254 sequence
  PTHR30461:SF3,cd00338,SM00857,G3DSA:1.10.10.2600,IPR036162, PF13408,IPR025827,G3DSA:3.40.50.1390,PS51737,IPR006119, IPR038109,PF07508,IPR011109,SSF53041,PTHR30461, PS51736,Coil,PF00239
MKDVEVIKARNTLSPRARTNFEKRLRVAAYCRVSTDTEDQLNSYKSQVKYYTELIKSKPEWSLAGIYADEAITGTQVKKREDFQRLINDCMNGDVDMVITKSISRFARNTLDTLKYVRMLKDKGVAVFFEEENINTLTMDGELLLVILSSVAQQEVENISANVKKGLKMKMQRGELVGFQGCLGYDYNPEDKTLTVNEEEAAVVRYIFQRYTEGAGGSVIAKELENLGYKTKRGSPKWADSTVIGIIKNEKYKGDILLGKTFTVDPISKRRLYNFGEEDQFYIREHHEPIISEEVFEAAQEILRRRAKPRSLNVDGKREKFSRKYAFSCMIECGFCGGTLTRRSWHSSSQYNKAIWQCVVSTKKGKKFCPESKGVDERTIERAFVESYRLLCQNNKDVLDEFMKRTEEALSESNAGKRLAKAEKDIHALEVKKNKLVDMRLEDTIDKETYDRKYLDLSSQIEQLQKECESLQDAAETETTMRKRVAMFRQTLEQNEVLDTFDRHIFESIVEKVIVGGYDSDGNKDPYMIVFVYKTGFKNSVDGKNFKPLRKNSKENHSPAVLCSHASNEAESMCSDSSDDTLRGCELLYQNDVTNATLKPLRVYHGINPHKTLIFSIFKT

SEQ ID NO: 254 - protein, 620 aa, Unknown
  Description of Unknown: Integrase B255 sequence
  PTHR30461:SF3,SM00857,G3DSA:1.10.10.2600,IPR036162,PS51737, G3DSA:3.40.50.1390,IPR006119,IPR038109,PF07508,IPR011109, SSF53041,PTHR30461,Coil,PS51736,cd00338, PF00239
MYQYSQECLPARNVVVYARVSTEHEAQLSALENQKDWYKPIIDRHPEWNVVRMYVDEGITGTSAKKRPQFMKMIQDADSGEFDLILTREVSRFARNTVDTLQYTRSLKEKGVEVFFINDNIKTFDGDGELRLTIMATLAQDESRKTSMRVKSGQQTSMENGVFYGNGNILGYNRVEKDMIINPDQARTVRMIYDMYLDGAGMRAIQFKLEEEGRLTAMGKTNWHTSNISKILKNSFYCGIITYHKEFTPNYLEQKKIRNFGDIEITTVKGSHEPIVTQEEFERVQQIMASRRGEIPNLAYGERIGKNPPKCVWAKLLVCDCGHKFNRKIWHRGKDSIQYAYQCYSSIRTGTASSRARRGLPTEGICRSPMIPEWKLQLMAKYVFTECLIGKNQILDLAESMLRKHIDDKKAEFDNTKIIEQKEAEYTKFLKRLENLIEMRADGEITRDEFKYMREEVESKLSKLRSEIDSLKLQDNEEEDINQKDKIKILRYYLEQSLTVVEGEDIPEDVIQAFVSKIVVYEDRFDWYLRFSANKIPESLTVQGNKKASKNTPPFVIHNSGCYRRKKELISPIITEISQSTYIKIYEFKIGLKEAKAFQNQYNQNHKIHKWNDLKVSIYL

SEQ ID NO: 255 - protein, 620 aa, Unknown
  Description of Unknown: Integrase B256 sequence
  PTHR30461:SF3,cd00338,SM00857,G3DSA:1.10.10.2600,IPR036162, PF13408,PS51737,IPR025827,G3DSA:3.40.50.1390,IPR006119, IPR038109,PF07508,IPR011109,SSF53041,PTHR30461, PS51736,Coil,PF00239
MSSVDKIAVVYARYSSHGQTEQSIEGQIAAAQKYAEQHGYTIIHVYADRAMTGRNDDREQFQKMLSDTAMHQFGVILLWKIDRFGRNREEIAFNRYRCKKNGVRVERVAEDVPDGPEGVILDSVLEGMAEYYSLQLAQNVRRGQRESAKKSMSIGGNKMLGYIVNPETKRYESDPKTASYVTEIFKRYANGETISEIVAWLNAQGIRTTRGSEFTVNSLHRLLKNEKYTGVYIFHDIRNEGGMPALTDRTTFDKVQEMLKVNRRAPARVWSKTEYLLTDKLFCGHCGAMMVGESGHGRNGIKHSYYTCLNRKKKKSCDKKPVRQDVIESLVLRAIGKLLENPATLENIADQVWAAYERSDTSGDAIKALDKQIADVDRALSNVMKAIEMGIINEMTKTRMDELTNQKQALSTARAEAGLAEGFKLTRDMILFFLQEISALDMADRDSQKRLIKTFVNAIYLYDDHFDIAFNYTDNGNVVVRMREINDAARGEMFGRCAQCPTKKDPQLRLRVLFCAGAGRIRTGRPSADGKKQSCGLFFRPRLANPPAPTKKLWQRCCRSFFSLLYRTKPAKAMTDFQSAFYRDVQLLPGGWTFFVANLYNSKCRYGERGAAAAGAVLEP

SEQ ID NO: 256 - protein, 619 aa, Unknown
  Description of Unknown: Integrase B257 sequence
  PTHR30461:SF3,cd00338,SM00857,G3DSA:1.10.10.2600,IPR036162, PF13408,IPR025827,PS51737,G3DSA:3.40.50.1390,IPR006119, IPR038109,PF07508,IPR011109,SSF53041,PTHR30461, PS51736,Coil,PF00239
MARKKNIAAGLDAVIYARYSSHNQREVSIEQQIAECTKHAAALGLRIVGTYEDRAISGKTDNRPRFQQMMRDAEKGKFQAVVAWKSNRIGRNMLQAMVNEAKLDDYGVKVFYAEEDFDDTAAGRFALRNMMNVNQFYSENMAEDITRGLYDNANKCMANGRQPLGYKRGADGKVMLDEPAAAVVREIFTRVAAGDLFVDIARDLNAKGIKTSKGATWNKGSFQSICQNERYKGIYIYGNVRIVDGIPRIVSDELWYKVQEAMRMKKNPVGTRHRVGAEDYLLTGKLRCGHCGSYMTGVSGTSRNGELHYYYTCQKRRTEHACNKKNVRRDVIEPAIAQAIKMYCLTDDVIEWVANRTVEYWEKHDNDLHIEALEQQLEENKKATSNMLKAIEMGIITDATRSRMIELETEQSKLAVQLNAAKADVVKIDRDDLIDELQIFRDMDVNNRSVQAELFKDFLVAAYIYDDNRLKLVFSFMGKDNSIEIPLETGEDPPDGEDSPDAKMFVLTPDCSTKKALYFVGSTVLFFFVPAKRSGVHRSPCRRASDTPDLHNSRHLPCRFNRGFRRGLRRQHGAGPTVPAPAWQALAGARRARPVIQPESRNVLILQMWNCNRCVKLVQ

SEQ ID NO: 257 - protein, 619 aa, Unknown
  Description of Unknown: Integrase B258 sequence
  cd00338,SM00857,G3DSA:1.10.10.2600,IPR036162,PS51737, G3DSA:3.40.50.1390,IPR006119,IPR038109,PF07508,IPR011109, SSF53041,PTHR30461,PS51736,Coil,PF00239
MTNTIFKNNTKIGNPYDFLDRNRHRKMVFYGRVSTEHEAQMAALENQIEWYDDQAKYHPNWEVLNKYIDEGITGTQAKKRPAFLQMIEDAKKGKFDLIVTREVCRFARNTVDTLVTTRELKNIGVEVYFVEDNIWTMDGDGELRLTIMATLAQEESRKTSERVKAGQHISRQQGMVYGRGNILGYNRKAKSTYTINPEQAETVRMIFDLYLQGEMGASKIANELTRLGRKNASGLVKWSPCVITRIVNNPTYMGYQAYGKSYSNNYLEQKRILNNDFSTYMLVKSDYEPIITEEEWYRCQEIKQRRVTKTIGVSTDGKKKQPNHGKNETKDLWATKLKCRCGASFRRNRWHKNNNAPWSYGYLCYNRLNNGSAQKRRDAGLDDTGYCDQTEIPDWKLEMMGKMIMEQVWRTRAEDIKLACEILQECYKPDSKAPRQNKSVILANIEKLKYKKDILLDMRSDGEITKEEFLNKKEEIDIKISQLTAEYEKDDCPIESDEAGLELGKIEAALNELIDFSQPVLPREIYQKFVAKVTPYSKTHYRWYLNLDGTGTQTADVKVNGRKSNAAVAFCDEGEIPPVHFKEIIFFNILKQEIINKKSFFVATLHRLLLLKCNSVILY

SEQ ID NO: 258 - protein, 619 aa, Unknown
  Description of Unknown: Integrase B259 sequence
  PTHR30461:SF3,SM00857,G3DSA:1.10.10.2600,IPR036162,PF13408, IPR025827,PS51737,G3DSA:3.40.50.1390,IPR006119,IPR038109, PF07508,SSF53041,IPR011109,PTHR30461,PS51736,cd00338, PF00239
MFCKCGIIELHRKIQKGGSAVKKDVKVIKGDTTLKRTASGCVQRSIKRVAAYCRVSTDTEDQINSYNSQVEHYTEFIQKNKEWTLAGIYADEAITGTQVDRRIDFQRLINDCMNGDIDMIITKSISRFARNTLDTLKYVRKLKEFNVAVFFEEENINTLTMDGELLLTILSSVAQQEVENISANVKKGLRMKMERGEMVGFQGCLGYDYDPETKSISINEKEAEIVRYIFRRYIEGVGGMVISRELEEQGYLSPRGNKRWTETTVLGIIKNEKYKGDLMMGKTYTVDPISKRRLDNFGEQDKFYIENHHEPIISEEDFEKAQGIRLRRSKNRNTVANNGGKREKYSRKYAFSSMLECGFCGHNLSRRNWHSSSEYTKVIWQCVNATKNGKKYCPHSKGIEEEAIEKAFMESYRQVCHNNVEITNEFLKTVEEELKDNSLAKDLKKITNQLDKILKKEKDLVELRLNESISMDIYQDKYNEIAISKEKLLAEKRTLEVTLTDEKALKKRLEGFKKLLESNKYLEEFDRAVFESIVDKIIIGGTNDEGEIDPAMITIIYKTGKKDSQDGRLFKSRRKNAKEVNEETDNKLYPHSSDEVNNLYSYPIDNTCGDGGIIVKKIE

SEQ ID NO: 259 - protein, 619 aa, Unknown
  Description of Unknown: Integrase B260 sequence
  cd00338,SM00857,G3DSA:1.10.10.2600,IPR036162,PS51737, G3DSA:3.40.50.1390,IPR006119,IPR038109,PF07508,SSF53041, IPR011109,PTHR30461,PS51736,Coil,PF00239
MTNTIFKNNTKIGNPYDFLDRNRHRKMVFYGRVSTEHEAQMAALENQIEWYDDQAKHHPNWEVLNKYIDEGITGTQAKKRPAFLQMIEDAKKGKFDLIVTREVCRFARNTVDTLVTTRELKNIGVEVYFVEDNIWTMDGDGELRLTIMATLAQEESRKTSERVKAGQHISRQQGMVYGRGNILGYNRKAKSTYTINPEQAETVRMIFDMYLQGEMGASKIANELTRLGRKNASGLVKWSPCVITRIVNNPTYMGYQAYGKSYSNNYLEQKRILNNDFSTYMLVKSDYEPIITEEEWYRCQEIKQRRVTKTIGVSTDGKKKQPNHGKNETKDLWATKLKCRCGASFRRNRWHKNNNAPWSYGYLCYNRLNNGSAQKRRDAGLDDTGYCDQTEIPDWKLEMMGKMIMEQVWRTRAEDIKLACKILNECYKPDIKAPRQNKSVMLANIEKLKSKKDNLLDMRSDGEITKEEFLNKKEEIDKKISQLTAEYEKDDCPTESDEAGLELSKIEAALNELIDFSQPVLPREIYQKFVSKVTPYSKTHYRWYLNLDGTGTQTADVKVNGRKSNAAVAFCEEGEIPPVHFKEIIFFNILKQEIINKKSFFVATLHRLLSQTSNPHRMY

SEQ ID NO: 260 - protein, 618 aa, Unknown
  Description of Unknown: Integrase B261 sequence
  PTHR30461:SF3,cd00338,SM00857,G3DSA:1.10.10.2600,IPR036162, PS51737,G3DSA:3.40.50.1390,IPR006119,IPR038109,PF07508, IPR011109,SSF53041,PTHR30461,Coil,PF00239
MNEIPIFEEIDLMLLRKSRSDNMKEPIEITLKRHEEQLQELCIKTTGKPVKEENIYREIVSGGENIKDRPDFLRLLRRLENGNVKRVWCVDPERLSRSGIYGAGDVLKIFDVTNTLIATLDQTYDLKNPMDKKYLEMRMIQSADYRNYSKDVMNRGRHKSVRDGYYIGSSAPFGYKRKQLHDEQDRFILEPHEEESQTVILMFEMLLEGVGTSNLANHLNKYKYKARKNEYWTPAMVRNIVTSEVYCGYNTWEKFKTVEEIINGEVVKKRKLNDKYYVYKGKHKALISEEEFKSVQEILKSHPSSKLGGNKNASNPLAGVVFCKKCGRHMIRRPYNEKHLKNGFRKYKYNKQELLDFMRSSKEKSNLSLSQIAKKMNISRDTVKGWFPTNIDKFYDGKNLANHWYQLKEVLEIKDSKWDKIITTYNKKVKQNDSLICLTPFCDNVSSELQLVEKRLLQALEIQLNDFRYYVDNYEQEIIKEAKSNAKTLNKIEKQIEDLKKELKNLRRSYNREEFTYDEYVEDKNDIESELKEIEKTKEEILKDTNQDKIIRYKKAIPILADCLKQYDKLSIQEKNNLLKDIFVKVEYEKNEGGRWNKEAIDKFTLTPHLKILIDEIE

SEQ ID NO: 261 - protein, 618 aa, Unknown
  Description of Unknown: Integrase B262 sequence
  PTHR30461:SF3,SM00857,G3DSA:1.10.10.2600,IPR036162,PS51737, G3DSA:3.40.50.1390,IPR006119,IPR038109,PF07508,IPR011109, SSF53041,PTHR30461,Coil,PS51736,cd00338, PF00239
MNEIPIFEEIDLMLLRKSRSDNIKEPIEITLKRHEEQLQELCIKTTGKPVKEENIYREIVSGGENIKDRPDFLRLLRRLENGNIKRVWCVDPERLSRSGMYGAGDVLKIFDVTNTLIATLDQTYDLKNPMDKKYLEMRMIQSAEYRNYAKDVMNRGRHKSVRDGYYIGSSAPFGYKRKQLHDEKDRYILEPHEEESQTVILMFEMLLEGVGTSNLANHLNKYKYKARKNEYWTPAMVRNIVTSEVYCGYNTWEKFKTVEEIINGEVVKKRKLNDKYYVYKGKHKALISEEEFKSVQEILKSHPSSKLGGNKNASNPLAGVVFCKKCGRHMIRRPYNEKHLKNGFRKYKYDKQELLDFMRSSKEKSNLSLSQIAKKMNISRDTVKGWFPTNIDKFYDGKNLANHWYQLKEVLEIKDSKWDKIITTYNKKVKQNDSLICLTPFCDNVSSELQLVEKRLLQALEIQLNDFRYYVDNYEQEIIKEAKSNAKNLNKIEKQIEDLKKELKNLRRSYNREEFTYDEYVEDKNDIESELKEIEKTKEEILKDTNQDKIIRYKKAIPILADCLKQYDKLSIQEKNNLLKDIFVKVEYEKNEGGRWNKEAIDKFTLTPHLKILLEENE

SEQ ID NO: 262 - protein, 618 aa, Unknown
  Description of Unknown: Integrase B263 sequence
  PTHR30461:SF3,SM00857,G3DSA:1.10.10.2600,IPR036162,PS51737, G3DSA:3.40.50.1390,IPR006119,IPR038109,PF07508,IPR011109, SSF53041,PTHR30461,Coil,PS51736,cd00338, PF00239
MNEIPIFEEIDLMLLRKSRSDNIKEPIEITLKRHEEQLQELCIKTTGKPVKEENIYREIVSGGENIKDRPDFLRLLRRLENGNIKRVWCVDPERLSRSGMYGAGDVLKIFDVTNTLIATLDQTYDLKNPMDKKYLEMRMIQSAEYRNYAKDVMNRGRHKSVRDGYYIGSSAPFGYKRKQLHDEKDRYILEPHEEESQTVILMFEMLLEGVGTSNLANHLNKYKYKARKNEYWTPAMVRNIVTSEVYCGYNTWEKFKTVEEIINGEVVKKRKLNDKYYVYKGKHKALISEEEFKSVQEILKSHPSSKLGGNKNASNPLAGVVFCKKCGRHMIRRPYNEKHLKNGFRKYKYDKQELLDFMRSSKEKSNLSLSQIAKKMNISRDTVKGWFPTNIDKFYDGKNLANHWYQLKEVLEIEDSKWDKIITTYNKKVKQNDSLICLTPFCDNVSSELKLVEKRLLQALEIQLNDFKYYVNNYEQEIIKEAKSNAKNLNKIEKQIEDLKKELKNLRRSYNREEFTYDEYVEDKNDIESELKEIEKTKEEILKDTNQDKIIRYKKAIPILADCLKQYDKLSIQEKNNLLKDIFVKVEYEKNEGGRWNKEAIDKFTLTPHLKILLEENE

SEQ ID NO: 263 - protein, 618 aa, Unknown
  Description of Unknown: Integrase B264 sequence
  PTHR30461:SF3,IPR036162,PS51737,IPR011109,PTHR30461, PF00239,G3DSA:1.10.10.2600,IPR006119,PF14287,SSF53041, IPR025378,SM00857,IPR025827,cd03770,IPR038109, PS51736,PF13408,G3DSA:3.40.50.1390,PF07508,Coil
MAGIKEEKKIYLVGIYCRLSKDDGTDNESASIATQKSILTDYVKKQGWHIAKTYVDDGYSGTNFQRPSFQNMIKDIESGLINCVITKDLSRLGRNYLDCGLYLEVFFPEHNVRYIAVNDGVDTLNKSAMDITPFRNILNEMYAADISVKIKSAYRARFQQGKFMGTTAPYGYIKDPADHNHLLIDDKVAHVVKEIFDLALKGNGVAKICRHLNKQHILRPAAYAAERGETGFERHFEGNEDKRYIWSGNSVRSILRSPIYAGNLVGYKRIAANMKSKKRPSKLPEEWEVIPNTHEGIVTQEEFDIVQQLITSRRLPQNKGGFVNIFAGVIKCVDCGCALRAMNVHRRKRPEIIDCVQYSCNNYARNGRSECSAHNIEARDLFNAVLADINCFADMAVNDEKAVRAIEKRLTETDQSRAKALEKERKKLNKRLAELDRLFSSLYEDKVMERITERNFEMMSGKYQKEQLEIEARLKEVTETLNESYEKSRGIRDFLALIRNYQGLKELDATVINALIDKILVSEREKMADGTVKQEIKIYYKFIGFVDELHIIPTKRWAAMPAKNCTVCGVEYVPGSGASRYCPACAKKIRREKSNESKRRSREQKRIACMNCPQKMTD

SEQ ID NO: 264 - protein, 618 aa, Unknown
  Description of Unknown: Integrase B265 sequence
  PTHR30461:SF3,cd00338,SM00857,G3DSA:1.10.10.2600,IPR036162, PF13408,PS51737,IPR025827,G3DSA:3.40.50.1390,IPR006119, IPR038109,PF07508,IPR011109,SSF53041,PTHR30461, PS51736,Coil,PF00239
MKEKTKVYIYTRVSTAVQVDGYSLDAQKSRMKAYAEFNDFEIVGEYEDAGKSGKSIEGRLEFNRMMEDIKSGKDGVSYVLVFKLSRFGRNAADVLSTLQVMQDFDVNLICVEDGIDSSKDAGKLMISVLSAVAEIERENIRVQTMEGRIQKAREGKWNGGFAPYGYKLEKGMLYINEEEAEAIRIIFDQYVHTDIGANGLAKYLANHGINKIQRQNGKNPLFDAALIRRILKNPVYCGKIAYGRRRTEKVHGTRNDYRLVEQENYLLVDGLHEAIVSEGLWHEAQVKLLAQAKKYEKVNNGKDNKVHLLTGLLKCPICGAGMYGNKSIKHKPDGTKYKDFFYYGCKHRTMTRGHKCEYKKQINEELLDGAVAEVIIKLVSNPKFAAMMQQKINMKIDTSAIEQEIANYEKQLRQSYATKSRLIDEIDTLDPDDKHYIKRKADLDDRLYKMYDKIEDTENLLIEARAKKMAIEAEKLTADNIYKVLIYFEKLYAVMDEQEKRQIMESLISEIHIYEERQPNGQWLKSIKFKLPIIEEDMEMSLDSDTHVDTERPIMAATSASDRPLLRRSFALRTSSGIIFLFAVIFLSLISAAQNGKSSSSSITAKSSVPVSAACWAL

SEQ ID NO: 265 - protein, 618 aa, Unknown
  Description of Unknown: Integrase B266 sequence
  PTHR30461:SF3,SM00857,G3DSA:1.10.10.2600,IPR036162,PS51737, G3DSA:3.40.50.1390,IPR006119,IPR038109,PF07508,SSF53041, IPR011109,PF00239,PTHR30461,PS51736,Coil, cd00338
MNKIPIFEEIDLMLLRKSRSDNIKEPIEITLKRHEEQLQELCIKTTGKPVKEENIYREIVSGGENIKDRPDFLRLLRRLENGNIKRVWCVDPERLSRSGMYGAGDVLKIFDVTNTLIATLDQTYDLKNPMDKKYLEMRMIQSAEYRNYAKDVMNRGRHKSVRDGYYIGSSAPFGYKRKQLHDEQDRFILEPHEEESQTVILMFEMLLEGVGTSNLANHLNKYKYKARKNEYWTPAMVRNIVTSEVYCGYNTWEKFKTVEEIINGEVVKKRKLNDKYYVYKGKHKALISEEEFKNVQEILKSHPSSKLGGNKNASNPLAGVVFCKKCGRHMIRRPYNEKHLKNGFRKYKYDKQELLDFMRSSKEKSNLSLSQIAKKMNISRDTVKGWFPTNIDKFYDGKNLANHWYQLKEVLEIEDSKWDKIITTYNKKVKQNDSLICLTPFCDNVSSELQLVEKRLLQALEIQLNDFRYYVDNYEQEIIKEAKSNAKTLNKIEKQIEDLKKELKNLRRSYNREEFTYNEYIEDKNDIENELKEIEKTKEEILKDTNQDKIIRYKKAIPIIADCLKQYDKLSIQEKNDLLKDIFVKVEYEKNEGGRWNKEAIDKFTLTPHLKILIDETE

SEQ ID NO: 266 - protein, 618 aa, Unknown
  Description of Unknown: Integrase B267 sequence
  PTHR30461:SF3,SM00857,G3DSA:1.10.10.2600,IPR036162,PS51737, G3DSA:3.40.50.1390,IPR006119,IPR038109,PF07508,SSF53041, IPR011109,PTHR30461,Coil,PS51736,cd00338, PF00239
MNKIPIFEEIDLMLLRKSRSDNIKEPIEITLKRHEEQLQELCIKTTGKPVKEENIYREIVSGGENIKDRPDFLRLLRRLENGNIKRVWCVDPERLSRSGMYGAGDVLKIFDVTNTLIATLDQTYDLKNPMDKKYLEMRMIQSAEYRNYAKDVMNRGRHKSVRDGYYIGSSAPFGYKRKQLHDEQDRFILEPHEEESQTVILMFEMLLEGVGTSNLANHLNKYKYKARKNEYWTPAMVRNIVTSEVYCGYNTWEKFKTVEEIINGEVVKKRKLNDKYYVYKGKHKALISEEEFKSVQEILKSHPSSKLGGNKNASNPLAGVVFCKKCGRHMIRRPYNEKHLKNGFRKYKYDKQELLDFMRSSKEKSNLSLSQIAKKMNISRDTVKGWFPTNIDKFYDGKNLANHWYQLKEVLEIKDSKWDKIITTYNKKVKQNDSLICLTPFCDNVSSELQLVEKRLLQALEIQLNDFRYYVDNYEQEIIKEAKSNAKTLNKIEKQIEDLKKELKNLRRSYNREEFTYDEYVEDKNDIESELKEIEKTKEEILKDTNQDKIIRYKKAIPILADCLKQYDKLSIQEKNNLLKDIFVKVEYEKNEGGRWNKEAIDKFTLTPHLKILIDEIE

SEQ ID NO: 267 - protein, 618 aa, Unknown
  Description of Unknown: Integrase B268 sequence
  PTHR30461:SF3,cd00338,SM00857,G3DSA:1.10.10.2600,IPR036162, PF13408,IPR025827,G3DSA:3.40.50.1390,PS51737,IPR006119, IPR038109,PF07508,SSF53041,IPR011109,PTHR30461, Coil,PF00239
MGNATIKKAAFLVRCSTNKQDYDRQVRDLQLVADRFRYSLYEIYGEHITGKDDTTKRDRLSIIRVRKDAELHKFDVLLVAEVSRMSRDSVSGRVYVRQFCNLGIPVYFRDKMKWTIDPQTMKEDESFVKELGLYFDGAAEYLKSMKTQIASGRRNSLMNNQLVVGHPPIGYKKRGGTDKYTKNELVIDEALAPMVKDVFAMYLEPEGTLKSVSLAISAKYSKELKGKRKTVSGVQQILCRKEYYTGEYTVYMSDPDNKDLEPEPFTITFEPLIDQETFDAATEKRDLKKSTDSPYPKQAIHPLSRLIKCPHCEHSFSPRVRSGDKPGEKHRIINGKKAYSWICMTRINNAGECNSHVNLNNEKTETIIWDLIKKELLTFADLNKDDRETRIYDLQQKIADAQNQIPVYEEEITRQDRKIKRAYNAYIDAPEVALEKAKEDYHKTLLDATKVKDDYAKEIKQLKKQIKGWEKSIDYYNNSNITTEYIDSIEDKEDEKRKIFLQLIQKIVPIGIRPGVVILQTHTINGIYWVLFDGNQVGQKRIAHYIHESFAVWHSTVKGEIQSSEAESYFSLKNTDVLVGTEDVDPAHVKFREMQMVCEANENVIPYNYIYERAYEGE

SEQ ID NO: 268 - protein, 617 aa, Unknown
  Description of Unknown: Integrase B269 sequence
  cd00338,SM00857,IPR006118,G3DSA:1.10.10.2600,IPR036162, PS51737,G3DSA:3.40.50.1390,IPR006119,IPR038109,PF07508, IPR011109,SSF53041,PTHR30461,PS00397,PS51736, Coil,PF00239
MDNEKKVAGLYIRVSTEDQAREGFSLPEQEKRLRAMCEYKGYEIYKLYKDAGISAKTGNYRPAFEELLQDIREKKCNTIVVLKLDRLTRSVFDLEGIMRFLEENNAYLDCANEEINTTNSSGKLVARMLTSVSQNEIERTSERTKFGLVGAIKEGHIPGKNPLGYKRDGKKLVIDPLTKDIVKRIYDLYFEGKSYSNIATLFNNEEVLGKTNWRDTGILRIISNEIYKGDFVSGKTFNKPVYYENVVEPIVSRELWENCQVQKKKNQKSYMRTQTYIFLQKLKCTKCGRILAGGASHKLKSDKWYFYYRCEDCKNNIKEEVIENSVKTLLADILEYDNVVNEFFLPVLKSKLNDPKVELEKELKSLNNKKERIRKAYIDSVFTEEEYKQESKTIDRQIEFVNSKLLENSQAEQLNFTTEDILLKRDMDFINKVKLPISYYAFNENWDLLDRETKADIVMRYIDDIELEIKNKKYHVKQINFRSTFYNDYEDLYKKGYIDKKRPLTYDFNGVCVDTNIRYSEYLPIKDVMQHLYRLNEYYEVNLYKGTYYKETEKLDIGPLQRNEVPIRVFPLQKDNNGDKNWLSMGMLATKNNLNDIKVNIRDVFETIPDNVTKEDF

SEQ ID NO: 269 - protein, 617 aa, Unknown
  Description of Unknown: Integrase B270 sequence
  PTHR30461:SF3,cd00338,SM00857,G3DSA:1.10.10.2600,IPR036162, PS51737,G3DSA:3.40.50.1390,IPR006119,IPR038109,PF07508, IPR011109,SSF53041,PTHR30461,PS51736,Coil, PF00239
MDNYIASLDRNRPRNIAFYGRVSTEHEAQLSALQNQMQWYDDQLKFHPNWNLVEKYIDEGITGTQAKKRPGFLRMIEDSKKGKFDLIVTREVCRFARNTVDTLVYTRELKSKYNIEVYFVDDNIWTMDGDGELRLTLMATLAQEESRKTSDRVKAGQKISRENGSLYGNGNILGYDRVGNTYVINEEQAETVRMIYDMYLDGLGSMKIAKSLSVQQRKNASGDIKWSAERVMRILKKSTYTGVLAYGQSHSNNYLEQKRINNLDRDSYMYQKVNIPVIIPQNKWDDVQKIIAKRTKSVGDKLSGKKDVKEFWSKKLLCNCGSSFRRNKWRTNKTGEAVYGYQCQRQLNYGSKQFREKNGLDTDGYCGIRMVADWKLDMMAKMVIEHIWKNKGESVILALKMISENYEEDVKPNKKNIKETELKIEKLQKRLQNLIEMRADGEISKEEFAESKNTITEQISILNSELTIDEVESDEPESIEKKIEVIKQAMNEVIDFSQPKLPKYIIDKFISKVLVLDNNKFRWYINLGNDYDKNSDIYLDTQVEGRKNNYSAQILSNDDSLSSVHSSTGSYRRNKGEIINLNFVITYKMAQDYRKSIGKYLRKNQWSDAIIDVAVEL

SEQ ID NO: 270 - protein, 617 aa, Unknown
  Description of Unknown: Integrase B271 sequence
  PTHR30461:SF3,cd00338,SM00857,G3DSA:1.10.10.2600,IPR036162, PS51737,G3DSA:3.40.50.1390,IPR006119,IPR038109,PF07508, IPR011109,SSF53041,PTHR30461,PS51736,Coil, PF00239
MDNYITSLDRNRPRNIAFYGRVSTEHEAQLSALQNQMQWYDDQLKFHPNWNLVEKYIDEGITGTQAKKRPGFLRMIEDSKKGKFDLIVTREVCRFARNTVDTLVYTRELKSKYNIEVYFVDDNIWTMDGDGELRLTLMATLAQEESRKTSDRVKAGQKISRENGSLYGNGNILGYDRVGITYVINEEQAETVRMIYDMYLDGLGSMKIAKSLSVQQRKNASGDIKWSAERVMRILKKSTYTGVLAYGQSHSNNYLEQKRINNLDRDSYMYQKVNIPVIIPQNKWDDVQKIIARRTKSVGDKLSGKKDVKEFWSKKLLCNCGSSFRRNKWRTNKTGEAVYGYQCQRQLNYGSKQFREKNGLDTDGYCGIRMVADWKLDMMAKMVIEHIWKNKGESVILALKMISENYEEDVKPNKKNIKETELKIEKLQKRLQNLIEMRADGEISKEEFAESKNTITEQISILNSELTIDEVESDEPESIEKKIEVIKQAMNEVIDFSQPKLPKYIIDKFISRVLVLDNNKFRWYISLGNDYDKNSDIYLDTQVEGRKNNYSAQILSNDDSLSSVHSSTGSYRRNKGEIINLNFVITYKMAQDYRKSIGKYLRKNQWSDAIIDVAVEL

SEQ ID NO: 271 - protein, 617 aa, Unknown
  Description of Unknown: Integrase B272 sequence
  PTHR30461:SF3,SM00857,G3DSA:1.10.10.2600,IPR036162,PS51737, G3DSA:3.40.50.1390,IPR006119,IPR038109,PF07508,IPR011109, SSF53041,PTHR30461,Coil,PS51736,cd00338, PF00239
MEIENIEQLFNILSTIKVHQIIIYLRKSRNEEKEDLQVVLARHEKMLQDYAIRNFGERIPEENIFREVVSGETIDDRIEIKKVFNKLADEDIKAVLVVEPQRLSRGDMEDCGRVVNVLRYSNTLCITLSKTYDLTNKFDRKIFEMELTQGNEYLEYTKTILKRGKKISLEEGKYIYSTAPFGYGREKLDKGFKLVPHPVEAPIVKMMFELFVESMSSHELANYLNQQGCESRTKTPWNYGMVNNILENETYYGVLVNEKRKVLKKLIDGERIVKTRPRQENYLIVKGLHEPLISKEMYELAQAKIKNNPNSRTGLNRELKNPLAGVVFCSYCGRSLVRNPCTRKHERKKVRAYEINKLELSQYLTEHKKQTNLSLQDIANELNLTKALVAGWFRKKEEKIIYSDVFTEKWPELKKLLNIKGKKFDKEITTYKEPEPRKDMLQCPDLNCKNVSSTLDTVEAAILKKLEETLDDYKYFLDNYEQEAKKKKTNNEKRLKQIETKLSKFKVALRNARRDYNEEKFSYEEYLEDKKYYEAQIEELEKEKNKLSNKDEEEIIIQYKKAVPILANCIKQYNTLESITDKNELLKSFIEKIVYKKTKRMNWRRNDPDDMELTIYM

SEQ ID NO: 272 - protein, 617 aa, Unknown
  Description of Unknown: Integrase B273 sequence
  PTHR30461:SF3,SM00857,G3DSA:1.10.10.2600,IPR036162,PF13408, IPR025827,G3DSA:3.40.50.1390,PS51737,IPR006119,IPR038109, PF07508,SSF53041,IPR011109,PTHR30461,Coil, PS51736,cd00338,PF00239
MGKRQKATGGDAVIYARYSSHNQRDVSIEQQVEACRKHAAELGLTVTATYEDRAISGKTDKRPSFQRMMRDAEQHKFAYVLAWKSNRIGRNMMQALVNESRLVDCGVKVFYAEEDFDDNAAGRFALRSMMNVNQFYIENMAEDVKRGLYDNAKKGLVNGSLPLGYKRGADGKPEIDEPKAAIVREIYTRVAAGELFASIAADLNARGIRTARGREWNKGSFHVLCHNDRYRGIYMYGDIRIPGGMPRIISDELFYDAQEAYGMKKDNRYGRARHGAENYLLTGKLYCGHCGSYMVGISGTSKTGEMHYYYACQKHRLEHTCEKKAIRRDVIENAVARVIMMYCLDDETIDFIVDSTIAYFKQKDHELHIEAMENELVAVQQAISNLMKAIEAGIITPTTRTRLLDLEEQQAKLSAKINTAKAERVEIDRDDLIAGLQLFRTGDIKNKKFLAKLFNTFLLAVYLYDDNRLKIVFSFTGNHNNIEIPLDLDNDCPDSESGPYETEVRMSHLECRKNSGTPPSLGGAEKGDGCSGGRFVRTAPLPPHQLTSGPFRPEVLFYPDAVQRRLSWSTPSVKWQRCWAFLHPPCATMTRKVCCPLWRGHPAASASSAKTTSSGCG

SEQ ID NO: 273 - protein, 617 aa, Unknown
  Description of Unknown: Integrase B274 sequence
  SM00857,G3DSA:1.10.10.2600,IPR036162,PS51737,G3DSA:3.40.50.1390, IPR006119,IPR038109,PF07508,SSF53041,IPR011109, PTHR30461,Coil,PS51736,cd00338,PF00239
MKESEERSSNIDEQKARIRQRYKGIDPEELEVIPALPPEDIFKTEKKLRVAVYARVSTDDPRQTSSYELQKNHYQDVVNKNPNWMLVEIYADEGISGTSLQHRDAFKKMIEDCEAGKIDLIITKSVSRFARNVVDCIRYVRELSSLRPPVGVFFETEHLNTLDPKSEMILSFMSTLAQEESHTKSEIMNSSIEMRFRRGIFLTPPLLGYDQDENGDLVINPHEAKIVQLIFYMYLNGSSTQQIADSLTELGCKTKKNNDVWSSSTILQILQNERHCGDVLARKTWTPNYLDHKSRKNNQDRNQYRKVGHHEAIISRDDFIAVQKLITNAKYGNKEILPELHVIQEGSLSGFISINPRWSGFKARDYFEASQSVLKPANMNVPDTITASAGSFDLRDYEVARGQFFSSVGRISVSFSYKQISFNKDAIRKFPNIKFVELLIHPSSKLLAIRPCSSETKNKVQWSRLKDGQLIPKPISGAAFLPTLYEIFKWDKKCKYRILGVAHQKGNENVLIFNMDDTEIRIPTSTNDVSAPNNNMPDTISDSKSVLAYPADWMNSFGNNYYTQSQAPELTEFTADKNWQTASESKPYKEPELQTTPKETIIQNIKNIITEIKGDTQ

SEQ ID NO: 274 - protein, 617 aa, Unknown
  Description of Unknown: Integrase B275 sequence
  SM00857,G3DSA:1.10.10.2600,IPR036162,PS51737,G3DSA:3.40.50 .1390,IPR006119,IPR038109,PF07508,SSF53041,IPR011109, PTHR30461,Coil,PS51736,cd00338,PF00239
MKESEERSSNIDEQKARIRQRYKGIDPEELEVIPALPPEDIFKTEKKLRVAVYARVSTDDPRQTSSYELQKNHYQDVVNKNPNWMLVEIYADEGISGTSLQHRDAFKKMIEDCEAGKIDLIITKSVSRFARNVVDCIRYVRELSSLRPPVGVFFETEHLNTLDPKSEMILSFMSTLAQEESHTKSEIMNSSIEMRFRRGIFLTPPLLGYDQDENGDLVINPHEAKIVQLIFYMYLNGSSTQQIADSLTELGCKTKKNNDVWSSSTILQILQNERHCGDVLARKTWTPNYLDHKSRKNNQDRNQYRKVGHHEAIISRDDFIAVQKLITNAKYGNKEILPELHVIQEGSLSGFISINPRWSGFKARDYFEASQSVLKPANMNVPDTITASAGSFDLRDYEVARGQFFSSVGRISVSFSYKQISFNKDAIRKFPNIKFVELLIHPSSKLLAIRPCSSETKNKVQWSRLKDGQLIPKPISGAAFLPTLYEIFKWDKKCKYRILGVAHQKDNENVLIFNMDDTEIRIPTSTNDVSAPNNNMPDTISDSKSVLAYPADWMNSFGNNYYTQSQAPELTEFTADKNWQTASESKPYKEPELQTTPKETIIQNIKNIITEIKGDTQ

SEQ ID NO: 275 - protein, 617 aa, Unknown
  Description of Unknown: Integrase B276 sequence
  PTHR30461:SF3,IPR036162,PS51737,IPR011109,PTHR30461, PF00239,G3DSA:1.10.10.2600,IPR006119,SSF53041,cd00338, SM00857,IPR025827,IPR038109,PS51736,mobidb-lite, PF13408,G3DSA:3.40.50.1390,PF07508,Coil
MAKTADTIAIYSRKSRYTGKGESIGNQIDLCREYIRTHYGDAAAEHTVVFEDEGFSGGNLNRPDFKKMMTAAKDRKFKAIVVYRLDRISRNISDFSSLIEELGRLGIDFVSIRESFDTSSPMGRAMMYIASVFSQLERETIAERIRDNMHELAKTGRWLGGTTPTGYASESVKSITVDGKTKKACKLKLLPDEAEIIYKIFDLYEQYDSLTMTETELLRQGIKTKTGRSFTRFSIKSILQNPVYLIADKDAYQYFVDNEAELFAPESDFDGVRGVLAYNRSDQEKGRATVYNPISEWIVSVGEHPGIISSNRWIRVQESLERNKSKSYHKSRGNEALLTGLLWCSCGSRMYPKVTGRKTADGQVVFPYMCKLKERSRRELCNVRNANGNLLDAAICEQVKHLADHSSDFMKQLEKAKSAHAGNRSEFETKLSTLRKEQAETQRKINALIDSLADFSDSTAAVHLKKRIEELNTQDATLSSRIRELESLTDSGVLGGIEFDVMRQLLTVFHDNIDDMTVTQKRAAIRTVVRKVVWDGKVAHVVLFGSPEDEIDWTTFPVDPEEDDNDPEGGGDGSDSPSGVRSGEDSILNASAGIGRKPRLAGGIKGIHGLHQPNGSN

SEQ ID NO: 276 - protein, 617 aa, Unknown
  Description of Unknown: Integrase B277 sequence
  PTHR30461:SF3,SM00857,G3DSA:1.10.10.2600,IPR036162,PS51737, G3DSA:3.40.50.1390,IPR006119,IPR038109,PF07508,IPR011109, SSF53041,PF00239,PTHR30461,PS51736,Coil, cd00338
MEIENIEQLFNVLSTIKVHQIIIYLRKSRNEEKEDLQVVLARHEKMLQDYAIRNFGERIPEENIFREIVSGETIDDRIEIKKVFNKLADDDIKAVLVVEPQRLSRGDMEDCGRVVNVLRYSNTLCITLSKTYDLNNKFDRKIFEMELTQGNEYLEYTKTILRRGKKISLEEGKYIYSTAPFGYDREKLDKGFKLVPHPVEAPIVKMMFELFVESMSSHELANYLNQQGCESRTKTPWNYGMVNNILENETYYGVLVNEKRKVLKKLIDGERIVKTRPRQENYLIVKGLHEPLISKEMYELAQAKIKNNPNSRTGLNRELKNPLAGVVFCSYCGRSLVRNPCTRKHERKKIRVYEINKLELSQYLTKHKNQTNLSLQDIANELNLTKALVAGWFRKKEEKIIYSDVFTEKWPELKKLLNIKGKKFDKEITTYKEPEPRKDMLQCPDLNCKNVSSTLDTVEAAILKKLEETLDDYNYFLDNYEQEAKKKKTNNEKRLKQIETKLSKFKVALRNARRDYNEEKFSYEEYLEDKKYYEAQIEELEKEKNKLSNKDEEEIIIQYKKAVPILANCIKQYNTLESITDKNELLKSFIEKIVYKKTKRMNWRRNDSDDMELTIYM

SEQ ID NO: 277 - protein, 617 aa, Unknown
  Description of Unknown: Integrase B278 sequence
  SM00857,G3DSA:1.10.10.2600,IPR036162,PS51737,G3DSA:3.40.50.1390, IPR006119,IPR038109,PF07508,SSF53041,IPR011109, PTHR30461,Coil,PS51736,cd00338,PF00239
MKESEERSSNIDEQKARIRQRYKGIDPEELEVIPALPPEDIFKTEKKLRVAVYARVSTDDPRQTSSYELQKNHYQDVVNKNPNWMLVEIYADEGISGTSLQHRDAFKKMIEDCEAGKIDLIITKSVSRFARNVVDCIRYVRELSSLRPPVGVFFETEHLNTLDPKSEMILSFMSTLAQEESHTKSEIMNSSIEMRFRRGIFLTPPLLGYDQDENGDLVINPHEAKIVQLIFYMYLNGSSTQQIADSLTELGCKTKKNNDVWSSSTILQILQNERHCGDVLARKTWTPNYLDHKSRKNNQDRNQYRKVGHHEAIISRDDFIAVQKLITNAKYGNKEILPELHVIQEGSLSGFISINPRWSGFKARDYFEASQSVLKPANMNVPDTITASAGSFDLRDYEVARGQFFSSVGRISVSFSYKQISFNKDAIRKFPNIKFVELLIHPSSKLLAIRPCSSETKNKVQWSRLKDGQLIPKPISGAAFLPTLYEIFKWDKKCKYRILGVAHQKDNENVLIFNMDDTEIRIPTNTNDVSAPNNNTPDTISDSKSVLAYPADWMNSFGNNYYTQSQAPELTEFTADKNWQTASESKPYKEPELQTTPKETIIQNIKNIITEIKGDTQ

SEQ ID NO: 278 - protein, 617 aa, Unknown
  Description of Unknown: Integrase B279 sequence
  SM00857,G3DSA:1.10.10.2600,IPR036162,PS51737,G3DSA:3.40.50.1390, IPR006119,IPR038109,PF07508,SSF53041,IPR011109, PTHR30461,Coil,PS51736,cd00338,PF00239
MKESEERSSNIDEQKARIRQRYKGIDPEELEVIPALPPEDIFKTEKKLRVAVYARVSTDDPRQTSSYELQKNHYQDVVNKNPNWMLVEIYADEGISGTSLQHRDAFKKMIEDCEGGKIDLIITKSVSRFARNVVDCIRYVRELSSLRPPVGVFFETEHLNTLDPKSEMILSFMSTLAQEESHTKSEIMNSSIEMRFRRGIFLTPPLLGYDQDENGDLVINPHEAKIVQLIFYMYLNGSSTQQIADSLTELGCKTKKNNDVWSSSTILQILQNERHCGDVLARKTWTPNYLDHKSRKNNQDRNQYRKVGHHEAIISRNDFIAVQKLITNAKYGNKEILPELHVIQEGSLSGFISINPRWSGFKSRDYFEASQSVLKPANMNAPDTITASAGSFDLRDYEVARGQFFSSVGRISVSFSYKQISFNKDAIRKFPNIKFVEMLIHPSSKLLAIRPCSSETKNKVQWSRLKDGQLIPKPISGAAFLPTLYEIFKWDKKCKYRILGVAHQKDNENVLIFNMDDTEIRIPTSTNEVSAPNNNTPDTISDSKSVLAYPADWMNSFGNNYYTQSQAPELTEFTVDKNWQTASESKPYKEPELQTTPKETIIQNIKNIITEIKGDTQ

SEQ ID NO: 279 - protein, 617 aa, Unknown
  Description of Unknown: Integrase B280 sequence
  PTHR30461:SF3,cd00338,SM00857,G3DSA:1.10.10.2600,IPR036162, PS51737,G3DSA:3.40.50.1390,IPR006119,IPR038109,PF07508, IPR011109,SSF53041,PTHR30461,PS51736,Coil, PF00239
MDNYIASIDRNRPRNIAFYGRVSTEHEAQLSALQNQMQWYDDQLKFHPNWNLVEKYIDEGITGTQAKKRPGFLRMIEDSKKGKFDLIVTREVCRFARNTVDTLVYTRELKSKYNIEVYFVDDNIWTMDGDGELRLTLMATLAQEESRKTSDRVKAGQKISRENGSLYGNGNILGYDRVGNTYVINEEQAETVRMIYDMYLDGLGSMKIAKSLSVQQRKNASGDIKWSAERVMRILKKSTYTGVLAYGQSHSNNYLEQKRINNLDRDSYMYQKVNIPVIIPQNKWNDVQKIIARRTKSVGDKLSGKKDVKEFWSKKLLCNCGSSFRRNKWRTNKTGEAVYGYQCQRQLNYGSKQFREKNGLDTDGYCGIRMVADWKLDMMAKMVIEHIWKNKGESVILALKMISENYEEDVKPNKKNIKETELKIEKLQKRLQNLIEMRADGEISKEEFAESKNTITEQISILNSELTIDEVESDEPESIEKKIEVIKQAMNEVIDFSQPKLPKYIIDKFISKVLVLDNNKFRWYISLGNDYDKNSDIYLDTQVEGRKNNYSAQILSNDDSLSSVHSSTGSYRRNKGEIINLNFIITYKMAQDYRKSIGKYLRKNQWSDAIIDVAVEL

SEQ ID NO: 280 - protein, 617 aa, Unknown
  Description of Unknown: Integrase B281 sequence
  SM00857,G3DSA:1.10.10.2600,IPR036162,PS51736,PS51737, G3DSA:3.40.50.1390,IPR006119,IPR038109,PF07508,SSF53041, IPR011109,PTHR30461,Coil,mobidb-lite,cd00338, PF00239
MKESEERSSNIDEQKARIRQRYKGIDPEELEVIPALPPEDIFKTEKKLRVAVYARVSTDDPRQTSSYELQKNHYQDVVNKNPNWMLVEIYADEGISGTSLQHRDAFKKMIEDCEAGKIDLIITKSVSRFARNVVDCIRYVRELSSLRPPVGVFFETEHLNTLDPKSEMILSFMSTLAQEESHTKSEIMNSSIEMRFRRGIFLTPPLLGYDQDENGDLVINPHEAKIVQLIFYMYLNGSSTQQIADSLTELGCKTKKNNDVWSSSTILQILQNERHCGDVLARKTWTPNYLDHKSRKNNQDRNQYRKVGHHEAIISRDDFIAVQKLITNAKYGNKEILPELHVIQEGSLSGFISINPRWSGFKARDYFEASQSVLKPENMNVPDTITASAGSFDLRDYEVARGQFFSSVGRISVSFSYKQISFNKDAIRKFPNIKFVELLIHPSSKLLAIRPCSSETKNKVQWSRLKDGQLIPKPISGAAFLPTLYEIFKWDKKCKYRILGVAHQKDNENVLIFNMDDTEIRIPTSTNDVSAPNNNTPDTTSDSKSVLAYPADWMNSFGNNYYTQSQAPELTEFTADKNWQTASESKPYKEPELQTTPKETIIQNIKNIITEIKGDTQ

SEQ ID NO: 281 - protein, 617 aa, Unknown
  Description of Unknown: Integrase B282 sequence
  PTHR30461:SF3,SM00857,G3DSA:1.10.10.2600,IPR036162,PS51737, G3DSA:3.40.50.1390,IPR006119,IPR038109,PF07508,IPR011109, SSF53041,PF00239,PTHR30461,PS51736,Coil, cd00338
MNNYIASLDRNRPRNIAFYGRVSTEHEAQLSALQNQMQWYDDQLKFHPNWNLVEKYIDEGITGTQAKKRPGFLRMIEDSKKGKFDLIVTREVCRFARNTVDTLVYTRELKSKYNIEVYFVDDNIWTMDGDGELRLTLMATLAQEESRKTSDRVKAGQKISRENGSLYGNGNILGYDRVGNTYVINEEQAETVRMIYDMYLDGLGSMKIAKSLSVQQRKNASGDIKWSAERVMRILKKSTYTGVLAYGQSHSNNYLEQKRINNLDRDSYMYQKVNIPVIIPQNKWDDVQKIIARRTKSVGDKLSGKKDVKEFWSKKLLCNCGSSFRRNKWRTNKTGEAVYGYQCQRQLNYGSKQFREKNGLDTDGYCGIRMVADWKLDMMAKMVIEHIWKNKGESVILALKMISENYEEDVKPNKKNIKETELKIEKLQKRLQNLIEMRADGEISKEEFAESKSTITEQISILNSELTIDEVESDEPESIEKKIEVIKQAMNEVIDFSQPKLPKYIIDKFISKVLVLDNNKFRWYINLGNDYDKNSDIYLDTQVEGRKNNYSAQILSNDDSLSSVHSSTGSYRRNKGEIINLNFVITYKMAQDYRKSIGKYLRKNQWSDAIIDVAVEL

SEQ ID NO: 282 - protein, 617 aa, Unknown
  Description of Unknown: Integrase B283 sequence
  PTHR30461:SF3,SM00857,IPR006118,G3DSA:1.10.10.2600,IPR036162, PS51737,G3DSA:3.40.50.1390,IPR006119,IPR038109,PF07508, IPR011109,SSF53041,PF00239,PTHR30461,PS00397, PS51736,Coil,cd00338
MSEEKKIAGIYIRVSTEDQAREGFSLPEQEKRLRAMCEYKNYEIYKVYKDAGISAKTGNKRPAFEELKEDIVNKKCNTIVVLKLDRLTRSVYDWENIMKFLEENNAYLDCANDDINTTNANGRMVARLLTTVSQNEIERTSERTKIGLAGAIKVGNIPNKAPFGYKHVNKKLVINPLTKDEVIRIFNLYFEGNSYQTIANIYNSEKVFGKTNWCDSTILRILENEIYKGDYVHGKKTNHPTYYENVVEPLVSKELWEECQVQKRKNSRNYKRDKEYLFLQKLRCPKCGRILGGNATRKKNGKVYYYYQCNNCKTIIKEPKIEETIKTMLADILEYDNVVNEFFLPVLKSKLENPKEELGKELKKLNSKKERIKKAYIDSLFTEEEFKEETKIIEEQIELINSKLLENEQTEQLNFTIDDILLKRDMDFINKVKLPISYYAFNDNWNLLDRETKADIIMRYVDDIELETINNKYEVKQVNFRSTFYSDFEELYKQGYIDKKRPLTYNFNGICVDTIVRYSEYLPLKEVMQHLCRLNEYYEVNFYKGTLYKETEKLDMFPLQKNEVPIRIFPLQENNNGNENWVSMGMIATKNNPNDIKVNIRDVFETIPDNVKEEDFC

SEQ ID NO: 283 - protein, 617 aa, Unknown
  Description of Unknown: Integrase B284 sequence
  SM00857,G3DSA:1.10.10.2600,IPR036162,PS51737,G3DSA:3.40.50.1390, IPR006119,IPR038109,PF07508,SSF53041,IPR011109, PTHR30461,Coil,PS51736,cd00338,PF00239
MKESEERSSNIDEQKARIRQRYKGIDPEELEVIPALPPEDIFKTEKKLRVAVYARVSTDDPRQTSSYELQKNHYQDVVNKNPNWMLVEIYADEGISGTSLQHRDAFKKMIKDCEGGKIDLIITKSVSRFARNVVDCIRYVRELSSLRPPVGVFFETEHLNTLDPKSEMILSFMSTLAQEESHTKSEIMNSSIEMRFRRGIFLTPPLLGYDQDENGDLVINPHEAKIVQLIFYMYLNGSSTQQIADSLTELGCKTKKNNDVWSSSTILQILQNERHCGDVLARKTWTPNYLDHKSRKNNQDRNQYRKVGHHEAIISRDDFIAVQKLITNAKYGNKEILPELHVIQEGSLSGFISINPRWSGFKSRDYFEASQSVLKPANMNAPDTITASAGSFDLRDYEVARGQFFSSVGRISVSFSYKQISFNKDAIRKFPNIKFVEMLIHPSSKLLAIRPCSSETKNKVQWSRLKDGQLIPKPISGAAFLPTLYEIFKWDKKCKYRILGVAHQKDNENVLIFNMDDTEIRIPTSTNDVSAPNNNTPDTISDSKSVLAYPADWMNSFGNNYYTQSQAPELTEFTVDKNWQTASESKPYKEPELQTTPKETIIQNIKNIITEIKGDTQ

SEQ ID NO: 284 - protein, 616 aa, Unknown
  Description of Unknown: Integrase B285 sequence
  PTHR30461:SF3,IPR036162,PS51737,IPR011109,PTHR30461, PF00239,G3DSA:1.10.10.2600,IPR006119,PF14287,SSF53041, IPR025378,SM00857,IPR025827,cd03770,IPR038109, PF13408,G3DSA:3.40.50.1390,PF07508,Coil
MTDYSKITALYSRLSVGDEDRDGGESNSIQNQKIFLENYARGQHLTNIRHYIDDDESGRFFDRSAYSRMMDDVENGKIGVCIMKDLTRWGRDYLQVGNAMEIFRRNNVRFIAVNNGIDSEKPDTLEFAPFINIMSEWYAKDISKKVKTGIKTKGMSGKPIVTEAPYGYVKDPDNKDFWIIDEEAAEVVRLIFRLFIGGKNRNQIAVHLKNEQIPTPTFYMKDRGRGTCKNKTLNEDNRCKWNKATLTNILTRQEYCGDVVNFKTTKHFRDKHNHYVDRSQWHITENVHEPIISRSDFETVQRILENAPVRRPNGDGEIHPLSGLLFCKDCGAKMHIRIDYRNGGKRHVAYCSEYHKGKAKNPKCHSPHIMDADLLMQTIAEVLKKIEDYSISNRAEFEALVKKNLAMQQTDQTKKQQKRIPQITTRLEQIDKVLNKLYEDNALGTIPQDRYEQMSQKYSEEYYALKAELATLQEQLSAYENAGGRAQKFLKLTERHAAFTELTPAILNEFISRIEVHERDQKRARYAIQHISIYFNYIGKFENEVTQLAEPTEQEIRQMREEIEEAKKEKSRAYHRQYSREYRARNLEKQREYDRIKAREYRAKKKAQAAAAQPTQ

SEQ ID NO: 285 - protein, 616 aa, Unknown
  Description of Unknown: Integrase B286 sequence
  SM00857,G3DSA:1.10.10.2600,IPR036162,PS51737,G3DSA:3.40.50.1390, IPR006119,IPR038109,PF07508,IPR011109,SSF53041, PTHR30461,Coil,PS51736,cd00338,PF00239
MKESEERSSNIDEQKARIRQRYKGIDPEELEVIPALPPEDIFKTEKKLRVAVYARVSTDDPRQTSSYELQKNHYQDVVNKNPNWILVEIYADEGISGTSLQHRDAFKKMIKDCEAGKIDLIITKSVSRFARNVVDCIRYVRELSSLRPPVGVFFETEHLNTLDPKSEMILSFMSTLAQEESHTKSEIMNSSIEMRFRRGIFLTPPLLGYDQDENGDLVINPHEAKIVQLIFYMYLNGSSAQQIADSLTELGCKTKKNNDVWSSSTVLQILQNERHCGDVLARKTWTPSYLDHKSRKNNQDRNQYRKVGHHEAIISRDDFIAVQKLITNAKYGNKEILPELHVIQEGSLSGFISINPRWSGFKARDYFEASQSVLKPANMNTPDTITASAGSFDLRDYEVARGQFFSSVGRISVSFSYKQISFNKDAIRKFPNTKFVEMLIHPSSKLLAIRPCSSETKNKVQWSRLKDGQPIPKPISGAAFLPTLYEIFKWDKKCKYRIIGVAHQKDNENVLIFNMNDTEIRIPTSTNDVSCSDNNAPDTISDSKSVLAYPADWMNGFGNNYYTQSQAPELTEFTAEKNWQTTSESKPYKEPELQTTPKETIIQNIKNIITEIKGDT

SEQ ID NO: 286 - protein, 616 aa, Unknown
  Description of Unknown: Integrase B287 sequence
  PTHR30461:SF3,IPR036162,PS51737,IPR011109,PTHR30461, PF00239,G3DSA:1.10.10.2600,IPR006119,PF14287,SSF53041, IPR025378,SM00857,IPR025827,cd03770,IPR038109, PS51736,PF13408,G3DSA:3.40.50.1390,PF07508,Coil
MGTKKDSTIYDVAIYCRLSKEDLKEDGDRDESASIGTQKAILTDYVRQRGWHLVQTYVDDGYSGTNFQRPGFQSMIQDIEAKRINCVITKDLSRLGRNYLDCGLYLEVFFPEHGVRYISVNDGVDTLNKSAMDITPFRNILNEMYAADVSMKVKSALRARFNSGLYVSTSPPYGYLKDPADHNHLIIDEKAAPVVKLIFQMALDGAGIAKIRNHLNASYILRPAAYAAAERGESGYERHFEGKEDNRYQWSNNSVRAILRSPVYAGNLVGYKRVAVSMKSKKRPSRLPEEWEVIPNTHEGIVTQAQFDIVQRMMTSRRRDKGGSGFDNIFSGILKCADCGYAMRATSANRRKRPNPIDCVQYMCNNYGTNGSKGCSAHSIEARDLFDAVLADIRHFARLAVEGDEKRVRQLQQQLSSIGATEQKALEREKRKLSKRLGELDKLFSALYEDKVMERITERNFDMVSRKYETEQAQLSARIEEINASLAEKETSDNGVTDFFSLIAGYADAAELSAAMVNALIEKITVGERVQKEDGTVEQTIKIYYKFVGVLSNELHIKATKRYAAPLSPKRCQCCGAEFTPGSGVAKYCKPCAQKIHTQQSTESTRRRRAAARKAA

SEQ ID NO: 287 - protein, 616 aa, Unknown
  Description of Unknown: Integrase B288 sequence
  PTHR30461:SF3,IPR036162,PS51737,IPR011109,PTHR30461, PF00239,G3DSA:1.10.10.2600,IPR006119,PF14287,SSF53041, IPR025378,SM00857,IPR025827,cd03770,IPR038109, PF13408,G3DSA:3.40.50.1390,PF07508,Coil
MTDYSKITALYSRLSVGDEDRDGGESNSIQNQKIFLENYARGQHLTNIRHYIDDDESGRFFDRSAYSRMMDDVENGKIGVCIMKDLTRWGRDYLQVGNAMEIFRRNNVRFIAVNNGIDSEKPDTLEFAPFINIMSEWYAKDISKKVKTGIKTKGMSGKPIVTEAPYGYAKDPDNKDFWIIDEEAAEVVRLIFRLFIGGKNRNQIAVYLTQEQIPTPTFYMKDRGRGTCKNKALNEDNRCKWNKATLTNILTRQEYCGDVVNFKTTKHFRDKHNHYVDRSQWHITENVHEPIISRSDFETVQRILENAPVRRPNGDGEIHPLSGLLFCKDCGAKMHIRIDYRNGGKRHVAFCSEYHKGKAKNPKCHSPHIMDADLLMQTIAEVLKKIEDYSISNRAEFEALVKKNLAMQQTDQTKKQQKRIPQITTRLEQIDKVLNKLYEDNALGAISQDRYEQMSQKYSEEYYALKAELATLQEQLSAYENAGGRAQKFLKLTERHAAFTELTPAILNEFISRIEVHERDQKRARYAIQHISIYFNYIGKFENEVTQLAEPTEQEIRQMREEIEEAKKEKSRAYHRNYSREYRAKNLEKQREYDRMKAREYRARRKAQAAAAQPTQ

SEQ ID NO: 288 - protein, 616 aa, Unknown
  Description of Unknown: Integrase B289 sequence
  PTHR30461:SF3,IPR036162,PS51737,IPR011109,PTHR30461, PF00239,G3DSA:1.10.10.2600,IPR006119,PF14287,SSF53041, IPR025378,SM00857,IPR025827,cd03770,IPR038109, PF13408,G3DSA:3.40.50.1390,PF07508,Coil
MTDYSKITALYSRLSVGDEDRDGGESNSIQNQKIFLENYARGQHLTNIRHYIDDDESGRFFDRSAYSRMMDDVENGKIGVCIMKDLTRWGRDYLQVGNAMEIFRRNNVRFIAVNNGIDSEKPDTLEFAPFINIMSEWYAKDISKKVKTGIKTKGMSGKPIVTEAPYGYVKDPDNKDFWIIDEEAAEVVRLIFRLFIGGKNRNQIAVYLTQEKIPTPTFYMKDRGRGTCKNKTLNEDNRCKWNKATLTNILTRQEYCGDVVNFKTTKHFRDKHNHYVDRSQWHITENVHEPIISRSDFETVQRILENAPVRRPNGDGEIHPLSGLLFCKDCGAKMHIRIDYRNGGKRHVAFCSEYHKGKAKNPKCNSPHIMDADLLMQTIAEVLKKIEDYSISNRAEFEALVKKNLAMQQTDQTKKQQKRIPQITTRLEQIDKVLNKLYEDNALGTIPQDRYEQMSQKYSEEYYALKAELATLQEQLSAYENAGGRAQKFLKLTERHAAFTDLTPAILNEFISRIEVHERDQKRARYAIQHISIYFNYIGKFENEVTQLAEPTEQEIRQMREEIEEAKKEKSRAYHRQYSREYRARNLEKQREYDRMKAREYRARRKAQAAAAQPTQ

SEQ ID NO: 289 - protein, 616 aa, Unknown
  Description of Unknown: Integrase B290 sequence
  PTHR30461:SF3,IPR022025,IPR036162,PS51737,IPR011109, PTHR30461,PF00239,G3DSA:1.10.10.2600,IPR006119,SSF53041, cd00338,SM00857,IPR025827,IPR038109,PF12224, PS51736,PF13408,G3DSA:3.40.50.1390,PF07508,Coil
MAKKKKPTGGVAIIYARYSSHNQRDVSIEQQIEACRKHAAELGLTITDTYEDRAISGRTDNRPAFQRMMRDAEDGKFQYVLAWKSNRMGRNMMQAMVNESRLMDCGVKVFYAEEDFDDSAAGRFALRSMMNVNQFYSDNLAEDVRRGLMDNASKCMANGRQPLGYKRGEDGKVVVDEPAAAIVREIYTRIASGEMFMDIARDLNRRGIKTQSGSEWNKSSFKVLCRNERYRGIYIYGDTRIEGGIPPIVDDVLWYKVQEVLKVKKSKNRHHCPSDEDYLLTGKLRCGKCGGYMIGMSGRSKTGDVHHYYACQNRRVGHTCDKKNIRRDVVEPAVAQAIKQYCLTDDAIEWITDQTIAYWEDEDRKLQIDSIENDLSAVQSSISNVMKAIEMGVITETTRDRLIELERQQTDLKSKLALAKEEIVHVDGANHTPESLCRLLNFATGRQDLFYEALQIGSRADHWCHKINPTLFREMKKNGRASRNDAERIWYSVANDGYDGGVDSSHYNSTRYHGINLHAFFTKGTVEFRLFNGTTHAGRIKAYVQFCLAMSAWAINCDHDNLHFKSVAGYTQQQKHDLMLRVLTKRLGMRGPEFKTARLHLTSAFLTEAESENTAA

SEQ ID NO: 290 - protein, 615 aa, Unknown
  Description of Unknown: Integrase B291 sequence
  cd00338,SM00857,G3DSA:1.10.10.2600,IPR036162,PS51737, G3DSA:3.40.50.1390,IPR006119,IPR038109,PF07508,IPR011109, SSF53041,PTHR30461,PS51736,Coil,PF00239
MHNKYDINEYVVKLDKLGKIIIYLRKSREDIIDGRYASTEETLSRHEEQLQQWAENNLGYRIPEDYIFKEVVSGEKIKNRPEFQKVLKMIENDDIDGVLVVNCSRLSRGDLIDCGTIINTFEVTNTLVLTPPKIYNLKNKYDKRFFKDELLRGNEYLEQTKELLQNGRHWSTSIGKYIGSVAPYGYDRVTCKEMKVSDGKGFTLRPNEKAEFVKLMFDWYVDGAGCYKIASRLNEMNAPYIDDTPWERCKVQRILKNTTYYGYLTYGEYTTVEKMVNGETISQRRYNKDCPKYKGLHTPIVSKEQWDAVQSRLSVGEAPVRKGEETQNPLAGIVKCAVCHRAMVRNADNRKYAKKRVNDLNKAELLRFLNEHKKKAKLSGRKLAVMLDVKTHYCHDWFGTNEARFHPNSPLFVSKWEDIKRVLNITDDRFDKAVTEFKEVTRAPALVCSGHNCENTSARVHAVEEIVIEEVKKRFEDYTYFVDNYAVEITKKIASAKKTAASIDKDIALKEKQIRNAKIAYEKGIDSIEEYIDRKKELLSEIDALNEKKNKIVNADEEEKTITIKKSVPILKNVFESYNELSSGERNALLRTIIESIEYNRMGGGEIKLDICWLV

SEQ ID NO: 291 - protein, 615 aa, Unknown
  Description of Unknown: Integrase B292 sequence
  SM00857,G3DSA:1.10.10.2600,IPR036162,PF13408,IPR025827, G3DSA:3.40.50.1390,PS51737,IPR006119,IPR038109,PF07508, IPR011109,SSF53041,PTHR30461,Coil,cd00338,PF00239
MAYRKITDIRDTIGMRAVFYARVSTAEEEQLNAIELQIEENRGCIKDHGWKLVGEYIDRSKSGTMVKGRDDYQRLYEDLYEDLFDIVVIKDQERLQRNTLDWYLFINRVVQTGKLLFMYMDGKFYSPDDALITGVRAIIAEEFSRNLSKKLHNYHDHRIEKARQGQEIALQGSGNVYGWDKKDGKYYINPEQAKVRRLMCEGIMARKGSTLIAKELNDAGYRNTVGKPWKPMDIPKFVYDCKNVGTMIINKERHDFESKQTIKLPKEEWVYVENALPPIVTQEEWDLICKIHEERVIATGSDRRGKKTSGYSFSGKLVCGICGAPYWRKQRVSKDEYWVCSTKQTKGRRTRKRDSTMGKAGEINPLGCDNENISYNSLMEIMGVVSERLQANTDTIKHDMINWLTKLRKQLLEANGGHTEADLQRELSRKSKLLDAYLDGILNKQEYQKKAEELDERIIQLKAETEKNKANSGDIEEIDKVLANIDEEVSRYVDGNEKLKVEYLLEHLEQVQIFPDKVIVIVPILSEGIVVEKAQYVSREKRSGEDDVDSANLRSAEPHFRELQPLRCQKYGPCDPENAETDGSCGGNAGHLSGYDGCREPGRGFFHLLCHGDGE

SEQ ID NO: 292 - protein, 615 aa, Unknown
  Description of Unknown: Integrase B293 sequence
  PTHR30461:SF3,cd00338,SM00857,G3DSA:1.10.10.2600,IPR036162, PS51737,G3DSA:3.40.50.1390,IPR006119,IPR038109,PF07508, IPR011109,SSF53041,PTHR30461,Coil,PF00239
MQSSEEAIKFLDEYLIYLRKSRNDGEKVPVEVIVKRHEEALQELAERELGFKIPEKNIYREIVSGGESIEDRPEFIKVLQRLEVGNIKGVFVFDPHRLSRSGLYGAGDVLEAFEVTQTLICTPMKFYNLDDKMDKKYLEMIMIQAAEYLNYAKDVMDAGRMKSFAEGKAILSTPPYGYGKEKISDEKGYKLIPNPVEAPNVKKMFELCCEGLGTTAIANYLNERNVKPRKKAYWEPTTIRDMLKNETYIGILTWGKNPIKKILQNGKARKKRFYNQEGFKVAKGLYEPLVTKEQFELAQEMMKSRRNREYYNNGIKNPLAGLVFCGYCGNAMIRRPYNKSFRKNLVRVYEIDKQELLDYLRAYKQQSNLSLTEIAKRLNVTRDVVVGWFPAKLEKFYPSKTLADKWFDLKTLLDIKDDKFDKEVTTYKEPDIQKDSLICSSLKCNCVSSYLEIVENGLIDKLKNELYKRKHFLDNYEQELKKEKVSNEKELKEVEKKIEEIQGYIKNAAKKNAMDIITDEQFLDLKEEFETELNPLLKKKEKLADTKDEERIIQYRRSIPVLERCVSDYHLLSIEEKNRLLKSFIDRIEYKKEVGGRWNKEAINQFELAVETYDF

SEQ ID NO: 293 - protein, 615 aa, Unknown
  Description of Unknown: Integrase B294 sequence
  PTHR30461:SF3,IPR036162,PS51737,IPR011109,PTHR30461, PS00397,PF00239,G3DSA:1.10.10.2600,IPR006119,SSF53041, cd00338,SM00857,IPR025827,IPR038109,mobidb-lite, PS51736,IPR006118,PF13408,G3DSA:3.40.50.1390,PF07508,Coil
MTRKAKTCFIYVRVSTKMQVENGESIEAQLYDLRQYAKRENLRILHEYIDDGYSGKNITGRPHFQEMMEEIKSGVHVDYVLVFKLSRFGRNAADALSSLQFMQDYGTNLVCVKDGINSEAQMGKMMIAFMSAFAEMERENILVQTMAGREQKAREGKWNGGQAPFGYRLVKDEKGKGHLEIDEDEAEIVRIIFREYTKNGKGVHAIASWLNTQGYRKKIRGNSKYEHFAPGTVKNIIRNPVYAGKIAFGRRRTTPVKGERNVYHMVKQDNFDIYEGEHDAIIDEATWNAAQKRLAEDSHPFPEAKPDGHTHLLTGMLVCPVCGRSMIANVSRGKRKKDGTIGKTTYAYTCKYSKRQFGHDCTFTRQFKQEYIDREVIEVISRAAHSAVFEERVREELDAAVDIEKLEADVARIGKALENNGAARRMLSRQLDALDASDRSYERKYEDMQARLDKLYDESADIEEALDEAEAKLESAKEKQVTTARVYEMLDEFQEKFDTYDPAKQKEILQQVVERVEIDPDANPKKGDAIVKRVRFKCPVSFYRTLPEEAYDVLGINEFNRLETTEYTPDENSRVDGNHDESVCVLEKKQFNLKPTKKAQRQAQFRSSKMSKKKR

SEQ ID NO: 294 - protein, 614 aa, Unknown
  Description of Unknown: Integrase B295 sequence
  PTHR30461:SF3,SM00857,G3DSA:1.10.10.2600,IPR036162,PF13408, IPR025827,G3DSA:3.40.50.1390,PS51737,IPR006119,IPR038109, PF07508,SSF53041,IPR011109,PTHR30461,Coil, PS51736,cd00338,PF00239
MNVYRTREILKTCSIFDLKLKVAFYARVSTESEDQQVSIHHQDEYYRNFIAKNKNWVFVGAYIDNGISGIRTEKRDEFQRMMADAKTGKIDMIVTKEITRFARNTLDSIRYTRELLMYGVCVWFQNDNINTIDEDSELRLTIMSGIAQDESRKLSNRIKFGHAQSIKNGVVLGARIYGYIKKDGKLTVDPKTAPMVKEIFEKYSTGEWSTSTIEKYLYKKGYRNYKGGKLSRDNIKKIIKNPKYKGYYCGGKVKVVDMFTKKQEFLPEDEWTMYKDDGNHVPQIVDESVWNKANVIMQTRSNAIKSHRTSFKQNNLFTGYIFCGNDGAPYWMKQHTIRGREDARWVCSYRIKNGAQSCNSFGIREKELRVMLADLINKSGDIQAAIEKYISLVEKNIDFSNDGAEISRLKNMVLQLEKKKEKLLDLNLDGIITNAEYLDKSEKFKDEIQNINNKLSELESKEEADKDSHLKLKEIGKILNDLQGIGPEDITKTVLGEFLDKIVINPKRPQECEILFFLKTGDVKKKSIIERDKQGCSEYFFLTIYPPTDPFCLEVRFPLYPSVSGTPSSFATSYLKRSSAPFASGTTALLEEVLLGIIHFLLGCYLVYCYIASM

SEQ ID NO: 295 - protein, 614 aa, Unknown
  Description of Unknown: Integrase B296 sequence
  PTHR30461:SF3,IPR036162,PS51737,IPR011109,PTHR30461, PF00239,G3DSA:1.10.10.2600,IPR006119,SSF53041,cd00338, SM00857,IPR025827,IPR038109,mobidb-lite,PS51736, PF13408,G3DSA:3.40.50.1390,PF07508,Coil
MRKKSNLNAATRAVIYARYSSANQRDCSIEQQVAKCRELAARLGLTVIDVYEDRAISGKTDRRPNFQRMMKDADLRQFDVVLAWKSNRMGRNMLQAMTNEERLRDNGIRTVYAEEDFDDTAAGRFALRNMMNVNQFYSENMAEDITRGLMDNAAKCLSNGSLPLGYKPGDDRHVVLDEAEAAIVQEIFTRVSCYEPFIDIARDLNRRGIKTKKGAEWGRSSFHTICRNERYRGIYIYRDVRVEGGMPRIISDELFYKVQEVLKVKKNPQGRRKRSGYEEYLLTGKLYCGHCGSPMTGIAGTSKTGAMHYYYTCQKRRTDHSCDKKAVRRDQIERAVGVAIQQQLLTDENIQMMADKLMEYNARTETKYRLQGLQDQLNANKTATANILKAIEMGIITDATKARLLELEKEQGQLLVKIDEAKAEMVPISRNDFVKLLYIYKEGEPTDKKYLAALFDNFLVRVDLYDDHLKITFDPTGGRQPIDMPIGAEESPESPGDSSESSDFEASSQDAEKFVLALHNCTKECLTRKCRAFFYCSILRRHDLVHRQGYSNRAAARSAVRNATVRRSLARGRVPDGAPEKAATNVAAFLLHHSLRDGLALRASARVRLAGTGR

SEQ ID NO: 296 - protein, 614 aa, Unknown
  Description of Unknown: Integrase B297 sequence
  PTHR30461:SF3,IPR036162,PS51737,IPR011109,PTHR30461, PF00239,G3DSA:1.10.10.2600,IPR006119,PF14287,SSF53041, IPR025378,SM00857,IPR025827,cd03770,IPR038109, PF13408,G3DSA:3.40.50.1390,PF07508,Coil
MKIKDKRFKITALYERLSKDDEVQGESNSIVNQKRMLTQYAEQHGYVNIEHYTDDGWTGTNFDRPDWKRMLADIEAGKVGTVIVKDMSRIGRDYLQVGFYTEVMFREKGVHFIAISNGVDSERRESAEFAPFLNIMNEWYVRDTSRKITTVLKARGMSGKAHTTNRCCYGYKKSADNPDKWIIDEEAAEVVRRIFNMCLNGKGPYQIARELAEDKVERPEYYLGIRGRGVNTKSFDMEHPYMWRGGTVKTILTRMEYTGCTVNFRTKKESYKDKRPTKVDSSEWIIFEDTQEPIIDKHTWETVQKLLDTPRRKGVFEENNPLTGKVFCADCGAKMYHHRNAQGIWKKNYFKAGEMIYHAPEDRYDCSNNIRGRQRYEKLCCSHSITTKALETLVLETIKRTCDYAVENEAEFREKVCSISEEQQGELSVRLEKRLAQKQKRVSEINRLIKKLYEDNISGKLNDKRFNTMLSDYESELEALEEDIERDNAELEGMCAKKTDVDVFMELVKKHMAFDELTPAILNEFVDKIMVYKAVGSGANRMQDVDIYLNYIGRFVVPEVVVELTEEEKLAEAKRQEKLEKKRASNRKYMARKREEARKAWAEIEAEKAKVVGH

SEQ ID NO: 297 - protein, 614 aa, Unknown
  Description of Unknown: Integrase B298 sequence
  PTHR30461:SF3,cd00338,SM00857,G3DSA:1.10.10.2600,IPR036162, PF13408,PS51737,IPR025827,G3DSA:3.40.50.1390,IPR006119, IPR038109,PF07508,IPR011109,SSF53041,PTHR30461, PS51736,Coil,PF00239
MDVVLYLRYSSERQNEQSIEGQRHVCEKYCADMGYTIVGEYTDRALSASKETDKRVDFQRMIRDSEKRLWQGVIVYKLDRFARNRYDSATYKTRLKKNGVKVISATEAISDNPEGIILESVLEGMAEFYSKELSQKITRGMHESALKGNSCGGQISLGYKIENKKLVIDPKTAPIVRQAFDMYANGHTVAEICKVFNAAGYKTKSGSDFNKNSFHSMFRNRKYIGEYKFMEVVIDDGVPAIIDKDTFDRVQTILSRKAQAPARGKAIVDYMLSGKVFCGHCGKLMTGTASTSKTGRKYFYYTCAGRRSHNGCTKSPIRKERLEEAVVNDTIKMLTPDFIEYLADLAVKESVKEREESTLIPSLKAEIAEYDKSIERLLKLVENGAESPSLSKRLNELEKSKRAAEKNLAKENAEYFMLDKAQVIFFLTKFTTGNKTDPEFQRRIIDLLVNSVIVWDENDNDDGTQDITITYNLTPKKTRKITVKDIRKSECVFHPVKSTIKTHAKGAYKTPTRVSFSMQNRGKLPFSWQFTLFVVSSSIAVGICSSLALKSRKPLTIAQKGFLHDKERMISSVLINEKMTDRTLTNTVGRLLIRFLLLLFRTRTRFRFPCWTAQ

SEQ ID NO: 298 - protein, 613 aa, Unknown
  Description of Unknown: Integrase B299 sequence
  SM00857,G3DSA:1.10.10.2600,IPR036162,PF13408,IPR025827, PS51737,G3DSA:3.40.50.1390,IPR006119,IPR038109,PF07508, SSF53041,IPR011109,PTHR30461,Coil,PS51736, cd00338,PF00239
MAYRKITDIKDTIGMRAVFYARVSTAEEEQLNAIELQIEENRGCIKDHGWKLVGEYIDRSKSGTMVKGRDDYQRLYEDLYEDLFDIVVIKDQERLQRNTLDWYLFINRIVQTGKLLFMYMDGKFYSPDDALITGVRAIIAEEFSRNLSKKLHNYHDHRIEKARQGQEIALQGSGNVYGWDKKDGKYYINPEQAKVRRLMCEGIMARKGSTLIAKELNDAGYRNTVGKPWKPMDIPKFVYDCKNVGTMIINKERHDFESKQTIKLPKEEWVYVENALPPIVTQEEWDLICKIHEERVIATGSDRRGKKTSGYSFSGKLVCGICGAPYWRKQRVSKDEYWVCSTKQTKGRRTRKRDSTMGKAGEINPLGCDNENISYNSLMEIMGVVSERLQANTDTIKQDMINWLTKLRKQLLEANGGHTEADLQRELSRKSKLLDAYLDGILNKQEYQKKAEELDERIIQLKTETEKNKANSGDIAEIDKVLANIDEEVTRYVDGNEKLKVEYLLEHLEQVQIFPDKVIVIVPILSEGIVVEKTQYVSREKRGGKNHIDPSDLRTAKTDIRKLQVIWKRKYGQENFGSAEKNRRSCGDPVDLSGYDGGRKHERAVLCFGFAVF

SEQ ID NO: 299 - protein, 613 aa, Unknown
  Description of Unknown: Integrase B300 sequence
  PTHR30461:SF3,SM00857,G3DSA:1.10.10.2600,IPR036162,PS51737, G3DSA:3.40.50.1390,IPR006119,IPR038109,PF07508,SSF53041, IPR011109,PTHR30461,Coil,PS51736,cd00338, PF00239
MNKIPIFEEIDLMLLRKSRSDNIKEPIEITLKRHEEQLQELCIKTTGKPVKEENIYREIVSGGENIKDRPDFLRLLRRLENGNIKRVWCVDPERLSRSGMYGAGDVLKIFDVTNTLIATLDQTYDLKNPMDKKYLEMRMIQSAEYRNYAKDVMNRGRHKSVRDGYYIGSSAPFGYKRKQLHDEQDRFILEPHEEESQTVILMFEMLLEGVGTSNLANHLNKYKYKARKNEYWTPAMVRNIVTSEVYCGYNTWEKFKTVEEIINGEVVKKRKLNDKYYVYKGKHKALISEEEFKNVQEILKSHPSSKLGGNKNASNPLAGVVFCKKCGRHMIRRPYNEKHLKNGFRKYKYDKQELLDFMRSSKEKSNLSLSQIAKKMNISRDTVKGWFPTNIDKFYDGKNLANHWYQLKEVLEIKDSKWDKIITTYNKKVKQNDSLICLTPFCDNVSSELQLVEKRLLQALEIQLNDFRYYVDNYEQEIIKEAKSNAKTLNKIEKQIEDLKKELKNLRRSYNREEFTYDEYIEDKNDIESELKEIEKTKEEILKDTNQDKIIRYKKAIPKLSECLKTYSKLSIQDKNDLLKSLVYKVDYLKTGKNGRWNKEEATTFTLEISLKI

SEQ ID NO: 300 - protein, 613 aa, Unknown
  Description of Unknown: Integrase B301 sequence
  PTHR30461:SF3,SM00857,G3DSA:1.10.10.2600,IPR036162,PS51737, G3DSA:3.40.50.1390,IPR006119,IPR038109,PF07508,IPR011109, SSF53041,PTHR30461,Coil,PS51736,cd00338, PF00239
MYDIYNQKPTSRKVVIYARVSTEHEAQLSALENQKDWYKPILQQHPEWDIVKMYVDEGITGTSAKKRPQFMQMIQDASSGNFDLILTREVSRFARNTVDTLQYTRELKSKGVEVFFLNDNIKTFDGDGELRLTIMATLAQDESRKTSVRVKSGQQTSMENGVFYGNGNILGYDRVGKDMVINPEQAKTVRMIFDWYLDGWGMRKIQFELEKAGRLTAMGKSNWHVSNISKILRNSFYCGIITYHKEFTPDFLEQKKIRNFGDMEFTQVRGNHKPIITEEEYDQAQKRINSRRKTLSVDTSGQRMYGEKPPSDVWVKLLECECGHKFNRKMWHNTTEGKQYGYQCYSSIRTGTVRTRLNKGLPIDGICQTPMIAGWKLQMMAKYIFKNYLSDTDQVLSLAESMLEKHIDDEEEVCDNTDIINQKKEELQKLLKRLDNLIEMRADGELARDIFILKKESTENSISQLKKELAELEPSEIESEIDEVTSKEKITILKYALDQYTNFDSDADIPESVIEAFVEKIIARKDGFDWYLRFNPEESPMGCLVDGKRKRGAKVSSFCSPQHRQLLTKVGNNSFTKMYEYVINLADAKSYLYTYSTKHRIFRWEDINVSIFM

SEQ ID NO: 301 - protein, 613 aa, Unknown
  Description of Unknown: Integrase B302 sequence
  SM00857,G3DSA:1.10.10.2600,IPR036162,PS51737,G3DSA:3.40.50.1390, IPR006119,IPR038109,PF07508,IPR011109,SSF53041, PTHR30461,PS51736,cd00338,PF00239
MYVMSTEEEKQKVRERQKGYRTDEIVVIKAAEPVSLRDTRTELRVCAYCRVSTDNIEQTSSFELQKNYYEEYIAKHDNWKMVDIFADEGISGTSMAKREGFKRMIRECLAGKIDLIVTKSVSRFSRNVVDCIDTIRKLKTMNPSVRVFFESEGIDTGDSSSDVMLNILAIFAQEESHTKSEIMQWSVDNRFARGNFLTPRLFGYNIDPDKPDRYIINEEEAKVVKLVYSMYVTGYSPNEIAVTMTKLNYVSNIKGDRKWTAGVVNNILNNERRCGMIIARKTYTPDFTTHKSRKNINQRNKYQMNEHHEGIVAVELYKEALRIKEMRKHRNYDLIPSLSVIKEGALKGFVPVSVKYSGFTYNNYLFASEFAYTKDKNGNIIKDKIKPIYKNDLSNFDLSDFEKVDSQLFSTVSQPMCWFKYNQMYFNRACIDKMKNTQYIELLFEPTEKLLAIRSCNEYDDYAIKWGVEKNDKLSPITKTSSGISHVLFDCMEWNEDYRYKMIGVRRTKNNDSIVIFDLNNAEAICREELESENPDEVISKITSYYDEYLSDHFGNNFYDDIYTMRLYMMDILKKWNLGAELVPIEDPKEWLIEAKKCVEEHLSKLMEEQLDV

SEQ ID NO: 302 - protein, 613 aa, Unknown
  Description of Unknown: Integrase B303 sequence
  SM00857,G3DSA:1.10.10.2600,IPR036162,PS51737,G3DSA:3.40.50.1390, IPR006119,IPR038109,PF07508,IPR011109,SSF53041, PTHR30461,PS51736,cd00338,PF00239
MYVMSTEEEKQKVRERQKGYRTDEIVVIKAAEPVSLRDTRTELRVCAYCRVSTDNIEQTSSFELQKNYYEEYIAKHDNWKMVDIFADEGISGTSMAKREGFKRMIRECLAGKIDLIVTKSVSRFSRNVVDCIDTIRKLKTMNPPVRVFFESEGIDTGDSSSDVMLNILAIFAQEESHTKSEIMQWSVDNRFARGNFLTPRLFGYNIDPDKPDRYIINEEEAKVVKLVYSMYVTGYSPNEIAVTMTKLNYVSNIKGDRKWTAGVVNNILNNERRCGMIIARKTYTPDFTTHKSRKNINQRNKYQMNDHHEGIVAVELYREALRIKEMRKHRNYDLIPSLSVIKEGALKGFVPVSVKYSGFTYNNYLFASEFAYTKDKNGNIIKDKIKPIYKNDLSNFDLSDFEKVDSQLFSTVSQPMCWFKYNQMYFNRACIDKMKNTQYIELLFEPTEKLLAIRSCNEYDDYAIKWGVEKNDKLSPITKTSSGISHVLFDCMEWNEDYRYKMIGVRRTKNNDSIVIFDLNNAEAICREELESENPDEVISKITSYYDEYLSDHFGNNFYDDIYTMRLYMMDILKKWNLGAELVPIEDPKEWLIEAKKCVEEHLSKLMEEQLDV

SEQ ID NO: 303 - protein, 613 aa, Unknown
  Description of Unknown: Integrase B304 sequence
  PTHR30461:SF3,SM00857,G3DSA:1.10.10.2600,IPR036162,PS51737, G3DSA:3.40.50.1390,IPR006119,IPR038109,PF07508,SSF53041, IPR011109,PTHR30461,Coil,PS51736,cd00338, PF00239
MYDIYNQKPTNRKVVIYARVSTEHEAQLSALENQKDWYKPILQQHPEWDIVKMYVDEGITGTSAKKRPQFMQMIQDASSGDFDLILTREVSRFARNTVDTLQYTRELKSKGVEVFFLNDNIKTFDGDGELRLTIMATLAQDESRKTSVRVKSGQQTSMENGVFYGNGNILGYDRVGKDMVINPEQAKTVRMIFDWYLDGWGMRKIQFELEKAGRLTAMGKSNWHVSNISKILRNSFYCGIITYHKEFTPDFLEQKKIRNFGDMEFTQVRGNHKPIITEEEYNQAQKRINSRRKTLSVDTSGQRMYGEKPPSDVWVKLLECECGHKFNRKMWHNTTEGKQYGYQCYSSIRTGTVRTRLNKGLPIDGICQTPMIAGWKLQMMAKYIFKNYLSDTDQVLSLAESMLEKHIDDEEEVCDNTDIINQKKEELQKLSKRLDNLIEMRADGELTRDIFILKKESTENSISQLKKELAELEPSEIESEIDEVTSKEKITILKYALDQYTNFDSDADIPESVIEAFVEKIIARKDGFDWYLRFNPEESPMGCLVDGKRKRGAKVSSFCSPQHRQLLTKVGNNSFTKMYEYVINLADAKSYLYTYSTKHRIFRWEDINVSIFM

SEQ ID NO: 304 - protein, 613 aa, Unknown
  Description of Unknown: Integrase B305 sequence
  PTHR30461:SF3,SM00857,G3DSA:1.10.10.2600,IPR036162,PS51737, G3DSA:3.40.50.1390,IPR006119,IPR038109,PF07508,IPR011109, SSF53041,PTHR30461,Coil,PS51736,cd00338, PF00239
MYDIYNQKPTNRKVVIYARVSTEHEAQLSALENQKDWYKPILQQHPEWDIVKMYVDEGITGTSAKKRPQFMQMIQDASSGDFDLILTREVSRFARNTVDTLQYTRELKSKGVEVFFLNDNIKTFDGDGELRLTIMATLAQDESRKTSVRVKSGQQTSMENGVFYGNGNILGYDRVGKDMVINPEQAKTVRMIFDWYLDGWGMRKIQFELEKAGRLTAMGKSNWHVSNISKILRNSFYCGIITYHKEFTPDFLEQKKIRNFGDMEFTQVRGNHKPIITEEEYNQAQKRINSRRKTLSVDTSGQRMYGEKPPSDVWVKLLECECGHKFNRKMWHNTTEGKQYGYQCYSSIRTGTVRTRLNKGLPIDGICQTPMIAGWKLQMMAKYIFKNYLSDTDQVLSLAESMLEKHIDDEEEVCDNTDIINQKKEELQKLSKRLDNLIEMRADGELTRDIFILKKESTENSISQLKKELAKLEPSEIESEIDEVTSKEKITILKYALDQYTNFDSDADIPESVIEAFVEKIIARKDGFDWYLRFNPEESPMGCLVDGKRKRGAKVSSFCSPQHRQLLTKVGNSSFIKIYEYDIDISRAKSYLYAYSTKHRILRWEDIHVCIFI

SEQ ID NO: 305 - protein, 613 aa, Unknown
  Description of Unknown: Integrase B306 sequence
  PTHR30461:SF3,SM00857,G3DSA:1.10.10.2600,IPR036162,PS51737, G3DSA:3.40.50.1390,IPR006119,IPR038109,PF07508,IPR011109, SSF53041,PTHR30461,Coil,PS51736,cd00338, PF00239
MNKIPIFEEIDLMLLRKSRSDNIKEPIEITLKRHEEQLQELCIKTTGKPVKEENIYREIVSGGENIKDRPDFLRLLRRLENGNIKRVWCVDPERLSRSGMYGAGDVLKIFDVTNTLIATLDQTYDLKNPMDKKYLEMRMIQSAEYRNYAKDVMNRGRHKSVRDGYYIGSSAPFGYKRKQLHDEQDRFILEPHEEESQTVILMFEMLLEGVGTSNLANHLNKYKYKARKNEYWTPAMVRNIVTSEVYCGYNTWEKFKTVEEIINGEVVKKRKLNDKYYVYKGKHKALISEEEFKNVQEILKSHPSSKLGGNKNASNPLAGVVFCKKCGRHMIRRPYNEKHLKNGFRKYKYDKQELLDFMRSSKEKSNLSLSQIAKKMNISRDTVKGWFPTNIDKFYDGKNLANHWYQLKEVLEIEDSKWDKIITTYNKKVKQNDSLICLTPFCDNVSSELQLVEKRLLQALEIQLNDFRYYVDNYEQEIIKEAKSNAKTLNKIEKQIEDLKKELKNLRRSYNREEFTYDEYVEDKNDIESELKEIEKTKEEILKDTNQDKIIRYKKAIPKLSECLKAYHKLSVQDKNDLLKSIVDKVDYLKTGKNGRWNKKEATTFTLEISLKI

SEQ ID NO: 306 - protein, 613 aa, Unknown
  Description of Unknown: Integrase B307 sequence
  PTHR30461:SF3,SM00857,IPR006118,G3DSA:1.10.10.2600,IPR036162, PS51737,G3DSA:3.40.50.1390,Coil,IPR006119,IPR038109, PF07508,IPR011109,SSF53041,PTHR30461,PS00397, PS51736,cd00338,PF00239
MNDEKKIADVYIRVSTLDQAREGFSLPEQKEKLIEFCKSKGYEIHAIYADEGISAKDDKRPAYQQMINDIKNGTVNVIVALKLDRLTRSVYDVEKLMKLLEKYGCDLDCKDDDSNTLTSTGRMCIRLTTAFSQNEIERCSERTKFGMVGAIKAGHIPNRTPIGFKRIDKKLVPDELTKDIVIRMYDLYLEGKSYQDIANIYNQEEILGRTNWLDSTIQKIMTNELYKGDFVHGKRTKHPQYYEDVVEPIVSKEKWNACQYQTKRNARHYERTATYLFTNKLKCSVCGNFLGGKATTKRKSGKKYYYYKCEKCRTNYKEDTIRDGLLLQLYDLIRKDNLINKYYTPFIKHKQEDITKDYKTELKGLEKQEERIKCAYLNGVVKMNEFDNELKSIRYKIDNINKKIKEIKQCENFNFTTNDLLILEDTETIDTFVNPDIFLTNILNLTNASREEMKRIIGTYIDNIEVNKVGDKIELLNIEYRKSFLTDLVNYHNNYGVPYNFNIFSDEKGFKIPMNHEGKTSFEAKEYFNKLQEVVSKNSLKLNYYETEADSKLKDISFEPNGDYEQILRLIVLSDTKNYNDKTLRLGVITLDLESALYSRLNRKEQPNKLCYI

SEQ ID NO: 307 - protein, 613 aa, Unknown
  Description of Unknown: Integrase B308 sequence
  PTHR30461:SF3,SM00857,G3DSA:1.10.10.2600,IPR036162,PF13408, IPR025827,G3DSA:3.40.50.1390,PS51737,IPR006119,IPR038109, PF07508,IPR011109,SSF53041,PTHR30461,PS51736, cd00338,PF00239
MARAAKQDNNSEIIDGVIYARYSEGPNQTEASIEGQVRECKEYAKRNGIRIINVYSDSKHTGTNDNRAEFQKMLRDSRRGGFSVVVVWKIDRFGRNRAEMAQNKALLKLQGVKVVSAKEYIPDSPEGIILESVLEGMAEYYSANLSQNIKRGMKENALHCKSNGSGKSLGYIVDKDGYFEIEPNEATIVKTIFQKYDEGMKIADIWREIVASGAKTKRGKDFTQYGISRVLSNRAYIGEYRYGDIVTPGGMPRIIDDDLFNRVQERRALSKKTPASRRSNSDVDFLLTGKVFCGHCKGTMRGMSGTSKTGRKFYYYACHDKIFKHNKCTKKNVKKEWLETEVTRITRDDILNKETIEFIADRVVEIQRQEQEDKSMLRYYEQQLRDTQSAINNIMKAIEAGIITSSTKSRLFELEEQKSIIEGEIEREKIITPVIEKEQVIFSLERFFGGDINNKEYQRNIIDMFVNKVILYDNKIIITYNISSQNEISVDVVEQAAFAALDECSSKLSLAPPAGACPCTQSALLYVRRIFYCRSSILSKTQPLFRRGGHFPSSVFVNTQSHRCDNLCVTFTNSGACPCTRSALLYVRRFFYCRSWIIIYKPNFVISPWQTLI

SEQ ID NO: 308 - protein, 613 aa, Unknown
  Description of Unknown: Integrase B309 sequence
  PTHR30461:SF3,cd00338,SM00857,G3DSA:1.10.10.2600,IPR036162, PF13408,PS51737,G3DSA:3.40.50.1390,IPR025827,IPR006119, IPR038109,PF07508,IPR011109,SSF53041,PTHR30461, PS51736,Coil,PF00239
MKITKFPIDLSMLTEEEIDQFRQDPSTLFEGDTDVCLYLRFSSERQREQSIEGQLRDCRAYCKMNRYRITAIYVDRATTARKDVEKRLHFQEMIRDSEKRPWEYVVVWKLDRFARNRTDSALFKFRLRKNGVKVISATENISEKPEGIILEAVLEGMAEFYSADLSQKITRGMRESALKCHSIGGHVPLGYKIEDHKLVINPATAHIVQEAFELYANGETVADICRIFNTKGYRTAKGVEFNRNSFKSMFRNKRYIGVYTYKDIEVEGGVPAIIDKELFETVGHRLSKNAEAPARGKAKVDYLLAGKLFCGHCGGSMNGESGTSRTGAVHNYYTCYTRKRKHACEKKPLKKEWIEYIVAQDAMELLTDDTIQELADMAISQTEQDLRENTRIPELTERMKETESGIANITNAIEKGIASDALMNRLVELEKEKKNLFRLLAEEEKYVCKIERSQIVYWLTEFKGGRIEDERYRRIIIDLMVNSVTVWDEPDGFRITTAYNLTSCKSKTFRINPSGEKGFGFEGSKSTKMKTVRKGGFHFAVGLRESKFIPPCGGNPFRSTKQVLDEHLFLQRRLRREVFALIQNRKAPSWEKSQGGAFSIFLGLVYFLSYAIY

SEQ ID NO: 309 - protein, 613 aa, Unknown
  Description of Unknown: Integrase B310 sequence
  PTHR30461:SF3,SM00857,G3DSA:1.10.10.2600,IPR036162,PS51737, G3DSA:3.40.50.1390,IPR006119,IPR038109,PF07508,IPR011109, SSF53041,PTHR30461,Coil,PS51736,cd00338, PF00239
MYDIYNQKPTSRKVVIYARVSTEHEAQLSALENQKDWYKPILQQHPEWDIVKMYVDEGITGTSAKKRPQFMQMIQDASSGNFDLILTREVSRFARNTVDTLQYTRELKSKGVEVFFLNDNIKTFDGDGELRLTIMATLAQDESRKTSVRVKSGQQTSMENGVFYGNGNILGYDRVGKDMVINPEQAKTVRMIFDWYLDGWGMRKIQFELEKAGRLTAMGKSNWHVSNISKILRNSFYCGIITYHKEFTPDFLEQKKIRNFGDMEFTQVRGNHKPIITEEEYDQAQKRINSRRKTLSVDTSGQRMYGEKPPSDVWVKLLECECGHKFNRKMWHNTTEGKQYGYQCYSSIRTGTVRTRLNKGLPIDGICQTPMIAGWKLQMMAKYIFKNYLSDTDQVLSLAESMLEKHIDDEEEVCDNTDIINQKKEELQKLLKRLDNLIEMRADGELARDIFILKKESTENSISQLKKELAELEPSEIESEIDEVTSKEKITILKYALDQYTNFDSDADIPESVIEAFVEKIIARKDGFDWYLRFNPEESPMGCLVDGKRKRGAKVSAFCSPQHRQLLTKVGNNSFTKMYEYVINLADAKSYLYTYSTKHRIFRWEDINVSIFM

SEQ ID NO: 310 - protein, 613 aa, Unknown
  Description of Unknown: Integrase B311 sequence
  SM00857,G3DSA:1.10.10.2600,IPR036162,PS51737,G3DSA:3.40.50.1390, IPR006119,IPR038109,PF07508,IPR011109,SSF53041, PTHR30461,Coil,PS51736,cd00338,PF00239
MKYNLNDYRIEVDKLGKIIIYLRKSREDIIDGRYASTEETLARHEEQLQQWAEANLGYRIPENHIFKEVVSGEKIKNRPVFKEVLKMTETETIGGILCINVSRLSRGELKDCGTIIDTFSVTDTKILTPQKIYDLQNKYDKRFFKDEILRANDYLEMTKELLQNGRHWSTSIGKFVGSVAPFGYDRVTCKEMKVADEKGFTLRPNADAETVKQIFDMYTDGNGCYKIASHLNSTHTPYIDDKQWDRCIIQRILKNTTYCGFLTYGEITTVEKMIDGEKLTFRRKNNDCPIYKGLHAPVVSKEQFDIVQSKLKLGESPTRRGNETRNPLAGLVKCSVCNRAMVYNADSRESSQKRVHELDKNELLQFLNEHKKKAKLSARKLSEMLNVKKHYCQDWFGGNVGRFHPNSPLFVSKWHEIKKAVNIETDKYDKAVTEFAPVTRETRLVCSGHSCSATSAVLSAVEKLVIDDVKKRFDDYTYFLDNYAVEITKKETAAKKAIKNIEKSIEQKEKQMKNAKIAFEKGIDSIEEYIDRKTELVAELEELKEKKRKAEEANEENDTETIKKSVPILKNVFDSYYELSTGERNTILRTIIESIEYTRIDGGEISLDICWLI

SEQ ID NO: 311 - protein, 613 aa, Unknown
  Description of Unknown: Integrase B312 sequence
  PTHR30461:SF3,SM00857,G3DSA:1.10.10.2600,IPR036162,PS51737, G3DSA:3.40.50.1390,IPR006119,IPR038109,PF07508,IPR011109, SSF53041,PTHR30461,Coil,PS51736,cd00338, PF00239
MYDIYNQKPTSRKVVIYARVSTEHEAQLSALENQKDWYKPILQQHPEWDIVKMYVDEGITGTSAKKRPQFMQMIQDASSGNFDLILTREVSRFARNTVDTLQYTRELKSKGVEVFFLNDNIKTFDGDGELRLTIMATLAQDESRKTSVRVKSGQQTSMENGVFYGNGNILGYDRVGKDMVINPEQAKTVRMIFDWYLDGWGMRKIQFELEKAGRLTAMGKSNWHVSNISKILRNSFYCGIITYHKEFTPDFLEQKKIRNFGDMEFTQVRGNHKPIITEEEYDQAQKRINSRRKTLSVDTSGQRMYGEKPPSDVWVKLLECECGHKFNRKMWHNTTEGKQYGYQCYSSIRTGTVRTRLNKGLPIDGICQTPMIAGWKLQMMAKYIFKNYLSDTDQVLSLAESMLEKHIDDEEEVCDNTDIINQKKEELQKLSKRLDNLIEMRADGELTRDIFILKKESTENSISQLKKELAELEPSEIESEIDEVTSKEKITILKYALDQYTNFDSDADIPESVIEAFVEKIIARKDGFDWYLRFNPEESPMGCLVDGKRKRGAKVSSFCSPQHRQLLTKVGNSSFIKIYEYDIDISRAKSYLYAYSTKHRILRWEDIHVCIFI

SEQ ID NO: 312 - protein, 613 aa, Unknown
  Description of Unknown: Integrase B313 sequence
  PTHR30461:SF3,SM00857,G3DSA:1.10.10.2600,IPR036162,PS51737, G3DSA:3.40.50.1390,IPR006119,IPR038109,PF07508,IPR011109, SSF53041,PF00239,PTHR30461,PS51736,Coil, cd00338
MYDIYNQKPTSRKVVIYARVSTEHEAQLSALENQKDWYKPILQQHPEWDIVKMYVDEGITGTSAKKRPQFMQMIQDASSGNFDLILTREVSRFARNTVDTLQYTRELKSKGVEVFFLNDNIKTFDGDGELRLTIMATLAQDESRKTSVRVKSGQQTSMENGVFYGNGNILGYDRVGKDMVINPEQAKTVRMIFDWYLDGWGMRKIQFELEKAGRLTAMGKSNWHVSNISKILRNSFYCGIITYHKEFTPDFLEQKKIRNFGDMEFTQVRGNHKPIITEEEYDQAQKRINSRRKTLSVDTSGQRMYGEKPPSDVWVKLLECECGHKFNRKMWHNTTEGKQYGYQCYSSIRTGTVRTRLNKGLPIDGICQTPMIAGWKLQMMAKYIFKNYLSDTDQVLSLAESMLEKHIDDEEEVRDNTDIINQKKEELQKLLKRLDNLIEMRADGELARDIFILKKESTENSISQLKKELAELEPSEIESEIDEVTSKEKITILKYALDQYTNFDSDADIPESVIEAFVEKIIARKDGFDWYLRFNPEESPMGCLVDGKRKRGAKVSAFCSPQHRQLLTKVGNNSFTKMYEYVINLADAKSYLYTYSTKHRIFRWEDINVSIFM

SEQ ID NO: 313 - protein, 613 aa, Unknown
  Description of Unknown: Integrase B314 sequence
  SM00857,G3DSA:1.10.10.2600,IPR036162,PS51737,G3DSA:3.40.50.1390, IPR006119,IPR038109,PF07508,IPR011109,SSF53041, PTHR30461,Coil,PS51736,cd00338,PF00239
MKYNLNDYRIEVDKLGKIIIYLRKSREDIIDGRYASTEETLARHEEQLQQWAEANLGYRIPENHIFKEVVSGEKIRNRPVFKEVLKMTEAETIGGILCINVSRLSRGDLKDCGTIIDTFSVTDTKILTPQKIYDLQNKYDKRFFKDEILRANDYLEMTKELLQNGRHWSTSIGKFVGSVAPFGYDRVTCKEMKVADEKGFTLRPNADAETVKQIFDMYTDGNGCYKIASHLNSTHAPYIDEKQWDRCIIQRILKNTTYCGFLTYGEITTVEKMIDGEKLTFRRKNNDCPIYKGLHTPIVSKEQFDIVQSKLKLGESPTRRGNETRNPLAGLVRCSVCNRAMVYNADSRESSQKRVHELDKNELLQFLNEHKKKAKLSARKLSEILNVKKHYCQDWFGGNVGRFHPNSPLFVSKWHEIKKAVNIETDKYDKAVTEFAPVTRETRLVCSGHSCSATSAGLSVVEKLVIDDVKKRFDDYTYFLDNYAVEITKKETAAKKAIKNIEKSIEQKEKQMKNAKIAFEKGIDSIEEYIDRKTELVAELEELKEKKRKAEEANEENDTETIKKSVPILKNVFDSYYELSTGERNTILRTIIESIEYTRIDGGEISLDICWLI

SEQ ID NO: 314 - protein, 612 aa, Unknown
  Description of Unknown: Integrase B315 sequence
  PTHR30461:SF3,SM00857,IPR036162,PF13408,IPR025827, G3DSA:3.40.50.1390,IPR006119,PF07508,IPR011109,SSF53041, PF00239,PTHR30461,Coil,cd00338
MRAAFLIRCSTKKQDYERQVNDLTRLAKKFGYTSSDNMIFGEHITGKDDASKRDRQSIQRLKDAAINKEFDVVLVSEVSRMSRDPMSGRLYVRQLINMDIPVYFRDIDTWTIDPVTGKKVRDAETIIGAAFDAAWKYIKSMKTQIASGRRDELDNNQMSIGQPFFGYKRYGGRDKGKKNSWVINDDAAKVVVDVFEEYVKDGATLKSTALAITAKYGEQFNKKFSIGTIEHILTFEPYCTGIKVVSLTDPDTEDVDEFEVEIPTIITRAMFDKATTKRATNRTARTPYPKQATYILSKLLKCPICEHSLTPQKRGGDKGDKYRLMNGKVAIRWSCMSGINNATDCSSRITISNEKLEAIIWGLIKQELIGFANLNDEDRVAKVEELTDKITNLEMNIANFTSHISNMDRLIERAYSAYMDAPDSVMDIAKDKYYKTLTKCENERAECKDKIEALSVEKLRLENMRTFFNQPTLPKDAIEKAESDPIKMRNLVMELIDKIYPYRITTYVSPATNRIMKNGIVLLEVYTINGIYNVLYDGNQRNNKVAYYISGVYATFQNGRNKFDAYDTGEYFVISNATLVTNTEDVDLLVTFNELIKICMQNGWEIDYTYKM

SEQ ID NO: 315 - protein, 612 aa, Unknown
  Description of Unknown: Integrase B316 sequence
  PTHR30461:SF3,SM00857,IPR036162,PF13408,IPR025827, G3DSA:3.40.50.1390,IPR006119,PF07508,IPR011109,SSF53041, PTHR30461,Coil,cd00338,PF00239
MRAAFLIRCSTKKQDYERQVNDLTRLAKKFGYTSSDNMIFGEHITGKDDASKRDRQSIQRLKDAAINKEFDVVLVSEVSRMSRDPMSGRLYVRQLINMDIPVYFRDIDTWTIDPVTGKKVRDAETIIGAAFDAAWKYIKSMKTQIASGRRDELDNNQMSIGQPFFGYKRYGGRDKGKKNSWVINDDAAKVVVDVFEEYVKDGATLKSTALAITAKYGEQFNKKFSIGTIEHILTFEPYCTGIKVVSLTDPDTEDVDEFEVEIPTIITRAMFDKATTKRATNRTARTPYPKQATYILSKLLKCPICEHSLTPQKRGGDKGDKYRLMNGKVAIRWSCMSGINNATDCSSRITISNEKLEAIIWGLVKQELIGFANLNDEDRVAKVEELTDKITNLEMNIANFTSHISNMDRLIERAYSAYMDAPDSVMDIAKDKYYKTLTKCENERAECKDKIEALSAEKLRLENMRTFFNQPTLPKDAIEKAESDPIKMRNLVMELIDKIYPYRITTYVSPATNRIMRNGIVLLEVYTINGIYNVLYDGNQRNNKVAYYISSVYATFQNGRNKFDAYDTGEYFVISHATLVTETEDVDMLVTFNELIKICMQNGWEIDYTYKM

SEQ ID NO: 316 - protein, 612 aa, Unknown
  Description of Unknown: Integrase B317 sequence
  IPR036162,PS51737,IPR011109,PTHR30461,G3DSA:1.10.10.10, PF00239,IPR036388,G3DSA:1.10.10.2600,IPR006119,SSF53041, PF13412,SSF46785,cd00338,IPR036390,SM00857,IPR025827,IPR038109 ,PS51736,PF13408,G3DSA:3.40.50.1390,PF07508,Coil
MLRAVIYCRCSTEEESQKDALAKQIQEAEECVRKNNWLLTDSYIESRSGTTTKGRTEYNRLLGDLELNKFDIVVIKSQDRLMRNTKDWYLFVDRLVTNSKKLYIYIEQKFYTTDDALITGIKAILAEEYSRELSKKINNAHRNRQKSGSSVILNSNVYGFQKLPDKTIALVEEEAEVKRRMYELCASGYGTRTIETILKNEGIKKRNGKPFIANDILRIIKNPLNKGCVVMGKTHYDFDSKKMIRMPEDQQYVYENLVPHTVSDALWESANEEIAKRRRSSKTDKTSFGRNTGKYELSGKIYCGLCGSPYYRKTRRRYRDEKIIYEWKCRTYLETGRNVGRKDRPQLRKVQLETVEGCDNVHLDEEQLYELLEQNCVKSYQVDKERIVKKMVRFLKLVLQERDLQPEIEQKEQKKRKIKQQMQLLVDKLLDGILSDEVYQEKQRSLEKQLSDITGQLKKLEQKRSKENVLEDRISHIEKSMKNGNLIEKATVAEMLDEIEKILIFPTYMEIYFNLSRMLGLHEMQLPYETSEQGEVLRIEYGNRFNYKEKKEGGREEIIELLRDNPKITAKMIAQKMGIGLSAVHYRMNVLKREGRIRFCGGGGVGYWEILE

SEQ ID NO: 317 - protein, 612 aa, Unknown
  Description of Unknown: Integrase B318 sequence
  PTHR30461:SF3,SM00857,IPR036162,PF13408,IPR025827, G3DSA:3.40.50.1390,IPR006119,PF07508,IPR011109,SSF53041, PTHR30461,Coil,cd00338,PF00239
MRAAFLIRCSTKKQDYERQVNDLTRLAKKFGYTSSDNMIFGEHITGKDDASKRDRQSIQRLKDAAINKEFDVVLVSEVSRMSRDPMSGRLYVRQLINMDIPVYFRDIDTWTIDPVTGKKVRDAETIIGAAFDAAWKYIKSMKTQIASGRRDELDNNQMSIGQPFFGYKRYGGRDKGKKNSWVINDDAAKVVVDVFEEYVKDGATLKSTALAITAKYGEQFNKKFSIGTIEHILTFEPYCTGIKVVSLTDPDTEDVDEFEVEIPTIITRAMFDKATTKRATNRTARTPYPKQATYILSKLLKCPICEHSLTPQKRGGDKGDKYRLMNGKVAIRWSCMSGINNATDCSSRITISNEKLEAIIWGLIKQELIGFANLNDEDRVAKVEELTDKITNLEMNIANFTSHISNMDRLIERAYSAYMDAPDSVMDIAKDKYYKTLTKCENERAECKGKIEALSAEKLRLENMRTFFNQPTLPKDAIEKAESDPIKMRNLVMELVDKIYPYRITTYVSPATNRIMKNGIVLLEVYTINGIYNVLYDGNQRNNKVAYYISGVYATFQNGKNKLDAYDTGEYFVISNATLVTETEDVDLTVTFNELIKICMQNGWEIDYTYKM

SEQ ID NO: 318 - protein, 612 aa, Unknown
  Description of Unknown: Integrase B319 sequence
  SM00857,IPR036162,PF13408,IPR025827,G3DSA:3.40.50.1390, IPR006119,PF07508,IPR011109,SSF53041,PTHR30461, Coil,cd00338,PF00239
MRAAFLIRCSTKKQDYERQVNDLTRLAKKFGYTSSDNMIFGEHITGKDDASKRDRQSIQRLKDAAINKEFDVVLVSEVSRMSRDPMSGRLYVRQLINMDIPVYFRDIDTWTIDPVTGKKVRDAETIIGAAFDAAWKYIKSMKTQIASGRRDELDNNQMSIGQPFFGYKRYGGRDKGKKNSWVINDDAAKVVVDVFEEYVKDGATLKSTALAITAKYGEQFNKKFSIGTIEHILTFEPYCTGIKVVSLTDPDTEDVDEFEVEIPTIITRAMFDKATTKRATNRTARTPYPKQATYILSKLLKCPICEHSLTPQKRGGDKGDKYRLMNGKVAIRWSCMSGINNATDCSSRITISNEKLEAIIWGLVKQELIGFANLNDEDRVARVVELTDKITNLEMNIANFTSHISNMDRLIERAYSAYMDAPDSVMDIAKDKYYKTLTKCENERAECKDKIEALNVEKLRLENMRTFFNQPTLPKDAIEKAESDPIKMRNLVMELVDKIYPYRITTYVSPATNRIMKNGIVLLEVYTINGIYNVLYDGNQRNNKVAYYISGNYATFQNGKNKLDAYDAGEYFVISNATLVTETEDVDLTVTFNELIKICMQNGWEIDYTYKM

SEQ ID NO: 319 - protein, 612 aa, Unknown
  Description of Unknown: Integrase B320 sequence
  PTHR30461:SF3,SM00857,G3DSA:1.10.10.2600,IPR036162,PS51737, G3DSA:3.40.50.1390,IPR006119,IPR038109,PF07508,IPR011109, SSF53041,PTHR30461,PS51736,cd00338,PF00239
MITGEVEAVDRKQKIRDRYKGVDISELEVIPAKIIEDLETSSVIRRVAAYIRVSTDNDEQTSSYELQKNYYTDYIQAQPGWVFVGIYADEGISGTSLEHRKGMQQLIEDCKAGKIDLVLTKSIARFARNIVDCLSVIELLKNLNPPVGVKFEADNIYTLDSNGRMILTILASVAEEESHSKSIIMNWSIDRRFSRGLFLTPALLGYDKDEEGNLVINPEEAQTVKVIYYLYLNGYSLTEIATLLMEYSRKTKLGRVEWNPGTLAGVLANERHCGDVLARKTFTPNFLTHKSKKNNNDRTQYRQKNHHEAIVSREVFNAANHLRASRNYSKKNRPLPVLSVVEDGILRGYVPFDKDWTGFSAEEYREASESVMKEPDVTVTADVKKRLDLTGYEIVRVQYFSTMQNPAMTISNGRLRFNTACLKKFENVEYVELLLNSVERCIAIRPCDKNNPNAIRWGRLKEGRWCASTLGCRGLAKTLFDIMEWDEDLRYRFRGQFLEQGDNKMMLFAFDEPEMIKVEEIVLPPNENTEEDEGETVKKKIYIFPPEWAGTFGQPITSIAQVGILRQEHYAGNWDVFRPATEIEEMNIFTAESLNELLREAEKIMEGWTDYR

SEQ ID NO: 320 - protein, 612 aa, Unknown
  Description of Unknown: Integrase B321 sequence
  SM00857,IPR036162,PF13408,IPR025827,G3DSA:3.40.50.1390, IPR006119,PF07508,IPR011109,SSF53041,PTHR30461, Coil,cd00338,PF00239
MRAAFLIRCSTKKQDYERQVNDLTRLAKKFGYTSSDNMIFGEHITGKDDASKRDRQSIQRLKDAAINKEFDVVLVSEVSRMSRDPMSGRLYVRQLINMDIPVYFRDIDTWTIDPVTGKKVRDAETIIGAAFDAAWKYIKSMKTQIASGRRDELDNNQMSIGQPFFGYKRYGGRDKGKKNSWVINDDAAKVVVDVFEEYVKDGATLKSTALAITAKYGEQFNKKFSIGTIEHILTFEPYCTGIKVVSLTDPDTEDVDEFEVEIPTIITRAMFDKATTKRATNRTARTPYPKQATYILSKLLKCPICEHSLTPQKRGGDKGDKYRLMNGKVAIRWSCMSGINNATDCSSRITISNEKLEAIIWGLVKQELIGFANLNDEDRVARVVELTDKITNLEMNIANFTSHISNMDRLIERAYSAYMDAPDSVMDIAKDKYYKTLTKCENERAECKDKIEALSAEKLRLENMRTFFNQPTLPKDAIEKAESDPIKMRNLVMELIDKIYPYRITTYVSPATNRIMRNGIVLLEVYTINGIYNVLYDGNQRNNKVAYYISSVYATFQNGRNKFDAYDTGEYFVISHATLVTETEDVDMLVTFNELIKICMQNGWEIDYTYKM

SEQ ID NO: 321 - protein, 612 aa, Unknown
  Description of Unknown: Integrase B322 sequence
  SM00857,IPR036162,PF13408,IPR025827,G3DSA:3.40.50.1390, IPR006119,PF07508,SSF53041,IPR011109,PTHR30461, Coil,cd00338,PF00239
MRAAFLIRCSTKKQDYERQVNDLTRLAKKFGYTSNDNLIFGEHITGKDDASKRDRQSIQHLKDAAINKEFDVVLVSEVSRMSRDPMSGRLYVRQLINMDIPVYFRDIDTWTIDPVTGKKVRDAETIIGAAFDAAWKYIKSMKTQIASGRRDELDNNQMSIGQPFFGYKRYGGRDKGKKNSWVINDDAAKVVVDVFEEYVKDGATLKSTALAITAKYGEQFNKKFSIGTIEHILTFEPYCTGIKVVSLTDPDTEDVDKFEVEIPTIITRAMFDKATTKRATNRTARTPYPKQATYVLSKLLKCPICEHSLTPQKRGGDKGDKYRLMNGKVAIRWSCMSGINNATDCSSRITISNEKLEAIIWGLVKQELIGFANLNDEDRVAKVEELTDKITNLEMNIANFTSHISNMDRLIERAYSAYMDAPDSVMDIAKDKYYKTLTKCENERAECKDKIEALNVEKLRLENMRTFFNQPTLPKDAIEKAESDPIKMRNLVMELVDKIYPYRITTYVSPATNRIMKNGIVLLEVYTINGIYNVLYDGNQRNNKVAYYISGNYATFQNGKNKLDAYDVGEYFVISNATLVTETEDVDLTVTFNELIKICMQNGWEIDYTYKM

SEQ ID NO: 322 - protein, 612 aa, Unknown
  Description of Unknown: Integrase B323 sequence
  SM00857,IPR036162,PF13408,IPR025827,G3DSA:3.40.50.1390, IPR006119,PF07508,SSF53041,IPR011109,PF00239, PTHR30461,Coil,cd00338
MRAAFLIRCSTKKQDYERQVNDLTRLAKKFGYTSSDNMIFGEHITGKDDASKRDRQSIQRLKDAAINKEFDVVLVSEVSRMSRDPMSGRLYVRQLINMDIPVYFRDIDTWTIDPVTGKKVRDAETIIGAAFDAAWKYIKSMKTQIASGRRDELDNNQMSIGQPFFGYKRYGGRDKGKKNSWVINDDAAKVVVDVFEEYVKDGATLKSTALAITAKYGEQFNKKFSIGTIEHILTFEPYCTGIKVVSLTDPDTEDVDEFEVEIPTIITRAMFDKATTKRATNRTARTPYPKQATYILSKLLKCPICEHSLTPQKRGGDKGDKYRLMNGKVAIRWSCMSGINNATDCSSRITISNEKLEAIIWGLIKQELIGFANLNDEDRVARVVELTDKITNLEMNIANFTSHISNMDRLIERAYSAYMDAPDSVMDIAKDKYYKTLTKCENERAECKDKIEALSAEKLRLENMRTFFNQPTLPKDAIEKAESDPIKMRNLVMELIDKIYPYRITTYVSPATNRIMKNGIVLLEVYTINGIYNVLYDGNQRNNKVAYYISGVYATFQNGRNKFDAYDTGEYFVISHATLVTKTEDVDMLVTFNELIKICMQNGWEIDYTYKT

SEQ ID NO: 323 - protein, 612 aa, Unknown
  Description of Unknown: Integrase B324 sequence
  PTHR30461:SF3,SM00857,IPR036162,PF13408,IPR025827, G3DSA:3.40.50.1390,IPR006119,PF07508,IPR011109,SSF53041, PTHR30461,Coil,cd00338,PF00239
MRAAFLIRCSTKKQDYERQVNDLTRLAKKFGYTSSDNMIFGEHITGKDDASKRDRQSIQRLKDAAINKEFDVVLVSEVSRMSRDPMSGRLYVRQLINMDIPVYFRDIDTWTIDPVTGKKVRDAETIIGAAFDAAWKYIKSMKTQIASGRRDELDNNQMSIGQPFFGYKRYGGRDKGKKNSWVINDDAAKVVVDVFEEYVKDGATLKSTALAITAKYGEQFNKKFSIGTIEHILTFEPYCTGIKVVSLTDPDTEDVDEFEVEIPTIITRAMFDKATTKRATNRTARTPYPKQATYILSKLLKCPICEHSLTPQKRGGDKGDKYRLMNGKVAIRWSCMSGINNATDCSSRITISNEKLEAIIWGLIKQELIGFANLNDEDRVAKVEELTDKITNLEMNIANFTSHISNMDRLIERAYSAYMDAPDSVMDIAKDKYYKTLTKCENERAECKGKIEALSAEKLRLENMRTFFNQPTLPKDAIEKAESDPIKMRNLVMELIDKIYPYRITTYVSPATNRIMKNGIVLLEVYTINGIYNVLYDGNQRNNKVAYYISGVYATFQNGRNKFDAYDTGEYFVISNATLVTNTEDVDLLVTFNELIKICMQNGWEIDYTYKM

SEQ ID NO: 324 - protein, 612 aa, Unknown
  Description of Unknown: Integrase B325 sequence
  PTHR30461:SF3,SM00857,IPR036162,PF13408,IPR025827, G3DSA:3.40.50.1390,IPR006119,PF07508,IPR011109,SSF53041, PTHR30461,Coil,cd00338,PF00239
MRAAFLIRCSTKKQDYERQVNDLTRLAKKFGYTSSDNMIFGEHITGKDDASKRDRQSIQRLKDAAINKEFDVVLVSEVSRMSRDPMSGRLYVRQLINMDIPVYFRDIDTWTIDPVTGKKVRDAETIIGAAFDAAWKYIKSMKTQIASGRRDELDNNQMSIGQPFFGYKRYGGRDKGKKNSWVINDDAAKVVVDVFEEYVKDGATLKSTALAITAKYGEQFNKKFSIGTIEHILTFEPYCTGIKVVSLTDPDTEDVDEFEVEIPTIITRAMFDKATTKRATNRTARTPYPKQATYILSKLLKCPICEHSLTPQKRGGDKGDKYRLMNGKVAIRWSCMSGINNATDCSSRITISNEKLEAIIWGLVKQELIGFANLNDEDRVAKVEELTDKITNLEMNIANFTSHISNMDRLIERAYSAYMDAPDSVMDIAKDKYYKTLTKCENERAECKDKIEALSAEKLRLENMRTFFNQPTLPKDAIEKAESDPIKMRNLVMELIDKIYPYRITTYVSPATNRIMKNGIVLLEVYTINGIYNVLYDGNQRNNKVAYYISSVYATFQNGRNKFDAYDTGEYFVISHATLVTETEDVDMLVTFNELIKICMQNGWEIDYTYKM

SEQ ID NO: 325 - protein, 612 aa, Unknown
  Description of Unknown: Integrase B326 sequence
  PTHR30461:SF3,SM00857,IPR036162,PF13408,IPR025827, G3DSA:3.40.50.1390,IPR006119,PF07508,IPR011109,SSF53041, PF00239,PTHR30461,Coil,cd00338
MRAAFLIRCSTKKQDYERQVNDLTRLAKKFGYTSSDNMIFGEHITGKDDASKRDRQSIQRLKDAAINKEFDVVLVSEVSRMSRDPMSGRLYVRQLINMDIPVYFRDIDTWTIDPVTGKKVRDAETIIGAAFDAAWKYIKSMKTQIASGRRDELDNNQMSIGQPFFGYKRYGGRDKGKKNSWVINDDAAKVVVDVFEEYVKDGATLKSTALAITAKYGEQFNKKFSIGTIEHILTFEPYCTGIKVVSLTDPDTEDVDEFEVEIPTIITRAMFDKATTKRATNRTARTPYPKQATYILSKLLKCPICEHSLTPQKRGGDKGDKYRLMNGKVAIRWSCMSGINNATDCSSRITISNEKLEAIIWGLVKQELIGFANLNDEDRVAKVEELTDKITNLEMNIANFTSHISNMDRLIERAYSAYMDAPDSVMDIAKDKYYKTLTKCENERAECKDKIEALSAEKLRLENMRTFFNQPTLPKDAIEKAESDPIKMRNLVMELIDKIYPYRITTYVSSATNRIMRNGIVLLEVYTINGIYNVLYDGNQRNNKVAYYISGVYATFQNGRNKFDAYDTGEYFVISHATLVTETEDVDMLVTFNELIKICMQNGWEIDYTYKM

SEQ ID NO: 326 - protein, 611 aa, Unknown
  Description of Unknown: Integrase B327 sequence
  cd03768,PTHR30461:SF3,SM00857,G3DSA:1.10.10.2600,IPR036162, PF13408, PS51737,G3DSA:3.40.50.1390,IPR025827,IPR006119, IPR038109,PF07508,SSF53041,IPR011109,PTHR30461,PS51736, Coil,PF00239
MSTSNTDCDNRKYAIYARKSKFTAKGESINQQIDRCKLHLSSMNVAEEDIIIFEDEGYSGGNTDRPQFKEMMDMCEDNKIQCVICYKLDRISRSVSDFTNTFNNLEKHNIRFISVSDGLNGTNSPMDKAMIQLVAVFAELERNIIAERIIDNMTELAQKGRWLGGTTPTGYKSVETFGSTNKEGKVHYARKLEIVPEEMELVKRIYKLYLKTESLTAVQAILLNDNIKTKMGNEYTRFAIKVILSNPVYAKADNAVLKFFENKGSTIYAEGTEFDGTKGMMVYNKTKQEKNTSHKVKPYNEWIVAIGEHEGVIDGADWVSVQNILDKNKDKNYNRPRSHCALLSGLLRCKCGSIMYPRVAKTYNERGERNFAYACKMMLNSNRQRCNVKRINGNFLDDLVWEQIKVLTSDKSELAKQLKEAQGNFESDEQPVLKELEQMKKRLSDNKQKQKNLINFIANNGSKMSPEMSDDANEQYRKLENSNKEISSKIIKLEEVVAQSEQAFANFKDLATRLSEFSAALDTQTTFEDKRYAVRQVIEHAEWDGENVKLFFTGNRTVELQDIKDELANYKKAHRKWAKTSSDENATLGEDSERDTNALSLPEKVCQRYPL

SEQ ID NO: 327 - protein, 611 aa, Unknown
  Description of Unknown: Integrase B328 sequence
  SM00857,G3DSA:1.10.10.2600,IPR036162,PF13408,IPR025827, G3DSA:3.40.50.1390,PS51737,IPR006119,IPR038109,PF07508, IPR011109,SSF53041,PF00239,PTHR30461,Coil, cd00338
MRTVKAYIYSRVSSLQQVDAFGLDRQISTVLDFLENAKLPAELGYQLDPSNHEVLDSDKGLSGYAGHNFTKGSLGRFKERVRSGEITEGCLLIESVDRFSRKQGYDAIDEFTFLIKRNIDIVEVETGQIYSYKLDHKLSTLSTSIERAYQESKRKARISKKSWQKRKKDSVDTGIALNNNTPDWLSLSQDKKSYELDVQKVQTITKIFELYRDGYGVTQIVNMLNKEGERYNGKGWNTVTVYNKLRDRRLNGYLVGKYPTIPKKDNESTNDAEKRILENIKIKKEANDNAKRIYPVVIEDDLFSRVQSMMDRNVSSKKQKSTTTKQRNLFNGLTKCNECGSPMIVQSMSNGGQYLRCYRQRTKDEKCNSKMLRYFETEKVLLQHIKNLNLDEIYGDEKSTQSLDTLKRLLSDVNGKIALLNEKVQSANDESELFAIMEFKRKRILEKDELIAKINSLENQCEAVTLNYTYDIEQLTNQDNTVIRRKANEHIAKVISSVKCRRIDSSYIGAYYLYDITYHRDILKHILITDNSGKLISEITISEKDNERTYVVREEDQTVFKVESNGNAWVMYASRTKTIDDLLYYINTMMVGREPDDFAYQLNEDHIEWID

SEQ ID NO: 328 - protein, 611 aa, Unknown
  Description of Unknown: Integrase B329 sequence
  PTHR30461:SF3,SM00857,IPR006118,G3DSA:1.10.10.2600,IPR036162, PS51737,G3DSA:3.40.50.1390,IPR006119,IPR038109,PF07508, IPR011109,SSF53041,PF00239,PTHR30461,PS00397, PS51736,Coil,cd00338
MNKENKIAGIYIRVSTEDQAREGFSLGEQEERLREFCKFKRYEIFKVYKDAGISAKSDKRPAYQEMLEDIKSKNINVIVAFKLDRLTRSVYDIEKLMKIVNDLECDIDCLADESNTTTSNGRMVMRIMTSVSQNEIEKCSERTKVGLAGAIKQGHLPSRTTLGYKRENKKLVPNPLTKDIVVRVFDLYLEGKSHQKIANIYNKENVLGKTWRDSTIQKILSNEIYKGDYIHGKRTKHPTYYENVVEPLVNKDKWESCQYQKLRNARHYERTSTYLFTNKLKCSKCGNYFGGKASVKKKLNKKYYYYKCNHCKINLKEDSIEDLILLELLALVYIDDLFNDYYTPFIKSKLDYNKIDYKKELKELDKEKDRIKTAYIKGIVKLDEFDNELKQIEYKRQILEKLEQDSKQYENLNFTMDDLLLIKDKKEIEDYLQPENIINLFVRWNYLDKTNKQKLISKYIDDIEIEKLGTKIEIKKLNLRNSFYYDLIDYHNNYDTPLDLFMFMDEDKFPIPVAHNGFRTRIEIENYVNKLKEMYDVNYYEVIPNKDFTNLSFTPKNDIEKIIRIIPIKDNDKFKSNKLELGIITINLSKIKSPDGTLLYKNIFKTSKLPT

SEQ ID NO: 329 - protein, 611 aa, Unknown
  Description of Unknown: Integrase B330 sequence
  PTHR30461:SF3,SM00857,IPR006118,G3DSA:1.10.10.2600,IPR036162, PS51737,G3DSA:3.40.50.1390,IPR006119,IPR038109,PF07508, IPR011109,SSF53041,PF00239,PTHR30461,PS00397, PS51736,Coil,cd00338
MNKENKIAGIYIRVSTEDQAREGFSLGEQEERLREFCKFKRYEIFKVYKDAGISAKSDKRPAYQEVLEDIKSKNINVIVAFKLDRLTRSVYDIEKLMKIVNDLECDIDCLADESNTTTSNGRMVMRIMTSVSQNEIEKCSERTKVGLAGAIKQGHLPSRTTLGYKRENKKLVPNPLTKDIVVRVFDLYLEGKSHQKIANIYNKENVLGKTWRDSTIQKILSNEIYKGDYIHGKRTKHPTYYENVVEPLVNKDKWESCQYQKLRNARHYERTSTYLFTNKLKCSKCGNYFGGKASVKKKLNKKYYYYKCNHCKINLKEDSIEDLILLELLALVYIDDLFNDYYTPFIKSKLDYNKIDYKKELKELDKEKDRIKTAYIKGIVKLDEFDNELKQIEYKRQVLEKQEQDSKQYENLNFTMDDLLLIKDKKEIEDYLHPENIIDLFVRWNYLDKTNKQKLISKYIDDIEIEKLGTKIEIKKLNLRNSFYYDLIDYHNNYDTPLDLFMFMDEDKFPIPVAHNGFRTRIEIENYVNKLKEMYDVNYYEVIPNKDFTNLSFTPKNDIEKIIRIIPIKDNDKFKSNKLELGIITINLSKIKSPDGTLLYKNIFKTSKLPT

SEQ ID NO: 330 - protein, 611 aa, Unknown
  Description of Unknown: Integrase B331 sequence
  PTHR30461:SF3,SM00857,IPR006118,G3DSA:1.10.10.2600,IPR036162, PS51737,G3DSA:3.40.50.1390,IPR006119,IPR038109,PF07508, IPR011109,SSF53041,PF00239,PTHR30461,PS00397, PS51736,Coil,cd00338
MNKENKIAGIYIRVSTEDQAREGFSLGEQEERLREFCKFKRYEIFKVYKDAGISAKSDKRPAYQEMLEDIKSKNINVIVAFKLDRLTRSVYDIEKLMKIVNDLECDIDCLADESNTTTSNGRMVMRIMTSVSQNEIEKCSERTKVGLAGAIKQGHLPSRTTLGYKRENKKLVPNPLTKDIVVRVFDLYLEGKSHQKIANIYNKENVLGKTWRDSTIQKILSNEIYKGDYIHGKRTKHPTYYENVVEPLVNKDKWESCQYQKLRNARHYERTSTYLFTNKLKCSKCGNYFGGKASVKKKLNKKYYYYKCNHCKINLKEDSIEDLILLELLALVYIDDLFNDYYTPFIKSKLDYNKIDYKKELKELDKEKDRIKTAYIKGIVKLDEFDNELKQIEYKRQVLEKQEQDSKQYENLNFTMDDLLLIKDKKEIEDYLHPENIIDLFVRWNYLDKTNKQKLISKYIDDIEIEKLGTKIEIKKLNLRNSFYYDLIDYHNNYDTPLDLFMFMDEDKFPIPVAHNGFRTRIEIENYVNKLKEMYDVNYYEVIPNKDFTNLSFTPKNDIEKIIRIIPIKDNDKFKSNKLELGIITINLSKIKSPDGTLLYKNIFKTSKLPT

SEQ ID NO: 331 - protein, 610 aa, Unknown
  Description of Unknown: Integrase B332 sequence
  SM00857,G3DSA:1.10.10.2600,IPR036162,PS51737,G3DSA:3.40.50.1390, IPR006119,IPR038109,PF07508,SSF53041,IPR011109, PTHR30461,PS51736,cd00338,PF00239
MISSGAEAADRKQRIRDRYKGVDTSELEVIPAKTVEGLGESTSIRRVAAYVRVSTDNDEQTSSYELQKNYYTDYIKAQPGWEFVGIYDDEGISGTSLEHRKGMQQLIEDCKAGKIDLILTKSIARFARNIVDCLSVIETLKNLDPPVGVKFEADNIYTLDSNGRMILTILASVAEEESHSKSIIMNWSIDRRFSRGLFLTPALLGYDQDEDGSLVVNQDEAQTVKVIYYLYLNGFSFTEIAELLTEYGRKTKLGNTEWNPGTLAGVIANERHCGDVLARKTFTPNFLTHKSKKNNNDRTQYRQRDHHEAIVSREVYNAANHLRASRSYTKKNRPLPVLSVVDDGILRGYVPFDKDWTGFSAEEYREASESVMREKQQDTVEVMNRLDLSGYEVVRAQYFATLQNPAMTISNGKLRFNTACLKKFEDVEYVELLLNSVDRCIAIRPCEKDNPNAIRWGRLKEGRWCASTLGCRGLAKALFDMMEWEEGLKYRFRGQLVGQNDDKLMLFELDEPEMVKVEEIVLPSKEQDEEGKTVKQTIYIFPPEWAGTFGKPITSIAQVGILQLEHYAGNWDVLRPAAEIEEMNTFTADGLNALLHEAEKIMEGWTDTDE

SEQ ID NO: 332 - protein, 610 aa, Unknown
  Description of Unknown: Integrase B333 sequence
  PTHR30461:SF3,SM00857,G3DSA:1.10.10.2600,IPR036162, PF13408,IPR025827,PS51737,G3DSA:3.40.50.1390, IPR006119,IPR038109,PF07508,IPR011109, SSF53041,PTHR30461,Coil,PS51736,cd00338,PF00239
MTAVIYARYSSDNQREESIEGQIRECTAYAEKNGITIVKHYIDRAISAKTDNRPEFQRMIKDSDKKLFDIVLVWKLDRFARNRYDSARYKTQLKKNGVKLMSATEIISEGPEGIILESVLEGYAEYYSADLAEKVVRGQTENILKGRCNGGRGTFGYTLDSERKFHIDPLTSPFVLESFKKYNEGSTMKEIRDWLNENGIKNPVGGAFTYNSVEHMLKNRRYIGELKFRDVVVPDAIPPIVPLELFDDVQEKIAKNKKAPARRKAEDDYLLTTKLFCGYCGALMFGESGTSRTGEVHRYYKCATAKKHKGCKKKTVRKQWLEDLVVNQTMQLVKDDAAMESIIAKVMELQNKENTNIPLYEKQLRDAESGIQNMLNAIQAGILTSSTKERLEQLEETKRELEARIAEEKLAKPKVTEEFIRFWLLRFRKLDMSLKDQRQALVDTFINAIYLYDDKVLITFNYKEGTQTVTFGEATEVASEGNGSDLDCFTAPKNAVRSKDFMAFLFFATQLHGFCTVGARFVFSVLNYVGRGIALQSVPFFAFRSTVQGEAVPSFQGLHLSGAPKARPWRALCSPGQAEFGRWLLVWRRKNFQTFCPAPCGKTAGYGRKC

SEQ ID NO: 333 - protein, 610 aa, Unknown
  Description of Unknown: Integrase B334 sequence
  PTHR30461:SF3,IPR036162,PS51737,IPR011109,PTHR30461, PF00239,G3DSA:1.10.10.2600,IPR006119,PF14287,SSF53041, IPR025378,SM00857,IPR025827,cd03770,IPR038109, mobidb-lite,PS51736,PF13408,G3DSA:3.40.50.1390,PF07508,Coil
MKRPDNNKITALYERLSRDDELNGDSNSIVNQKKMLEKYAKEQGFTNLAHYTDDGYSGTNFDRPDWKRLTADIEEGNIGCVIVKDMSRIGRNYLEVGFYTEVLFREKGVRFIAISNGVDSTHSESNEFAPFLNIMNEWYVRDTSRKIKSVLRNKGMEGKHLTSNAIYGYKKDPEDNNHWLVDEEAAAVVRRIFQLIIEGNGPMQVARILTNEKVERPSYYLAKQGLGTCRGKCDMTRPYSWTATTITDLVSKPEYMGHTVNFRTFKESYKDKHSQYANPEDWLIFRDTQEAIVDEDTWYMVQKIRETKHRPIAQGKANPLTGLMFCADCGAKMFNHRTKGYEKKDKDGNPTGKYTNAQNNYTCSTYSKAKGHFENKCSQHHVRTDVVRDLILTTLQYTASYVKEHEDEFLEKVRKSNVLKQELDTKALTKKIAKSEKRVAELDHLIKRIYEDNVSGKLSDKRFELLSTDYEKEQSELEEFLTSAREQLATAKEEASNVNKFIALVHKYTDFSELTTPMIHEFIDRIEVHEADKSTGERTQEIDIYLKYVGKLDVPMPELTPEELAEEERKRRKRAWNRTYNRRKAEKERAEKEKAALEAATDTDKSKKGA

SEQ ID NO: 334 - protein, 609 aa, Unknown
  Description of Unknown: Integrase B335 sequence
  PTHR30461:SF3,SM00857,G3DSA:1.10.10.2600,IPR036162,PF13408, PS51737,IPR025827,G3DSA:3.40.50.1390,IPR006119,IPR038109, PF07508,SSF53041,IPR011109,PTHR30461,Coil, PS51736,cd00338,PF00239
MRKKFNIDLSMLTPEEQQQFRDDPTTLTKGEVNVALYLRFSSERQKEQSIEGQLRDCIAYCKRKSFRIVAIYVDRATTARKDVEKRVHFQEMISDSAHHLWNFVVVWKLDRFARNREDSAVFKMRLRKNGVRVKSATETISDNPEGIILESVLEGIAEYYSADLSQKITRGLRESAMKGHSVGGHVPLGYKIEDHRLVINPATAHIVQEAFQLYANGESVAEICRIFNGKGYRTAKNSEFNRSSFKSIFKNVRYIGTYIYKDIEKENAIPAIIDKDLFETVQRRLSLAADAPARGKAKVDYLLSGKLFCGHCGATMNGESGTSKTGAIHNYYTCYSRKRRKGCNKNPLKKDFIERVVAQDAMALLTDDVIEELADMAMSQADKDLKENTRIPELSARLTEVEQGINNITKAVEKGIASDALLNRLTELEKEKKDLTSQLREEEKYIYRIDRDQVVFWLTKFQGGDIEDEDCRRRIIDLLVNSVTVWDEPDGYKITTAYNLTSCKTKTFRVSNNADSPSGEGFGFGELSSTSTKKNQQSIAIAGFSLFINALRRSQGALQCEKCRGFTIVFHIMQAHFANKMLTARNDMRKSVLDNVSSFGWGGYLPRLG

SEQ ID NO: 335 - protein, 609 aa, Unknown
  Description of Unknown: Integrase B336 sequence
  SM00857,G3DSA:1.10.10.2600,IPR036162,PF13408,IPR025827, PS51737,G3DSA:3.40.50.1390,IPR006119,IPR038109,PF07508, SSF53041,IPR011109,PTHR30461,Coil,cd00338, PF00239
MAYRKITDIRDTIGMRAVFYARVSTAEEEQLNAIELQIEENRGCIKDHGWKLVGEYIDRSKSGTMVKGRDDYQRLYEDLYEDLFDIVVIKDQERLQRNTLDWYLFINRVVQTGKLLFMYMDGKFYSPDDALITGVRAIIAEEFSRNLSKKLHNYHDHRIEKARQGQEIALQGSGNVYGWDKKDGKYYINPEQAKVRRLMCEGIMARKGSTLIAKELNEAGYRNTVGKPWKPMDIPKFVYDCKNVGTMIINKERHDFESKQTIKLPKEEWVYVENALPPIVTQEEWDLICKIHEERVIATGSDKRGKKTSGYSFSGKLVCGICGAPYWRKQRVSKDEYWVCSTKQTKGRKTRKRDSTMGKAGEINPLGCDNENISYNSLMEIMGIVSERLQANTDTIKQDMINWLTKLRKQLLEANGGHTEADLQRELSRKSKLLDAYLDGILNKQEYQKKAEELDERIIQLKAETEKNKANSGDIAEIDKVLANIDEEVARYVDGNEKLKVEYLLEHLEQVQIFPDKVIVIVPILSDGIVVEKTQYVSREKRCRKIYDHEHYDRLPGSYRGTGADRWTRHFKGAGRSQEEYRLSAGNSAVIYGNDGAGISGIRCRIKRN

SEQ ID NO: 336 - protein, 609 aa, Unknown
  Description of Unknown: Integrase B337 sequence
  PTHR30461:SF3,SM00857,G3DSA:1.10.10.2600,IPR036162,PS51737, G3DSA:3.40.50.1390,IPR006119,IPR038109,PF07508,SSF53041, IPR011109,PTHR30461,PS51736,cd00338,PF00239
MQDDGRREQLRQIYQREDTGEKTFIPAKPKINPNEKDRFFRVCAYCRVSTDNDEQLSSFELQQAHYRQLVQDHPNWDLRHIFADQGISGTSLKNRDQFNEMIEACRRGEYDLILTKSVSRFARNLVDCISLIRMLKGLTPPVGVFFETDNLYTLGENTEFMLSFLATFAQEESVKKSESMNWSLQQRFKDGKLLTPAPLGYDREKDAAGHYVKYAPLLLNESEARIVRFIYDAYLSGWSQENIASFLKDIGCLTKTGSTDWTSSAIGYILTNERYVGNVLTWKTFTADLYEHKHKKNKQDRDQYLYHDRHPAIISVEKFEAVQSLIENRKHHVRGGLPALHVIDEGIFRGYIPINHHWVNDDPNVYYDISNSVAKVLKVKTIDKRSFSAFDLSGYQVVRNQFTQVRYEGPSITLAENRVSFNLFCMRCFESVAYIQLLLHPAERKIAIRPCRERDTHSVRWRPDPDKPVYSKTLNCQHFGNALFRIMEWDPEYIYRVRGTWAKRGAEQIIVFNLVNAIPAMLVPSENADNTARRRTELCPAEWTDDFGEEFYEHILENGFYYLAPDSEWRTTAASVPAPGMEQFDVPTAEQLQLTIDNLTRGNEMPYDG

SEQ ID NO: 337 - protein, 609 aa, Unknown
  Description of Unknown: Integrase B338 sequence
  SM00857,G3DSA:1.10.10.2600,IPR036162, PF13408,IPR025827,G3DSA:3.40.50.1390,PS51737, IPR006119,IPR038109,PF07508,IPR011109, SSF53041,PTHR30461,Coil,PF13412,cd00338,PF00239
MIRAVIYCRCSTEEESQKNALEKQVAEAESSVRQYGWVLVDRYVESRSGTTAKGRNEYKRLFNDLLTDKFDVIVIKSQDRLMRNTKDWYLFVDRLCTEQKKLYMYIENKFYSTDDALITGIKAILAEEYSRELSKKINNAHRNRQRDGGNVMLPGNAYGFKRMPDKSVALVEKEAEIKREMYRLCAAGYGTRTISTIMRNRGIVNRDGKPFTSSYILRMLRNPINKGTAVMGKYHFDFDSKRTIKNPKEKIYIHEDKVPRTVSDELWNAANEQIDKRSVKTKDGEDDIGKNPGKYQLSGKIVCGMCGQPYWRKVHRKHSNHELIYTWACSSYLELGRSDNLRARPNLRKVFLENEKGCDNINIAENEFYAVLEEICSNQYQKNKKKIIEKIMKLLSKSLNNQDGTKEIEKLEREQEDIERKMKFLVDKLIDGVLTDQMYKTKQEELEKKRDQNKKKILELTERTSNTQNIKDRLQEIETRLNDDDLFKKATIDDMLEEVDKIVVYPRYMEIYFSLSSVTGCMDLKIFDGDKKCFRVDYGNRLDYKGRQCDAREVVVDLIRENPRITGKMIAKEIGCSLSGANYKLKVLKKEGRIRFNGAGGKGCWEILE

SEQ ID NO: 338 - protein, 609 aa, Unknown
  Description of Unknown: Integrase B339 sequence
  PTHR30461:SF3,SM00857,G3DSA:1.10.10.2600,IPR036162,PF13408, PS51737,IPR025827,G3DSA:3.40.50.1390,IPR006119,IPR038109, PF07508,IPR011109,SSF53041,PTHR30461,Coil, PS51736,cd00338,PF00239
MAQPEANELAVVYARYSSHSQGEQSIEGQLSNARDYAAAHGYTIVHEYVDRAKSGRTDNRAEFQQMLKDTAKRQFSVIILWKVDRFGRNREEIAINKMKCRKNGVRVEYVAETIPDSPEGVILESVLEGFAEYYSLQLSQNIRRGRAESAEKCQSLGGNRPLGYKTGPDKKFVIDENTAPTVKMIFTMYADGKTVTEIVDKLNEMGLRTLRGGPFTKNSLHSILKNKKYIGIYEYQGHEIKDGVPRIIEDDVFNKVQEMLKINKRAPAKTWSRADYILTDKLFCGKCGALMFGESGTSKTGAKHNYYICSNKKRFRSCDKKAVRQADIEDTVLNATHELLQDDELLDYIVDRTWEYYLAQDNSQEELRNLQRQLAQTDTAISNLIRAIEAGILTEETKKRMDELTQQKADLKASIADREIARGFHLKKSHIAYYLRSLRDADWSDKETQKRLIQTFVNAVFVYDDHITLTYNFSGDKNTITLRDMQRFEDGEEFGCRASRSTIMWRQKDASCEKPDYIGLFCYPNGDFSLYQNTDAKSAFSLMKYAVTVLRCGMARPVQAAPQPPQPAHRGRLCLTNLHFVQIPRWDRPASRRVAARGKKRVDKLPQRW

SEQ ID NO: 339 - protein, 608 aa, Unknown
  Description of Unknown: Integrase B340 sequence
  PTHR30461:SF3,SM00857,G3DSA:1.10.10.2600,IPR036162,PS51737, G3DSA:3.40.50.1390,IPR006119,IPR038109,PF07508,IPR011109, SSF53041,PTHR30461,Coil,PS51736,cd00338, PF00239
MNTAVNEYNYRFKLTDYSLFDRNRARKVAIYGRVSTEHEAQLSALENQLQWYDDQVKYHPNWTVCERYIDEGITGTQAKKRPAFLKMIEDAKQGKFDLIVTREVCRFARNVVDTLVVTRELKGIGVEVFFIDDNIWTMDGDGELRLSLMATLAQEESRKTSERVKAGQKISRDNGVLYGNGNILGYDRVGDTYVINEEQAETVRMIYDLYLQGYGSMKIAKILTERKRKTASGLIKWSVSNIMRAIKNATYTGTKCYNKSRSNNFLEQKRINNLDMSTYEYVEGDFPSIISQEIWDKAQAIRESRVKPVCVSAGKNTHSKRDSRDIWVNKLRCSCGSSYRKNKWHTKLDGKTSYGYQCYNQLNNGIKRKRAEIGLDTEGYCDSRMITDWKLDFMAKALLEHLWTERKESVLIALDLIKYYYKEEKSNETQSDTVTIQAKLDKANSRLTNLIAMRADGEISKDEYQAMRSPVDEEIKKLQKALDEIPQEKSNPKGLDIEGIRSTLNSFIDFSGSTISHDVVNQFVYLITPTSDTTFDWYVNLNGTADVKATFTAEGRKKNCIIKLEEIEKISSVHREKNEDNAHFIKNPHIFTYLHRLLLQSRQNRQRF

SEQ ID NO: 340 - protein, 608 aa, Unknown
  Description of Unknown: Integrase B341 sequence
  PTHR30461:SF3,SM00857,G3DSA:1.10.10.2600,IPR036162,PS51737, G3DSA:3.40.50.1390,IPR006119,IPR038109,PF07508,IPR011109, SSF53041,PTHR30461,PS51736,cd00338,PF00239
MSNYSSREELRQVYQREDQGEKTFIPAKPKADLYGGSHTFRTCAYCRVSTDNDEQLSSFELQQNHYKHLVQDHPNWELKAIYADEGISGTSLKNRDQFNEMIEACKQGQYDLIVTKSVSRFARNLVDCISLIRMLKGLKPPVGVYFETDNLYTLDENKEFMLSFLATFAQEESVKKSESMNWSLQQRFKDGKLLTPAPLGYDRPKDVTGRYIKYAPLEVNEAEAKIVKFIYDAYLSGWSQEEIAAFLTDIGCETKSGAVEWNSGSVGYILTNERYCGNVLTWKTFTADLYEHKHKKNNQDRDQYLYKDRHEAIISVEQFESVQALIENRKHHIRGGLPMMHVIDEGIFRGFIPINHHWVNDDPNTYYDISNSVKRQSKTKVIPKSSFSAFDLQGYQVVRGQFMQVRYEGPTINITNERISFNKFCVQKFENVAYVQLLLHPTERRIAIRPCSSTDAHNIRWRPDPEKAVYSKTLNCQHFGNALYSIMEWNPDYVYKIRGTWAQRGAEQIIVFNLPNATPAVMVAPENGEETKQKRVSLCPEEWADDFGEEFYEHTLENGFYYIAPNTEWNSQAKSVLAPGMMQFATTTPEQLQLSINDLRRGIDEDDG

SEQ ID NO: 341 - protein, 608 aa, Unknown
  Description of Unknown: Integrase B342 sequence
  PTHR30461:SF3,SM00857,G3DSA:1.10.10.2600,IPR036162,PF13408, PS51737,G3DSA:3.40.50.1390,IPR025827,IPR006119,IPR038109, PF07508,SSF53041,IPR011109,PF00239,PTHR30461, PS51736,Coil,cd00338
MARKKNIAAGLDAVIYARYSSHNQREVSIEQQIAECTKHAAALGLRIVGTYEDRAISGKTDNRPRFQQMMRDAEKGKFQAVVAWKSNRIRRNMLQAMVNEAKLDDYGVKVFYAEEDFDDTAAGRFALRNMMNVNQFYSENMAEDITRGLYDNANKCMANGRQPLGYKRGADGKVMLDEPAAAVVREIFTRVAAGDLFVDIARDLNAKGIKTSKGATWNKGSFQSICQNERYKGIYIYGNVRIVDGIPRIVSDELWYKVQEAMRMKKNPVGTRHRVGAEDYLLTGKLRCGHCGSYMTGVSGTSRNGELHYYYTCQKRRTEHACNKKNVRRDVIEPAIAQAIKMYCLTDDVIEWVANRTVEYWEKHDNDLHIEALEQQLEENKKATSNMLKAIEMGIITDATRSRMIELETEQSKLAVQLNAAKADVVKIDRDDLIDELQIFRDMDVNNRSVQAELFKDFLVAAYIYDDNRLKLVFSFMGKDNSIEIPLETGEDPPDGEDSPDAKMFVLTPDCSTRMKALHGNVWCFFVAAKRVRASLTRESAVHGLQEGHRDQNRPGNLHQNESTTRKRVVLFCFICRSPYVPFHEKSVCRSPQAVTNAFYFTVRPSAF

SEQ ID NO: 342 - protein, 608 aa, Unknown
  Description of Unknown: Integrase B343 sequence
  PTHR30461:SF3,SM00857,G3DSA:1.10.10.2600,IPR036162,PS51737, G3DSA:3.40.50.1390,IPR006119,IPR038109,PF07508,IPR011109, SSF53041,PTHR30461,Coil,PS51736,cd00338, PF00239
MNTAVNEYNYRFKLTDYSLFDRNRARKVAIYGRVSTEHEAQLSALENQLQWYDDQVKYHPNWTVCERYIDEGITGTQAKKRPAFLKMIEDAKQGKFDLIVTREVCRFARNVVDTLVVTRELKGIGVEVFFIDDNIWTMDGDGELRLSLMATLAQEESRKTSERVKAGQKISRDNGVLYGNGNILGYDRVGDTYVINEEQAETVRMIYDLYLQGYGSMKIAKILTERKRKTASGLIKWSVSNIMRAIKNATYTGTKCYNKSRSNNFLEQKRINNLDMSTYEYVEGDFPSIISQEIWNKAQAIRESRVKPVCVSAGKNTHSKRDSRDIWVNKLRCSCGSSYRKNKWHTKLDGKTSYGYQCYNQLNNGIKRKRAEIGLDTEGYCDSRMITDWKLDFMAKALLEHLWTERKESVLIALDLIKYYYKEEKSNETQSDTVTIQAKLDKANSRLTNLIAMRADGEISKDEYQAMRSPVDEEIKKLQKALDEIPQEKSNPKGLDIEGIRSTLNSFIDFSGSTISHDVVNQFVYLITPTSDTTFDWYVNLNGTADVKATFTAEGRKKNCIIKLEEIEKISSVHREKNEDNAHFIKNPHIFTYLHRLLSQTSNPHRMY

SEQ ID NO: 343 - protein, 608 aa, Unknown
  Description of Unknown: Integrase B344 sequence
  PTHR30461:SF3,SM00857,G3DSA:1.10.10.2600,IPR036162,PS51737, G3DSA:3.40.50.1390,IPR006119,IPR038109,PF07508,IPR011109, SSF53041,PTHR30461,Coil,PS51736,cd00338, PF00239
MNTAVNEYNYRFKLTDYSLFDRNRARKVAIYGRVSTEHEAQLSALENQLQWYDDQVKYHPNWTVCERYIDEGITGTQAKKRPAFLKMIEDAKQGKFDLIVTREVCRFARNVVDTLVVTRELKGIGVEVFFIDDNIWTMDGDGELRLSLMATLAQEESRKTSERVKAGQKISRDNGVLYGNGNILGYDRVGDTYVINEEQAETVRMIYDLYLQGYGSMKIAKILTERKRKTASGLIKWSVSNIMRAIKNATYTGTKCYNKSRSNNFLEQKRINNLDMSTYEYVEGDFPSIISQEIWDKAQAIRESRVKPVCVSAGKNTHSKRDSRDIWVNKLRCSCGSSYRKNKWHTKLDGKTSYGYQCYNQLNNGIKRKRAEIGLDTEGYCDSRMITDWKLDFMAKALLEHLWTERKESVLIALDLIKYYYKEEKSNETQSDTVTIQAKLDKANSRLTNLIAMRADGEISKDEYQAMRSPVDEEIKKLQKALDEIPQEKSNPKGLDIEGIRSTLNSFIDFSGSTISHDVVNQFVYLITPTSDTTFDWYVNLNGTADVKATFTAEGRKKNCIIKLEEIEKISSVHREKNEDNAHFIKNPHIFTYLHRLLSQTSNPHRMY

SEQ ID NO: 344 - protein, 608 aa, Unknown
  Description of Unknown: Integrase B345 sequence
  PTHR30461:SF3,SM00857,G3DSA:1.10.10.2600,IPR036162,PF13408, IPR025827,G3DSA:3.40.50.1390,PS51737,IPR006119,IPR038109, PF07508,IPR011109,SSF53041,PF00239,PTHR30461, PS51736,Coil,cd00338
MKITKFPIDLSMLTEEEIDQFRQDPSTLFEGDTDVCLYLRFSSERQREQSIEGQLRDCRAYCKMNRYRITAIYVDRATTARKDVEKRLHFQEMIRDSEKRPWEYVVVWKLDRFARNRTDSALFKFRLRKNGVKVISATENISEKPEGIILEAVLEGMAEFYSADLSQKITRGMRESALKCHSIGGHVPLGYKIEDHKLVINPATAHIVQEAFELYANGETVADICRIFNTKGYRTAKGVEFNRNSFKSMFRNKRYIGVYTYKDIEVEGGVPAIIDKELFETVGHRLSKNAEAPARGKAKVDYLLAGKLFCGHCGGSMNGESGTSKTGAVHNYYACYTRKRQHSCDKKPLRKEWIEQIVAQDAMELLTDDTIQEMADMAISQTEKDLRENTRIPELSERMKETESGIANITKAVEKGIASDALMSRLVELEKEKKNLLRLIAEEEKYVCKIDRDQIVYWLTKFKDGNIEDENFKRIIIDLMVNSVTVWDEPDGFRITTAYNLTSCKNKTFRIPSSSDKGFGFEGLESAKKKGMTYGHALLFGARRPECGFPPSSFECLGAAKPLLHNSRPAVGNLRATHRALILLLLAPNHNRLCWGTSHKEVAPGRGP

SEQ ID NO: 345 - protein, 607 aa, Unknown
  Description of Unknown: Integrase B346 sequence
  PTHR30461:SF3,cd00338,SM00857,G3DSA:1.10.10.2600,IPR036162, PF13408,IPR025827,PS51737,G3DSA:3.40.50.1390,IPR006119, IPR038109,PF07508,IPR011109,SSF53041,PTHR30461, PS51736,Coil,PF00239
MRRLPLQHSTLFGYGQAKAPALVRCSAGDNMEYSTKSDKENFMLAGVSIPRSLHMGNRPEGSVIMPRKKSTAADAPRLVAYYRYSGGSRQTEQSIEGQRRDCEAYARAHGMTILREYVDRHISGKTDDRPAFQQLVADSAAHTFDAVICWKTDRLARNRYDSAVYKKKLRDNGVEILYAAESNISGAEGIIIEGLMEALAEYYSAELAEKARRGMRESALKGKALGSSRPLGLTVDADKHYIIEPTGAEAVRYIFEQYAAGLSSSSIVERLNAMGLRTSHGGPFNKSSINRIIQNEMYRGVYVSKKFDVRIEGAIPAIIDNDLWERAQKMFERNRQSRTPHASRADYILSGKLYCGECGCLMKGVCGRSSGNGQMYHYYACPGRSIGRACTRKNIPQDELEAMVVNAVADLLLEPALLEQIADAIVELQQAEAARPDPEKQALEKSLSDVRNKIQNILSAIENGTSSAALSARLADLEQQESTLSYQLSSLDAKKPLTFTRDQILFLLQQFRVSPSERTKAYCRRLVDTFVDHIELTSTELILYFNLSDETVDKNKKAPRSNPSEESSTEKRLVHLAHQQANYSLYAASGYFSLVEHQFSARLWRTA

SEQ ID NO: 346 - protein, 607 aa, Unknown
  Description of Unknown: Integrase B347 sequence
  PTHR30461:SF3,IPR036162,PS51737,IPR011109,PTHR30461, PF00239,G3DSA:1.10.10.2600,IPR006119,SSF53041,cd00338, SM00857,IPR025827,IPR038109,mobidb-lite,PS51736, PF13408,G3DSA:3.40.50.1390,PF07508,Coil
MKKFPIDLSCLAEEEISQFQEDPYTLYNGDQDVALYLRYSSTGQSDQSIEGQLRDCRAFCKANHYRIVAIYVDRATTAHKDVEKRVHLMEMVADSAKQNWEYVIVWKLDRFARNRNDSAIMKMRLRKNGVKVLSATEHLTDSPESIILESVLEGMAEFFSAELSQKVTRGMRESALKCHSVGGHIPLGYKVENHKLVVDPDTAHIVQEAFSLYANGESVADICRKFNSAGYKTAKNTEFNRSSFKAMFRNTRYIGTYTYKDIVIENGIPAIIDKELFETVQRRLSKTATAPARGKAKVDYLLSGKLFCGHCGASMNGESGAGRHGKVYHYYSCYTKKRKLGCDKRPLKKDYIEGIVARDALNLLTDQLIDEIADMAIRQSEQDLINDTHIPQLTAQLSEVEKSIMNITAAIEKGIASETLMNRLVQLEHEKKTLNKEIKAEEKFVYRIDRDQIVFWLSQFKYGNIEDENFRRRLIDLLVNSVTVWDEPDGYKITTAYNLTSCKTKTFRVDKNPAAEEATGFDFGESECTKTLEISTVSRVFVILLKGFRPPAFSTKFRERRRSYYGEENRNSIENRCVRKRSIRGFRGSTNRKRLHRKDNSKLPLTL

SEQ ID NO: 347 - protein, 607 aa, Unknown
  Description of Unknown: Integrase B348 sequence
  PTHR30461:SF3,SM00857,G3DSA:1.10.10.2600,IPR036162,PF13408, IPR025827,PS51737,G3DSA:3.40.50.1390,IPR006119,IPR038109, PF07508,SSF53041,IPR011109,PF00239,PTHR30461, PS51736,Coil,cd00338
MPRKKKLQEVGGLRLVAYYRYSNGGQQTEQSIEGQRRDCEAYAKAHGYKIVHEYIDRHISGKSDSRPAFQQMISDSDSHLFDAVICWKTDRLARSRYDSIIYKTRLRRNGVKILYAAETVVDGPEGIIIEGLMESLAEYYSAELAQKLRRGQRESALKCIALGGNRSFGYDIGPDKHYCINEKQAPAVRYIFEQYAAGATAADIVRELTARGYRTSRGNPFNKNSICRIITNEMYLGVYKYADIRIEGGVPAMIDRELFNRCQTQLAFNRAHGGGKGAPRADYVLVGKLDCGLCGHAMKGASATGHTGSKHYYYTCTQHVEKKCPKTSIEKSYLEQIIVDGVAKYVLTPEKISQIVDCMMELQAKEQEPKGNPEKDALEAELAECRRKQNNILEAIEEGGSARLAARLRALEEQEAQLTFALGEINNAPAPPQFSREALTFMFEQFRREEDEVDEEYRRRILDTFVSSILLYEDRAEVKFNITDQKTGDFERVILPISANKKPPEDDDTTSNSEGSTALRLVEHQGVEPWHRSPGLSHFESLNRLDEAGFVRLSWAVAGIFCASQKWHISAIYRQKSTTFCEVPLEKPPFTRSVRSCISGAVPLDVR

SEQ ID NO: 348 - protein, 607 aa, Unknown
  Description of Unknown: Integrase B349 sequence
  PTHR30461:SF3,SM00857,G3DSA:1.10.10.2600,IPR036162,PS51737, G3DSA:3.40.50.1390,IPR006119,IPR038109,PF07508,IPR011109, SSF53041,PTHR30461,PS51736,cd00338,PF00239
MHNNSREKLREIYQREDNSQKTFIPAKPKVDPNERNRFFRVCAYCRVSTDSDEQLSSYELQQAHYLHLVEDHPNWELRHIYADEGISGTSLKKRDQFVEMIEACKHGEYDLIVTKSVSRFARNLVDCISIIRLLKGLPKPVGVYFETDNLNTLGENNEFMLSFLATFAQEESVKKSEAMNWSLMQRFKDGKLLTPALLGYDRPKDVTGRYIKYAPLKINESEAAIVRFIYDAYLFGWTQEEIANFLTDIGCETKTGGTEWSSGSIGYILTNERYCGNVLTWKTFTADLYEHKHKRNRKDRDQYLYTDRHEAIISPEKFDSVQILIDNRKCHIRGTLPLLHVIDEGIFRGFVPINHHWINDDPSVYYDISNSIDSKLKIRKIDKSHLSAFDLQGYQVVRNQFTQVRYEGPSLTISEEKITFNLFCMKKFDDVGFVQLLLHPTERKIAIRPCQETDVHSIRWRPDPTKQFYSKTLLCQHFGNALYNIMKWNPDFLYKIRGIWAKRLNEQIIVFNLTNAMPAVFVTKDGTENAVKQRVELCPDEWTDDFGEEFYEHTLENGFYYLTPDSDWQTKTQSIPAPGIEQYLIPSAEELQQSMATIKKGTDDKNE

SEQ ID NO: 349 - protein, 607 aa, Unknown
  Description of Unknown: Integrase B350 sequence
  PTHR30461:SF3,SM00857,G3DSA:1.10.10.2600,IPR036162,PF13408, PS51737,G3DSA:3.40.50.1390,IPR025827,IPR006119,IPR038109, PF07508,IPR011109,SSF53041,PTHR30461,Coil, PS51736,cd00338,PF00239
MNVYRTREILKTCSIFDLKLKVAFYARVSTESEDQQVSIHHQDEYYRNFIAQNKNWVFVGAYIDNGISGIRTEKRDEFQRMMADAKTGKIDMIVTKEITRFARNTLDSIKYTRELLMYGVCVWFQNDNINTIDEDSELRLTIMSGIAQDESRKLSNRIKFGHAQSIKNGVVLGSRIYGYIKKDGKLTVDPKTAPMIKEIFEKYSTGEWSTSTIERYLYKKGYRNYKGGKLSRDNIKKIIKNPKYKGYYCGGKVKVVDMFTKKQEFLPEDEWTMYKDDGNHVPQIVDESVWNKANVIMQTRSDAIKSHRTSFKQNNLFTGYIFCGNDGAPYWMKQRTARGREDVRWVCSYRIKNGAQSCNSFGIHEKELKIMLADLINKSGDIQAAIEKYISLVEKNIDFSNDRAEINRLKNMILQLEKKKDKLLDLNLDGIITNSEYLEKNEKFKNEIQDISNKLSELESKEEANKDSHLKLKEIGKILNDLQGIGPEDITKAVLGEFLDKIIVNPKRPQECEILFFLKTGDVKKKSIIERGKQSCSEYFFLTIYPPTDPFCLEVRFPLYPSVSGTPSSFATSYLKRSSAPFASGTTALLEEVLLGIIHFLLGCYLV

SEQ ID NO: 350 - protein, 607 aa, Unknown
  Description of Unknown: Integrase B351 sequence
  PTHR30461:SF3,SM00857,G3DSA:1.10.10.2600,IPR036162,PF13408, PS51737,G3DSA:3.40.50.1390,IPR025827,IPR006119,IPR038109, PF07508,SSF53041,IPR011109,PTHR30461,Coil, PS51736,cd00338,PF00239
MNVYRTREILKTCSIFDLKLKVAFYARVSTESEDQQVSIHHQDEYYRNFIAQNKNWVFVGAYIDNGISGIRTEKRDEFQRMMADAKTGKIDMIVTKEITRFARNTLDSIRYTRELLMYGVCVWFQNDNINTIDEDSELRLTIMSGIAQDESRKLSNRIKFGHAQSIKNGVVLGARIYGYIKKDGKLTIDPKTAPMIKEIFEKYSTGEWSTSTIEKYLYKKGYRNYKGGKLSRDNIKKIIKNPKYKGYYCGGKVKVVDMFTKKQEFLPEDEWTMYKDDGNHVPQIVDESVWNKANVIMQTRSDAIKSHRTSFKQNNLFTGYIFCGNDGAPYWMKQRTARGREDVRWVCSYRIKNGAQSCNSFGIHEKELKIMLADLINKSGDIQAAIERYISLVEKNIDFSNDGAEINRLKNMILQLEKKKDKLLDLNLDGIITNSEYLEKNEKFKNEIQDISNKLSELESKEEANKDSHLKLKEIGKTLNGLQGIDPEDITKSVLGEFLDKIIVNPKRPQECEILFFLKTGDVKKKSIIERDKQSCSEYFFLTIYPPTDPFCLEVRFPLYPSVSGTPSSFATSYLKRSSAPFASGTTALLEEVLLGIIHFLLGCYLV

SEQ ID NO: 351 - protein, 606 aa, Unknown
  Description of Unknown: Integrase B352 sequence
  PTHR30461:SF3,SM00857,G3DSA:1.10.10.2600,IPR036162,PF13408, PS51737,G3DSA:3.40.50.1390,IPR025827,IPR006119,IPR038109, PF07508,IPR011109,SSF53041,PF00239,PTHR30461, PS51736,Coil,cd00338
MARKKKFAPNDNNLAIAYYRFSSHSQNDASIDQQRELAHEWADAHGFKIVQEYEDAAISGTTDARPGFQQMLSEVAKIRPHTLIMWKTDRLGRDKYVLAMAKKKIRDAGCEIHLLAEHIPTEGPEGVLIEGLMEAMAEYYSRQLSQNIQRGMDYNAQHALYNGHKLFGYDVDRSTKKYIPDPNTAPFVQWAFREYASGKPLKTIAEEMNAQGLRTPRNAEFSVNMLNKMLKNRAYIGEYHHGDIVVAGGMPVLVDEATFDRAQRRFAENKRKGSQRAHGMGDAEAPRYWLTGKLYCGECGSTMQGVSGTSKAGRTYYYYYCSAQRRKECHLHKARKRDLEDMVLFALHNIVDDEENVTALALDAAEYYERSHDDTAYLEALEAKRREVEKSLANLVKVIERGVVSDTVTQRLAQLEEQKSALNDAIGTENVRVSLCEDRHSIQAYFDKFLHADVNDPEIRDQVFEYFVDKVYLYDDKLVVSMWFSEDDKQEITWRDWFSLDEYWTDESPFVKGGGVEFDCFPLGSTKKRTCFSAGPFSMKFISAQRAKYLRPEIFAPQMRKAPDASLSAPNALFSARRCIFRAGHTNTLQYPALYGSANAPRIKTN

SEQ ID NO: 352 - protein, 606 aa, Unknown
  Description of Unknown: Integrase B353 sequence
  cd00338,SM00857,G3DSA:1.10.10.2600,IPR036162,PS51737, G3DSA:3.40.50.1390,IPR006119,IPR038109,PF07508,SSF53041, IPR011109,PTHR30461,PS51736,Coil,PF00239
MKIIYKLFVGAVTAVKALNFNFYNKIEIATPLAQGGSHIRRYTISDCSSHIVSFSEQSCKRNCCSVLAVIFIRKIVRRRTYILRKVIHMQYEEYLIYLRKSRSDASLEAMGVDVLERHEQILLDLAKRMNLSIGGIYREVVSGESISARPEMQRLLSEVEAGRWKGVVVMEVERLARGDTIDQGIVQRAFQYSGTQIVTPAKTYNPNNEFDEEYFEFGLFMSRREYKTIRRRMRAGVTAAVKEGKWPFNKAPYGWQRVKLEHARGWVLAPDPEEAPVVKLIFQLYTGPDRIGITNICRYLDNRGVKPRNGDTWTECSIMGILRNIVNDQRVGIGRRKIVKQVQNGSVSKVRPHSDYDFTAPGLQPRLIDHDVFLEAQTHLGKNSHKLPESYGIKNPLAGIVVCSCCGKKMMRRPASKTPGGASYDVLKCNTRNCPTIGSALDLVEREVIQALSDWVAGYQLDPTLEVENKVPEKEQLLSSAISNHDVLLKQNGNLYDLLEQGVYTTEIFLERSHELQKRIKESEAHIEVLKKDLEYEKEKIANIENFIPSCMELLSCYWELSAQDRNKALKMLLENVEYTKTKRNQKGDKDNPTFTLNLKPRIPRI

SEQ ID NO: 353 - protein, 606 aa, Unknown
  Description of Unknown: Integrase B354 sequence
  PTHR30461:SF3,cd00338,SM00857,G3DSA:1.10.10.2600,IPR036162, PS51737,G3DSA:3.40.50.1390,IPR006119,IPR038109,PF07508, SSF53041,IPR011109,PTHR30461,PS51736,Coil, PF00239
MKRKIAIYARVSTEHEAQISALENQIQYYDEILKKHPEWELYERYIDEGITGTSIGKRDSFLRMMSDAKDKCFDLIVTREVSRFARNIVDTLQQTRTLKQYGVEVYFTDDNIWTMNDEDGELRLSIMATLAQNESKKTSMRVKAGQMISFKNGVFYGNGNILGYDREGKNLVINPTQALTVKRIFELYLQGNGIRKIQFIMEQEKRKTSLGKTKWSASNIARILKNPFYCGRIEYRKQYVPDYLTQKKINNHGEIERVITKGTHDPIVSEEDFDKVQEIFKTKTTKKDNKKYGKPLAYNVWVRKLKCKCGHGMNRKINYVSKITGVKTYSFQCHDQIHTGTIKTRLKKGLSINGICDNKSFPEWKLEVQADFIFRKLLLNKQEIYETAIEMLESSVAVDTHIQDKKKKIEDSIKNIDKLKARNDMLLDMCTDGDISRETFKKKTELNNQNIHELEEKIKLIRKQIEENDAQEDLNKRIVLLSEFIKMKAFSKKEKIPETIIEKYVEKIIFYKDDFEWYLRPTIGNVDFLSIDAKNMKKGTHELEKTMCHVPSSTGSDCRRRKIDKRKYFYFTTLIVTRDDVNEYMKYHAEYTKANRFKDIVCKIYI

SEQ ID NO: 354 - protein, 606 aa, Unknown
  Description of Unknown: Integrase B355 sequence
  PTHR30461:SF3,SM00857,IPR036162,PF13408,PS51737, G3DSA:3.40.50.1390,IPR025827,IPR006119,PF07508,IPR011109, SSF53041,PF00239,PTHR30461,Coil,cd00338
MKKVFVYHRVSSDQQLDGSGIARQAELLEAYLKRTNILAEMDDPEPVIITESGGVSAFKGHNMLITSGLGAWMQEVRAAMWDGSHLVYENGDRFSRQNPFTVIGYINDLINHNITIHDATMNIIISRQNSAMLPMVLMNAQRAYDESKYKSDRIRKGWAKKREQAFNKGTIVTNKRPQWIEVEKDKYVLNEKAAVVKEIFALYQTGMGCPTIAKKLQGKEGEQYKFNRPWTGELVHKILTNRRVTGKIFISETIRNHADIENPVTQKKYDMDVYPVVINEEEFELVQELLKSRRPNAGRVTVKKDGQEEVLIKSNLFSGIARCTECGGPMYHNVVRAKRTPKKGDPKIEEYRYIRCLNERDGLCENKAMTYETVERFVVEHLLGMDLITVMKEQEFNPEIEVLRIQIDQVKEQITNYENGIERRKSAGKIITFDMREDLDDAKSELERLLARQASLATVQVDVAVLQDVNVTELYNVNNVDIRTRYENELNKIVSTIRLKRNGTSYTIDISYKQNELKRHVLFVENKKKEQTLISEVIIEDVDGGKFYYTPSFMIRLEDGEIRFQHTNEDLSIVDYSLLLNYVDAVDRNDTVGVWMRNQFNFLTSN

SEQ ID NO: 355 - protein, 606 aa, Unknown
  Description of Unknown: Integrase B356 sequence
  PTHR30461:SF3,SM00857,G3DSA:1.10.10.2600,IPR036162,PF13408, PS51737,G3DSA:3.40.50.1390,IPR025827,IPR006119,IPR038109, PF07508,IPR011109,SSF53041,PF00239,PTHR30461, PS51736,Coil,cd00338
MARKKKFAPNDNNLAIAYYRFSSHSQNDASIDQQRELAHEWADAHGFKIVQEYEDAAISGTTDARPGFQQMLSEVAKIRPHTLIMWKTDRLGRDKYVLAMAKKKIRDAGCEIHLLAEHIPTEGPEGVLIEGLMEAMAEYYSRQLSQNIQRGMDYNAQHALYNGHKLFGYDVDRSTKKYIPDPNTAPFVQWAFREYASGKPLKTIAEEMNAQGLRTPRNAEFSVNMLNKMLKNRAYIGEYHHGDIVVAGGMPVLVDEATFDRAQRRFAENKRKGSQRAHGMGDAEAPRYWLTGKLYCGECGSTMQGVSGTSKTGRTYYYYYCSAQRRKECHLHKARKRDLEDMVLFALHNIVDDEENVTALALDAAEYYERSHDDTAYLEALEAKRREVEKSLANLVKVIERGVVSDTVTQRLAQLEEQKSALNDAIGTENVRVSLCEDRHSIQAYFDKFLHADVNDPEIRDQVFEYFVDKVYLYDDKLVVSMWFSEDDKQEITWRDWFSLDEYWTDESPFVKGGGVEFDCFPLGSTKKRTCFSAGPFSMKFISAQRAKYLRPEIFAPQMRKAPDASLSAPNALFSARRCIFRAGHTNTLQYPALYGSANAPRIKTN

SEQ ID NO: 356 - protein, 606 aa, Unknown
  Description of Unknown: Integrase B357 sequence
  PTHR30461:SF3,IPR036162,PS51737,IPR011109,PTHR30461, PF00239,G3DSA:1.10.10.2600,IPR006119,SSF53041,cd00338, SM00857,IPR025827,IPR038109,PS51736,mobidb-lite, PF13408,G3DSA:3.40.50.1390,PF07508,Coil
MAQQKKAAGAEFDGTPRAVIYARYSSTHQRERSIEDQIADCRAYAERCGLMVVGTYADRAISGKTDERPDFQRMIDDSKKRQFDRVIVWKLDRFARNRYDSALYKHKLKQNGVSVLSAMENIGEGDESIILEAILEASAEYYSRDLRKKVLRGMTTSAKKGLHNTGSVPYGYRLEGESAIPDGDRAEFVKHVFEAYAKGETPAELYREMQRRGLDTKANGRKVSDNIIGSILRNEKYTGRGMWRGIPVEWPRLIDDELFEAARARTEKNRRAPAAYKAAEPFILCGKAFCGYCGAPLMSGGGKGRSGKYYRHYICRTKKRERACGKKTEDKDFLEWYIVEQTCAYVLAPERLEYIADRVVECYKESFDGQRVSVLEARIAKLDRDLDKTTDLLFAAPSAAAVDRINKHVVELEAQKSELETELSGLKIAAAITYTRDEVVAWLKQFCNGDPLEAEFRRRIVETFINSVYVYDDRIVIYFNVRGGKQISYAEMLDSAGDVEPLPPGPESKKSGGPDNGTAASNSKERFLHGKNTEQTAESAVRFCSGLVHQKTLQLVLECFFVYPVREIEPDGAQVLLCAIMERCVFGCILDMKIPPELSEFFLCLL

SEQ ID NO: 357 - protein, 606 aa, Unknown
  Description of Unknown: Integrase B358 sequence
  PTHR30461:SF3,IPR036162,PS51737,IPR011109,PTHR30461, PF00239,G3DSA:1.10.10.2600,IPR006119,SSF53041,SM00857, IPR025827,IPR038109,PS51736,mobidb-lite,cd03768, PF13408,G3DSA:3.40.50.1390,PF07508,Coil
MAKNKDCIAVYSRKSKFTGKGESIGNQVELSREYIRTHYGDAYAESMVVYEDEGFSGGNLNRPDFKRMMKAAHEHKFKAIVVYRLDRISRNVSDFSTLIEELSRLDIAFVSIREQFDTGTPMGRAMMYIASVFSQLERETIAERIRDNMHELAKTGRWLGGTTPTGYASESVKHITVDGKSKKACKLKLVPEEADTIRLIYKIFQESDSLTYTEAELMKRGIKTKNGKYHTRFSIKSILQNPVYVIADDEVYNYLVNKDADIFSDKAAFDGVHGLMVYNRTDQEKGRATRYLSPEEWIVSVGEHPGIIPGREWIRIQESLYRNKSKAYRKPRGNEALLTGLLFCRCGSRMYPKLSKRKTADGKRIYTYVCKIKDRSKHKLCDERNANGNTLDLAIIEQIKMMEDNQGTFIAQLEQSRKFYTGNRTDYEDRLAAARRDKAEAEKKVEALVDSLAAVDDSTAKGLVIKRIEKLSQECRNIDSRIQELEGLTEQYHLSDIEFDVFRQLLTMFKSNIDTMTVEEKRAAIRTLVRKVVWDGTNAHVVLFGVPDEEIEYPDLPTVSGGSDDEDDTDDLEPFADVDYEDEEDDSLGKTQPLSAAKARWGENSK

SEQ ID NO: 358 - protein, 606 aa, Unknown
  Description of Unknown: Integrase B359 sequence
  PTHR30461:SF3,IPR036162,PS51737,IPR011109,PTHR30461, PF00239,G3DSA:1.10.10.2600,IPR006119,SSF53041,cd00338, SM00857,IPR025827,IPR038109,PS51736,mobidb-lite, PF13408,G3DSA:3.40.50.1390,PF07508,Coil
MTVVERLRSRGVTPRAVLYARFSSDNQREESIEAQLRAMHEYCSRNSIVIIHEYCDRAKSATTDDRPEFLKMIAASREGNFDFAIVHKLDRFSRNRYDSAYYKRELKKNGVQLLSVLEQMDDSPESIILESVLEGMSEYYSKNLAREVMKGMRESAMDCRYIGGWIPYGFRVDPQTHRYIINDYEAEAVRMIFRDVADGCGYNVVLNKLNSMGYRTRLGNTFSKETLYEMLRNEKYNGVYVFSRAASKDELGRRNNHLDKPIEDQIRIPGGMPKIVDDETFARVQAILTSRKRHGRRDGKRKYLLTGMVFCGLCGHRYCGDSMQTGGEKNRSVIGTYFCNNRKNHGAHACSNSNIHQEPLEELVLRKIEEIVFDESRIPGIVQAYRELCQQEDGEDKEKIRTLRQNLKTVEQKIANIVNIIANTGSAALVTQLTQLEREKELLDVQIQEEERDTKENDLDEEAIRAAFRQAQKMFHSGTLPQMEQIINLYLDKVLVYPDYVEIHLNNVPTNLLNPSQTKDEPALGGLHTFYIEKMCEKNAPQNRTRKNGQYGYNILVKLNRKEQKKAKSRRKGQKETRAQDGLDSSKTGGLDKSKSEIVAVLFSPL

SEQ ID NO: 359 - protein, 606 aa, Unknown
  Description of Unknown: Integrase B360 sequence
  PTHR30461:SF3,SM00857,G3DSA:1.10.10.2600,IPR036162,PF13408, PS51737,IPR025827,G3DSA:3.40.50.1390,IPR006119,IPR038109, PF07508,IPR011109,SSF53041,PTHR30461,Coil, PS51736,cd00338,PF00239
MRKKFNIDLSMLTPEEQQQFHDDPTTLTKGEVDVALYLRFSSERQKEQSIEGQLRDCIAYCKRKSFRIVAIYVDRATTARKDVEKRVHFQEMISDSAHHLWNFVVVWKLDRFARNREDSAVFKMRLRKNGVRVKSATETISENPEGIILESVLEGIAEYYSADLSQKITRGLRESAMKGHSVGGHVPLGYKIEDHRLVINPATAHIVQEAFQLYANGESMAEICRIFNSKGYRTAKNSEFNRSSFKSMFKNVRYIGTYIYKDIKKENAIPAIIDKDLFETVQRRLSLAADAPARGKAKVDYLLSGKLFCGHCGATMNGESGTSKTGAIHNYYTCYSRKRRKGCDKKPLKKDFIERIVAQDAMALLTNDVIEELADMAMSQADRDLKENTCIPELSTRLTEVEQGINNITKAIEKGIASDTLLNRLTELEKEKKDLTSQLREEEKYICRIDRDQIIFWLTKFQGGNIEDEDCRRRIIDLLVNSVTVWDEPDGYKITTAYNLTSCKTKTFRVSNTGSPSSEGFGFGELSSTKKRTCFSAGPFSMKFISAQRAKYLRPEIFAPQMGKAPDASHSAPNALFFCTPVHFSRRTYKHPALCDSANVPRIKTN

SEQ ID NO: 360 - protein, 605 aa, Unknown
  Description of Unknown: Integrase B361 sequence
  PTHR30461:SF3,cd00338,SM00857,IPR006118,G3DSA:1.10.10.2600, IPR036162,PS51737,G3DSA:3.40.50.1390,IPR006119,IPR038109, PF07508,SSF53041,IPR011109,PTHR30461,PS00397, PS51736,Coil,PF00239
MNEERKVAGIYIRVSTEDQVREGFSLGEQEEKLKQLCKYKDYKIYKIYKDAGISAKNMSGRPAFQQMLEDMRAGKINYIVAYKLDRVTRSVRDLEVLISELEEHHCYLVCDRDDVNTSTANGRFFVRMLTVLSQLEIEIVSERTKFGLTGAIKSGHIPGTCPLGYKRDTSKKMVIDETTKDIVIRIFNLYLQGKSYQTIANILNEEKVLEPKKWDDSTIEKILNNKIYVGDYERFKRVAKEQGKEPVIYSNVVEPIITRAMFEDIQLQKEKNQRAYCRDRVYIFMQKMKCPKCGKLMGSKGTGGKKKKYMYYHCSDCKIYLREDLIEEQVMPMIMDLIEYDMTVKKYFYPVLADKKEKNTDKLDKEINTLRNQKSRIKEAYLKEIVDVEEFSKEYKAIDEKLELLEQKRIETIDLNKQSFSQQHLMADRDVEKEKLIRSNKFYDMLMTEWKSKDKEEKQEFISKFLESITVEKDSKGNYKLVNLKLRKTFINQIFKLMQNGMFDMTIADEKDKEVRTTVMMDKRELEEYIERLNEYYEVSYYEVARLDEQKKGYQKKYLTIDETNDNEEKLFKLVELVTDDKKYPQKKVNRIVGAIRVKEREKVS

SEQ ID NO: 361 - protein, 604 aa, Unknown
  Description of Unknown: Integrase B362 sequence
  PTHR30461:SF3,SM00857,IPR006118,G3DSA:1.10.10.2600,IPR036162, PS51737,G3DSA:3.40.50.1390,IPR006119,IPR038109,PF07508, IPR011109,SSF53041,PF00239,PTHR30461,PS00397, PS51736,Coil,cd00338
MCEEEIKNAGIYIRVSTDDQARAGFSLPEQKEKLLSLCEFKGYNVFKVYEDAGISAKDMEHRPKFQEMLNDVKTGKINYIVAYKLDRVTRSVRDLEELINILEKYNCYLVCDRDDVNTSTANGRFFVRMLTVLSQLEIEIVSERTKFGLNGAIKSGHLPGVVPLGYKKDGSKKTIIDETTRHIIERIFNLYLEGNSYQQISNIFNKEKVLNKSWHDTDIEKIINNRIYMGDYEQYKRIAKKIGRDTVIYMNVVEPIITRAMWEECQTQKLANQRTYTRTRTYLFFQKLVCPKCGRIMKCKGSGGKKKKYIYYNCEFCHFNLREDYVEEYMIKAIYEFLEFEQMCNSFFLPILADKKDKNTDLNLDKEIEGYIKQKERIKKAYLTGIVELKDFEEDLKKINEKLEILNNKKQELNELDVHTFTIEKVMARRDIEKISIDNGYKEKEFYKFEWDIKTKEEKQQFISKYIDNIVIDKTDTGSLDIKQINFRSSFIDKAVKLTQVGAYDYKLPFEVNHKQEMVLVSSPMKRKQVNKYLGYLREYFEIEYREDKGDRTENGMAVFDSAIPDNYELLKVIPIIDINLFKGKDITFGLVFRPTIKEIINEK

SEQ ID NO: 362 - protein, 604 aa, Unknown
  Description of Unknown: Integrase B363 sequence
  SM00857,IPR006118,G3DSA:1.10.10.2600,IPR036162,PS51737, G3DSA:3.40.50.1390,Coil,IPR006119,IPR038109,PF07508, IPR011109,SSF53041,PTHR30461,PS00397,PS51736, cd00338,PF00239
MIKIIGYARVSTTKQDLSRQKLKIKEFCENNNYELIEIIEDFGISGVVADRKGYIELQSKTYKDADMIVISELSRLSRQEDVTETVYNIQQIINKGLSVILLDSPSKIYEANKLLDITEILILTIKAWAAAQERLDIKKKNQDGKQALFQAYPYAVVDQKIPYGYKAVPNPNGKRPKYILEEVPEEVENIKRLFALVNSGKTLGAVARYFNERNITFRGYYSTVAILSNYIHSDIYRGIRRRTQRLGREEPYTIEVRIKPIISEEDFMKAQELIKNNYKNTPTGKVNHNPLKGIIRCRCGRAMTVKDKKPAAGISKLTYRCSCVDRKSHPDFCKYNIDEVSYDLTNEILYSLFKSMHTAEYINFFRNQTDNRVTELQEEIAGIEKRLSALYLDKENLSNESQDNANKFLLTTNPTLLNIIQEKQNQLDEKIKSIDKEIIRYKKSQSKKMADIERIKDNNGKEKLQNLSIEEQGELYHNYLERVNYIPVTTMQGYYIVQFLNGIKFYIAITKVRSIAMASLLLDNWTIDEKGIITANYDTLKSSDMKNFSIEMIRKTKTMTLQEYLKSDLAKERALHLDLSYRERYLEELHKAGLDGRLRPLKKE

SEQ ID NO: 363 - protein, 604 aa, Unknown
  Description of Unknown: Integrase B364 sequence
  PTHR30461:SF3,SM00857,IPR006118,G3DSA:1.10.10.2600,IPR036162, PS51737,G3DSA:3.40.50.1390,IPR006119,IPR038109,PF07508, IPR011109,SSF53041,PF00239,PTHR30461,PS00397, PS51736,Coil,cd00338
MNKENKIAGIYIRVSTEDQAREGFSLGEQEERLREFCKFKRYEIFKVYKDAGISAKSDKRPAYQEMLEDIKSKNINVIVAFKLDRLTRSVYDIEKLMKIVNDLECDIDCLADESNTTTSNGRMVMRIMTSVSQNEIEKCSERTKVGLAGAIKQGHLPSRTTLGYKRENKKLVPNPLTKDIVVRVFDLYLEGKSHQKIANIYNKENVLGKTWRDSTIQKILSNEIYKGDYIHGKRTKHPTYYENVVEPLVNKDKWESCQYQKLRNARHYERTSTYLFTNKLKCSKCGNYFGGKASVKKKLNKKYYYYKCNHCKINLKEDSIEDLILLELLALVYIDDLFNDYYTPFIKSKLDYNKIDYKKELKELDKEKDRIKTAYIKGIVKLDEFDNELKQIEYKRQVLEKQEQDSKQYENLNFTMDDLLLIKDKKEIEDYLHPENIIDLFVRWNYLDKTNKQKLISKYIDDIEIEKLGTKIEIKKLNLRNSFYYDLIDYHNNYDTPLDLFMFMDEDKFPIPVAHNGFRTRIEIENYVNKLKEMYDVNYYEVIPNKDFTNLSFTPKNDIEKIIRIIPIKDNDRFKSNQLELAIITINLSNIKGINGAPLYKQIK

SEQ ID NO: 364 - protein, 604 aa, Unknown
  Description of Unknown: Integrase B365 sequence
  PTHR30461:SF3,IPR036162,PS51737,IPR011109,PTHR30461, PF00239,G3DSA:1.10.10.2600,IPR006119,SSF53041,cd00338, SM00857,IPR025827,IPR038109,mobidb-lite,PS51736, PF13408,G3DSA:3.40.50.1390,PF07508,Coil
MARKKNIAAGQNAVIYARYSSHNQREVSIEQQVRECMKHAAELGLHVVGTYEDRAISGKTDKRPNFQRMMRDAEKGKFQAVVAWKSNRIGRNMLQAMVNEAKLEDCGVKVFYAEEDFDDTAAGRFALRNMMNVNQFYSENMAEDITRGLYDNASKCMANGRQPLGYKRGEDGRVVLDEANAAVVREIFTRVAAGDLFVDIARDLNAQGIKTSKGANWNKGSFQSICQNERYRGIYIYGDVRVADGIPRIVSDDLWYRVQEAMRMKKNPVGTRHRVGAEDYLLTGKLRCGHCGSYMTGVSGTSRNGELHYYYTCQKRRTEHACDKKNIRRDVIEPAVAQAIKMYCLTDDVIEWMADRTVEYWEKHDNDLQIEALEQQLEENKKATSNMLKAIEMGIITEATRTRMVELETEQSRLSVQLNAAKEDVVKIDREQIISYLELLQQGDIHDRDFQMELFKNFLVAVYVYDDNRMKLVFSCMGDQNSVEIPLETGEDPPDGGLSPDAKMFVLTPDSSTRSERHHTLCGAFFVLHCSRKTQKNFCPLPQPARNGLFCARMADHGRRNLCYNIKKQGSRRNRGCSNEPADGDRGRQQAGCRTVETAAEKGI

SEQ ID NO: 365 - protein, 604 aa, Unknown
  Description of Unknown: Integrase B366 sequence
  SM00857,IPR006118,G3DSA:1.10.10.2600,IPR036162,PS51737, PS00397,G3DSA:3.40.50.1390,IPR006119,IPR038109,PF07508, IPR011109,SSF53041,PTHR30461,Coil,PS51736, cd00338,PF00239
MIKIIGYARVSTTKQDLSRQKLKIKEFCENNNYELIEIIEDFGISGVVADRKGYIELQSKTYKDADMIVISELSRLSRQEDVTETVYNIQQIINKGLSVILLDSPSKIYEANKLLDITEILILTIKAWAAAQERLDIKKKNQDGKQALFQAYPYAVVDQKIPYGYKAVPNPNGKRPKYILEEVPEEVENIKRLFALVNSGKTLGAVARYFNERNITFRGYYSTVAILSNYIHSDIYRGIRRRTQRLGREEPYTIEVRIKPIISEEDFMKAQELIKNNYKNIPTGKVNHNPLKGIIRCRCGRAMTVKDKKPAAGISKLTYRCSCVDRKSHPDFCKYNIDEVSYDLTNEILYSLFKSMHTAEYINFFRNQTDNRVTELQEEIAGIEKRLSALYLDKENLSNESQDNANKFLLTTNPTLLNIIQEKQNQLDEKIKSIDKEIIRYKKSQSKKMADIERIKDNNGKEKLQNLSIEEQGELYHKYLERVNYIPVTTMQGYYIVQFLNGIKFYIAITKVRSIAMASLLLDNWTIDEKGIITANYDTLKSSDMKNFSIEMIRKTKTMTLQEYLKSDLAKERALHLDLSYRERYLKELHKAGLDGRLRPLKKE

SEQ ID NO: 366 - protein, 604 aa, Unknown
  Description of Unknown: Integrase B367 sequence
  PTHR30461:SF3,SM00857,G3DSA:1.10.10.2600,IPR036162,PS51737, G3DSA:3.40.50.1390,IPR006119,IPR038109,PF07508,IPR011109, SSF53041,PF00239,PTHR30461,PS51736,Coil, cd00338
MKRKVAIYARVSTEHEAQINALENQIQYYNNILAQHPEWELVGRYVDEGITGTSVKKRKNFLRMMEDAKNGMFSLILTREVSRFARNTVDTLQETRKLKSYGVEVYFTEDNIRTSDDTDGELRLTLMATLAQNESKKTSVRVKAGQKISFENGVLYGNGNILGYDRVGRELVVNPEQAETVKMIFNMYHDGMGCKQIAYELEKRGRITSTGLTHWQPGTISRLLRNSFYCGKIVYRKQYVPDYLEQKKINNYDEVDKIEIMGKHEPIISEELFNDCQRRLDAKTVNRLRGKHAINPPKSAYARILKCQCGSNFERRKWHKYKDGRIRYGFECYKQKNHGSYRTRLKKGLDTTGCCTTKMFPEWKLKIVAHWLFNDLWKERDKIINRAIEMLNATIKDENVVDYTDEVKELNKKRKKYEEKLSNLVELRVEGDISKEVYEEKKGAFKKQIEYIDSELLKRDVKNSAIVSNVKTQIQLLTDLLEKKYDVISGDIPEDIVETFIDQIVVHDDYFEWRLRTSTEPVLCKVEGNAKDNTIIFLENDSHKVATQYRQRLRIRQNNLIHAIDSIELGNFVITKDYLAKYKETDENMKKVNKWNDIKIKVTI

SEQ ID NO: 367 - protein, 604 aa, Unknown
  Description of Unknown: Integrase B368 sequence
  PTHR30461:SF3,IPR036162,PS51737,IPR011109,PTHR30461, PF00239,G3DSA:1.10.10.2600,IPR006119,SSF53041,cd00338, SM00857,IPR025827,IPR038109,PS51736,mobidb-lite, PF13408,G3DSA:3.40.50.1390,PF07508,Coil
MARKKNIAAGQNAVIYARYSSHNQREVSIEQQVRECMKHAAELGLHVVGTYEDRAISGKTDKRPNFQRMMRDAEKGKFQAVVAWKSNRIGRNMLQAMVNEAKLDDYGVKVFYAEEDFDDTAAGRFALRNMMNVNQFYSENMAEDITRGLYDNASKCMANGRQPLGYKRGEDGRVVLDEANAAVVREIFTRVAAGDLFVDIARDLNAQGIKTSKGANWNKGSFQSICQNERYRGIYIYGDVRVADGIPRIVSDDLWYRVQEAMRMKKNPVGTRHRVGAEDYLLTGKLRCGHCGSYMTGVSGTSRNGELHYYYTCQKRRTEHACDKKNIRRDVIEPAVAQAIKMYCLTDDVIAWIADRTVEYWEKHDNDLQIEALEQQLEENKKATSNMLKAIEMGIITEATRTRMVELETEQSRLSVQLNAAKEDVVKIDREQIISYLELLQQGDIHDRDFQMELFKNFLVAVYVYDDNRMKLVFSCMGDQNSVEIPLETGEDPPDGGLSPDAKMFVLTPDSSTRSERHHTLCGAFFVLHCSRKTQKNFCPLPQPARNGLFCARMADHGRRNLCYNIKKQGSRRNRGCSYEPADGDRRRQQAGCRTVETAAEKGI

SEQ ID NO: 368 - protein, 604 aa, Unknown
  Description of Unknown: Integrase B369 sequence
  SM00857,G3DSA:1.10.10.2600,IPR036162,PF13408,PS51737, G3DSA:3.40.50.1390,IPR025827,IPR006119,IPR038109,PF07508, IPR011109,SSF53041,PTHR30461,Coil,PS51736, cd00338,PF00239
MKKVFVYHRVSSDQQLDGSGIARQAELLEGYLERTGICFEMDDPIPVVLSDQGVSAFKGLNISEGELGAWMEEVRKGMWDSSILVVESIDRFSRQNPFDVMGYINALMAHNVAIHDVMANIVISRSNSKDLPFVMMNAQRAYDESKYKSDRIRKGWAKKREQAFNKGTIVTNKRPQWIDVEDDKYILNHKAAVIKEIFELYKTGLGCPTIAKELQKKEGEQYKFNRAWTGELVHKILTNRRVTGKIFISETIRNHDDLDNPVTQKKYQMNVYPIVVNEDEFELVQDLLKSRRPNAGRITIKKTDNEEVLIKSNLFSGIARCMDCGGPMYHNVVRAKRTPKKGDPKVEEYRYIRCLSERDGLCNNKAMTYETVERFVVEHLIGMDISTVIKEQEFNPELEIIRIQIDQVKDQIANYENGIERRKSVGKVISFEMREELDDARLQLEELLARQASLATVNVDIPVLKNVDVNELFNVNNVDIRTRYENELNKIVSTVRLKRVDDSYIIDIKYKNNDLKRHVIFVEHKKKEQKLIGDVIIENIDGTILYSTSSFWIRVKDGAIRFQPTKDDLSIIDYHLLLNYVDGLERDNMVAVWMRHNINFLFDK

SEQ ID NO: 369 - protein, 604 aa, Unknown
  Description of Unknown: Integrase B370 sequence
  SM00857,IPR006118,G3DSA:1.10.10.2600,IPR036162,PS51737, G3DSA:3.40.50.1390,PS00397,IPR006119,IPR038109,PF07508, IPR011109,SSF53041,PTHR30461,Coil,PS51736, cd00338,PF00239
MIKIIGYARVSTTKQDLSRQKLKIKEFCENNNYELIEIIEDFGISGVVADRKGYIELQSKTYKDADMIVISELSRLSRQEDVTETVYNIQQIINKGLSVILLDSPSKIYEANKLLDITEILILTIKAWAAAQERLDIKKKNQDGKQALFQAYPYAVVDQKIPYGYKAVPNPNGKRPKYILEEVPEEVENIKRLFALVNSGKTLGAVARYFNERNITFRGYYSTVAILSNYIHSDIYRGIRRRTQRLGREEPYTIEVRIKPIISEEDFMKAQELIKNNYKNTPTGKVNHNPLKGIIRCRCGRAMTVKDKKPAAGISKLTYRCSCVDRKSHPDFCKYNIDEVSYDLTNEILYSLFKSMHTAEYINFFRNQTDNRVTELQEEIAGIEKRLSALYLDKENLSNESQDNANKFLLTTNPTLLNIIQEKQNQLDEKIKSIDKEIIRYKKSQSKKMADIERIKDNNGKEKLQNLSIEEQGELYHKYLERVNYIPVTTMQGYYIVQFLNGIKFYIAITKVRSIAMASLLLDNWTIDEKGIITANYDTLKSSDMKNFSIEMIRKTKTMTLQEYLKSDLAKERALHLDLSYRERYLEELHKAGLDGRLRPLKKE

SEQ ID NO: 370 - protein, 604 aa, Unknown
  Description of Unknown: Integrase B371 sequence
  PTHR30461:SF3,SM00857,IPR006118,G3DSA:1.10.10.2600,IPR036162, PS51737,G3DSA:3.40.50.1390,IPR006119,IPR038109,PF07508, IPR011109,SSF53041,PF00239,PTHR30461,PS00397, PS51736,Coil,cd00338
MCEEEIKNAGIYIRVSTDDQARAGFSLPEQKEKLLSLCEFKGYNVFKVYEDAGISAKDMEHRPKFQEMLNDVKTGKINYIVAYKLDRVTRSVRDLEELINILEKYNCYLVCDRDDVNTSTANGRFFVRMLTVLSQLEIEIVSERTKFGLNGAIKSGHLPGVVPLGYKKDGSKKTIIDETTRHIIERIFNLYLEGNSYQQISNIFNKEKVLNKSWHDTDIEKIINNRIYMGDYEQYKRIAKKIGRDTVIYMNVVEPIITRAMWEECQTQKLANQRTYTRTRTYLFFQKLVCPKCGRIMKCKGSGGKKKKYIYYNCEFCHFNLREDYVEEYMIKAIYEFLEFEQMCNSFFLPILADKKDKNTDLNLDKEIEGYIKQKERIKKAYLTGIVELKDFEEDLKKINEKLEILNNKKQELNELDVHTFTIEKVMARRDIEKISIDNGYKEKEFYKFEWDIKTKEEKQQFISKYIDNIVIDKTDTGSLDIKQINFRSSFIDKAVKLTQVGAYDYKLPFEVNHKQEMVLVSSPMKRKQVNKYLGYLREYFEIEYREDKGDRTENGMAVFDSAIPDNYELLKVIPIIDLNLFKGKDITFGLVFRPTIKEIINEK

SEQ ID NO: 371 - protein, 603 aa, Unknown
  Description of Unknown: Integrase B372 sequence
  PTHR30461:SF3,IPR036162,PS51737,IPR011109,PTHR30461, PF00239,G3DSA:1.10.10.2600,SSF144091,IPR006119,SSF53041, G3DSA:1.20.1540.10,PF01694,cd00338,IPR035952,SM00857,IPR025827 ,IPR022764,IPR038109,PS51736,PF13408,G3DSA:3.40.50.1390,
  CONT. FROM ABOVE: PF07508,Coil
MYEDIKTACLYVRFSSHNQTEQSIEGQTRVCRDFCKRHNIRIVEIYADRATSASKDIEKRVQFLKMIKDSEKGLFDAVIVYKLDRFARSRYDSATYKYRLKRNGVQLISATENISNDPEGIILESVLEGMAEFYSAELSQKINRGMRESAYKHNSIGGAIPLGYKIEDKKLVIDPKTAPIVKEAFEKYADGETVAEICRQFNARGYKTSKGTAFGKSSFTKIFRNERYIGVYTFHDYRAEDAIPAIIDKDLWDRVQLRVGKIKNAPARNKAKVVYLLSGKIFCGHCGSKMNGNCNAGNYCYYQCYGKKNGNVDCKKKNIRKEFIERLVAQDALSLLTDEYIEQIATIACEKNQHEIELDSALPTIRDRIHQVDLSLNHLLKAIESGSAPDMLVKRMGELEKEKKDLQAQAKKESEDIVELDKAQVIYWLEQFRGGSIEDEEFCRMLIDLFVNSVTVWDEDDNTYKVTVAYNLTSLPTKTYRLNKGGTLSDFASNAPPLEERYGSRTLLSGILMTALVSGILQCVLFPTSALLGASGIVFMLIMLSSLAGSKNGGIPITFILVGVLYLSQQVYSILFIQDNVANFMHIVGGICGTAFGFAVRKR

SEQ ID NO: 372 - protein, 602 aa, Unknown
  Description of Unknown: Integrase B373 sequence
  PTHR30461:SF3,SM00857,G3DSA:1.10.10.2600,IPR036162,PF13408, PS51737,G3DSA:3.40.50.1390,IPR025827,IPR006119,IPR038109, PF07508,IPR011109,SSF53041,PF00239,PTHR30461, PS51736,Coil,cd00338
MKKKFSSVPDPDIQDAVIYARYSSHSQRDCSIEQQVADCELFAQQNGLRVVKIYADRHLSGTTDNRPQFQQMLKDAAHGHWPFVICWKIDRFARNRYDSATYKYKLKKAGVRVLYAKESIPDGPEGILLESVLEGSAEYYSASLAQNIRRGMRFNAENCKVNSGSIPFGYCKGPDGRFAIHETNAEIVRDIFRKAAAGVPFVDIATELNNKGLKTSRGGRWNKNSFVLLKNESYIGVYHFSDIRIEGGMPAIIDPGTFLAANERMNANRRVRGRHHDGGDYLLTGKLKCAHCGSYMVGFSGTAKNGESHYYYGCQKRRRERACKKANVPREWIEKVVVKAALDYVLQPDVMEWITDAVMEYQEREAASSQLAALTAELEENQKATNNVMKAIEAGIITATTKQRLLDLETKAKDLKRAIELEKLSHVRLEREQILYWLEQFQGGSLQSQEFRRKVIDTFVSVVYLSDDHLRIAFNYSGQNRSEADFNLIMDAETASADYPINSLSLPLCPPHKKNPNLFPSGKGSDFFVCRISYRVIFISSLSSAAFFSMPPAYPVRLPFVPTTRWQGMMIEITLCPTAPPTACADIRERPRSAASCLASAP

SEQ ID NO: 373 - protein, 602 aa, Unknown
  Description of Unknown: Integrase B374 sequence
  SM00857,G3DSA:1.10.10.2600,IPR036162,PS51737,G3DSA:3.40.50.1390, IPR006119,IPR038109,PF07508,IPR011109,SSF53041, PF00239,PTHR30461,PS51736,Coil,cd00338
MYITVTLDPNGIYDAYLRKSRADMELEKLKKFDTLKQHEKFLKDRANQLGIKIRKIYREVVSGESIQERPEMQEVLKNVETGTIDGILVVEVERLTRGDAKDQGTVTQAFKYSNTKIITLNKIYDPNSDEDEEYFEFGLFMSRREYKTINRRMQRARIANVLDGKYCASEPPFGYKKVRVKYGKGYTLEPVSEEAEIVKEMYQKRADGMGYDIICNWLNTLDFKPKKSDVWTPATIKGMLSNPIYIGKIRWNSNKQKKILINGQIIKKRKKGNNEDLILVEGLHPAIISNELFDIVQGIKPNKASTKHNTELQNPLATLVKCADCGRSMQRRPYYDNKKQEPKLRRKYDIDKEKLRLCLREHKGEYSLRDIATALKVRKHCVDHWFASNQSKFTMPYADKWEELKKLLNINTTEFDKAITTYESNLIEPHEDTLICPKAHCTNIGSNLALVEQETIKALQEYISSQKELLATYNPAEEDDNVMFVSLSKELDKYNKQLDKAYELVEQGIYTPQEFTKRTKTIKDKITNTEKELNKYQLKLNKDRIEKLLPKIEKVIDSYYKVTSVEKKNKLLKSVISYIEYKKEKGGRGYESNFSIIIHPKF

SEQ ID NO: 374 - protein, 602 aa, Unknown
  Description of Unknown: Integrase B375 sequence
  PTHR30461:SF3,cd00338,SM00857,G3DSA:1.10.10.2600,IPR036162, PF13408,IPR025827,G3DSA:3.40.50.1390,PS51737,IPR006119, IPR038109,PF07508,SSF53041,IPR011109, PTHR30461,PS51736,Coil,PF00239
MKKKFSSVPDPDIQDAVIYARYSSHSQRDCSIEQQVADCELFAQQNGLRVVKIYADRHLSGTTDNRPQFQQMLKDAAHGHWPFVICWKIDRFARNRYDSATYKYKLKKAGVRVLYAKESIPDGPEGILLESVLEGSAEYYSASLAQNIRRGMRFNAENCKVNSGSIPFGYCKGPDGRFAIHETNAEIVRDIFRKAAAGVPFVDIATELNNKGLKTSRGGRWNKNSFVLLKNESYIGVYHFSDIRIEGGMPAIIDLGTFLAANERMNANRRVRGRHHDGGDYLLTGKLKCAHCGSYMIGFSGTAKNGESHYYYGCQKRRRERACKKANVPREWIEKVVVKAALDYVLRPDVMEWITDAVMEYQEREAASSQLAALTAELEENQKATDNVMKAIEAGIITATTKQRLLDLETKAKDLKRAIELEKLSHVRLEHEQILYWLEQFQGGNLQSQEFRRKVIDTFVSVVYLSDDHLRIAFNYSGQNRSEADFNLIMDAETASADYPINSFSLPLCPPHKKNPNLFPSGKGSDFFVCRISYRVIFISSLSSAAFLSMPPAYPVRLPFVPTTRWQGMMIEITLCPTAPPTACADIRERPRSAASCLASAP

SEQ ID NO: 375 - protein, 602 aa, Unknown
  Description of Unknown: Integrase B376 sequence
  PTHR30461:SF3,IPR036162,PS51737,IPR011109,PTHR30461, PF00239,G3DSA:1.10.10.2600,PF14287,IPR006119,SSF53041, IPR025378,SM00857,IPR025827,cd03770,IPR038109, PS51736,mobidb-lite,PF13408,G3DSA:3.40.50.1390,PF07508,Coil
MKQSDNTKITALYERLSRDDELNGESNSIVNQKKMLEKYALEQGFTNLRHYSDDGWSGTNFERPDWKRLLDDIENGLVGTVIVKDMSRIGRNYLQVGFYTDVFFREKGVRFIAISNGVDNTRSDSNEFAPFLNIMNEWYVRDTSRKIKEVIHAKGMDGKHLTSTAIYGYKKDPEDSNHWIIDEEAANVVRRIFNLVLEGKGPMQIARILYNDKVERPSYYLAMRGLGTCRGSCDMNEPYTWTASTISDLLRKPEYMGHTVNFRNYKDSYKDKNSKRADKKDWVIFENTQEAIVDENTWNIVQKIRETKHRPTVKGDFSPLTGLVICSDCGRPLYHHQTWGYEKKDKDGNPTGKWTNAQDYYRCSTYGLSSGKFATKCSGHYIRTAVLNELILDTIKYTCKYAKENKEEFAKKVEDSFNLRRVSSLKGIKSNITKKEKRSMELNNLIKKIYEDNVNGKLSDKRFQMMLSDYEKEQDEVDNAILALNEELEKYQTDSMRTENFMELVHKYTDFTELTAPMIYEFVDKIIVHEADKSTGERIQQVDVYLKYIGKLDVPMPELTPEERKEQERLRKKRAQSRNYRQRQKLKKQAEKEAREKANSEA

SEQ ID NO: 376 - protein, 602 aa, Unknown
  Description of Unknown: Integrase B377 sequence
  SM00857,G3DSA:1.10.10.2600,IPR036162,PS51737,G3DSA:3.40.50.1390, IPR006119,IPR038109,PF07508,IPR011109,SSF53041, PF00239,PTHR30461,PS51736,Coil,cd00338
MYITVTLDPNGIYDAYLRKSRADMELEKLKKFDTLKQHEKFLKDRANQLGIKIRKIYREVVSGESIQERPEMQEVLKNVETGTIDGILVVEVERLTRGDAKDQGTVTQAFKYSNTKIITLNKIYDPNSDEDEEYFEFGLFMSRREYKTINRRMQRARIANVLDGKYCASEPPFGYKKVRVKYGKGYTLEPVSEEAEIVKEMYQKRADGMGYDIICNWLNTLDFKPKKSDVWTPATIKGMLSNPIYIGKIRWNSNKQKKILINGQIIKKRKKGNNEDLILVEGLHPAIISNELFDIVQGIKPNKASTKHNTELQNPLATLVKCADCGRSMQRRPYYDNKKQEPKLRRKYDIDKEKLRLCLREHKGEYSLRDIATVLKVRKHCVDHWFASNQSKFTMPYADKWEELKKLLNINTTEFDKAITTYESNLIEPHEDTLICPKAHCTNIGSNLALVEQETIKALQEYISSQKELLATYNPAEEDDNVMFVSLSKELDKYNKQLDKAYELVEQGIYTPQEFTKRTKTIKDKITNTEKELNKYQIKLNKDRIEKLLPKIEKVIDSYYKVTSAEKKNKLLKSVISYIEYKKEKGGRGYESNFSIVIHPKF

SEQ ID NO: 377 - protein, 601 aa, Unknown
  Description of Unknown: Integrase B378 sequence
  PTHR30461:SF3,cd00338,SM00857,G3DSA:1.10.10.2600,IPR036162, PF13408,PS51737,G3DSA:3.40.50.1390,IPR025827,IPR006119, IPR038109,PF07508,IPR011109,SSF53041, PTHR30461,PS51736,Coil,PF00239
MARKKNIAAGQDAVIYARYSSHNQREVSIEQQVSECMKHAAELGLHVVGTYEDRAISGKTDNRPRFQQMMRDAEKGKFQAVVSWKSNRIGRNMLQAMVNEAKLDDYGVKVFYAEEDFDDTAAGRFALRNMMNVNQFYSENMAEDITRGLYDNASKCMANGRQPLGYKRGEDGRVVLDEANAAVVREIFTRVAAGDLFVDIARDLNAQGIKTSKGANWNKGSFQSICQNERYRGIYIYGDVRVADGIPRIVSDDLWYRVQEAMRMKKNPVGTRHRVGAEDYLLTGKLRCGHCGSYMTGVSGTSRNGELHYYYTCQKRRTEHACDKKNIRRDVIEPAVAQAIKMYCLTDDVIAWIADRTVEYWEKHDNDLQIEALEQQLEENKKATSNMLKAIEMGIITEATRTRMVELETEQSRLSVQLNAAKEDVVKIDREQIISYLELLQQGDIHDRDFQMELFKNFLVAVYVYDDNRMKLVFSCMGDQNSVEIPLETGEDPPDGGLSPDAKMFVLTPDSSTKKALYFVGSTVLFFLLKLVFGGCIASPAPFLGFCRRFLYNPQLLTLHRFQKGMFAGRFSAGCCIIPFNVRRKVELESNVELMPTININ

SEQ ID NO: 378 - protein, 601 aa, Unknown
  Description of Unknown: Integrase B379 sequence
  PTHR30461:SF3,cd00338,SM00857,G3DSA:1.10.10.2600,IPR036162, PF13408,IPR025827,G3DSA:3.40.50.1390,PS51737,IPR006119, IPR038109,PF07508,IPR011109,SSF53041,PTHR30461, PS51736,Coil,PF00239
MKDVEVIKARNTLSPRARTNFEKRLRVAAYCRVSTDTEDQLNSYKSQVEYYTELIKSKPEWSLAGIYADEAITGTQVKKREDFQRLINDCMNGDVDMVITKSISRFARNTLDTLKYVRMLKDKGVAVFFEEENINTLTMDGELLLVILSSVAQQEVENISANVKKGLKMKMQRGELVGFQGCLGYDYNPEDKTLTVNEEEAAVVRYIFQRYTEGAGGSVIAKELENLGYKTKRGSPKWADSTVIGIIKNEKYKGDILLGKTFTVDPISKRRLYNFGEEDQFYIREHHEPIISEEVFEAAQEILRRRAKPRSLNVDGKREKFSRKYAFSCMIECGFCGGTLTRRSWHSSSQYNKAIWQCVVSTKKGKKFCPESKGVDERTIERAFVESYRLLCQNNKDVLDEFMKRTEEALSESNAGKRLAKAEKDIHALEVKKNKLVDMRLEDTIDKETYDRKYLDLSSQIEQLQKECESLQDAAETESTMRKRVATFRQTLEQNEVLDTFDRHIFESIVEKVIVGGYDSNGNKDPYMIVFVYKTGFKNSVDGKNFKPLRKNSKENHSPAVLCSHASNEAESMCSDSSDDTCGVHHGICPHESLIFDVFKV

SEQ ID NO: 379 - protein, 601 aa, Unknown
  Description of Unknown: Integrase B380 sequence
  PTHR30461:SF3,SM00857,G3DSA:1.10.10.2600,IPR036162,PF13408, IPR025827,G3DSA:3.40.50.1390,PS51737,IPR006119,IPR038109, PF07508,SSF53041,IPR011109,PTHR30461,Coil, PS51736,cd00338,PF00239
MAKRTSVENSIITGVIYARYSSHSQKEESIEQQIEECTAFAVTNGISVVGIYADKAISGRTDRRNEFQRLMRDAEKRKFDVVIAYKSNRISRNMLNALQYESRLDSFGIKTLYAKEEFGNTAAGRFALRTMMNVNQFYSENMAEDIRRGLKDNAAECKVNGSLPYGYKKGEDGKYAIDEPRAAIVREIFSKVVDDVPYADIIRSLNDRGILTKTRKPFNKNSFNRMLRNERYIGIYEHSGVRVVGGVPAIISEEVFYAVQRKLQEGLNSDGAKRKSNSDYLLTGKLYCGECGSPMVGYAGTSRNGTLHYYYTCKSRGNDGCTKHNVRRDFIEQFVVDLTRACLSRADVTDWLVSGYIELKKQAQETSDVPVMEEELSSRKKALDNIMKAIEAGIFNETTSARMRELETEIHDLERSIALGKAMFEEPVDGERMRFYLEKLRNGMPDNQAYRKELLRTMVKAIRLWDDRIEIEYNFTGTDGDGNNYRVVTEFLKGDSGSASGVHTEPPQPHQIKETSMRMSLLFGVKTVVDSNRGRLETCRGKSAMPLLEADKGMALFPQPQLLQGYANADLQKLNAARWFCFNPRRPARRQANVPTPLRET

SEQ ID NO: 380 - protein, 601 aa, Unknown
  Description of Unknown: Integrase B381 sequence
  SM00857,G3DSA:1.10.10.2600,IPR036162,PS51737,G3DSA:3.40.50.1390, IPR006119,IPR038109,PF07508,IPR011109,SSF53041, PTHR30461,Coil,PS51736,cd00338,PF00239
MLNIIKLDPNGIYDAYLRKSRADMELERLKKFDTLKQHEKFLKDRAKQLGIKIRNTYKEVVSGESIQDRPEIQKLLKEVETGTVDGILVVEVERLTRGDAKDQGIVSQTLKYSNTKVITLNKIYDPNSEEDEEYFEFGLFMSRREYKTINRRMQRGRMANILDGKYCASEPPFGYRKIKLKQTKGFTLEPIPEEASVVKEMFKKRANGLGHDIICNWLNTLDFKPKKSDVWTPATIKGMLSNPIYLGKIRWNSNKTEKKLVNGQIVKTRKRNNSDIILVEGLHEAIVDQETFDIVQKIKPKNASTKRGMELQNPLATILKCAYCGRSMQRRPYYENKKQKPKLRRVYEIDKEKLRLCLREHKGNFSLNDIARELNVSKNCVDHWFASKQEKFSMPHADKWESLKELLNIKTSEFDKAIMTYEENIIEPHEDTLVCPKNHCINIGANLASVEAEIINGLQEYVSTQKTLLATYNPAEEGDNIMVVSLSKDLEKYNKQLDRAYELVEQGIYSSEEFSKRTKVIKDKINSTNKELNKYQSKLNKTRIEKLLPKIEEVIKSYYKVDSAEKKNKLLKSVVSYIEYKKDKGGRGYENNFSIVIHPKL

SEQ ID NO: 381 - protein, 600 aa, Unknown
  Description of Unknown: Integrase B382 sequence
  PTHR30461:SF3,cd00338,SM00857,G3DSA:1.10.10.2600,IPR036162, PF13408,PS51737,IPR025827,G3DSA:3.40.50.1390,IPR006119, IPR038109,PF07508,IPR011109,SSF53041, PTHR30461,PS51736,Coil,PF00239
MARKKNIAAGQNAVIYARYSSHNQREVSIEQQIAECTKHAAALGLRIVGTYEDRAISGKTDNRPRFQQMMRDAEKGKFQAVVAWKSNRIGRNMLQAMVNEAKLDDYGVKVFYAEEDFDDTAAGRFALRNMMNVNQFYSENMAEDITRGLYDNASKCMANGRQPLGYKRGEDGRVVLDEANAAVVREIFTRVAAGDLFVDIARDLNAQGIKTSKGANWNKGSFQSICQNERYRGIYIYGDVRVADGIPRIVSDDLWYRVQEAMRMKKNPVGTRHRVGAEDYLLTGKLRCGHCGSYMTGVSGTSRNGELHYYYTCQKRRTEHACDKKNIRRDVIESAVAQAIKMYCLTDDVIAWIADRTVEYWEKHDNDLQIEALEQQLEENKKATSNMLKAIEMGIITEATRTRMVELETEQSRLSVQLNAAKEDVVKIDREQIISYLELLQQGDIHDRDFQMELFKNFLVAVYVYDDNRMKLVFSCMGDQNSVEIPLETGEDPPDGGLSLDAKMFVLTPDSSTKKALYFVGSMVLFFLLKPVFGGLHCFACAVFRLLQAVPIQPPTFDFTPFSKRNVCRPFLADSCIIPFNVRRKIKVAFSGTIFVRLRS

SEQ ID NO: 382 - protein, 600 aa, Unknown
  Description of Unknown: Integrase B383 sequence
  cd00338,SM00857,IPR036162,PF13408,IPR025827, G3DSA:3.40.50.1390,IPR006119,PF07508,SSF53041,IPR011109, PTHR30461,Coil,PF00239
MAQKLYSYQRWSSAVQADGTTKARQTKSAEEYAQKNGLEIEEIVDAGVSGFKSANTNENGALGQFLRAVDEGLIACNSVLYVEALDRITRSEIDTALELFLGILRRGITVVTGMDNKVYTREAIKGNPVDLLTSILMFSRAHEESKTKQNRTNGNALALIDRFLKQGLPVNIKSVGSHPWWIDDSGSMYEAVKPHPVLWACAQLAMDKFMEGISVFKVTQMLNERFPHYYKGKAWAMANVRKLRLNKAVYGVREISVGGKTYVLPDYYPALISEGQFLRLQQIRTTTKYIGKVGEGRVVTDSEGNSKVIAERNNINLLSGMKLFRCGHCGGTMMAMRHGDTIRYLCEKGRGYHHDCKTWSLPGILVEHTLMLVTTIAYIELQQKGQGAKADYTQQINAMESTINGYSTQINKATKLAIALDDVDVDELAETIKELKAKRDNAIIELEVLQRKQLLANDSTFETIMMDFFTYAQYGVLQNPVHEYRSKLRDVVYSAISDVRAWKHDRRLFISFQIKGNDEYYNFSAGNTPYEWGCYVGALPFSQQELEVADGDVPEEVLERVRERYAELHAANMMMLHQAKELLSHVGYPELDSKMFWPRK

SEQ ID NO: 383 - protein, 600 aa, Unknown
  Description of Unknown: Integrase B384 sequence
  PTHR30461:SF3,cd00338,SM00857, G3DSA:1.10.10.2600,IPR036162,PF13408,IPR025827, G3DSA:3.40.50.1390,PS51737,IPR006119,IPR038109, PF07508,IPR011109,SSF53041,PTHR30461,PS51736,Coil,PF00239
MIDNCVRAVFYARVSTQEEEQLKALPKQVEECKDIIASKGWRLIDGYVDEGKSGTKKDGRKAYIKLLEDMQEDKFDIVVVKSQDRLQRNTFDWYKFTDLLNKNNKRLYLYMDNKFYEPSEDALITGIKAILAEEYSRDLSKKLNNSNKRRIEKARAGEEVSAMGNGQTYGYQIVNGKWVVDESQREVVRRMYELYTELHSVRKVRDALNEQGYRNQRGNLFTDENISRIVKNVMHKGWVILNRHHRDFDSKEIIEKSEEEWVIVKNDHEPIVSEELWDAVNNEIQSHRNRGNSGSRGKRGGTDPLSGKMICNCCGRVLWKHASQGSYKSKEGRKYTYKRYTQWYCSGKMGRGELACTDPATISGVKLQKYLVEMSDMFLDYSTVEYSKNLLKKRTISWLEDLRDKLTTPNDNGKIEQDLKALEGKKGKLIDLYTDELISKEEFKSRSVDLDAEIEKKRALLVPVEENPDIKAIEDTIANIDAEIEVLFEDEAMVEEKKVQFIQEHIKKIYVSKNSDVFIVLDNVAGAFLFIDKEDTRIEVVPVAEYNPEELSEEGITENDFVPFDRESMPQHHGPKHFHPSGSQTAPRCCFRDRFSCDQP

SEQ ID NO: 384 - protein, 600 aa, Unknown
  Description of Unknown: Integrase B385 sequence
  SM00857,IPR036162,PF13408,IPR025827,G3DSA:3.40.50.1390, IPR006119,PF07508,SSF53041,IPR011109,PF00239, PTHR30461,Coil,cd00338
MAQKLYSYQRWSSAVQADGTTKARQTKAAEEYAQKNGLEIEEIVDAGVSGFKSANTDESGALGQFLQAVDQGLIASNAVLFVESLDRITRDEIDTALELFLGILRRGITIVTGMDNKVYTREAIKGNPVDLLTSILMFSRAHEESKTKQNRTNGNAVALIDRFLKQGLPVNIKSIGSHPWWIDDSGSMYEAVKPHPVLWACAQLAMDNFMEGVSVFKVTQMLNERFPHYYKGKAWAMANVRKLRLNKAVYGVRELSVGGKSYVLPNYYPALISEGQFLRLQQIRTTTKYIGKVGEGRVVTDEEGNSKVIAERNNINLLAGMKLFRCGHCGGTMMAMRHGDTIRYLCEKGRGYHHDCKTWSLPGILVEHTLMLVTTIAYIELQQKGQGDKADYTQQINAMESTINSYSTKINKATKLAIALDDIDVDELAETIKELNANRDNAIIELEVLQRKQLLANDSTFETIMMDFFTYAQYGVLQDPVHEYRSKLRDVVYSAIGDVRAWKHDRRLFISFQIKGNDEYYNFSAGNTPYEWGCYVGALPFSQQELEIADGEVPDEVLERVRERYAELHAANMMMLHQAKELLSHVGYPELDSRMFWPRK

SEQ ID NO: 385 - protein, 600 aa, Unknown
  Description of Unknown: Integrase B386 sequence
  IPR036162,PS51737,IPR011109,PTHR30461 ,PS00397,PF00239,G3DSA:1.10.10.2600, IPR006119,SSF53041,cd00338,SM00857,IPR025827,IPR038109 ,PS51736,IPR006118,PF13408,G3DSA:3.40.50.1390,PF07508,Coil
MRCGVYVRVSTDDQRDNGYSIDSQLRMIKEYCEKNEYDIVDVYNDAGHSGKDLMRPEMQRLLKDIKSKKIDKLIAIKVDRLTRNNYDGFWLLNYCEEHDVKIELILEPYDVSTANGEMIFGMNLVFGQRERKEIGARTKRAMEEMALERIHPSKAPYGYIRNKETGHLEVEPIEAEVVKEIFELCKQGNSTRSIATIMKDNNAYLKQGKWKSDRVYKILTNSIYIGIFEYGKYKRKSQDILRVENYCEPIIDEVTWNATRNVLVKNKHSNYGEYIHLFSGLVKCPICGEIMSSSESFKYPSGKQKVYYHLRCKNHNCSGFGLHYNTEKIETKLKQVLEELTLFMLSMDNEIITCNSTKSDDVKDIEKAIEKLKLQEKRLVDLYLSSNLDVETINHKNDVIKKEIDKLNQKKVRLDPDNNSKEYTVELVKKLGCTEKNNTLFFTNIKNIGFAFLYDLLSRESKRDMIHRLISMIEIKRDKNYNIEIKDIKFTDEFITKSCKEYLKYLNTIINDNNIGIKFHKEINEIELKNMESNYDILSIKKMKNKEYSNKFLEEFISKSQEHLYIDGIVSCPYTEGNVIKDILILVPRLVPKNELINTI

SEQ ID NO: 386 - protein, 599 aa, Unknown
  Description of Unknown: Integrase B387 sequence
  PTHR30461:SF3,IPR036162,PS51737,IPR011109,PTHR30461, PF00239,G3DSA:1.10.10.2600,IPR006119,SSF53041,cd00338, SM00857,IPR025827,IPR038109,mobidb-lite,PS51736, PF13408,G3DSA:3.40.50.1390,PF07508,Coil
MIDNCVRAVFYARVSTQEEQQLKALPKQIQENRDKIREKGWVLVDGYVDEGKSGTVIKRRDEYQRLLEDMELNKFDVVVVKDQERLQRNTRDWYNFIDRLVQNKLKLYFYLDNTFYSPDNALITGIKAIMAEEYSRNLSKKMNNSNKRRIEKARAGEEVSAMGNGQTYGYSIVNGKWVVDESQRELVKKMYEFYTELHSIRKVRDALNEQGYRNQRGNLFTDENIGRIVKNVMHKGWVILNRHHREFDSKETIEKLEDEWVIVKNDHEAIVSEELWDAVNDEIQSHRNKGNSGTRGKRGGTDTLSGKMVCNCCGRVLWKHASQGSYKSKEGRKYTYKRYTQWYCSGKMGRGELACTDPATISGVKLQKYLVEMADMFLDYSTVEYSKNLLKRRTISWLEDLRDKLTTPTDNGKIEQDLKALEGKRGKLIDLYTDELISKEEFKSRSVDLDAEIEKKKTLLVPVEENPDIKAIEDTIANIDAEIEALFEDEAMVEEKKVQFIQEHIKKIYVSKNSDVFIVLDNVAGAFLFIDKEDTRIEVVPVAEYNPKELSEEGITENDFVPFDRESMPQHHGPKHLHPSGPQTAPRCCFRDRFSCDQP

SEQ ID NO: 387 - protein, 599 aa, Unknown
  Description of Unknown: Integrase B388 sequence
  PTHR30461:SF3,IPR036162,PS51737,IPR011109,PTHR30461, PF00239,G3DSA:1.10.10.2600,IPR006119,SSF53041,cd00338, SM00857,IPR025827,IPR038109,PS51736,mobidb-lite, PF13408,G3DSA:3.40.50.1390,PF07508,Coil
MIDNCVRAVFYARVSTQEEQQLKALPKQIQENRDKIREKGWVLVDGYVDEGKSGTVIKRRDEYQRLLEDMELNKFDVVVVKDQERLQRNTRDWYNFIDRLVQNKLKLYFYLDNTFYSPDNALITGIKAIMAEEYSRNLSKKMNNYHEHRIEKARAGEEVPAMGNGQTYGYQLINGKWVVDESQRELVRKMYELYTDLHSVRKVRDALNEQGYRNQRGNLFTDENIGRIVKNVMHKGWVILNRHHKEFDSKETIKKLEDEWVIVKNDHEAIVSEELWDAVNDEIQSHRNKGNSGTRGKRGGTDPLSGKMVCNCCGRVLWKHASQGSYKSKEGRKYTYKRYTQWYCSGKMGRGELACTDPATISGVKLQKYLVEMADMFLDYSTVEYSKNLLKRRTISWLEDLRDKLTTPNDNGKIEQDLKALEGKRGKLIDLYTDELISKEEFKSRSVDLDAEIEKKRALLVPVEENPDIKAIEDTIANIDAEIEVLFEDEAMVEEKKVQFIQEHIKKIYVSKNSDVFIVLDNVAGAFLFIDKEDTRIEVVPVAEYNPEELSEEGITENDFVPFDRESMPQHHGPKHLHPSGPQTAPRCCFRDRFSCDQP

SEQ ID NO: 388 - protein, 599 aa, Unknown
  Description of Unknown: Integrase B389 sequence
  PTHR30461:SF3,SM00857,G3DSA:1.10.10.2600,IPR036162,PF13408, PS51737,IPR025827,G3DSA:3.40.50.1390,IPR006119,IPR038109, PF07508,IPR011109,SSF53041,PF00239,PTHR30461, PS51736,Coil,cd00338
MNVYRTREILKTCSIFDMKLKVAFYARVSTESEDQQVSIHHQDEYYRNFIAQNKNWVFVGAYIDNGISGIRTEKRDEFQRMMADAKTGKIDMIVTKEITRFARNTLDSIRYTRELLMYGVCVWFQNDNINTIDEDSELRLTIMSGIAQDESRKLSNRIKFGHAQSIKNGVVLGARIYGYIKKDGKLTIDPKTAPMIKEIFEKYSTGEWSTSTIEKYLYKKGYRNYKGGKLSRDNIKKIIKNPKYKGYYCGGKVKVVDMFTKKQEFLPEDEWTMYKDDGNHVPQIVDESVWNKANVIMQTRSDAIKSHRTSFKQNNLFTGYIFCGNDGAPYWMKQHTIRGREDARWVCSYRIKNGAQSCNSFGIREKELRIMLADLINESGDIQTAIEKYISLVEKNMDFSNDGVEISRLKNMILQIEKKKDRLLDLNLDGIITNSEYLEKNEKFKNEIQDISNKLSELESKEEANKDSHLKLKEIGKILNDLQGVGPEDITKTVLGEFLDKIVINPKHPQECEILFFLKTGDVKKKSIIERDKQSCSEYFFLNKFSERHAVFYRKIYFRINSTASTYIRALIFFSFALPVIRLMATYVIIPMEIPSEML

SEQ ID NO: 389 - protein, 599 aa, Unknown
  Description of Unknown: Integrase B390 sequence
  PTHR30461:SF3,IPR036162,PS51737,IPR011109,PTHR30461, PS00397,PF00239,G3DSA:1.10.10.2600,IPR006119,SSF53041, cd00338,SM00857,IPR025827,IPR038109,PS51736, IPR006118,PF13408,G3DSA:3.40.50.1390,PF07508,Coil
MSTNKELREGVADKAKTCFLYVRVSTKMQVENGESIEAQLYDLRDYAKRNNLRILHEYIDDGYSGKNITGRPHFQEMMEEIKSGVRVNYVLVFKLSRFGRNAADALSSLQLMQDYGTNLVCVKDGINSEAQMGKMMIAFMSAFAEMERENILVQTMAGREQKAREGKWNGGQAPYGYKLVKDEKGKGHLEIDEDEAEIVRIIFHEYTKKGKGVMALASWLNAQGYRKNVRGNGKYEHFVPTFLKNVLCNPVYVGKIAYGRRRTTPVKGKRNEYRMIKQSDYDVYDGEHEAIIDEATWNAAQERMAEESHPFPEAKTGEHVHLLTGMLICPVCGRKMIANVSHGKRKKDGTVGKSTYAYACKYSKKQFGPSCTFTRQFKQEYINREVIEVIARTAYSDIFEERVRDELDAAVDIEKLEADVERIGKALDNNKAARRMLSRKLDSLDVSDRSYERKYEDMQARLDKLYDECADIEAAFGNAESKLESAKEKQVTTARIYEMLDEFREHFDEYDPVRKKEILRQVVDSVEINPDANPKKGDTIVTRVRFRCPVSFYPTLPEEAYDALGIKEFNRLETTEYVSENNSRVDEDTVETVAILGRR

SEQ ID NO: 390 - protein, 599 aa, Unknown
  Description of Unknown: Integrase B391 sequence
  PTHR30461:SF3,SM00857,G3DSA:1.10.10.2600,IPR036162,PF13408, IPR025827,G3DSA:3.40.50.1390,PS51737,IPR006119,IPR038109, PF07508,IPR011109,SSF53041,PTHR30461,Coil, PS51736,cd00338,PF00239
MNIYYVREKLRNCSIYDIELNVAYYARVSTEKVEQQASIKHQEEHFEELIHSNNRWKFAGSYIDDGISGIHADKREEFQRMLRDAKLGKIDMIITKEISRFARNTLDSIQYTRELLSYGVCVWFQNDGINTIDEDSELRLTIMAGVAQDEIRKLSSRIKFGHAQSIKNGVVLGHRMYGYSNHQGKLELIPEEADMVRMVFRDYASGMSTPRIEKKLWNMGYRSFKGGKISRDVIKNIIRNPKYKGYYCGGKVKVVDMFTKKQEFLPQSEWIMFKDDGSRVPQIIDETTWEKANAYLRERGEAIKSRRTSFKNENIFTGKLFCANDGAPYWMKQHYIRGKEDVRWVCSYKIKNGAASCDSFGLAESELKEVIAELINKSSENIDSILEEYFEILQSSIKNIPDNKNEISRLEKQIDLLKQKREKILEYNLDGKISDDEFISRNKEYVKQIKQIESHILEIQNTKSPEPVEIQLSAIKEQLEKFKGVNPKDINRQIVNELFEKITVEPLAATCATLTFQLRSGSIEKWGFPLRRSDDMIFTIYPPTLPFCLEVRFPLYPSVSGTPSSFATSNLKRFNAPFASGTAALLEEVLFDIIIFLLG

SEQ ID NO: 391 - protein, 599 aa, Unknown
  Description of Unknown: Integrase B392 sequence
  PTHR30461:SF3,cd00338,SM00857,G3DSA:1.10.10.2600,IPR036162, PF13408,PS51737,G3DSA:3.40.50.1390,IPR025827,IPR006119, IPR038109,PF07508,SSF53041,IPR011109,PTHR30461, PS51736,Coil,PF00239
MSSVETTAVVYARYSSHGQTEQSIEGQIAAAQKYAEQHGYTIIHIYADRAMTGRNDDREEFQKMLSDTATRQFGVILLWKIDRFGRNREEIAFNRYRCKKNGVRVERVAEDVPDGPEGVILDSVLEGMAEYYSLQLAQNVRRGQRESAKKSQTVGGCKIIGYNVNSDTKRYEVDPKTAPFVTEVFKRYANGETISEIVAWLNAQGVRTTRGGEFTVNSLHRLLKNEKYTGVYIFHDIRNEGGMPALIDRATFDKAQEMLKVNRRAPARVWSKTEYLLTDKLFCGHCGTMMVGESGHGRNGTKHNYYTCWNRKKKKTCDKKPIRQDVIEPLVLRAIGKLLENPATLENIADQVWAAYERSDTSGDTIKALDKQIADVDRALSNVMKAIEMGIINEMTKARMDELTDQKQALSAARAEAGLAGGFKLTRDMILFFLQDMAALDRSNRDSQKRLIKTFVNAIYLYDDHFNIAFNYTDNGKMTVRMQEIDDAASGDVFGRCAQSPAKDRQCKADGLFVFIYRKISGKQVGQTANTVLPVLCMCCVLLMGLPVGVSLLSHQNTLADVVAVLRYAGSGDNCRGEHCSPASLTELLLFRDGYSRKK

SEQ ID NO: 392 - protein, 599 aa, Unknown
  Description of Unknown: Integrase B393 sequence
  PTHR30461:SF3,SM00857,G3DSA:1.10.10.2600,IPR036162,PS51737, G3DSA:3.40.50.1390,IPR006119,IPR038109,PF07508,IPR011109, SSF53041,PTHR30461,PS51736,cd00338,PF00239
MNIQKTAPTPKLVTMIPADPQMTERDLRKKHLRVAPYCRVSTDKEEQLSSYEAQIEYYTEKIDANPDWTMVRLYADEGISGTSLEHRKGMQQLIEDCKAGKIDLVLTKSIARFARNIVDCLSVIELLKNLNPPVGVKFEADNIYTLDSNGRMILTILASVAEEESHSKSIIMNWSIDRRFSRGLFLTPALLGYDKDEEGNLVINPEEAQTVKVIYYLYLNGYSLTEIATLLMEYSRKTKLGRVEWNPGTLAGVLANERHCGDVLARKTFTPNFLTHKSKKNNNDRTQYRQKNHHEAIVSREVFNAANHLRASRNYSKKDRPLPVLSVVEDGILRGYVPFDKDWTGFSAEEYREASESVMKEPDVTVTADVKKRLDLTGYEIVRVQYFSTMQNPAMTISNGRLRFNTACLKKFENVEYVELLLNSVERCIAIRPCDKNNPNAIRWGRLKEGRWCASTLGCRGLAKTLFDIMEWDEDLRYRFRGQFLEQGDNKMMLFAFDEPEMIKVEEIVLPPKENTEEDEGETVKKKIYIFPPEWAGTFGQPITSIAQVGILRQEHYAGNWDVFRPATEIEEMNIFTAESLNELLREAEKIMEGWTDYR

SEQ ID NO: 393 - protein, 598 aa, Unknown
  Description of Unknown: Integrase B394 sequence
  PTHR30461:SF3,IPR036162,PS51737,IPR011109,PTHR30461, PF00239,G3DSA:1.10.10.2600,IPR006119,PF14287,SSF53041, IPR025378,SM00857,IPR025827,cd03770,IPR038109, mobidb-lite,PS51736,PF13408,G3DSA:3.40.50.1390,PF07508,Coil
MQSDKKQKQLTGITALYCRLSRDDNTDRESNSIANQKKMLQAYAKENHMGSTKFYVDDGYTGTNFNRPGFQELLDDIEMGYVSTIIVKDMSRFGREYLQVGYYTENYFPDHNVRFIAINDNVDCVDGATDMDDFIPIKNIMNELYAKDISRKVRSAHNTRGRAGEPLSQPPYGYVKDPQDKKRWIIDPEAAAVVREIFKLYLDGNGEDTIARIMQDEQHLNCTAYWASKGINRGGKKSQPNPYKWKSSTIHGILTRQEYCGDVLNFKTHSKSFKNHRRIDNPKEDWMVFEDRHEAIVERDTYIKVQKRLKSTHQRAPKEANGPKSIFCDILRCADCGSKMWYHTNTQNKDIHYFSCSNYVKDYRGTCLTRHYIRADAVEAVVEMELRRLAEYLVADENRFAEILARKSNKQYESEKKAAASELRKSEMRIEMIPKLLKSLYEDKVDGKTTEENYSILSSEYADEREQLKKKILKLRKKLAEMGEKENEREEFIRAIRKFMEMRTLTKQVLNELIDHIDVYETQGTGKNKTQRIVIYYKFVGYLDIDPTQCHPNYTADIREGVAVEYVSCEPSDGQKELFPEQYGVEDDSFEEEETEQA

SEQ ID NO: 394 - protein, 598 aa, Unknown
  Description of Unknown: Integrase B395 sequence
  PTHR30461:SF3,cd00338,SM00857,G3DSA:1.10.10.2600,IPR036162, PF13408,PS51737,IPR025827,G3DSA:3.40.50.1390,IPR006119, IPR038109,PF07508,IPR011109,SSF53041,PTHR30461, PS51736,Coil,PF00239
MEIIKIPKKEGIIDRTTGKVLNRKLRVAAYARVSTMGAEQLNSYESQKKYYYEKINNNPEWQYVDIYADEGISGTTDYRRASFMKMIQDALSGKIDLILTKSISRFGRNTMDVLKNVRLLRDNNVAVLFEENNLNTLDTKTSEMLLTTLSAVAQQESENISEHVKLGLQMKMNRGELIGFNRCYGYRNENDKLEIIDEEAEVVKFIFDKYCDGHGANGIAKMLTEQGIKSPKGNNKWNDSTIRGILRNEKYKGDVLQGKTYTADPLSHKRYKNLGEADQFYVSEHHEPIISPERFDMVQEILKERCGARANGRRIGNVGRKFAFSSRIRCGFCGNCFTRRTVVGKDREKIPSWSCTSFAKNGKENCTDSKTIREEMIKEAFVDSYKLLSSNTNFETDEFLNLMQDTMNENNKQDELERYKKEFSNIKSKKSKLIDLMVEDKISENDYNEKVEKYNRKLEILENKIEQLKLLAEDKKSISEGLQKVKELLNSKDIMDQFDQEIFNAIVDYIIVGGYDENGLIDPYLIRFILKREFDLSVPKDVSDEVVIQNNKIDLNSNNVLVDFINTRKYFSYERDENGKLNKVLRNGLRIRVECDIT

SEQ ID NO: 395 - protein, 597 aa, Unknown
  Description of Unknown: Integrase B396 sequence
  PTHR30461:SF3,SM00857,G3DSA:1.10.10.2600,IPR036162,PF13408, IPR025827,G3DSA:3.40.50.1390,PS51737,IPR006119,IPR038109, PF07508,SSF53041,IPR011109,PTHR30461,Coil, PS51736,cd00338,PF00239
MGKKQKATGGNAVIYARYSSHNQRDVSIEQQVEACRKHAAELGLTVTATYEDRAISGKTDKRPSFQRMMRDAEQHKFAYVLAWKSNRIGRNMMQALVNESRLVDCGVKVFYAEEDFDDNAAGRFALRSMMNVNQFYIENMAEDVKRGLYDNAKKGLVNGSLPLGYKRGADGKPEIDEPKAAIVREIYTRVAAGELFASIAADLNARGIRTARGREWNKGSFHVLCHNDRYRGIYMYGDIRIPGGMPRIISDELFYDAQEAYGMKKDNRYGRARHGAENYLLTGKLYCGHCGSYMVGISGTSKTGEMHYYYACQKHRLEHTCEKKAIRRDVIENAVARVIMMYCLDDETIDFIVDSTIAYFKQKDHELHIEAMENELAAVQQAISNLMKAIEAGIITPTTRTRLLDLEEQQAKLSAKINTAKAERVEIDRDDLIAGLQLFRTGDIKNKKFLAKLFNTFLLAVYLYDDNRLKIVFSFTGNHNNIEIPLELDNDCPDSESGPYETEVRMSHLECRKNSGTPPSSGGAEKGDGCSGGRFVRTAPLPPHQLTSGPFRPEVLFYPDAVQRRISWSTPSVKWQRCWAFRHPPCATMTRKVCCPL

SEQ ID NO: 396 - protein, 597 aa, Unknown
  Description of Unknown: Integrase B397 sequence
  SM00857,G3DSA:1.10.10.2600,IPR036162,PF13408,PS51737, IPR025827,G3DSA:3.40.50.1390,IPR006119,IPR038109,PF07508, SSF53041,IPR011109,PTHR30461,Coil,cd00338, PF00239
MAYRKITDIRDTIGMRAVFYARVSTAEEEQLNAIELQIEENRGCIKDHGWKLVGEYIDRSKSGTMVKGRDDYQRLYEDLYEDLFDIVVIKDQERLQRNTLDWYLFINRVVQTGKLLFMYMDGKFYSPDDALITGVRAIIAEEFSRNLSKKLHNYHDHRIEKARQGQEIALQGSGNVYGWDKKDGKYYINPEQARVRRLMCEGIMARKGSTLIAKELNDAGYRNTVGKPWKPMDIPKFVYDCKNVGTMIINKERHDFESKQTIKLPKEEWVYVENALPPIVTQEEWDLICKIHEERVIATGSDRRGKKTSGYSFSGKLVCGICGAPYWRKQRVSKDEYWVCSTKQTKGRRTRKRDSTMGKAGEINPLGCDNKNISYNSLMEIMGVVSERLQANTDTIKQDMINWLTKLRKQLLEANGGHTEADLQRELSRKSKLLDAYLDGILNKQEYQKKAEELDERIIQLKTETEKNKANSGDIAEIDKVLANIDEEVARYVDGNEKLKVEYLLEHLEQVQIFPDKVIVIVPILSEGIVVEKTQYVSREKRSRQNDLFENDLWSVQPNGRRIFYFWIQRKGACTGSLACRLSDRGTGHLSKYDGER

SEQ ID NO: 397 - protein, 597 aa, Unknown
  Description of Unknown: Integrase B398 sequence
  cd00338,SM00857,IPR036162,PF13408,IPR025827, G3DSA:3.40.50.1390,IPR006119,PF07508,SSF53041,IPR011109, PTHR30461,Coil,PF00239
MKQKLYSYQRWSSAVQSDGTTKARQTFAAEEYAKRNDLEVVEIVDAGISGFKSINSKSGALAKFLEAVDEGLIPNNAYLFVESLDRITRDEIDVALELFMGILRRGITIVTGMDNKVYTHAGIKGNPIDLLTSILLFTRAHEESKTKQNRTNGNALAMIRRFQSGLPTTIKAVGSHPWWIDCSTDKFEAVRRHPTLWQPAQDAINMFMEGVSVFKVVQYLNEKYPHAYKGKAWKTANIRKLRFNKAVYGLREITVDGTDYALPNYFPSLITEGQFLRLEKIRETTKYIGKVGEGKTVTDEEGNSKVIAERNNINLLAGMKLFRCGHCGGTMMAMRHGDTIRYLCEKGRGHQNDCKTWSLPGILVEHTLMLVTTIAYINIQRKGGVDKEDYTAQISSTEKLIEDISKKISNGTSLVLAGLGDVDEVIEQLQELKDTRSNLVLELEVLQRKQLLAEDQTFEGLMMDFFTYAQYGVLQDPVHEYRSKLRDIVYSSIGDVRAWKVDRRLMISFQIKGDDEYYTFSAGDEPYNYIFYYGSPVQLGEDLSPQGNYELPEEVKQRIREHSDVYEDSMKLLGTANALLSVVHYPDLDGRLFWPRK

SEQ ID NO: 398 - protein, 597 aa, Unknown
  Description of Unknown: Integrase B399 sequence
  PTHR30461:SF3,IPR036162,PS51737,IPR011109, PTHR30461,PS00397,PF00239,G3DSA:1.10.10.2600, IPR006119,SSF53041,SM00857,IPR025827,IPR038109, PS51736,cd03768,IPR006118,PF13408,G3DSA:3.40.50.1390,PF07508,Coil
MPKKRGSNEEFLNPGARRFRPPEVMPRKLKAAIYVRVSTRYQVDKDSLPFQKEELINYIKYALNIEDYEIFEDAGYSAKNTSRPKFQEMMSRIRNNEFTHLVVYKIDRISRNLLDFAQMYEELQKHNCSFVSKVEQFDTSTAMGEAMTRIVLVFAELERKMTGERVTAIMFSRAEKGLWNGAPIPIGYKWSEEKKYPVVDPEEAKVVRYIFDRYISLESALKVSYDLAANSVKTKRGGEWTSKTVRDVIRNPFYKGTYRYNHKTQTGTEKPLSEQIIIECNHEPIISEEVWSRANAIMDTNAERSVAHLRNNIKYTHIFSKMLKCWYCGMTMGAGLDRPRSDGYRPSKYYCTSHNRKQGCPNRYISDIIIGPFVLNYLANMVQAAQSVSKRTRADTLEKMLLRGKFFSNVDHIEREGLLTTFNNMVYGVARADFDPKKDQQDEPNNAELDLLASEREKYIRALDRLQSLYLFSDDGISEKDYIVQKGELEDKLESVNRRIAEIQGEAPEDDADLLQKATRFYIQNELVKKRSLDFKKAVSVFDKESLKDFFSSVIDTMTVKDGRVKAIRFKNGLTNVFVYKDETGPEEHESAVEASE

SEQ ID NO: 399 - protein, 596 aa, Unknown
  Description of Unknown: Integrase B400 sequence
  IPR036162,PS51737,IPR011109,PTHR30461,PS00397, PF00239,G3DSA:1.10.10.2600,IPR006119,SSF53041,cd00338, SM00857,IPR025827,IPR038109,PS51736,IPR006118, PF13408,G3DSA:3.40.50.1390,PF07508,Coil
MRCGIYVRVSTDDQRDNGYSIDSQLRMIKEYCEKNEYDIVDVYNDAGHSGKDLMRPEMQRLLKDIKSKKIDKLVAIKVDRLTRNNYDGFWLLNYCEEHDVKIELILEPYDVSTANGEMIFGMNLVFGQRERKEIGARTKRAMEEMALERIHPSKAPYGYIRNKENGHLEVEPIEAEVVKEIFELCKKGHSTRSIATIMKENNAYLKQGKWKSDRVYKILTNSIYIGIFEYGKYKRKPQDVLRVENYCEPIIDEVTWNATRNVLVKNKHSNYGEYIHLFSGLVKCPICGEIMSSSESFKYPNGKQKVYYHLRCKNHNCNGVGLHYNTEKIEAKLKQVLEELTIFILSMDNQIITCNSTKSDDVKDIEKAIEKLKLQEKRLVDLYLSSNLDVETINHKNDVIKKEIDKLNQKKIRLDPDNSSKEYTVELVKKLDCTEENDTLFFTNIKNIGFTFLYDLLSREAKRDMIHRLISMIEIKRDKNYNIEIKDIKFTDEFITKSSKEYLKYLNTIINDNNIGIKFHKEINESELKNMKSSYDILSIMKMKNKGYSDEFLEDFITKSQEHLYIDGIVSCPYIEENVIKDILILVPKNELINAI

SEQ ID NO: 400 - protein, 596 aa, Unknown
  Description of Unknown: Integrase B401 sequence
  PTHR30461:SF3,IPR036162,PS51737,IPR011109,PTHR30461, PS00397,PF00239,G3DSA:1.10.10.2600,IPR006119,SSF53041, cd00338,SM00857,IPR025827,IPR038109,PS51736, IPR006118,PF13408,G3DSA:3.40.50.1390,PF07508,Coil
MPKIAIKKVAIYIRVSTVHQVDKFSLPMQRRDLSTYSELILGIPDYEIFEDAGYSGGNTDRPAYQNMMTRIRKGEFSHLLVWKLDRISRNLLDFAAMYEELQRLGVAFVSKTEQFDTSTAMGVAMMQIIMVFATLERRTTAERVTATMLSRAHSGQWNGGRVPYGYNYDADTKTFSINEDEAKNCRTIFNTYLKEKSIVVVTQYMNSLGAKTRNGIDWTPGTVWKILSNPFYAGIYRYNRYSGTKNRIINDKNEWILVKNHHPAIITQDAYEQAATTLLENGTQRNTLGRLHHAKQPYVFRDLIYCGLCKTRMVASPGNKNAHGARIPIYTCPLRRTSSCDNQSTNEYAIGEFVLNYIINMLWAKKEFSSIKSPTELEKRLLRGSSFCKIAYIEPDGLNDFYNLLTHYKRGSSFIFTASKPHKKKAPENSEVAALRKEQEQQERALSRLQNLYLYDESAISEKDFILRKHDIMAKLDEINRKLGMMNTAAVATLSDSDFVAKASYLLISKELQSKKYIYYRDFAESVSPDVLKTYMRSIIDSIFLVYGHVTAITFKNGLTHRFAYSAPLSPRFSHKSGYNLDKQKQAEQENHQNTE

SEQ ID NO: 401 - protein, 596 aa, Unknown
  Description of Unknown: Integrase B402 sequence
  cd00338,SM00857,IPR006118,G3DSA:1.10.10.2600,IPR036162, PS51737,G3DSA:3.40.50.1390,IPR006119,IPR038109,PF07508, IPR011109,SSF53041,PTHR30461,PS00397,PS51736, Coil,PF00239
MRCGIYVRVSTDEQRDNGYSIDSQLRMIKEYCEKNEYDIVDVYNDAGHSGKDLMRPEMQRLLKDIKSKKIDKLVAIKVDRLTRNNYDGFWLLNYCEEHDVKIELMLEPYDVSTANGEIIFGMNLVFGQRERKEIGARTKRAMEEMALERIHPSKAPYGYIRNKETGHLEVEPIEAEVVKEIFELCKQGNSTRSIANIMKDNNAYLKQGKWKSDRVYKILTNSIYIGIFEYGKYKRKSQDILRVENYCEPIIDEVTWNATRNVLVKNKHSNYGEYIHLFSGLVKYPICGEIMSSSESFKYPSGNQKVYYHLRCKNHNCSGFGLHYNTEKIETKLKQVLEELTLFMLSMDNEIITCNSTKSDDVKDIEKAIEKLKIQEKRLVDLYLSSNLDVETINHKNDVIKKEIDKLNQKKERLDPDNNSKEYTIELVKKLDCTEKNNTLFFTNIKNIGFVFLYDLLSREAKRDMIHRLISMIEIKRGKNYNIEIKDIKFTDEFITKSSKEYLKYLNTIMNDNNIGIKFHKEIDEIQLKNMESNYDILSIKKMKHKEYSNKFLEEFITKSQEHLYIDGIVSCPYIEKNVIKDILILVPKKKLINTI

SEQ ID NO: 402 - protein, 596 aa, Unknown
  Description of Unknown: Integrase B403 sequence
  PTHR30461:SF3,SM00857,G3DSA:1.10.10.2600,IPR036162,PF13408, PS51737,IPR025827,G3DSA:3.40.50.1390,IPR006119,IPR038109, PF07508,IPR011109,SSF53041,PF00239,PTHR30461, PS51736,Coil,cd00338
MKKFPIDLSCLTEEEISQFQEDPYTLYNGDQDVALYLRYSSTGQSDQSIEGQLRDCRAFCKANHYRIVAIYVDRATTARKDVEKRVHLMEMVADSAKQNWEYVIVWKLDRFARNRNDSAIMKMRLRKNGVKVLSATEYLTDSPESIILESVLEGMAEFFSAELSQKVTRGMRESALKCHSVGGHIPLGYKVENHKLVVNPDTAHIVQEAFSLYANGESVADICRKFNSAGYKTAKNTEFNRSSFKAMFRNTRYIGTYTYKDIVIENGIPAIIDKELFETVQRRLSKTATAPARGKAKVDYLLSGKLFCGHCGASMNGESGAGRHGKVYHYYSCYTKKRKLGCDKRPLKKDYIEGIVARDALNLLTDQLIDEIADMTIRQSEQDLINDTHIPQLTAQLSEVEKSIMNITAAIEKGIASETLMNRLVQLEHEKKTLNKEIKAEEKFVYRIDRDQIVFWLSQFKYGNIEDENFRRRLIDLLVNSVTVWDEPDGYKITTAYNLTSCKTKTFRVDKNPAAEEATGFDFGESECTSKKPVFSKNTGFSVFLRSFPRFVSAHITPQAGEISGYFYHYYQFLAAVRMPLTVFTAWIWVSLVTWA

SEQ ID NO: 403 - protein, 596 aa, Unknown
  Description of Unknown: Integrase B404 sequence
  PTHR30461:SF3,cd00338,SM00857,G3DSA:1.10.10.2600,IPR036162, PF13408,PS51737,G3DSA:3.40.50.1390,IPR025827,IPR006119, IPR038109,PF07508,IPR011109,SSF53041,PTHR30461, PS51736,Coil,PF00239
MCAKKKPAMLEPDMQDAVIYTRYSSHNQRDCSIEQQVADCEIFARQNNLRVVKVYADRHLSGTTDNRPQFQQMLKDAAHGHWAYVICWKIDRFARNRYDSATYKFRLKKAGVRVLYAKESIPDGPEGILLESVLEGSAEYYSAALAQNIRRGMKFNAEQCKVNSGSIPFGYCKGPDGRFAIHEANAEVVREIFRKAAAGMPFVDIANDLNSRGLKTSRGGRWNKGSFRLLMNEAYIGVYHFSDTRIEGGMPALIDQGTFWAANERLKANSSVRGRHQDGGDYLLTGKLKCAHCGSYMIGFSGTGKSGELHYYYGCQKRRRERACKKANVPREWIERVVVKAALDYVLRPDVMEWIADAVMEYQEREAASAQLAALTAELEENQKATDNVMKAIEAGIITSTTKQRLLDLEAKAQDLKRAIELEKLSHVRLERDQVLFWLDRFRGGSLQSQEFRRKVIDAFVSVVYLSDDHLRIAFNYSGGSNAEADFDLVMDAEAAAGELSKKFAQGHVTSTNLPHRFVRCGVFYAQKNFGRPCRAPNPEVGCEPGGVIHVLFENPSISRLFLCILQSAAGKRIAFMPPFRKFLQKFPRHRRLIQP

SEQ ID NO: 404 - protein, 596 aa, Unknown
  Description of Unknown: Integrase B405 sequence
  PTHR30461:SF3,SM00857,G3DSA:1.10.10.2600,IPR036162,PF13408, PS51737,IPR025827,G3DSA:3.40.50.1390,IPR006119,IPR038109, PF07508,IPR011109,SSF53041,PF00239,PTHR30461, PS51736,Coil,cd00338
MKKFPIDLSCLTEEEISQFQEDPYTLYNGDQDVALYLRYSSTGQSDQSIEGQLRDCRTFCKANHYRIVAIYVDRATTARKDVEKRVHLMEMISDSAKQNWEYVIVWKLDRFARNRNDSAIMKMRLRKNGVKVLSATEHLTDSPESIILESVLEGMAEFFSAELSQKVTRGMRESALKCHSVGGHIPLGYKVENHKLVVDPDTAHIVQEAFSLYANGESVAAICRKFNSAGYKTAKNTEFNRSSFKAMFRNTRYIGTYTYKDIVIENGIPAIIDKELFETVQRRLSKTATAPARGKAKVDYLLSGKLFCGHCGASMNGESGAGRHGKVYHYYSCYTKKRKLGCDKRPLKKDYIEGIVARDALNLLTDQLIDEIADMAIRQSEQDLINDTHIPQLTAQLSEVEKSITNITAAIEKGIASETLMNRLVQLEHEKKTLNKEIKAEEKFVYRIDRDQIVFWLSQFKYGNIEDEDFRRRLIDLLVNSVTVWDEPDGYKITTAYNLTSCKTKTFRVEKNPAAEEATGFDFGESECTSKKPVFSKNTGFSVFLRSFPRFVSAHITPQAGEISGYFYHYYQFLAAVRMPLTVFTAWIWVSLVTWA

SEQ ID NO: 405 - protein, 596 aa, Unknown
  Description of Unknown: Integrase B406 sequence
  cd00338,SM00857,G3DSA:1.10.10.2600,IPR036162,PF13408, IPR025827,PS51737,G3DSA:3.40.50.1390,IPR006119,IPR038109, PF07508,IPR011109,SSF53041,PTHR30461,PS51736, Coil,PF00239
MYNTNDFAPFERENIMNIYHTREKLRTCSIHDLPLRVAFYARVSTESDDQQVSIEHQVQYYGDFIKTHKNWTFVKGYVDNGISGIQTKHRQRFKEMLDDAQNGKFDMLITKEITRFARNTLDSIQYTRQMLSWGVCVWFQNDNINTIDEDSELRLTIMAGVAQDEVRKLSNRIKFGHKQSIKNGVVLGNSRLYGYDKKDGRLTINEVEAEMVRMIFRDYASGEWSTPRLEDKLYEMGYRNYKGGKINRGVIQHIIKNPKYKGVYAGGKVKIVDMFTKRQEFLPESEWVMFKDDGSRVPQIIDDETWEKANEYLRKRGEIVKSRRTSIKKADNLFTGLIFCGNDGATYWLKQRTLRGREDVKWVCSKKIKDGASSCDSFYVDDRELRETLAKLICESSGDIDRIADDFISIYHTVTSQTDASSEISQLEKQISIAERKSDKLLEYNLDGAISDSVFLEKNKSIEEQIKKCKDRIAQLRSAEKSVLPIEENIRMIAKSVKELDGVTPEDITRPVLETFLDKIVVYPIEGRIDEKEARLVFYLKNGITTEMPLEIKKKLRCSDNIFLNMFPERNTIFYRKSGTSIGHEQEIKYSYRFAL

SEQ ID NO: 406 - protein, 596 aa, Unknown
  Description of Unknown: Integrase B407 sequence
  PTHR30461:SF3,IPR036162,PS51737,IPR011109,PTHR30461, PS00397,PF00239,G3DSA:1.10.10.2600,IPR006119,SSF53041, cd00338,SM00857,IPR025827,IPR038109,PS51736, IPR006118,PF13408,G3DSA:3.40.50.1390,PF07508,Coil
MPKIAIKKVAIYIRVSTVHQVDKFSLPMQRRDLSTYSELILGIPDYEIFEDAGYSGGNTDRPAYQNMMTRIRKGEFSHLLVWKLDRISRNLLDFAAMYEELQRLGVAFVSKTEQFDTSTAMGVAMMQIIMVFATLERRTTAERVTATMLSRAHSGQWNGGRVPYGYNYDADTKTFSINEDEAKNCRTIFNTYLKEKSIVVVTQYMNSLGAKTRNGIDWTPGTVWKILSNPFYAGIYRYNRYSGTKNRIINDKNEWILVKNHHPAIITQDAYEQAATTLLENGTQRNTLGRLHHAKQPYVFRDLIYCGLCKTRMVASPGNKNAHGARIPIYTCPLRRTSSCDNQSTNEYAIGEFVLNYIINMLWAKKEFSSIKSPTELEKRLLRGSSFCKIAYIEPDGLNDFYNLLTHYKRGSSFIFTASKPRKKKAPENSEVAALRKEQEQQERALSRLQNLYLYDESAISEKDFILRKHDIMAKLDEINRKLGMMNTAAVATLSDSDFVAKASYLLISKELQSKKYIYYRDFAESVSPDVLKTYMRSIIDSIFLVYGHVTAITFKNGLTHRFAYSAPLSPRFSHKSGYNLDKQKQAEQENHQNTE

SEQ ID NO: 407 - protein, 596 aa, Unknown
  Description of Unknown: Integrase B408 sequence
  PTHR30461:SF3,IPR036162,PS51737,IPR011109,PTHR30461, PS00397,PF00239,G3DSA:1.10.10.2600,IPR006119,SSF53041, cd00338,SM00857,IPR025827,IPR038109,PS51736, IPR006118,PF13408,G3DSA:3.40.50.1390,PF07508,Coil
MPKIAIKKVAIYIRVSTVHQVDKFSLPMQRRDLSTYSELILGIPDYEIFEDAGYSGGNTDRPAYQNMMTRIRKGEFSHLLVWKLDRISRNLLDFAAMYEELQRLGVAFVSKTEQFDTSTAMGVAMMQIIMVFATLERRTTAERVTATMLSRAHSGQWNGGRVPYGYNYDADTKTFSINEDEAKNCRTIFNTYLKEKSIVVVTQYMNSLGAKTRNGIDWTPGTVWKILSNPFYAGIYRYNRYSGTKNRIINDKNEWILVKNHHPAIITQDAYEQAATTLLENGTQRNTLGRLHHAKQPYVFRDLIYCGLCKTRMVASPGNKNAHGARIPIYTCPLRRTSSCDNQSTNEYAIGEFVLNYIINMLWAKKEFSSIKSPTELEKRLLRGSSFCKIAYIEPDGLNDFYNLLTHYKRGSSFIFTASKPRKKKAPENSEVAALRKEQEQQERALSRLQNLYLYDESAISEKDFILRKHDIMAKLDEINRKLGMMNTAAVATLSDSDFVAKASYLLISKELQSKKYIYYRDFAESVSPDVLKTYMRSIIDSIFLVYGHVTAITFKNGLTHRFVYSAPLSPRFSHKSGYNLDKQKQAEQENHQNTE

SEQ ID NO: 408 - protein, 596 aa, Unknown
  Description of Unknown: Integrase B409 sequence
  cd00338,SM00857,G3DSA:1.10.10.2600,IPR036162,PF13408, IPR025827,PS51737,G3DSA:3.40.50.1390,IPR006119,IPR038109, PF07508,IPR011109,SSF53041,PTHR30461,PS51736, Coil,PF00239
MYNTNDLAPFERENIMNIYHTREKLRTCSIHDLPLRVAFYARVSTESDDQQVSIEHQVQYYGDFIKTHKNWTFVKGYVDNGISGIQTKHRQRFKEMLDDAQNGKFDMLITKEITRFARNTLDSIQYTRQMLSWGVCVWFQNDNINTIDEDSELRLTIMAGVAQDEVRKLSNRIKFGHKQSIKNGVVLGNSRLYGYDKKDGRLTINEVEAEMVRMIFRDYASGEWSTPRLEDKLYEMGYRNYKGGKINRGVIQHIIKNPKYKGVYAGGKVKIVDMFTKRQEFLPESEWVMFKDDGSRVPQIIDDETWEKANEYLRKRGEIVKSRRTSIKKADNLFTGLIFCGNDGATYWLKQRTLRGREDVKWVCSKKIKDGASSCDSFYVDDRELRETLAKLICESSGDIDRIADDFISIYHTVTSQTDASSEISQLEKQISIAERKSDKLLEYNLDGAISDSVFLEKNKSIEEQIKKCKDRIAQLRSAEKSVLPIEENIRMIAKSVKELDGVTPEDITRPVLETFLDKIVVYPIEGRIDEKEARLVFYLKNGITTEMPLEIKKKLRCSDNIFLNMFPERNTIFYRKSGTSIGHEQEIKYSYRFAL

SEQ ID NO: 409 - protein, 596 aa, Unknown
  Description of Unknown: Integrase B410 sequence
  cd00338,SM00857,G3DSA:1.10.10.2600,IPR036162,PF13408, IPR025827,PS51737,G3DSA:3.40.50.1390,IPR006119,IPR038109, PF07508,IPR011109,SSF53041,PTHR30461,PS51736, Coil,PF00239
MYNTNDLAPFERENIMNIYHTREKLRTCSIHDLPLRVAFYARVSTESDDQQVSIEHQVQYYGDFIKTHKNWTFVKGYVDNGISGIQTKHRQRFKEMLDDAQNGKFDMLITKEITRFARNTLDSIQYTRQMLSWGVCVWFQNDNINTIDEDSELRLTIMAGVAQDEVRKLSNRIKFGHKQSIKNGVVLGNSRLYGYDKKDGRLTINEAEAEMVRMIFRDYASGEWSTPRLEDKLYEMGYRNYKGGKINRGVIQHIIKNPKYKGVYAGGKVKIVDMFTKRQEFLPESEWVMFKDDGSRVPQIIDDETWEKANEYLRKRGEIVKSRRTSIKKADNLFTGLIFCGNDGATYWLKQRTIRGREDVKWVCSKKIKDGANSCDSFYVDDRELRETLAKLICESSGDIDRIAEEFISIYHAVTSQTDASSEISQLEKQISIAERKSDKLLEYNLDGAISDSVFLEKNKSIEEQIKKCKDRIAQLRSAEKSVIPIEKNIRMIAKSVKELDGITPEDITRPVLETFLDKIVVYPIEGRIDEKEARLVFYLKNGITTEMPLEIKKKLRCSDNIFLNMFPERNTIFYRKSGTSIGHEQEIKYSYRFAL

SEQ ID NO: 410 - protein, 596 aa, Unknown
  Description of Unknown: Integrase B411 sequence
  PTHR30461:SF3,IPR036162,PS51737,IPR011109,PTHR30461, PS00397,PF00239,G3DSA:1.10.10.2600,IPR006119,SSF53041, cd00338,SM00857,IPR025827,IPR038109,PS51736, IPR006118,PF13408,G3DSA:3.40.50.1390,PF07508,Coil
MPKIAIKKVAIYIRVSTVHQVDKFSLPMQRRDLSTYSELILGIPDYEIFEDAGYSGGNTDRPAYQNMMTRIRKGEFSHLLVWKLDRISRNLLDFAAMYEELQRLGVAFVSKTEQFDTSTAMGVAMMQIIMVFATLERRTTAERVTATMLSRAHSGQWNGGRVPYGYNYDADTKTFSINEDEAKNCRTIFNTYLKEKSIVVVTQYMNSLGAKTRNGIDWTPGTVWKILSNPFYAGIYRYNRYSGTKNRIINDKNEWILVKNHHPAIITQDAYEQAATTLLENGTQRNTLGRLHHAKQPYVFRDLIYCGLCKTRMVASPGNKNAHGARIPIYTCPLRRTSSCDNQSTNEYAIGEFVLNYIINMLWAKKEFSSIKSPTELEKRLLRGSNFCKIAYIEPDGLNDFYNLLTHYKRGSSFIFTASKPRKKKAPENSEVAALRKEQEQQERALSRLQNLYLYDESAISEKDFILRKHDIMAKLDEINRKLGMMNTAAVATLSDSDFVAKASYLLISKELQSKKYIYYRDFAESVSPDVLKTYMRSIIDSIFLVYGHVTAITFKNGLTHRFAYSAPLSPRFSHKSGYNLDKQKQAEQENHQNTE

SEQ ID NO: 411 - protein, 596 aa, Unknown
  Description of Unknown: Integrase B412 sequence
  PTHR30461:SF3,IPR036162,PS51737,IPR011109,PTHR30461, PS00397,PF00239,G3DSA:1.10.10.2600,IPR006119,SSF53041, cd00338,SM00857,IPR025827,IPR038109,PS51736, IPR006118,PF13408,G3DSA:3.40.50.1390,PF07508,Coil
MPKIAIKKVAIYIRVSTVHQVDKFSLPMQRRDLSTYSELILGIPDYEIFEDAGYSGGNTDRPAYQNMMTRIRKGEFSHLLVWKLDRISRNLLDFAAMYEELQRLGVAFVSKTEQFDTSTAMGVAMMQIIMVFATLERRTTAERVTATMLSRAHSGQWNGGRVPYGYNYDTDTKTFSINEDEAKNCRTIFNTYLKEKSIVVVTQYMNSLGAKTRNGIDWTPGTVWKILSNPFYAGIYRYNRYSGTKNRIINDKNEWILVKNHHPAIITQDAYEQAATTLLENGTQRNTLGRLHHAKQPYVFRDLIYCGLCKTRMVASPGNKNAHGARIPIYTCPLRRTSSCDNQSTNEYAIGEFVLNYIINMLWAKKEFSSIKSPTELEKRLLRGSNFCKIAYIEPDGLNDFYNLLTHYKRGSSFIFTASKPRKKKAPENSEVAALRKEQEQQERALSRLQNLYLYDESAISEKDFILRKHDIMAKLDEINRKLGMMNTAAVATLSDSDFVAKASYLLISKELQSKKYIYYRDFAESVSPDVLKAYMRSIIDSIFLVYGHVTAITFKNGLTHRFAYSAPLSPRFSHKSGYNLDKQKQAEQENHQNAE

SEQ ID NO: 412 - protein, 595 aa, Unknown
  Description of Unknown: Integrase B413 sequence
  PTHR30461:SF3,SM00857,G3DSA:1.10.10.2600,IPR036162,PF13408, IPR025827,G3DSA:3.40.50.1390,PS51737,IPR006119,IPR038109, PF07508,IPR011109,SSF53041,PF00239,PTHR30461, PS51736,Coil,cd00338
MYEDIKTACLYVRFSSHNQTEQSIEGQTRVCRDFCKRHNIRIVEIYADRATSASKDIEKRVQFLKMIKDSEKGLFDAVIVYKLDRFARSRYDSATYKYRLKRNGVQLISATENISNDPEGIILESVLEGMAEFYSAELSQKINRGMRESAYKHNSIGGAIPLGYKIEDKKLVIDPKTAPIVKEAFEKYADGETVAEICRQFNARGYKTSKGTAFGKSSFTKIFRNERYIGVYTFHDYRAEDAIPAIIDKDLWDRVQLRVGKIKNAPARNKAKVVYLLSGKIFCGHCGSKMNGNCNAGNYCYYQCYGKKNGNVDCKKKNIRKEFIERLVAQDALSLLTDEYIEQIATIACEKNQHEIELDSALPTIRDRIHQVDLSLNHLLKAIESGSAPDMLVKRMGELEKEKKDLQAQAKKESEDIVELDKAQVIYWLEQFRGGSIEDEEFCRMLIDLFVNSVTVWDEDDNTYKVTVAYNLTSLPTKTYRLNKGGTLSDFASNAPDRKTHKDCIVVLHVVPLHGNLRTGSRIVHLNRAAGFLVHPVQIGFRIRHLRLNLKDVRADCLCQRLGNLCGHAGRRKICYKFITHCVLPHQSFHFLHSA

SEQ ID NO: 413 - protein, 595 aa, Unknown
  Description of Unknown: Integrase B414 sequence
  PTHR30461:SF3,IPR036162,PS51737,IPR011109,PTHR30461, PF00239,G3DSA:1.10.10.2600,IPR006119,PF14287,SSF53041, IPR025378,SM00857,IPR025827,cd03770,IPR038109, mobidb-lite,PF13408,G3DSA:3.40.50.1390,PF07508,Coil
MSVKQTEEKITALYERLSRDDELAGESNSILNQKAYLETYAAQHGYTTIAHYTDDGWSGGNFERPDWKRMIADIEAGRVCRVIVKDMSRAGRDYLQTGFYTEVFFRQHGVHFIAIANGVDSEDQNSNEFAPFLNIMNEWYLRDQSRKVSAAYKIKGNSGKHTSTHAIYGYKKDPEDKNHWLIDEEAAAIVRRIFQMSIEGHGGYEIAQILTREKVESPSYYLASRGLYKNRKDMSRPYDWYGNSVNVLLSKPEYMGHTVNFRTSKKSYKDKRIMNPPEEWLIFENTHEAIVDPETWHLAQQTRKTVHRIDTTGEANPLTGLMYCADCGAKMYNHRSFKTKSDGTRTAVDNYNCANYTLTLQRETHKCCSHSVTTKAIRGILLDTIRGVSKYAISNEEEFRDKVMEASRLKQESDAKDLKKRLKAAQKRCQELDILIQKLYESYAVGKITEHRFDLLSTQYEKEQAELSAVIDSNRVELADFETDTSRAKQFLALAKKYTDFSELTTPMINEFIEKIIVHAPEKINGERTMEIEIYLKFIGKFEVEPTPEEIAVAEAERNRRAVERQKYLRKKAQQEQKRMEAQLEQTDAPTQETA

SEQ ID NO: 414 - protein, 595 aa, Unknown
  Description of Unknown: Integrase B415 sequence
  PTHR30461:SF3,SM00857,G3DSA:1.10.10.2600,IPR036162,PF13408, IPR025827,G3DSA:3.40.50.1390,PS51737,IPR006119,IPR038109, PF07508,IPR011109,SSF53041,PF00239,PTHR30461, PS51736,Coil,cd00338
MYEDIKTACLYVRFSSHNQTEQSIEGQTRVCRDFCKRHNIRIVEIYADRATSASKDIEKRVQFLKMIKDSEKGLFDAVIVYKLDRFARSRYDSATYKYRLKRNGVQLISATENISNDPEGIILESVLEGMAEFYSAELSQKINRGMRESAYKHNSIGGAVPLGYKIEDKKLVIDPKTAPIVKEAFEKYADGETVAEICRQFNARGYKTSKGTAFGKSSFTKIFRNERYIGVYTFHDYRAEDAIPAIIDKDLWDRVQLRVGKIKNAPARNKAKVVYLLSGKIFCGHCGSKMNGNCNAGNYCYYQCYGKKNGNVDCKKKNIRKEFIERLVAQDALSLLTDEYIEQIATIACEKNQHEIELDSALPTIRDRIHQVDLSLNHLLKAIESGSAPDMLVKRMGELEKEKKDLQAQAKKESEDIVELDKAQVIYWLEQFRGGSIEDEEFCRMLIDLFVNSVTVWDEDDNTYKVTVAYNLTSLPTKTYRLNKGGTLSDFASNAPDREAHKNCVVVLHVVPLYGNLWTGNRIVHLNRAAGFLVHPVQISFRVRHLRLNLKDVRADCLCQRLGNLCGHAGRRKIRYKFLTHCVLPHQSFHFLHSA

SEQ ID NO: 415 - protein, 595 aa, Unknown
  Description of Unknown: Integrase B416 sequence
  PTHR30461:SF3,SM00857,G3DSA:1.10.10.2600,IPR036162,PS51737, G3DSA:3.40.50.1390,IPR006119,IPR038109,PF07508,IPR011109, SSF53041,PTHR30461,Coil,PS51736,cd00338, PF00239
  MOD_RES (567)..(570): Any amino acid
MYDIYNQKPTSRKVVIYARVSTEHEAQLSALENQKDWYKPILQQHPEWDIVKMYVDEGITGTSAKKRPQFMQMIQDASSGNFDLILTREVSRFARNTVDTLQYTRELKSKGVEVFFLNDNIKTFDGDGELRLTIMATLAQDESRKTSVRVKSGQQTSMENGVFYGNGNILGYDRVGKDMVINPEQAKTVRMIFDWYLDGWGMRKIQFELEKAGRLTAMGKSNWHVSNISKILRNSFYCGIITYHKEFTPDFLEQKKIRNFGDMEFTQVRGNHKPIITEEEYDQAQKRINSRRKTLSVDTSGQRMYGEKPPSDVWVKLLECECGHKFNRKMWHNTTEGKQYGYQCYSSIRTGTVRTRLNKGLPIDGICQTPMIAGWKLQMMAKYIFKNYLSDTDQVLSLAESMLEKHIDDEEEVCDNTDIINQKKEELQKLLKRLDNLIEMRADGELARDIFILKKESTENSISQLKKELAELEPSEIESEIDEVTSKEKITILKYALDQYTNFDSDADIPESVIEAFVEKIIARKDGFDWYLRFNPEESPMGCLVDGKRKRGAKVSAFCSPQHRQLXXXXETKKRGKSFRILFTAAQAAIAEKNA

SEQ ID NO: 416 - protein, 595 aa, Unknown
  Description of Unknown: Integrase B417 sequence
  PTHR30461:SF3,cd00338,SM00857,G3DSA:1.10.10.2600,IPR036162, PF13408,IPR025827,G3DSA:3.40.50.1390,PS51737,IPR006119, IPR038109,PF07508,IPR011109,SSF53041,PTHR30461, PS51736,Coil,PF00239
MFEDVKTACLYVRFSSHNQTEQSIEGQTRVCQEFCQRHNIKIVEIYADRATSASKNTEKRVSFLKMIKDSEKGLFDAVVVYKLDRFARSRYDSATYKYRLKKNGVQLISATENITNSPEGIILESVLEGMAEFYSAELSQKINRGMRESAYKHNSIGGALPLGYKTVDKKLVIDEKTAPIVREAFTMYAEGHSVAEICRIFNARGYKTSKGTEFGKNSFSKIFRNERYIGTYTYHDYRAEDAIPAIIDRDLWDRVQLRLKKVKNSPGRNKAKRVYLLSGKLFCGHCGESMNGNCNGNKYAFYECYGKKSKYNGCQKRNLRKEYIERLIAQDALSLLTDENIEHLATVACERNDYEIETGSPIPVIRNRIHQTEVSINNLTKAIETGATPDALVKRMVELEREKKDLSTQLKKEEELIVPLEKEQVIFWLEKFKDGDIEDEEFCRLLIDLFVNSVTVWDEDNDMLKVTIAYNLTSLPTKTYRLTKDGTLSDFTGNAPDREAHKNCVVVRHVVPLRGNLRTGSRIVHLNRAAGVLVHPVQISFRIRHLRLNLKDVRADCLCQRLGNLCGHAGRRKKCYKFITHCVLPHQSFHFLHSA

SEQ ID NO: 417 - protein, 595 aa, Unknown
  Description of Unknown: Integrase B418 sequence
  PTHR30461:SF3,IPR036162,PS51737,IPR011109,PTHR30461, PS00397,PF00239,G3DSA:1.10.10.2600,IPR006119,SSF53041, cd00338,SM00857,IPR025827,IPR038109,PS51736, IPR006118,PF13408,G3DSA:3.40.50.1390,PF07508,Coil
MARKNPKTLDAARLLSCVLYIRVSTKLQVEKGESIDAQRFELTRYAENHDMRVLGEYVDAGFSGKNVQGRPQFRQMMDDIIKAQPSKRPAYVLVFKLSRFGRNAADTWNSLQTLQDYGVELCCVKDGIDSGTSMGKAMLSIAAVFAEMERDNIRTQTMSGREEKARKGYWNGGQAPFGYRLVDKGNKFKELEVDEDEAKVVRRIFEMYACENKGSMAIATWLNNHGIKKKPRGNARMDTFSSGTVQRMITNPVYIGKIAYGRRRTETIEGTRGETHVVKSDGYEMHDGQHDAIIDDATWAAAQALVGTRKPNMKTHDDGHVNMLNGLLVCPVCGRKMSSKPNRGKLKKDGTRGKTTWAYYCPHTSKARGASCTFKSQYPQECVDAEVVQLVSLASRSDAFVDALRRRIDDATDIEQLKEDIERIEGEKAANDKRMRMLMTQIDSLDPADRSYERKFNDLQRRLDDLYDRDAGLSDALEEAQAKMTTAEKRMDGERRLLEELDRIPELLEGADEQTRFDLIHEAVSEVHILPDKNPRKERVVANVTFKCPVRFFWEEIPGVANAYTPMTPDSLGENDFRDDEAHVETIVLLQRETL

SEQ ID NO: 418 - protein, 594 aa, Unknown
  Description of Unknown: Integrase B419 sequence
  PTHR30461:SF3,cd00338,SM00857,G3DSA:1.10.10.2600,IPR036162, PS51737,G3DSA:3.40.50.1390,IPR006119,IPR038109,PF07508, IPR011109,SSF53041,PTHR30461,PS51736,Coil, PF00239
MNITQRMYFGQFPLDKDRDRRIVFYGRVSTQHEAQVDALGNQMQWYDDQLRYHPNWQVINRYIDEGITGTSAKKRPAFMQMISDAKRGKFDLIVTREVCRFARNTVDTLQLTRELRNFGVEVFFVSDNIWTMDGDGELRLSIMATMAQEESRKISERVLAGQKISRQNGVLYGSGNIIGYDRDKVNRTYVINEEQAATIRMVFTLYSQGYGEKAIVNELSRLGRKDGHGNVSWSCTKISRILRNATYMGYICYNKSKVNNYLEKKRINNLDEASFVYVKGNFEPIVSENLWHECERIRKSRISSLRLPDGETRRKGARTTKNLWVSKLRCRCGSSYRIFNWRKLKDGTPVFGYQCNMRTVNPTRSFVLEHNMTQQLSCDAISIPEWKLELMAKKIFEKVWGNQNKAILRACKMIESCQNGKATARMSAAPIQSKIEKIKKRKLNYAAMRADGELPREEYQALCKQADDEIARLEQELKALSPAPEPQTVSSDMKAIYDFLSQKVDVHGACLAPELIEQFVEVVTPIADYSYRWKLNTGCKKSKEERTDLMAVSEKPILTFTIDFETAKRYREANKMPHQFRRAAWTDLTVEVYL

SEQ ID NO: 419 - protein, 594 aa, Unknown
  Description of Unknown: Integrase B420 sequence
  SM00857,G3DSA:1.10.10.2600,IPR036162,PS51737,G3DSA:3.40.50.1390, IPR006119,IPR038109,PF07508,SSF53041,IPR011109, PF00239,PTHR30461,PS51736,Coil,cd00338
MEISGTNKLILPKDIILADRERERIIVYYGRVSTEHEAQLSALENQLQWYDDQSKYHPNWKVLRKYIDEGITGTQAKKRPAFLKMLEDAKNGQFDLIVTREVCRFARNTVDTLVTTRELKKIGVEVYFVEDNIWTMDGDGELRLTIMATLAQEESRKTSERVRAGQKISRDNGVLYGNGNILGYDRVGDTYVINEEQAETVRLIYNLYSQGLGFKKIINELVSQHRKDSYGLVRWECTKISRILHNATYKGYMGYLKSFRNNYLEQKSIINRDESTHLYIKGKFEPIVSEELWEKCRQIRESKAMKIKSYGGKERVVGFKPSNDIWVKKMKCRCGSSFRRCKWHKNKSGELIYGYQCYNQLNNGSKKIRESAGISTEGYCDMGTIGDWKIDMMAQKIFQGLCGEQRECINRSYSIYENNFRAKGNNSNNQKEVLLSKIEKSKVKLNNLTNMRMEGEISKEEYQECRQKVTDEIATFQKKLKALVEEKKEPDPAVIKMSLDEFAAILIEKIDFNAPIIDRGIIEQFVEKIVPRNTLEFDWYLNLIPHIFEDNSSTGYNEVWTFVINFDEAEKYRKLRGGFLRKNQWRDLTVHVFV

SEQ ID NO: 420 - protein, 594 aa, Unknown
  Description of Unknown: Integrase B421 sequence
  PTHR30461:SF3,cd00338,SM00857,G3DSA:1.10.10.2600,IPR036162, PF13408,IPR025827,G3DSA:3.40.50.1390,PS51737,IPR006119, IPR038109,PF07508,SSF53041,IPR011109, PTHR30461,PS51736,Coil,PF00239
MARKKNIAAGLDAVIYARYSSHNQREVSIEQQIAECTKHAAALGLRIVGTYEDRAISGKTDNRPRFQQMMRDAEKGKFQAVVAWKSNRIGRNMLQAMVNEAKLDDYGVKVFYAEEDFDDTAAGRFALRNMMNVNQFYSENMAEDITRGLYDNANKCMANGRQPLGYKRGADGKVMLDEPAAAVVREIFTRVAAGDLFVDIARDLNAKGIKTSKGATWNKGSFQSICQNERYKGIYIYGNVRIVDGIPRIVSDELWYKVQEAMRMKKNPVGTRHRVGAEDYLLTGKLRCGHCGSYMTGVSGTSRNGELHYYYTCQKRRTEHACNKKNVRRDVIEPAIAQAIKMYCLTDDVIEWVANRTVEYWEKHDNDLHIEALEQQLEENKKATSNMLKAIEMGIITDATRSRMIELETEQSKLAVQLNAAKADVVKIDRDDLIDELQIFRDMDVNNRSVQAELFKDFLVAAYIYDDNRLKLVFSFMGKDNSIEIPLETGEDPPDGEDSPDAKMFVLTPDCSTKKALYFAGSTVLFFFTEANFWGLRCFACTIFRLLQAVPIHPPIFDFTSFSKRNVCRPAVQQTAASSPSMYGVRSKLNVILS

SEQ ID NO: 421 - protein, 594 aa, Unknown
  Description of Unknown: Integrase B422 sequence
  PTHR30461:SF3,cd00338,SM00857,G3DSA:1.10.10.2600,IPR036162, PF13408,PS51737,G3DSA:3.40.50.1390,IPR025827,IPR006119, IPR038109,PF07508,IPR011109,SSF53041,PTHR30461, PS51736,Coil,PF00239
MARKKNIAAGLDAVIYARYSSHNQREVSIEQQIAECTKHAAALGLRIVGTYEDRAISGKTDNRPRFQQMMRDAEKGKFQAIVAWKSNRIGRNMLQAMVNEAKLDDYGIKVFYAEEDFDDTAAGRFALRNMMNVNQFYSENMAEDITRGLYDNASKCMANGRQPLGYKRGEDGRVVLDEANAAVVREIFTRVAAGDLFVDIARDLNAQGIKTSNGANWNKGSFQSICQNERYRGIYIYGDVRVADGIPRIVSDDLWYRVQEAMRMKKNPVGTRHRVGAEDYLLTGKLRCGHCGSYMTGVSGTSRNGELHYYYTCQKRRTEHACDKKNIRRDVIEPAVAQAIKMYCLTDDVIAWIADRTVEYWEKHDNDLQIEALEQQLEENKKATSNMLKAIEMGIITEATRTRMVELETEQSRLSVQLNVAKEDVVKIDREQIISYLELLQQGDIHDRDFQMELFKNFLVAVYVYDDNRMKLVFSCMGDQNSVEIPLETGEDPPDGGLSPDAKMFVLTPDSSTKKALYFVGSTVLFFFAEAGFWGLHRFACTVFRFLQAVPIQPPTFDFTPFSKRNVCRPVFQQAAASSPSMYGVRSKLKGMLS

SEQ ID NO: 422 - protein, 594 aa, Unknown
  Description of Unknown: Integrase B423 sequence
  PTHR30461:SF3,cd00338,SM00857,G3DSA:1.10.10.2600,IPR036162, PF13408,PS51737,G3DSA:3.40.50.1390,IPR025827,IPR006119, IPR038109,PF07508,SSF53041,IPR011109,PTHR30461, PS51736,Coil,PF00239
MARKKNIAAGLDAVIYARYSSHNQREVSIEQQIAECTKHAAALGLRIVGTYEDRAISGKTDNRPRFQQMMRDAEKGKFQAVVAWKSNRIGRNMLQAMVNEAKLDDYGVKVFYAEEDFDDTAAGRFALRNMMNVNQFYSENMAEDIIRGLYDNANKCMANGRQPLGYKRGADGKVMLDEPAAAVVREIFTRVAAGDLFVDIARDLNAKGIKTSKGAAWNKGSFQSICQNERYKGIYIYGNVRIVDGIPRIVSDELWYRVQEAMRMKKNPVGTRHRVGAEDYLLTGKLRCGHCGSYMTGVSGTSRNGELHYYYTCQKRRTEHACNKKNVRRDVIEPAIAQAIKMYCLTDDVIEWMADQTVQYWEKHDNDLQIEALEQQLAENKKATSNMLLAIEMGIITEATRSRMVELETENSKLTAQLSAAKRDVVKINREDLIDELHILRSKDIQDREVQAELFKDFLVAAYIYDDNRLKMVFSFMGKDNSVEIPLETGEDPPDGEDSPDAKMFVLTPDCSTKKALYFVESMVLFFLRKPVFGGCIASPAPVSGFLQAVPIQPPTFDFTPFSKKNVCRPFFQQAAASSPSMYGVRSKLKVMLS

SEQ ID NO: 423 - protein, 594 aa, Unknown
  Description of Unknown: Integrase B424 sequence
  PTHR30461:SF3,SM00857,G3DSA:1.10.10.2600,IPR036162,PF13408, PS51737,G3DSA:3.40.50.1390,IPR025827,IPR006119,IPR038109, PF07508,SSF53041,IPR011109,PTHR30461,cd00338, PF00239
MDIYNVANQMKLERKTIFDLNIRVTFYARVSTTRDEQENSIENQIAYFTEMIKGNKNWEYVEGYVDRIRGESAENRTEFMQMINDGKGGKFDLIITKEVSRFARDTVDSLNYTRDLLRCGVGVFFQNDNICTVDTDSELRLTIMASIAADEVRKLSERIRWGHRRSIESGNVLGNNRIFGYDLYDKKLHINEREAEMVKLIFELYSSGHYSVRKIEQKLYDEGFRGRNGNRIHHNTISGIIQNPKYKGYFCGGKVKITDFRTRQQRFLPEEEWIMHKDLTGETVPAIVSEDLWDRCNQIFKERSEIVKSKERSIKDRSVFTGKIWCAVDGKAYWRTSYSNSKQKGKSIYQWICSEKKRINAKACPSFSILESELYQMVGEFFQSVVPSIESYVDNFISIYQKNDSAAVIRKQLREIEDKIGREKSKKDKLFELYLDEIITKNEFKKRNDDSDSLIASLGNNARELKRESSSDKTIETIKEITAYIKDVYNPGEPMPKELVDDLVETIIDRIDVEPVNDNSMRVSIKLRTGEKQDYKYSNSGRRLRNNEIGNRCSSGIMSLVMFPEQQWSFPRVYITRPASKRGTEVLFLVSAGV

SEQ ID NO: 424 - protein, 593 aa, Unknown
  Description of Unknown: Integrase B425 sequence
  IPR036162,PS51737,IPR011109,PTHR30461,PS00397, PF00239,G3DSA:1.10.10.2600,IPR006119,SSF53041,SM00857, IPR025827,IPR038109,PS51736,cd03768,IPR006118, PF13408,G3DSA:3.40.50.1390,PF07508,Coil
MAYAAMRKAGLVPEAAPDLRTVALYVRVSTGYQVDKDSLPFQKKELKNYCEHVLHIDKNRIEVFEDAGKSGKNTNRPGFERMMKKVRAGQISHVIVYKIDRISRNLVDFSLMYDDFKYNRVTFISLNEQFDTSSAIGEAVLKIILVFAELERKLTSERVKDVMIGRALSGQWNGARVPFGWEWDEEAKFPKHSETEAVFARLMYDLYEETRSTCKVRDYCNTHDVPTKRGGEWTSKTVADFIRNPMNRGDYRYNYRESARGRKKPEEEVVYIEGVFPPLVPVEQWDRCSAIMDHNAAVRCTPGVPHKKKHVHPFAGLLVCGACGAPYQVIKQDKPRENGFSPSLYRCGNRYRKRSCTAAGCSDVVIGPFVFNYISSMVRAANLRTKIKTPEELERLLLSGPEFQNVAGIASEGLNATFALLSGRPAASGPSYAPDLLTAPAGSVNAGEVEEIRQQITRLERAAERLKKAYLFDENAMSEKEYLETKIALDTERVQAENRLKDLSEATFSTDAGELSFIKSASSFLLAHRIQSGDHIVYSDFAPLVGNETMRDFLNLIIEKIVIRNGRPEEITFKNGLTHIFLYRDEMAENVPK

SEQ ID NO: 425 - protein, 593 aa, Unknown
  Description of Unknown: Integrase B426 sequence
  PTHR30461:SF3,cd00338,SM00857,G3DSA:1.10.10.2600,IPR036162, PF13408,PS51737,G3DSA:3.40.50.1390,IPR025827,IPR006119, IPR038109,PF07508,SSF53041,IPR011109,PTHR30461, mobidb-lite,Coil,PF00239
MPRKPAKHPAKPKRGKKLEVEEPGVLYGRYSSHNQKDISVEQQFEKGYELAAEYGIRIIDTYADRAVSGRTDKRRDFQRMMTDAAKGKFRYVIAWKSNRMGRNMLEALINEARLQDLGVRVLYVEEDFDDTAAGRFAARSMMNVNQFYSENMAEDIKRGLYDNAANCMVANGHLPYGYKADETLHYAIDEPKAAVIREIFTRVSCGEAFVDIMASLNARGIKTSYGRPWGRSSFQRILSNERYRGIYIYGDVRKEGGIPRIVSDELYFKVQEVITTKKNPQGRHRVNGDYLLTGKLFCGHCKSPMTGISGTSRSGNLHYYYVCQKRRTEKTCEKKNLRRDDIELQVAKAIKRRTLDDDTINWIADSVVEYSQHQESASGIGLLEDQLKDTQRSIKNLMAAIEQGIITPTTKARLMELEKEQSDIDRKITMAKADVIPVNRDQLVGWLKKLQAGDVHDKKYQAELFDTFLIAVYVYDNPDGQDYMKVVFNYAGSKNTVEIPLDPSVIDNVENIETGAVRLSSAQVHQRGITRTFLLCRRLCRHNMVQVIPTEKNGYSHLLRVSVLSLCPADCPRTVRGQSADSHRMQLFSLTVQ

SEQ ID NO: 426 - protein, 593 aa, Unknown
  Description of Unknown: Integrase B427 sequence
  PTHR30461:SF3,SM00857,G3DSA:1.10.10.2600,IPR036162,PF13408, IPR025827,PS51737,G3DSA:3.40.50.1390,IPR006119,IPR038109, PF07508,SSF53041,IPR011109,PTHR30461,PS51736, cd00338,PF00239
MAQVEIIAANLKEKNNNITIANKKKRVCAYGRVSTDDEEQITSYNSQIKYYTEKIKSNPDWEFVGIYADEGISGTQVKNRTEFQRMIDDALNGKIDIILAKSISRFARNTLDTLKYCRELRDKKVDVYFEKENIHTIDLDSEMFLTLYSAFAQAESESTSQNVKLGLKAMMKRGEYVGSPDCYGYDWNKETKQLDINEEQAEVVRMIFNWYIDGLGSRRIIRKLEELNIPTYKGNKRWAESSIMGIIHQEKYVGDLIQNKSYTVSPITHKTVINRGEKEKYYVKDHHTPIISREVWDKAQEIANKRKEAHTINKQGYSSRLTNKYAFSGKIKCAFCGTNFTRRKSSKSKTHPNYNVYWTCYRKRMFAEDCPDSVGISETKLEETFVMIYNNIIKNKHKTKEVLLKAIKDVVNDNDYQDKLNSLLTEKETIEKRLSKIIDMELDDDFDRKALFIQKEKELLEELNTVKNRISHYEMLLAENKGLSKQLKEIDKYFDNFKELKKFNREAFENMIECIIVGDYDENGNKLPRVARFVLKTGKEYKFELSNNSNDNNSDNTKNELVPFDTGRLSCFNCTSKSNLCSLACSFNFLLAN

SEQ ID NO: 427 - protein, 593 aa, Unknown
  Description of Unknown: Integrase B428 sequence
  PTHR30461:SF3,SM00857,G3DSA:1.10.10.2600,IPR036162,PS51737, G3DSA:3.40.50.1390,IPR006119,IPR038109,PF07508,IPR011109, SSF53041,PTHR30461,PS51736,cd00338,PF00239
MQTTQQQLYFGSMNLDRNRDRRMVFHGRVSTQHEQQKDALSNQMQWYDDQLKYHANWQLVGRYIDEGITGTLAKKRPSFMRMLDDARNGKFDLIVTREVCRFARNTVDTLSITRELRGIGVEVYFVSDNIWTLDSDGELRLSIMSSLAQEESRKISERVLAGQMISRQNGVLYGNGNILGYDLDKAHNTYTINEEQAKVVRFVFDMYSSGYGQSLICNELTRLGYKDSQGNVKWSCIKVSKMLRNATYMGYIGYNKSKTTNYIDKVRVKNLDEDSIQLVKGNFPPLISEELWHECDRIRKQKIATYRMPDGSTRRAGYLGPMHLWTQKLRCRCGGGFNRFKWRVLKDGTPVYGYQCNYRTVNVSRSFVVEHNLQGQSSCDAISICEWKLELMAKLIFDRIWGDQNAAVKKAVAMIDSVSSRAAPACSVASSSAQISKLRNRKLRLAQMYADGDLGRDEYKELCAKTEQEISALQHPPAEMAAQQKAAATPSMKELTAALNRIVDLSAPKLPDSLIQEFVEVVTPIKDNLYRWKLNFGPQVPHAERTDLTKIEQNPLLKFRINFETARQYRQKNGMPSQFRRCSWTDLRVEVYV

SEQ ID NO: 428 - protein, 593 aa, Unknown
  Description of Unknown: Integrase B429 sequence
  PTHR30461:SF3,SM00857,G3DSA:1.10.10.2600,IPR036162,PF13408, IPR025827,PS51737,G3DSA:3.40.50.1390,IPR006119,IPR038109, PF07508,IPR011109,SSF53041,PF00239, PTHR30461,PS51736,Coil,cd00338
MKKFPIDLSCLTEEEISQFQEDPYTLYNGDQDVALYLRYSSTGQSDQSIEGQLRDCRAFCKANHYRIVAIYVDRATTARKDVEKRVHLMEMVADSAKQNWEYVIVWKLDRFARNRNDSAIMKMRLRKNGVKVLSATEYLTDSPESIILESVLEGMAEFFSAELSQKVTRGMRESALKCHSVGGHIPLGYKVENHKLVVNPDTAHIVQEAFSLYANGESVADICRKFNSAGYKTAKNTEFNRSSFKAMFRNTRYIGTYTYKDIVIENGIPAIIDKELFETVQRRLSKTATAPARGKAKVDYLLSGKLFCGHCGASMNGESGAGRHGKVYHYYSCYTKKRKLGCDKRPLKKDYIEGIVARDALNLLTDQLIDEIADMAIRQSEQNLINDTHIPQLTAQLSEVEKSIMNITAAIEKGIASETLMNRLVQLEHEKKTLNKEIKAEEKFVYRIDRDQIVFWLSQFKYGNIEDENFRRRLIDLLVNSVTVWDEPDGYKITTAYNLTSCKTKTFRVDKNPAAEEATGFDFGESECTKSPRNRLISRTFAFHKLSFLDTAFFLTQTLTPTGAGSGKHQTARDRILPMVWAAFSWASVVTWA

SEQ ID NO: 429 - protein, 593 aa, Unknown
  Description of Unknown: Integrase B430 sequence
  PTHR30461:SF3,IPR036162,PS51737,IPR011109,PTHR30461, PS00397,PF00239,G3DSA:1.10.10.2600,IPR006119,SSF53041, cd00338,SM00857,IPR025827,IPR038109,PS51736, IPR006118,PF13408,G3DSA:3.40.50.1390,PF07508,Coil
MARKNPKTLDAAHPLSCVLYIRVSTKLQVEKGESIDAQHFELTRYADNHDMRVLGEYVDAGFSGKNVQGRPQFRQMMDDIIKAQPSKRPAYVLVFKLSRFGRNAADTWNSLQTLQDYGVELCCVKDGIDSGTSMGKAMLSIAAVFAEMERDNIRTQTMSGREEKARKGYWNGGQAPFGYRLVDKGNKFKELEVDEDEAKVVRRIFEMYAYENKGSMAIATWLNNHGIKKKPRGNARMDTFSSGTVQRMITNPVYIGKIAYGRRRTETIEGTRGETHVVKSDGYEIHDGQHDAIIDDATWAAAQALVGTRKPNMKTHDDGHVNMLNGLLVCPVCGRKMSSKPNRGKLKKDGTRGKTTWAYYCPHTSKARGASCTFKSQYPQECVDAEVVQLVSLASRSDAFVDALRRRIDDATDIEQLKEDIERIEGEKAANDKRMRMLITQIDSLDTADRSYERKFNDLQRRLDDLYDRDAGLSEALDETQAKMTTAEKRMDGERRLLEELDRIPELLEVADEQTRFDLIHEAVSEVHILPDKNPRKERVVANVTFKCPVRFFWEEIPGVANGYTPMTPDSLGQNNFRDDEAHVETVAILGRR

SEQ ID NO: 430 - protein, 593 aa, Unknown
  Description of Unknown: Integrase B431 sequence
  PTHR30461:SF3,cd00338,SM00857,G3DSA:1.10.10.2600,IPR036162, PF13408,PS51737,G3DSA:3.40.50.1390,IPR025827,IPR006119, IPR038109,PF07508,IPR011109,SSF53041,PTHR30461, PS51736,Coil,PF00239
MYEDIKTACLYVRFSSHNQTEQSIEGQTRVCRDFCKRHNIRIVEIYADRATSASKDIEKRVQFLKMIKDSEKGLFDAVIVYKLDRFARSRYDSATYKYRLKRNGVQLISATENISNDPEGIILESVLEGMAEFYSAELSQKINRGMRESAYKHNSIGGAVPLGYKIEDKKLVIDPKTAPIVKEAFEKYADGETVAEICRQFNTRGYKTSKGTAFGKSSFTKIFRNERYIGVYTFHDYRAEDAIPAIIDKDLWDRVQLRVGKIKNAPARNKAKVVYLLSGKIFCGHCGSKMNGNCNAGNYYYYQCYGKKNGNVDCKKKNIRKEFIERLVAQDALSLLTDEYIEQIATIACEKNQHEIELDSALPTIRDRIHQVDLSLNNLLKAIESGSAPDMLVKRMGELEKEKKDLQVQAKKESEDIVELDKAQVIYWLEQFRGGNIEDEEFCRMLIDLFVNSVTVWDEDDNTYKVTVAYNLTSLPTKTYRLNKGGTLSDFTSNAPLQVAEVLCSGRVCVLDRISIGQMAGGADRTGENVGHTVETVAARQADLQDSVNTDVVLDLLHLHGAGIIQQNDDLAAVGRLGSDGGIDEVALVVGQA

SEQ ID NO: 431 - protein, 592 aa, Unknown
  Description of Unknown: Integrase B432 sequence
  PTHR30461:SF3,SM00857,G3DSA:1.10.10.2600,IPR036162,PF13408, IPR025827,G3DSA:3.40.50.1390,PS51737,IPR006119,IPR038109, PF07508,IPR011109,SSF53041,PF00239,PTHR30461, PS51736,Coil,cd00338
MIDNCVRAVFYARVSTQEEQQLKALPKQIQENRDKIREKGWVLVDGYVDEGKSGTVIKRRDEYQRLLEDMELNKFDVVVVKDQERLQRNTRDWYNFIDRLVQNKLKLYFYLDNTFYSPDNALITGIKAIMAEEYSRNLSKKMNNSNKRRIEKARAGEEVSAMGNGQTYGYSIVNGKWVVDESQRELVKKMYELYTELHSVRKVRDALNEQGYRNQRGNLFTDENIGRIVKNVMHKGWVILNRHHREFDSKETIEKLEDEWVIVKNDHEAIVSEELWDAVNDEIQSHRNKGNSGTRGKRGGTDLLSGKMVCSCCGRVLWKHASQGSYKSKEGRKYTYKRYTQWYCSGKMGRGELACTDPATISGVKLQKYLVEMADMFLDYSTVEYSKNLLKRRTISWLEDLKDKLTTPNDNGKIEQDLKALEGKRGKLIDLYTDELISKEEFKSRSVDLDAEIEKKRALLVPVEENPDIKAIEDTIANIDAEIEALFEDEAMVEEKKVQFIQEHIKKIYVSKNSDVFIVLDNVAGAFLFIDKEDTRIEVVPVAEYNPEELSEEGITENDFVPFDRESMPVNSCPKFFHPSGEHPWSCRPVCH

SEQ ID NO: 432 - protein, 592 aa, Unknown
  Description of Unknown: Integrase B433 sequence
  SM00857,G3DSA:1.10.10.2600,IPR036162,PS51736,PS51737, G3DSA:3.40.50.1390,PF13408,IPR025827,IPR006119,IPR038109, PF07508,IPR011109,SSF53041,PF00239,PTHR30461, mobidb-lite,Coil,cd00338
MGGGKSLARKKKFELNDNNIAIAYYRFSSHSQNEASIDQQRELAHAWADAHGFKIVKEYEDAAISGTTENRPGFQQMLSEVAKIRPRVLIMWKTDRLGRDKYVLAMAKRTIRDAGCEIRLLAENIPTDGPEGVLIEGLMDAMAEYYSRQLSQNIQRGMDYNAQHALYNGHKLFGYGVDKSTKRYIVDPDTAPFVQRMFAEYAEGKAMQTICDELNAQGLRTTRGAKFGVKTMNKMLQNRAYIGEYRHGDIVVEGGMPALVDEETFDKVQRKFAENKRKGSQRARGMDENDAPRYWLTGKVYCGKCGSTLQGVSGTSGTGRTYYYYYCSAQRRKQCTLKKVRKEKLEDAVTMILRSILHNSENLMSLAVDAAAYYEKNYRDTGYLDGLEAKRREVEKSLANLVKVIESGLISETVTERLVQLEEQKRALNEAIEAENIRAALCEDEHTIKAYFEKFLHADFDNPETRDQVLEYFVDKIYLTDDGLVVTSWYSEDRTEVTWDMLYGEDGNPFVKGEAVKFDCFPFGSTKKHPGRRAVRGAFMLFTLRGCISGPTGRWRRIPASGPGPFPSGNTPPAAASRYTARGGQVRPLPAP

SEQ ID NO: 433 - protein, 592 aa, Unknown
  Description of Unknown: Integrase B434 sequence
  PTHR30461:SF3,SM00857,G3DSA:1.10.10.2600,IPR036162,PF13408, PS51737,G3DSA:3.40.50.1390,IPR025827,IPR006119,IPR038109, PF07508,IPR011109,SSF53041,PTHR30461,PS51736, cd00338,PF00239
MRKINKIEPLMPTLPSRKKVAAYARVSMETERLQHSLSAQVSYYSELIQSNPEWEYAGVYADDGITGTKSTRAEFQRLLRDCEDGKIDIILTKSISRFARNTVDLLETVRHLKELGIEVRFEKERINSLSGDGEVMLTLLASFAQEEIVSLSNNVKWATQKRFQQGLHNGRFQIYGYRWEGDQLVIHEEEAAIVRLIYDNFLNGLSAESTEKQLAEMGVKAYKGGHFGNGSIRQILSNITYTGNLLFQKEYTVDPVSKKSKINRGELPQYFVENTHEAIIPMEVYQAVQDEKARRRELGVFANWSIQTTCFTSKIKCPHCGCSYVHNKRTKNGNVQEYWNCGSKKKKKVGDGCPVGGTISQKSLLKACTEVLGLTEFNEDVFLDQVDHIDVPEKYTLVFYLKDGTTVTKEAPNTGHQDCWTAEYRAKVSKRRMGKNHNKKHLNPFTGYFRCPDCGANFRRQTHKYKDGTMRIYWHCPDAPRCGNQAKPNEDTMKNLLAELLGLPEFDEATFKETVSHIDLTGNYEATVYYKAGGTDIITWEPVPKKSYPHTEEYKELMRERMNEYWTDERKAEMSTRVKKLRSEKHWSSKRK

SEQ ID NO: 434 - protein, 592 aa, Unknown
  Description of Unknown: Integrase B435 sequence
  PTHR30461:SF3,SM00857,G3DSA:1.10.10.2600,IPR036162,PF13408, PS51737,IPR025827,G3DSA:3.40.50.1390,IPR006119,IPR038109, PF07508,IPR011109,SSF53041,PTHR30461,Coil, cd00338,PF00239
MARTATKHPAKPKRGKKLEAEEPGVLYGRYSSHNQKDISVEQQFEKGYGLAGEYGIRIVETYADRAVSGRTDKRKDFQRMMADAAKGKFRYVIAWKSNRMGRNMLEALVNEAKLQELGVRVLYVEEDFDDTAAGRFAARSMMNVNQFYSENMAEDIKRGLYDNASNCMVANGHLPYGYKRDDTLHYVIDEAKAAVIREIFVRVSCGEPLVDIYDSLNARGIKTSYGRPWGRSSFQKILSNERYRGIYIYGDVRKEGGIPRIVSDELYFKVQEVLKTKKNPQGRHRVNGDYLLTGKLFCGNCKSPMIGISGTGRTGKLHYYYVCQKKRSEKTCDKKNVRRDEVEYQIAKAIFDNALQDQVIEWIADSTIAYNDRKEAEGHIGILEDQLADVQRSLKNIMSAIEQGIVTETTKSRLLELESERSEIEGKIAAAKADIVPVNREQLIEWLLSLREGDIHDKKYQARLFDTFLIAAYLYDDGTAKLVFSFAGDKNTVTVPLAEAVDSVEENTAEGSFKLCLAPPCEKPPLVGGFSHAETEWREKSCGFDRMQSAAFTRPLRETQLEEYSLQFHQKSIIILIKLRRLLCCTAFSWMV

SEQ ID NO: 435 - protein, 592 aa, Unknown
  Description of Unknown: Integrase B436 sequence
  PTHR30461:SF3,IPR036162,PS51737,IPR011109,PTHR30461, PF00239,G3DSA:1.10.10.2600,IPR006119,SSF53041,cd00338, SM00857,IPR025827,IPR038109,mobidb-lite,PS51736, PF13408,G3DSA:3.40.50.1390,PF07508,Coil
MKKRINTNSAARAVIYARYSSANQRDCSIEQQVEKCRELAAREGVTVIEIYADRAVSGKTDRRPNFQRMMKDASLRQFDVVLAWKSNRMGRNMLQAMMNEEQLRSNGIRTIYAEEDFDDTAAGRFALRNMMNVNQFYSENMAEDISRGLMDNASKCMSNGSLPLGYKTGKDQKVVLDEAEAAIVQEIFTRVSCYEPFIDIARDLNRRGIKTKKGAEWGRSSFHTICRNERYRGIYIYRDIRVEGGMPRIVSDELFYKVQEVLKVKKNPQGRRKRSGYEEYLLTGKLYCGHCGSPMTGIAGTSKTGAMHYYYTCQKRRTDHSCDKKAVRRDQIEKAVAIAIQQQLLTDENIQMMADETMAYNARTEIKYRLQSLQQQLYSNETSTANIMKAIEMGIITDTTKARLLALEQEHGQLLAKIDTAKAEMVPINREDFVSLLDIYRTGDVNNKKYLAALFDTFLVRVDLYDDHFKITFDPTGGKMPVDIPIGAEDFPESPGDSPESSDFEASPQDAEKFVLALHNRTKILERLFGDFFVLMICLGCQASPPCGTGGSRFSAIDTATAPVLHWNRGCTILHPLYAMKSGRGLPSFSHW

SEQ ID NO: 436 - protein, 591 aa, Unknown
  Description of Unknown: Integrase B437 sequence
  PTHR30461:SF3,cd00338,SM00857,G3DSA:1.10.10.2600,IPR036162, PF13408,IPR025827,G3DSA:3.40.50.1390,PS51737,IPR006119, IPR038109,PF07508,IPR011109,SSF53041,PTHR30461, PS51736,Coil,PF00239
MIDNCARAVFYARVSTQEEEQLKALPKQVEECKDIIASKGWRLIDGYVDEGKSGTKKDGRKAYIKLLEDMQEDKFDIVVVKSQDRLQRNTFDWYKFTDLLNKNNKRLYLYMDNKFYEPSEDALITGIKAILAEEYSRDLSKKLNNSNKRRIEKAKAGEEISAMGNGQTYGYSIVNGKWVVDESQREVVRRMYELYTELHSVRKVRDALNKQGYRNQRGNLFTDENIGRIVKNVMHKGWVILNRHHRDFASKEIIEKSEEEWVIVKNDHEAIVSEELWDAVNDEIQSHRNKGNSGTRGKRGGTDLLSGKMVCSCCGRVLWKHASQGSYKSKQGRKYTYKRYTQWYCSGKMGRGELACTDPATISGVKLQKYLVEMADMFLDYSTVEYSKNLLKRRTISWLEDLKDKLTTPNDNGKIEQDLKALEGKRGKLIDLYTDELISKEEFKSRSVDLDAEIEKKRALLVPVEENPDIKAIEDTIANIDAEIEALFEDEAMVEEKKVQFIQEHIKKVYVSKNSDVFIVLDNVAGAFLFIDKEDTRIEVVPVAEYNSEELSEEGITENDFVPFDRESMPQHHGAECLCPSGGGSEPGRLF

SEQ ID NO: 437 - protein, 591 aa, Unknown
  Description of Unknown: Integrase B438 sequence
  PTHR30461:SF3,cd00338,SM00857,G3DSA:1.10.10.2600,IPR036162, PF13408,IPR025827,G3DSA:3.40.50.1390,PS51737,IPR006119, IPR038109,PF07508,IPR011109,SSF53041,PTHR30461, PS51736,Coil,PF00239
MIDNCVRAVFYARVSTQEEEQLKALPKQVEECKDIIASKGWRLIDGYVDEGKSGTKKDGRKAYIKLLEDMQEDKFDIVVVKSQDRLQRNTFDWYKFTDLLNKNNKRLYLYMDNKFYEPSEDALITGIKAILAEEYSRDLSKKLNNSNKRRIEKAKAGEEVSAMGNGQTYGYSIVNGKWVVDESQREVVRRMYELYTELHSVRKVRDALNEQGYRNQRGNLFTDENIGRIVKNVMHKGWVILNRHHRDFASKEIIEKSEEEWVIVKNDHEAIVSEELWDAVNDEIQSHRNKGNSGTRGKRGGTDTLSGKMVCSCCGRVLWKHASQGSYKSKEGRKYTYKRYTQWYCSGKMGRGELACTDPATISGVKLQKYLVEMADMFLDYSTVEYSKNLLKKRTISWLEDLRDKLTTPTDNGKIEQDLKALEGKRGKLIDLYTDELISKEEFKSRSVDLDAEIEKKRALLVPVEENPDIKAIEDTIANIDAEIEALFEDEAMVEEKKVQFIQEHIKKIYVSKNSDVFIVLDNVAGAFLFIDKEDTRIEVVPVAEYNPEELSEEGITENDFVPFDRESMPFPNVRIRIKRHGGTAWLDRTI

SEQ ID NO: 438 - protein, 591 aa, Unknown
  Description of Unknown: Integrase B439 sequence
  PTHR30461:SF3,SM00857,G3DSA:1.10.10.2600,IPR036162,PF13408, IPR025827,G3DSA:3.40.50.1390,PS51737,PS51736,IPR006119, IPR038109,PF07508,SSF53041,IPR011109,PTHR30461, mobidb-lite,cd00338,PF00239
MAKITRVEQAVPTIKTKKKVAAYARISMESERMNHSLSAQISYYSSLIQKNPDWQYAGVFADDGISGTGIAKRDEFKRMIEAADNGEIDIILTKSIQRFARNTVDLLETVRHLKDIGVEVRFEKEHINSMSGDGELMLTILASFAQEESRSLSENCKWGIRKRFEKGIPNGHFRVYGYRWEDDELVIVQEEAEVVRRIFQNFLDGKSRLETEREFAAEGITTREGCRWVDSNIKVVLTNVTYTGNLLLQKEFISDPISKQRKKNKGQLPQYYVEDTHPAIIDKATFDYVQSEIARRKELGPRANKSLNLTCFSGKLKCPFCGISYAHNKRTDRGFMEYWACGSRKKKGGRCPVGGSINHENLKKACAEVLGLDEFDEDAFSDMVDYINVPEREMLEFHLKSGEVITKDCPNTGHKDCWTAEYRAKTSEKRRKKPNCKGSSVMTGKIKCVGCGCNFRRATQPSSTAESGKAYYWRCAERDGCGTVGLREDVLKPFIAETLGIDEFDDAEFEKQIDHIDVLSATEMVFHFKDGRTVSRTWEQPKRVGRPWTDEQRAKFKESIKGRYTPEVRQRMSEHMKQLRKERGKAWRKEK

SEQ ID NO: 439 - protein, 591 aa, Unknown
  Description of Unknown: Integrase B440 sequence
  PTHR30461:SF3,cd00338,SM00857,G3DSA:1.10.10.2600,IPR036162, PF13408,IPR025827,G3DSA:3.40.50.1390,PS51737,IPR006119, IPR038109,PF07508,IPR011109,SSF53041,PTHR30461, PS51736,Coil,PF00239
MYEDIKTACLYVRFSSHNQTEQSIEGQTRVCRDFCKRHNIRIVEIYADRATSASKDIEKRVQFLKMIKDSEKGLFDAVIVYKLDRFARSRYDSATYKYRLKRNGVQLISATENISNDPEGIILESVLEGMAEFYSAELSQKINRGMRESAYKHNSIGGAVPLGYKIEDKKLVIDPKTAPIVKEAFEKYADGETVAEICRQFNARGYKTSKGTAFGKSSFTKIFRNERYIGVYTFHDYRAEDAIPAIIDKDLWDRVQLRVGKIKNAPARNKAKVVYLLSGKLFCGHCGSKMNGNCNAGNYCYYQCYGKKNGNVDCKKKNIRKEFIERLVAQDALSLLTDEYIEQIATIACEKNQNEIELDSALPTIRDRIHQVDLSLNNLLKAIESGSAPDMLVKRMGELEKEKKDLQAQAKKESEDIIELDKAQVIYWLEQFRGGSIEDEEFCRMLIDLFVNSVTVWDEDDSTYKVTVAYNLTSLPTKTYRLNKGGTLSDFASNAPDREPNKDGVVFVHVITLGGDDRARGRIAHFDSAAGFLIHPVQIGFSVRNFRLNLKNVCTDGICQIFSNFCGNTAGRKIGDKSFVHGNALPLDDFV

SEQ ID NO: 440 - protein, 591 aa, Unknown
  Description of Unknown: Integrase B441 sequence
  PTHR30461:SF3,SM00857,G3DSA:1.10.10.2600,IPR036162,PF13408, IPR025827,G3DSA:3.40.50.1390,PS51737,IPR006119,IPR038109, PF07508,SSF53041,IPR011109,PF00239,PTHR30461, PS51736,Coil,cd00338
MAKKKKPAGGNAIIYARYSSHNQRDVSIEQQIEACRKHAAELGLTITDTYEDRAISGRTDNRPAFQRMMRDAEGGKFQYVLAWKSNRMGRNMMQAMVNESRLMDCGVKVFYAEEDFDDSAAGRFALRSMMNVNQFYSDNLAEDVRRGLMDNASKCMANGRQPLGYKRGEDGKVVVDEPAAAIVREIYTRIASGEMFMDIARDLNRRGIKTQSGSEWNKSSFKVLCRNERYRGIYIYGDTRIEGGIPPIVDDVLWYKVQEVLKVKKSKNRHHCPSDEDYLLTGKLRCGKCGGYMIGMSGRSKTGDVHHYYACQNRRVGHTCDKKNIRRDVVEPAVAQAIKQYCLTDDAIEWITDQTIAYWEDEDRKLQIDSIENDLSAVQSSISNVMKAIEMGVITETTRDRLIELERQQTDLKSKLALAKEEIVHVDRKDLISSLLAFRHGNVHDRAYQEKLFNAFLIAVYVYDDDHLKLVFNSFGKDDTVNIALDLGENDDNSGLSDVSKSSPILSNGQPKKNQSNLFGWFFFLFVSYFRLHPFSVWMGSGNAPLDIRGAHSISFRRQSSNLQHIPPGGFKIPGVPWGCPIAVAAGVIYL

SEQ ID NO: 441 - protein, 591 aa, Unknown
  Description of Unknown: Integrase B442 sequence
  SM00857,G3DSA:1.10.10.2600,IPR036162,PF13408,IPR025827, PS51737,PS51736,G3DSA:3.40.50.1390,IPR006119,IPR038109, PF07508,SSF53041,IPR011109,PTHR30461,Coil, mobidb-lite,cd00338,PF00239
MEELDTRPVADILARYSTDNQNPVTIDVQVEKCREWCERNGYQVGKIFSDEAVSGMKETRAGYEACMMHLGMGGAQLVVVYDQSRMFREFTEWFQFRKDVDMLGARVASVTQPMVGGDLKDPAVFINEAATAMLNHAQVLITRQKTIDALKHNAREGKSSGGKPPLGYDLDKDKKYVVNEHEAEAVRLVFQLFARGFSYGEIIDELNSRGYLTKRGQPFGKNSIFDLLKNEKYIGRLVYGATKAQADGRWNSHAKSKEDAIVVENGVPAIIEQELWEQVQSRIRTRKGAGGRYSAKREYLLTGRVFCGDCGASMVVMGSKASGYQYYECNNKRRTHTCKMKNVRTEWLEQTVAASIKQMLTEPANIEMLVDVARDQERQITTEYDTRRAGLASRYTRVCRQLENGVNALLEGVVSAELKEKVRRLEEEKAEIEAETAELNQYKGYVGLDDATIRRCVENVAKVDIDTPEGLKLILSVVSRVNIHTDTIEIKTLISTDGTDPDPTKSRPQNLELFPSEGLSGEKYHTTPENGSGHQTRQIRTLRQLATGSDLLFLSIDWSQKKWHRIFLCHSLPKKVTYRWPFSRIGGGNAV

SEQ ID NO: 442 - protein, 591 aa, Unknown
  Description of Unknown: Integrase B443 sequence
  PTHR30461:SF3,SM00857,G3DSA:1.10.10.2600,IPR036162,PF13408, PS51737,G3DSA:3.40.50.1390,IPR025827,IPR006119,IPR038109, PF07508,SSF53041,IPR011109,PF00239,PTHR30461, PS51736,Coil,cd00338
MKKFPIDLSCLTEEEISQFQEDPYTLYNGDQDVALYLRYSSTGQSDQSIEGQLRDCRTFCKANHYRIVAIYVDRATTARKDVEKRVHLMEMISDSAKQNWEYVIVWKLDRFARNRNDSAIMKMRLRKNGVKVLSATEHLTDSPESIILESVLEGMAEFFSAELSQKVTRGMRESALKCHSVGGHIPLGYKVENHKLVVDPDTAHIVQEAFSLYANGESVADICRKFNSAGYKTAKNTEFNRSSFKAMFRNTRYIGTYTYKDIVIENGIPAIIDKELFETVQRRLSKTATAPARGKAKVDYLLSGKLFCGHCGASMNGESGAGRHGKVYHYYSCYTKKRKLGCDKRPLKKDYIEGIVARDALNLLTDQLIDEIADMAIRQSEQDLINDTHIPQLTAQLSEVEKSITNITAAIEKGIASETLMNRLVQLEHEKKTLNKEIKAEEKFVYRIDRDQIVFWLSQFKYGNIEDENFRRRLIDLLVNSVTVWDEPDGYKITTAYNLTSCKTKTFRVEKNPAAEEATGFDFGESECTKTKDMLMSFVLFYLLFSLSKEQRTGHPYGSLCVVFIFSWSYSCFRACSRSISSASPHRRSKS

SEQ ID NO: 443 - protein, 591 aa, Unknown
  Description of Unknown: Integrase B444 sequence
  SM00857,IPR006118,G3DSA:1.10.10.2600,IPR036162,PS51737, G3DSA:3.40.50.1390,PS00397,IPR006119,IPR038109,PF07508, IPR011109,SSF53041,PTHR30461,Coil,PS51736, cd00338,PF00239
MRCGVYVRVSTDDQKDNGYSIDSQLRMIKEYCEKKNYDIIDVYNDAGHSGKDLMRPEMQRLLKDIKSKKIDKLVAIKVDRLTRSNYDGFWLLNYLEEHDVKLELILEPFDVSTANGEMIYGMNLVFGQRERKEIGARTKRAMEEMAMEHIHPSKAPYGYTRNKETGHLEIEPIEAEVVKEIFELCKERHSTRNIATIMKDNDAYLKQGKWKADRVYKILTNSIYIGIFEYGKYKRKPEDILKVENYCEPIIDLKTWNITRKNLEKNKHPNYGEHIHLFTSLIKCPECGNILSSTISYKYSGTPNKKEYYHLTCKNVNCKAKGLHYSSDKIEKKLGRVLNELTRYMYDMNNEIIVSNSTKSKDISDIDKAIEKLKIQEKKLVDLYLSSNLNVDAINHKNEVIKKEIEKLNKKKQLLDPNDDFKEYTVELLKKLDYKKEDDYLLFNKLGFSFMWDSLNRKAKRDILNKLVSQIEITRDKNYNIEIKNIKFTDEFISRSCKEYLEYLNDILKNNNIGIKYQELITTDELNDYSKNYYVLSLQKLEKNEYSSDERKILLTLASEHFYYDGIIQCPLYSNETIIDQIMLIPKTEIC

SEQ ID NO: 444 - protein, 591 aa, Unknown
  Description of Unknown: Integrase B445 sequence
  SM00857,IPR006118,G3DSA:1.10.10.2600,IPR036162,PS51737, G3DSA:3.40.50.1390,Coil,IPR006119,IPR038109,PF07508, IPR011109,SSF53041,PTHR30461,PS00397,PS51736, cd00338,PF00239
MRCGVYVRVSTDDQKDNGYSIDSQLRMIKEYCEKKKYDIIDVYNDAGHSGKDLMRPEMQRLLKDIKSKKIDKLVAIKVDRLTRSNYDGFWLLNYLEEHDVKLELILEPFDVSTANGEMIYGMNLVFGQRERKEIGARTKRAMEEMAMEHIHPSKAPYGYTRNKETGHLEIEPIEAEVVKEIFELCKERHSTRNIAIIMKDNNAYLKQGKWKADRVYKILTNSIYIGIFEYGKYKRKPEDILKVENYCEPIIDLKTWNITRKNLEKNKHPNYGEHIHLFTSLIKCPECGNILSSTISYKYSGTPNKKEYYHLTCKNVNCKVKGLHYSSDKIEKKLGRVLNELTRYMYDMNNEIIVSNSTKSKDISDIDKAIEKLKIQEKKLVDLYLSSNLNVDAINHKNEVIKKEIEKLNKKKQLLDPNDDFKEYTVELLKKLDYKKEEDYLLFNKLGFSFMWDSLNRKAKRDILNKLVSQIEITRDKNYNIEIKNIKFTDEFISRSCKEYLEYLNDILKNNNIGIKYQELITTDELNDYSKNYYVLSLQKLEKNEYSNDERKILLTLASEHFYYDGIIQCPLYSNETIIDQIMLIPKTEIC

SEQ ID NO: 445 - protein, 591 aa, Unknown
  Description of Unknown: Integrase B446 sequence
  PTHR30461:SF3,IPR036162,PS51737,IPR011109,PTHR30461, PS00397,PF00239,G3DSA:1.10.10.2600,IPR006119,SSF53041, cd00338,SM00857,IPR025827,IPR038109,PS51736, IPR006118,PF13408,G3DSA:3.40.50.1390,PF07508,Coil
MTRKAKTCFIYVRVSTKMQVENGESIEAQLYDLRQYAKRENLRILHEYIDDGYSGKNITGRPHFQEMMEEIKSGVHVDYVLVFKLSRFGRNAADALSSLQFMQDYGTNLVCVKDGINSEAQMGKMMIAFMSAFAEMERENILVQTMAGREQKAREGKWNGGQAPFGYRLVKDEKGKGHLEIDEDEAEIVRIIFREYTKNGKGANAIASWLNTQGYRKKIRGNSKYEHFAPGTVKNIIRNPVYAGKIAFGRRRTTPVKGERNVYHMVKQDNFDIYEGEHDAIIDEATWNAAQKRLAEDSHPFPEAKPDGHTHLLTGMLVCPVCGRNMIANVSRGKRKKDGTIGKTTYAYTCKYSKRQFGHDCTFTRQFKQEYIDREVIEVISRAAHSAVFEERVREELDAAVDIEKLEADVARIGKALENNGAARRMLSRQLDALDASDRSYERKYEDMQARLDKLYDESADIEEALDEAEAKLESAKEKQVTTARVYEMLDEFQEKFDTYDPAKQKEILQQVVERVEIDPDANPKKGDAIVKRVRFKCPVSFYRTLPEEAYDVLGINEFNRLETTEYTPDGNSRVDGNHDETVVLMSRKEK

SEQ ID NO: 446 - protein, 590 aa, Unknown
  Description of Unknown: Integrase B447 sequence
  PTHR30461:SF3,SM00857,G3DSA:1.10.10.2600,IPR036162,PF13408, PS51737,G3DSA:3.40.50.1390,IPR025827,IPR006119,IPR038109, PF07508,IPR011109,SSF53041,PF00239,PTHR30461, PS51736,Coil,cd00338
MRVSVNLNAQKPDTTTNAVIYARYSSHGQTEQSIEGQLAKGHEYAAAQGYTVVHEYIDRAMTGRNDNREAFQKMLSDTGKHQFQVVIVWKVDRFGRNREEIAFNKHTCKKNGVRVEYVAESLPNSPEAVILESVLEGMAEYYSIQLSQNIRRGQLESAKKCQCVGGSVPLGYTLDSDKHFVIDPQTAPVVKKIFDLYAEGATISEITGQLNEQGIRTIRKQLFTKNSLTKLLKNEKYIGVYTYKDIVRVEGGVPAIVDKSTFDRVQELLKINRRAPSHTWTKVEYLLTDKLFCGHCGSPMVGESGFSHTGAKYSYYGCIKRRREKACDKKPVRQDWIEALVLDETVKLLHDDELMEYIIDRTWEYYQVTDKVQEEKAVLEAQLAEVDKAINNLVRAIEAGIFNAATKSRMDELDAQKAALTASLADLELTSGIRITRDHIEYFLLRLRDLDVKDRECQKRLVQTFVNAVFIYDDGRVKITYNYSGQSSTITLNQIASAEKGKGFVCCLPCSTFSPRFRVGNRGIFCFWGKQDANILPISAVLCYNGSENGGGGTENEKAACCVPDGARLLGLRGVRGRNAGRRYGHVRAI

SEQ ID NO: 447 - protein, 590 aa, Unknown
  Description of Unknown: Integrase B448 sequence
  PTHR30461:SF3,SM00857,G3DSA:1.10.10.2600,IPR036162,PF13408, PS51737,IPR025827,G3DSA:3.40.50.1390,IPR006119,IPR038109, PF07508,IPR011109,SSF53041,PF00239,PTHR30461, PS51736,Coil,cd00338
MRVSVNLNAQKPDTTTNAVIYARYSSHGQTEQSIEGQLAKGHEYAAAQGYTVVHEYIDRAMTGRNDNREAFQKMLSDTGKHQFQVVIVWKVDRFGRNREEIAFNKHTCKKNGVRVEYVAESLPNSPEAVILESVLEGMAEYYSIQLSQNIRRGQLESAKKCQCVGGSVPLGYTLDSDKHFVIDPQTAPVVKKIFDLYAEGATISEITGQLNEQGIRTARKQLFTKNSLTKLLKNEKYIGVYTYKDIVRVEGGVPAIVDESTFDRVQELLKINRRAPSHTWTKVEYLLTDKLFCGHCGSPMVGESGFSHTGAKYSYYGCIKRRREKACDKKPVRQDWIEALVLDETVKLLHDDELMEYIIDRTWEYYQVTDKVQEEKAVLEAQLAEVDKAINNLVRAIEAGIFNAATKSRMDELDAQKAALTASLADLELTSGIRITRDHIEYFLLRLRDLDVKDRECQKRLVQTFVNAVFIYDDGRVKITYNYSGQSSTITLNQIASAEKGKGFVCCLPCSTSSPRFPRGVAALFLFWGKSGANQLPISTVLCYNGSENGRGGMENEKAACCVPDGARLLGLRGVRGRNAGWRYGHFRAV

SEQ ID NO: 448 - protein, 590 aa, Unknown
  Description of Unknown: Integrase B449 sequence
  PTHR30461:SF3,SM00857,G3DSA:1.10.10.2600,IPR036162,PF13408, IPR025827,PS51737,mobidb-lite,G3DSA:3.40.50.1390,IPR006119, IPR038109,PF07508,IPR011109,SSF53041,PTHR30461, PS51736,cd00338,PF00239
MKTVEKIERKLPVLKTRKRVAAYARVSMESERMQHSLSAQVSYYSALIQKNPEWEYAGVFADYGISGTGTKKREEFNRMLAECEAGNIDIILTKSIQRFARNTVDLLNTVRHLKDLGIEVRFEKENINSLSGDGELMLSILASFAQEESRSISENVKWGTIKRFKQGIPNGKFSIFGYEWQDDKLVIVPEEAEIIRWMYAEYMKGASRIEIGRALMDRGIYTRQGKPWVDSNVKVILTNITYTGNMLFQKEYCEDPITKHRRKNYGEMPQYFVEDTHEAIIPMDEWQAVQAEFKRRRDLGPFGNKSLKLSAFSTKITCGCCRKHYRHSGKRNTAGEVYYIWICQTKSQKGVSACPSKNIPEKMLQNTAAEVLGLDKFDEDVFSQQIEEVIVIGDDTLTFRFYDGHEVTTKWQSTAKTDWWTDERRKLWGERHKRKDTNPNRNTFYEFTGFIKCGCCGANYRCQSGKRKDGTPTRSWYCTGPRSECRNPAIRDETMKRLVTEILGLDEFDEAAMDAQIESATILDHMVTFHFRDGHIESRDFLDKRHGTPWTEERREKAKKSMKAAWTDERREAMSERIKKIRSEKKWPNP

SEQ ID NO: 449 - protein, 590 aa, Unknown
  Description of Unknown: Integrase B450 sequence
  PTHR30461:SF3,IPR036162,PS51737,IPR011109,PTHR30461, PS00397,PF00239,G3DSA:1.10.10.2600,IPR006119,SSF53041, SM00857,IPR025827,IPR038109,PS51736,cd03768, IPR006118,PF13408,G3DSA:3.40.50.1390,PF07508,Coil
MQGLSLCIWENIMARRKTALRGASVSTRITKVAIYIRVSTVHQVDKDSIPMQKKDLIAYCQLILGTDNYEIFEDAGYSGKNTDRPAFQDMMGRIRKGEFTHVLVWKIDRISRNLLDFAEMYEELQALRVTFVSKNEQFDTSTAIGEAMLKIVLVFAELERNMTSERVTATMISNNGQWNGGRIPFGYSYDSSTSQFSIREDEAVICRRLKDLYLDNKSLVYTARALNADGYKTRAGVDWTPTAVWIIASSPFYAGIYRYNRYKGTENRTLNPEEEWVMISDHHPAIFTLEEHEAMKSSLKTNARYVDNPVGKPHTTANVHIFQGIAYCGKCGNKMVSTPGRKHADGYRPSNYSCPLHRRSKKCDNATVNDMIVGEFAINYILNMLNAKKTFSRIDTPKELQRHLLTGSTFSDISSIEEDGLNDFFNLLSRYGSDNSYVFAIKTPRKKKASVNPELAALRKEKEKQERALQRLQDLYLYSDKSMSEKDFILRKSEISDRLKNINAQLGLITQNPDSLLSDEEFIKQASHLLIQKELKGRKYIYYKSLATSVDPEILRTYMETILDSVYITDGHVSSIVFKNGLTHKFIYKN

SEQ ID NO: 450 - protein, 590 aa, Unknown
  Description of Unknown: Integrase B451 sequence
  PTHR30461:SF3,cd00338,SM00857,G3DSA:1.10.10.2600,IPR036162, PF13408,PS51737,G3DSA:3.40.50.1390,IPR025827,IPR006119, IPR038109,PF07508,IPR011109,SSF53041,PTHR30461, PS51736,Coil,PF00239
MIDNCARAVFYARVSTQEEQQLKALPKQIQENRDRIREKGWVLVDGYVDEGKSGTVIKRRDEYQRLLEDMELNKFDVVVVKDQERLQRNTRDWYNFIDRLVQNKLKLYFYLDNTFYSPDNALITGVKAIMAEEYSRNLSKKMNNSNKRRIEKARAGEEVSAMGNGQTYGYSIVDGKWVVDESQREVVRRMYELYTELHSVRKVRDALNEQGYRNQRGNLFTDENISRIIKNVMHKGWVILNRHHRDFDTKEIIEKSEEEWVIVKNDHEAIVSEELWDAVNDEIQSHRNKGNSGTRGKRGGTDTLSGKMVCSCCGRVLWKHASQGSYKSKEGRKYTYKRYTQWYCSGKMGRGELACTDPATISGVKLQKYLVEMADMFLDYSTVEYSKNLLKRRTISWLEDLKDKLTTPNDNGKIEQDLKALEGKRGKLIDLYTDELISKEEFKSRSVDLDAEIEKKRSLLVPVEENPDIKAIEDTIANIDAEIEALFEDEAMVEEKKVQFIQEHIKKIYVSKNSDVFIVLDNVAGAFLFIDKEDTRIEVVPVAEYNPEELSEEGITENDFVPFDRESMPFPHGRIHIKRYSNKTWYCRSV

SEQ ID NO: 451 - protein, 590 aa, Unknown
  Description of Unknown: Integrase B452 sequence
  PTHR30461:SF3,cd00338,SM00857,G3DSA:1.10.10.2600,IPR036162, PF13408,PS51737,IPR025827,G3DSA:3.40.50.1390,IPR006119, IPR038109,PF07508,IPR011109,SSF53041,PTHR30461, PS51736,Coil,PF00239
MRVSVNLNAQKPDTTTNAVIYARYSSHGQTEQSIEGQLAKGHEYAAAQGYTVVHEYIDRVMTGRNDNREAFQKMLSDTGKHQFQVIIVWKVDRFGRNREEIAFNKHTCKKNGVRVEYVAESLPNSPEAVILESVLEGMAEYYSIQLSQNIRRGQLESAKKCQCVGGSVPLGYTLDSDKHFVIDPQTAPVVKKIFDLYAEGATISEITGQLNEQGIRTIRKQLFTKNSLTKLLKNEKYIGVYTYKDIVRVEGGVPAIVDKSTFDRVQELLKINRRAPSHTWTKVEYLLTDKLFCGHCGSPMVGESGFSHTGAKYSYYGCIKRRREKACDKKPVRQDWIEALVLDETVKLLHDDELMEYIIDRTWEYYQVTDKVQEEKAVLEAQLAEVDKAINNLVRAIEAGIFNAATKSRMDELDAQKAALTASLADLELTSGIRITRDHIEYFLLRLRDLDVKDRECQKRLVQTFVNAVFIYDDGRVKITYNYSGQSSTITLNQIASAEKGKGFVCCLPCSTFSPRFRVGNRGIFCFWGKQDANILPISAVLCYNGSENGGGGTENEKAACCVPDGARLLGLRGVRGRNAGRRYGHVRAI

SEQ ID NO: 452 - protein, 590 aa, Unknown
  Description of Unknown: Integrase B453 sequence
  PTHR30461:SF3,SM00857,G3DSA:1.10.10.2600,IPR036162,PF13408, IPR025827,PS51737,G3DSA:3.40.50.1390,IPR006119,IPR038109, PF07508,SSF53041,IPR011109,PTHR30461,Coil, PS51736,cd00338,PF00239
MNDVQVIKANRNENRIRGRKVEILRVAAYCRVSTDSEDQLNSYKSQVMYYTDLIKKKPEWSLADIYADEAITGTQVTKREDFQRMINDCMNGDIDMVITKSISRFARNTLDTLKYVRMLKEKGIAVFFEDENINTLTMDGELLLVVLSSVAQQEVENISSNVKKGLKMKMQRGELVGFQGCLGYDYHKDTKSISVNEKEAEIVRYIFNRYIEGAGCTVIANELENLGYKTKYGSSRWVQSTVIGIIKNEKYKGDLLLGKTFTVDPISKRRLENFGEEDKFYIRDHHEAIISEEIFEEAQKILAKRNVNRGVHQEGQKRNKFSRKYAFSCMIKCGFCGGTLSRRNWHSSSAYTKTIWHCVTATKHGKKNCPHCKGIPEEVIENAFVKSYQLLCSDQHEVVSEFLQKVEDILKDDASLKRLPKIEKEMTDLQRRKEKLLDLRLDNNIDRDIYDKKNQELSEQLKKLQAEQLQLVELSKNQESTKTRIKEFRKNLNSGELLENFDRVVFESVVERIIIGGYNDEGVADPLKITFVYKTGIHSNLNAKDFKPKRKNAAAVHTDAELCSYASVEDDKLCLHSSSDTCGNSLFIIT

SEQ ID NO: 453 - protein, 590 aa, Unknown
  Description of Unknown: Integrase B454 sequence
  PTHR30461:SF3,SM00857,G3DSA:1.10.10.2600,IPR036162,PF13408, PS51737,G3DSA:3.40.50.1390,IPR025827,IPR006119,IPR038109, PF07508,IPR011109,SSF53041,PF00239,PTHR30461, PS51736,Coil,cd00338
MRVSVNLNAQKPDTTTNAVIYARYSSHGQTEQSIEGQLAKGHEYAAAQGYTVVHEYIDRAMTGRNDNREAFQKMLSDTGKHQFQVVIVWKVDRFGRNREEIAFNKHTCKKNGVRVEYVAESLPNSPEAVILESVLEGMAEYYSIQLSQNIRRGQLESAKKCQCVGGTVPLGYTLDSDKHFVIDPQTAPIVKKIFDLYAEGATISEITGQLNEQGIRTARKQLYTKNSLTKLLKNEKYIGIYAYKDVVRVEGGVPAIVDKSTFDRVQELLKINRRAPSHTWTKVEYLLTDKLFCGHCGSPMVGESGFSHTGAKYSYYGCIKRRREKACDKKPVRQDWIEALVLDETVKLLHDDELMEYIIDRTWEYYQVTDKVQEEKAVFEAQLAEIDKAINNLVRAIEAGIFNAATKSRMDELDAQKAALTASLADLELTSGIRITREHIEYFLLRLRDLDVKDRECQKRLVQTFVNAVFVYDDGRVKITYNYSGKSSTITLNQIDGAEKGKGFVCCLPCSTSSPRFPRGVAALFLFWGKSGANQLPISTVLCYNGSENGRGGMENEKAACCVPDGARLLGLRGVRGRNAGWRYGHFRAV

SEQ ID NO: 454 - protein, 590 aa, Unknown
  Description of Unknown: Integrase B455 sequence
  PTHR30461:SF3,cd00338,SM00857,G3DSA:1.10.10.2600,IPR036162, PF13408,IPR025827,G3DSA:3.40.50.1390,PS51737,IPR006119, IPR038109,PF07508,IPR011109,SSF53041,PTHR30461, PS51736,Coil,PF00239
MKRVAVYSRKSKFTGKGDSIENQIEMCKEYITNNISKDVEFTIYEDEGFSGGNLDRPKFKKLIAAIKNKKFDILVCYRLDRISRNVADFSSTLEVLQSNNCSFVSIKEQFDTSSPMGRAMIYIASVFAQLERETIAERVKDNMIEIAKNGKWTGGKIPVGFNSEKIEYVDENGLTRVAPNLVINNKEMELVKFLYEKYLELGSLHKLEVYIHENNIRSRNDILYEKSSLKTILQNPIYVKANNAVINYLKNSKWNVYGDPDNIHSLLTYNKTEQIKKDGKYTKSKKDLSERFAAVSSIKGYIEPDLWLAVQRQFEKNKNTFPRLGKTHNALLVGKLRCGKCKEYMLVSHGRISKVTGQKLFYYTCSLKRKSHKKLCNNGNAKAGDIENLVLLSLKQLSLNKKKFILNLRNRYKSNASDENMDLEKLSLLKSLKEKKSQINNLVTKLSLCDSIDDILLHRIKLLKDECIAIEKNINNLESKALNLKNSLLNLDLIDELLDKCAIIDTLDRSQQKLIIDNLIDTIYWYSDNTGKGNIEIKFVGIEDEQKEFKFTSEEMKQLMLHFYSDSTCKINDNLLSFRKIKKDTRTRTC

SEQ ID NO: 455 - protein, 590 aa, Unknown
  Description of Unknown: Integrase B456 sequence
  SM00857,G3DSA:1.10.10.2600,IPR036162,PF13408,IPR025827, G3DSA:3.40.50.1390,PS51736,PS51737,IPR006119,IPR038109, PF07508,IPR011109,SSF53041,PTHR30461,mobidb-lite, cd00338,PF00239
MKTVEKIERKLPVLKARKRVAAYARVSMESERMQHSLSAQVSYYSALIQKNPEWEYAGVFADYGISGTGTKKRDEFNHMLTECEAGNINIILTKSIQRFARNTVDLLNTVRHLKELGIEVRFEKEKINSLSGDGELMLSILASFAQEESRSISENVKWGTIKRFKQGIPNGKFSIFGYEWQDDKLVIVPEEAEIIRWMYAEYMKGASRIEIGRALMDRGIYTRQGKPWVDSNVKVILTNITYTGNMLFQKEYCEDPITKHRRKNYGEMPQYFVEDTHEAIIPMDEWQAVQAEFKRRRDLGPFGNKSLKLSAFSTKITCGCCRKHYRHSGKRNTAGEVYYIWICQTKSQKGVSACPSKNIPEKMLQNTAAEVLGLDEFDEDVFSQQIEEVIVIGDDTLTFRFYDGHEVTTKWQSTAKTDWWTDERRKLWGERHKRKDTNPNRNTFYEFTGFIKCGCCGANYRCQSGKRKDGTPTRSWYCTGPRSECRNPAIRDETMKRLVTEILGLDEFDEAAMDAQIESATILDHMVTFHFRDGHIESRDFLDKRHGTPWTEERREKARESMKAAWTDERREAMSERIKKIRSEKKWPNP

SEQ ID NO: 456 - protein, 590 aa, Unknown
  Description of Unknown: Integrase B457 sequence
  PTHR30461:SF3,cd00338,SM00857,G3DSA:1.10.10.2600,IPR036162, PS51737,G3DSA:3.40.50.1390,IPR006119,IPR038109,PF07508, SSF53041,IPR011109,PTHR30461,PS51736,Coil, PF00239
MKRKIAIYARVSTEHEAQISALENQIQYYDEILKKHPEWELYERYIDEGITGTSIGKRDSFLRMMSDAKDKCFDLIVTREVSRFARNIVDTLQQTRTLKQYGVEVYFTDDNIWTMNDEDGELRLSIMATLAQNESKKTSMRVKAGQMISFKNGVFYGNGNILGYDREGKNLVINPTQALTVKRIFELYLQGNGIRKIQFIMEQEKRKTSLGKTKWSASNIARILKNPFYCGRIEYRKQYVPDYLTQKKINNHGEIERVITKGTHDPIVSEEDFDKVQEIFKTKTTKKDNKKYGKPLADNVWVRKLKCKCGHGMNRKINYVSKITGVKTYSFQCHDQIHTGTIKTRLKKGLSIDGICDNKSFPEWKLEVQADFIFRKLLSNKQEIYETAIEMLESSVAVDTHIQDKKQKIENHIQSIDKLRARNDMLLDMCTDGDISRETFKKKTELNNQNIHELEEKIKLIRKQIKENDTQEDLNKRIECLSAFLKMKCFSKKEKIPESIIEKYVEKIIFYKDDFEWYLRPTIGNVDFLSIDAKNMKKGTHELEKTMCYVPSSTGSDKHETLIKNPFITGQRLLSSFRAKVSASEKSKFT

SEQ ID NO: 457 - protein, 590 aa, Unknown
  Description of Unknown: Integrase B458 sequence
  cd00338,SM00857,IPR006118,G3DSA:1.10.10.2600,IPR036162, PS51737,G3DSA:3.40.50.1390,IPR006119,IPR038109,PF07508, SSF53041,IPR011109,PTHR30461,PS00397,PS51736, Coil,PF00239
MLPINPRADIVKPQTSLIISYALFFRKGLFYMSKTVAIYVRVSTGKQADRDSIPFQIQECSNYVKHFLKTENFEVFKDAGRSGKNTHRPEYQRMIEKVKAGMISHVVVYKIDRISRNLVDFSIMYNDFKEHKVAFISLNEQFDTSSAIGEAVLKIILVFAELERKLTGERVRDIMMNRALEGKWNGARVPYGWDWDTKKQCPVHSDTEAEYARMMYRLYDESHSTCVVRDYCNAHDIPTKRGGEWTSKTVADFLRNPMNVGDYRYNYRKSARGKKNDPSEVVYVKDVFPPLIDRELYERVTHQMDANARGIGKDGRKIVSKRTHVFGGLIVCGLCGAFYHSDSDAPRADGFLPSQYRCGAHNKKIHCKAKGTSDVKLGPFIFNYISNLVKASKSRKLLHSVSDLEQMLLTGPEFEQVAGIADAGLDVTFDTIMHGFKPKRYTAAPYTVIRSGDSDALTAKRDKTIRALERLKKLFLFEDDAMSEKEYLMSKRELEGTLSDIENELSALEADTADGKYDDMSFISTASGFLIAHQISSGEHINYRELACAVDAKVLKDFANSVIERIVLLDGRVASIEFKNGLVHEFLYRE

SEQ ID NO: 458 - protein, 590 aa, Unknown
  Description of Unknown: Integrase B459 sequence
  PTHR30461:SF3,SM00857,G3DSA:1.10.10.2600,IPR036162,PF13408, IPR025827,PS51737,G3DSA:3.40.50.1390,IPR006119,IPR038109, PF07508,IPR011109,SSF53041,PTHR30461,Coil, PS51736,cd00338,PF00239
MKITAPARSARAVSLEAFVDNLNLANVVIYARYSSAGQNDQSIDGQLAKCREYAQQRGYRVVGEYCDRALSGRYAETRPEFQRMISDSAKHAFDFVLVWKLDRFSRDRYDSAIYKKKLRANGVRVLSVTEGVGDSSESVLLEAILEAMAEEYSRQLAQNVRRGMRQNAEKGLSLGGLAPLGYRVVNKQYEINEDEARIVRFIHEQYADGAGQKQIVADCARLGYRNQRGNPLTLASVKRILANERYVGRYDYLGEIVIEDAFPAIVSKDLKKRVRARLKANSKAPGHAKAKVEYLLHGKLFCGECGAPMIGECGRGRHGATYYYYTCAARKKQHTCKKRNERKDELEASIVDYIGSCVLTDSWIDGAAERVVAEYQKSYDASGIKPLEKQIRDADKEIDQLVDALISATAEAARRRINERIETAEARKRALEADLASLRIASRVQIRKEDIVVWLNQFRTGDRSDLEYRKKVIDLFVNAIYLYDDSFKLFLNVADSAQVTYADALALAPPSVSDFGASGVPEKQLISFWNQLLFFFCAALPQEHKTAPLICKGSRWCVRLSACSDHPIGWQKPDQLLTVNFAESSSWLPM

SEQ ID NO: 459 - protein, 590 aa, Unknown
  Description of Unknown: Integrase B460 sequence
  PTHR30461:SF3,SM00857,G3DSA:1.10.10.2600,IPR036162,PF13408, IPR025827,G3DSA:3.40.50.1390,PS51737,PS51736,IPR006119, IPR038109,PF07508,IPR011109,SSF53041,PTHR30461, mobidb-lite,cd00338,PF00239
MRTIRKIERSIPNLKKRKKVAAYARVSVDSERMHHSLSAQVSYYNSLIQKNPEWEYAGVYADYGISGTRIKKRQEFLRMLEDAEAGKIDIILTKSIQRFARNTVDLLRTVRHLKELGIEVWFEKENIHTMSGDGELMMTILASFAQEESRSISENVRWRIKKQFEQGNPNGRFRVYGYRWEGDKLVVVPEEAAVVRRIFQNFLDGKSRLETEREFAAEGITTRNGCRWMDSNIKVVLTNITYTGNMLLQKEYVTDPILKKRKKNRGELPQYYVENTHEPIIDKKTFDYVQQEMARRKELGALANKSLNTTCFTGKIKCGICGRSYMHNLRTDRGFEEFWDCGSHKLKGRNCGAKGSIPHAVLIKECTEALGLDNFDEQAFLDQVEKIVVPEYHVMVFCMKNGQKLIRHWVSTAKKDCWTDEYKERQRDWMRNYMASGKGTRFSPFTTRVRCAVCGHAFRRCKQKKKQGISVHWRCGQGGKCSSLSVREEELMKIAADAMGLEAFDGDRFREEIDFMEAGAEERITIHFKDGRIQTVPWTKPKKQGTRHTETYKEYMSQLGKKRWTPERKQRMSEQMKALRKERGENWQRQ

SEQ ID NO: 460 - protein, 589 aa, Unknown
  Description of Unknown: Integrase B461 sequence
  PTHR30461:SF3,IPR036162,PS51737,IPR011109,PTHR30461, PS00397,PF00239,G3DSA:1.10.10.2600,IPR006119,SSF53041, cd00338,SM00857,IPR025827,IPR038109,PS51736, IPR006118,PF13408,G3DSA:3.40.50.1390,PF07508,Coil
MTRKAKTCFIYVRVSTKMQVENGESIEAQLYDLRQYAKRENLRILHEYIDDGYSGKNITGRPHFQEMMEEIKSGVHVDYVLVFKLSRFGRNAADALSSLQFMQDYGTNLVCVKDGINSEAQMGKMMIAFMSAFAEMERENILVQTMAGREQKAREGKWNGGQAPFGYRLVKDEKGKGHLEIDEDEAEIVRIIFREYTKNGKGANAIASWLNTQGYRKKIRGNSKYEHFAPGTVKNIIRNPVYAGKIAFGRRRTTPVKGERNVYHMVKQSDFDVYEGEHDAIIDEATWETAKQRAADESRPFPEAKPDSHTHLLTGMLVCPVCGRSMIANVSRGKRKKDGTIGKTTYAYTCKYSKRQFGHDCTFTRQFKQEYIDREVIEVISRAAHSAVFEERVREELDAAVDIEKLEADVARIGKALENNSAARRMLSRQLDALDASDRSYERKYEDMQARLDKLYDESADIEDALDEAEAKLESAKEKQVTTARVYEMLDEFQEKFDTYDPAKQKEILQQVVERVEIDPDANPKKGDAIVKRVRFKCPVSFYRTLPEEAYDVLGINEFNRLETTEYTTDGNSRVAGNHDETVVLMSKK

SEQ ID NO: 461 - protein, 589 aa, Unknown
  Description of Unknown: Integrase B462 sequence
  PTHR30461:SF3,SM00857,IPR036162,PF13408,IPR025827, G3DSA:3.40.50.1390,IPR006119,SSF53041,PTHR30461,Coil, PS51736,cd00338,PF00239
MSAHVTILRNTVLPVKFNTMNRPRLYSYIRYSSERQGKGSSIERQKSYIAEMAKQIATEYDLEIFEEYQDLGVSAYKGKNVQEGALSDFIDQVESGLIPKGSFLLIESLDRFSRQNAMQAVNLFTSLLLNGITVITGIDKQVYRQTEVNTETLQQLMFSVMLFSRANEESSTKSHRTIASALSKIRRHQERKPGDPVVAIKELGSDKWWTDSSTGYVNPHPVLFPIAKKIIQLKQDGWSNRMILQHLKNNYDGPVIGNKKSKGIWNMQHCSRILEPAIYGRKVITVNNAEYVLDDYYPAIISKDEYEALKLQVGNKGFAPNRESNPEIPLLSGIGILHCAHCSCYMVKAKSTLKNHPHAYRYQCASRDLHQDCNKWGFRASTLERTILQLIADRIFLQTKYQPSGLEGKIADIQSQIENYVLAIGSAKSPEIINSLTSQIDQLEQEKQSLIVEKRLYDESIVQMNTEGWDKFRKFDIDDALNPLRTKIRANIKTVIMRVDCSRIDKKHNLFTITYRDQHKQRIVIENNSGWKKGKIYVEAQTINDIQILESEGLILHDHIDILINRDKFMTEAKKRLDHPRTLIDELTE

SEQ ID NO: 462 - protein, 589 aa, Unknown
  Description of Unknown: Integrase B463 sequence
  SM00857,G3DSA:1.10.10.2600,IPR036162,PF13408,PS51737,IPR025827, mobidb-lite,G3DSA:3.40.50.1390,IPR006119,IPR038109,PF07508, IPR011109,SSF53041,PTHR30461,PS51736,cd00338,PF00239
MTKTIRRIEAQIPITTKKKRVAAYARVSLDTERLENSLSAQISYYSAFIQRNPSWEYAGVFADNGISGTSTDRTEFQRLMAECEAGHIDIILTKSISRFARNTLDTLTAVRRLRELGIEVQFEKEHIHTLSDKGELLLTLLASFAQEESRSISENVKWGVRKRMKKGIPNGRFRILGYRWQGDKLVIVPEEAAVVRRIYQDFLDGKSRLETERALNAEGIRTINGCRFQDSSLKVILTNVTYTGNLLLQKEYITDPINGKRRKNHGELPQYYVENTHEAIIDQATFDYVQQEMTRRKALGAQANKSLNLTCFSGKIKCPYCHVSYMHNPHRRKSNIDYWICGSRKKKKVGDGCPVKGAMSEVALKKCCAEVLGIEEFDEIVFAEKIEHLEVPEKGHLTFFMRDGSVFTRECRNTGHQDCWTKEHRAVASEYRLKHSSERSGSTCFTGKIKCGFCSMNYQRATQSNAGKKTRYWRCPSKGEPDKKGLREDHLRELCAEVLHIDTFDEAAFTQAIDHITVSPDAVLEFQFNDGHAEIHNWSYERHGHKWTAAQRARFSETMKRHYTPERRQTMSEKMKQIRKERGAQWRKE

SEQ ID NO: 463 - protein, 589 aa, Unknown
  Description of Unknown: Integrase B464 sequence
  SM00857,G3DSA:1.10.10.2600,IPR036162,PF13408,IPR025827, PS51736,PS51737,G3DSA:3.40.50.1390,IPR006119,IPR038109, PF07508,SSF53041,IPR011109,PTHR30461,Coil, mobidb-lite,cd00338,PF00239
MFLTLEQYIESIQAINTSGEKDKKIEALLEYYEKYNKRIKAAPGMFYAVIYARYSSHGQREESIEGQVREALEYAARNNMIVIGVYIDKALTGKTDTRDGFQRMIKDAAKKKWQYVICWKLDRFARNRYDSARYKAKLKEYNIRVVSAREYIPDGPEGILLEGALESQAEFYSASLRENVKRGMTDNALECISNGGNIPFGFKTEKKRYVLDTEKAPVVKRIYQMYNTGSTIQELVKYLDGLGIRSTKGNKITINGINSILRNPKYMGVYKYKDTYVEGAIPQIVEKELFEAVQKKLNDRASKKRLKKNDVEFLLTTKLYCGKCGMGMTGMSGTGKLGAKYYYYSCVGRRRDHNCDKDNVGKDWIENIVISETVNTVLNDDVIKRIADGVIDFQRREQNNQVLSGLKNRLVEVEKSIENIIRAIEQGIITPSTKSRMETLEAEKVAIEHGITEESLKNPIVTREQVIFFLEKFKGGDIADQEYRRKLVDTFVNSVYVYDDHILISYNFTSSGDRTKLEEISKGYEKAEETANTSRFSHFFMGSPLLPNGPPLETQTNTQDEHPRRTPRTQPACIFFLPGTFVLVIKFVK

SEQ ID NO: 464 - protein, 589 aa, Unknown
  Description of Unknown: Integrase B465 sequence
  PTHR30461:SF3,cd00338,SM00857,G3DSA:1.10.10.2600,IPR036162, PS51736,PS51737,G3DSA:3.40.50.1390,IPR006119,IPR038109, PF07508,IPR011109,SSF53041,PTHR30461,mobidb-lite, Coil,PF00239
MKSVFKTLDRSRPRKMVFYGRVSTEHEAQLAALKNQMQWYDDQERYHPNWTVVDRYIDEGITGTQAKKRPAFMKMLEDARQGKFDLIVTREVCRFARNTVDALVSVRELKKLDIEVYFVEDNIWTLDGDGELRLTIMATLAQEESRKISERVLAGQAISRQNGVLYGTGNIIGYDRVGSTYVINEPQAEIIRLIYSMYLDGYGEKAIVNELTRRGCQNGRGEVKWDCSKVGRILKNATYKGYIGYNKSVTVDFLEHRRITNHDTSQHTLIKGDFPAIISEEDWNRCAEIRESRIQSMPQLGGGTRKFGRNPSKFLWSKKLRCSCGCSFQRFHWRTNKRDGKEVYGYQCYSHRNGASLQYMVDNGLTDEHTCQIRSICDWKLDLMAKTVLENVWIDRRAAVIEACKILAQCGKESHQEEHQEHKRLEARAQKLKTRLQNLIEMRADGELSKEEFMSQKSEIAEQLQAIESQRTTVPVQKQPVLNIEKIRDTLNCLIDFTQPKLDEMLLDKVVDRVIPITNDHFRWELNLLSGEHNAVECSIKGRKNKASVSIEETVRSDTLSNISSEKIAPTGGPPRRPPSRIPAKGEHL

SEQ ID NO: 465 - protein, 588 aa, Unknown
  Description of Unknown: Integrase B466 sequence
  PTHR30461:SF3,cd00338,SM00857,G3DSA:1.10.10.2600,IPR036162, PF13408,IPR025827,G3DSA:3.40.50.1390,PS51737,IPR006119, IPR038109,PF07508,IPR011109,SSF53041,PTHR30461, PS51736,Coil,PF00239
MKKENEIRAVVYARYSSHSQTEQSIEGQISAAQVYAKAKGYTIVKEYVDRAKTGKNDNREAFQQMLSDTAKHEFSVIIVWKVDRFGRNREEITFNKYRCKKNDVRVEYIAEAVPDSPEGVILESVLEGMAEYYSLQLAQNIRRGIRASAEKCQAIGGHCSLGYAIDPKTKKYVIDPDTAPTVQLIFDKYAEGYTGMDIVRLLNEKGLRTVRGKPFTKNSLWTILKNERYAGVYLFKDEVRVEGGIPALVSRETFDKVQEMLEINHRSPVNTWNRATYLLTDKLFCGHCGSKMVGECGTSRTGATYNYYICAGKKRERNCSKKAVRQDWIEKVVLQQIRRVLFDQEFLEFIAHKAYTYYLEEKKKLDQSAAIKAQLSSVESSIDNLIRAMEAGIFSASTKSRLDDLENQKAALTRTLAEIKLSEESFDLTEDRILFFLESMRGLDMDDVDSRKRLVKTFVNAVYLYDDKITLAFNFTDSCEKPEIIELADIADGVVEKFVHRASCSTKKALYFVGSTVLFFFTEADFGGCIASPAPFLGFCRRSSYAPAIPRYATNERHLRLGTAQTETPLFSFLNDIIRSRWAGWAGR

SEQ ID NO: 466 - protein, 588 aa, Unknown
  Description of Unknown: Integrase B467 sequence
  PTHR30461:SF3,SM00857,G3DSA:1.10.10.2600,IPR036162,PF13408, IPR025827,G3DSA:3.40.50.1390,PS51737,IPR006119,IPR038109, PF07508,IPR011109,SSF53041,PF00239,PTHR30461, PS51736,Coil,cd00338
MNIYTLIEKMTLEHKTIFDMQLRVAFYARVSTTKEVQLNSRDNQIQTFTELIQKNSNWTLIKGYVDTVRGETAANRNNFMRMIDDAKLGKFDLIVCKEISRFSRDLIDSISYTRELFKNNVGVYFTSDNLCTIDRDSELRLGIMASIAQQEVARLSERIKFGHKKAIENGVVMGNSRIFGYIKNDGKLVVDPYESKLVEKIFQMYSTGDYSLRNISEDLYKMGYKNHSGNMIAHTTIKAIIKNPKYKGYYCGNKVKVLDYRTKEQKFLPEESWIVYKDETGEKVPAIISEEIWDRCNAMLKTRCTGTKGNIGGKRFTSPLSSKIFCTHCGKNYHHDSYGHKNGKDNVQWHWICSEKKKRSSNCPSFSIKDDDMLKIIKNFLVSFIGDMDKYIEKYLTVYKSQFSNNKIQETLKSIETEIKKYQNKKDKLLDLYTDEIISKEDFKIKNEKIQAHLDELNREKESLCGGKHSIEKSISQLKDIKEYFNNSNVTVDNMSDTFAYELSKTIIKRIEIEPIDKITANIVFYTNFSDNFKMSIAKECRGKANCSGMTNGHIFLIMIPLVTMKFTYSFLRNQPSITKTLNLKLKM

SEQ ID NO: 467 - protein, 588 aa, Unknown
  Description of Unknown: Integrase B468 sequence
  cd03768,PTHR30461:SF3,SM00857,G3DSA:1.10.10.2600,IPR036162, PF13408,IPR025827,G3DSA:3.40.50.1390,PS51737,IPR006119, IPR038109,PF07508,IPR011109,SSF53041,PTHR30461, PS51736,Coil,PF00239
MAKKRLAAALDEKKAAIYKRVSTQYQVDRASLPVQESELINYCKYALGIDNYEIFEDAGYSAKNTDRPDYQRMMARIRTGEFTHLVVWKIDRISRNLLDFAAMYSELKDLGVTFVSKNEQFDTSNAMGEAMLKIILVFAELERNMTSERVTQVLMSRAKDGIWNGGRPPYAYSYDKPSNTFSVVEDEKKVVLFVYDTYEATESLLLTTKAVNEKGIVSRNGKPWSPTTIRNLLANPFYSGTLRYNYRDITRSKTVYIKPEDEWVLVEDHHEAIVSKERQARVMSILESKRRGGGKLGLTYQRKNVHIFGGLLKCGCCGSSMVCTVDTRERKNGVKPSIYACSRRRRFNDCQNKYITDLTIGPFIFNFIANMIKASNSFGKTTSMDTLQKKLLRGEALADVDHIGEAGLSELYNHFRSGFDGSPFEATKVAQVQAATDLSEREILLSERRRLDRALSRLKTLYLYSEEAMAEKDYVLERKELTDRLEETDQRLSELDAQIAAATPMSDEEFMAKASYFILSQELQGKREVDYPKFITNADPQILKNFIKNVTTNFCIKNGRVTSILFKNGIELQFFYKPSKDDKSPETA

SEQ ID NO: 468 - protein, 588 aa, Unknown
  Description of Unknown: Integrase B469 sequence
  PTHR30461:SF3,cd00338,SM00857,G3DSA:1.10.10.2600,IPR036162, PF13408,PS51737,G3DSA:3.40.50.1390,IPR025827,IPR006119, IPR038109,PF07508,IPR011109,SSF53041,PTHR30461, PS51736,Coil,PF00239
MYEDIKTACLYVRFSSHNQTEQSIEGQTRVCRDFCKRHNIRIVEIYADRATSASKDIEKRVQFLKMIKDSEKGLFDAVIVYKLDRFARSRYDSATYKYRLKRNGVQLISATENISNDPEGIILESVLEGMAEFYSAELSQKINRGMRESAYKHNSIGGAIPLGYKIEDKKLVIDPKTAPIVKEAFEKYADGETVAEICRQFNARGYKTSKGTAFGKSSFTKIFRNERYIGVYTFHDYRAEDAIPAIIDKDLWDRVQLRVGKIKNAPARNKAKVVYLLSGKIFCGHCGSKMNGNCNAGNYCYYQCYGKKNGNVDCKKKNIRKEFIERLVAQDALSLLTDEYIEQIATIACEKNQHEIELDSALPTIRDRIHQVDLSLNHLLKAIESGSAPDMLVKRMGELEKEKKDLQAQAKKESEDIVELDKAQVIYWLEQFRGGSIEDEEFCRMLIDLFVNSVTVWDEDDNTYKVTVAYNLTSLPTKTYRLNKGGTLSDFASNAPDRESDKDGVVFVHVITLGSDGRARGRIAHFDGAAGFLVHPVQIGLGVRNFRLNLKNVCTDSIGKIFSNLCGNAAGGEVSNKSFAHDKCTSFD

SEQ ID NO: 469 - protein, 587 aa, Unknown
  Description of Unknown: Integrase B470 sequence
  PTHR30461:SF3,IPR036162,PS51737,IPR011109,PTHR30461, PS00397,PF00239,G3DSA:1.10.10.2600,IPR006119,SSF53041, SM00857,IPR025827,IPR038109,PS51736,cd03768, IPR006118,PF13408,G3DSA:3.40.50.1390,PF07508,Coil
MTSQKSSIERKLSEQRAALYIRVSTHWQIDKDSLPVQREDLINYAKYALGIDKYEIFEDAGYSAKNTDRPAFQQMMSRLRTGEFSHLLVWKIDRISRNLLDFAEMYSEIKKLGITFVSKNEQFDTSNAMGEAMLKIILVFAELERNMTSERVTAVMLSRASNGQWNGGKVPFGYNYDKQTREFTINESEASVINLIYDTYEANNSLTLVARTLNEKGIYPRSGTPWNPATVSTILKNPFYTGAYRYNYHDESKSGGNTSSKHIKDRSEWVYIENHHPAIIDAERQSRILAILESNRRSNHRSSKTYIRKNVHIFAGLLYCGYCGSQMQSTIDRERADGYRPSIYACSRKRRFNDCKNKYVSDVTLAPFVLNYIANIIKAQNNFGKSTPIDTFERKLLRGEIFADVDHIEPVGLTEMYNMLKRGNLSDAVFSSARIQDAEADKMAADERDLLASERRKKERALDRLKSLYLYNDEAISERDYLVEKKSLTDSIDKIDKRLEEIERNSSHHFTLTDEEFMAKASVFIVTNQLQGKRFIDAEKLLRQIDTRVVKEFLNSVVQKIVIKDGRVLSIRFKNGLEHKFLYKDAE

SEQ ID NO: 470 - protein, 587 aa, Unknown
  Description of Unknown: Integrase B471 sequence
  PTHR30461:SF3,IPR036162,PS51737,IPR011109,PTHR30461, PS00397,PF00239,G3DSA:1.10.10.2600,IPR006119,SSF53041, SM00857,IPR025827,IPR038109,PS51736,cd03768, IPR006118,PF13408,G3DSA:3.40.50.1390,PF07508,Coil
MSRSKASLESKLSERKAALYIRVSTHWQIDKDSLPVQREDLINYAKYALGIDKYEIFEDAGYSAKNTDRPAFQQMMSRLRTGEFSHLLVWKIDRISRNLLDFAEMYSEIKKLGITFVSKNEQFDTSNAMGEAMLKIILVFAELERNMTSERVTAVMLSRASNGQWNGGRIPFGYDYDKEMRTFSINEAEAAVINLIYDTYEETNSLLYVARALNEKGIRPRSGLPWNPTTISTMLKNPFYTGAYRYNYHDETASGGNTSGKHLKDKSEWIFIENHHPAIIPSERQALVLETLEQNRRSNKRSSKTYTRKNTHIFAGLLYCHYCGKQMQSTVDRIRADGYRPSIYACVQKRKFNSCPNKYVSDVTVAPFVLNYIANILKAQNNFGKSTPLDTFERKLLRGDMFASVDHIEPAGLTEMYDMLKRGNLSDAVFSSARIQDAETDQMAADERDLLASERRKKERALDRLKSLYLYNDEAISERDYLVEKKSLTDSIDKIDKRLEEIERNSSHHFTLTDEEFMAKASVFIVTNQLQGKRFIDAEKLLRQIDTHVVKEFLNSVVQKIVIKDGRVLSIRFKNGLEHKFLYKDPE

SEQ ID NO: 471 - protein, 587 aa, Unknown
  Description of Unknown: Integrase B472 sequence
  PTHR30461:SF3,IPR036162,PS51737,IPR011109,PTHR30461, PS00397,PF00239,G3DSA:1.10.10.2600,IPR006119,SSF53041, SM00857,IPR025827,IPR038109,PS51736,cd03768, IPR006118,PF13408,G3DSA:3.40.50.1390,PF07508,Coil
MGKIADKLKQIRVAIYVRVSTHYQIDKDSLPVQKEELIAYAKYVLNADSYEIFEDAGFSAKNTDRPGFQQMMSRIREGEFSHVLVWKLDRISRNLLDFAAMYDELKRLGVTFVSKNEQFDTSSAMGEAMLKIILVFAELERKMTAERVIAVMISRAGNGQWNGGRIPFGYNYDKNAETFSVNETEAAVVLKMFDLYEETHSLLQVAKALNASGSRHRSGKEWTPATVSIILKSPFYTGAYRYNYYDMSKRNSRQDVKPEGEWVIVEDHHPAIIDPVRWKNVVELLERNRRGWQSAGKTYTRKNIHVFAGLLTCGVCGSIMSATSNARAHKDGYRPSNYACMSHRKNNGCTNKYITDTKIGPFVLNYISNLIRAKESFGKTTSPETLQKKLLRGDMFKDIVRIKEPGLMELYNLYRSQLPGVKYASKVAERSGSSDTASEKDILLSERRRLERALSRLKSLYLYSEEDMSERDYVIEKNRLTESLDKVNERLDKLNDGLSSQFSISDEELLAKASYFIMSQKLLDRRFVDYRRLLKETDPRILKEFINSVSSNFCIKNGRIESITFKNGIIHEFVYADEEPVAEASEG

SEQ ID NO: 472 - protein, 587 aa, Unknown
  Description of Unknown: Integrase B473 sequence
  SM00857,G3DSA:1.10.10.2600,IPR036162,PF13408,PS51737, G3DSA:3.40.50.1390,IPR025827,IPR006119,IPR038109,PF07508, IPR011109,SSF53041,PTHR30461,Coil,PS51736, cd00338,PF00239
MAYRKVKSLVDTIGLRAVFYARVSTAEEEQLNAIELQIEENRNCIHKNKWKKVDEYIDRSKSGTMVKGRDEYQRLYEDLLTDKFDIVVIKDQERLMRNTKDWYLFIDRLVQTGKLLYMYLDNKFYNPDDALITGIRAIIAEEFSRNLSKKLHNYHDGRIEKARQGKEIDLQGSGNVFGWDKKDGRYYINPEQAKIRRLMCEGIMARKGSTQIAKELNDAGYRNTVGKEWKPMDIPKFVYDCKNVGTMIINKERQDFESKQIIKLPESEWVYVKNAFPPIVTEEEWELICKIHDERVVATGSDKRGKGKKVSGYSFSGKLVCGICGAPYWRKQRSTKEEYWVCSTKQQKGRKTRKRDSVNGKAGEFNEAGCDNNNISYNSLMEIMTIISERLEANTELVKADMISKLNSMKKRILEANRGATEEDLQKELSRKDKLLDALLDGILTKEEYTRKAESIESKITELRQEIEDNKTQFEDIAEIDRVLANIDREIAIYLDVNKKLKSEYILEHLDRVEIYPDKVIVIVSLFDVGFIVDKEQYVSREKRSRKNYNDWLYSKYNRQRQRNGKVVWKRNDRRRYKYAGKNRCCL

SEQ ID NO: 473 - protein, 587 aa, Unknown
  Description of Unknown: Integrase B474 sequence
  IPR036162,PS51737,IPR011109,PTHR30461,PS00397, PF00239,G3DSA:1.10.10.2600,IPR006119,SSF53041,SM00857, IPR025827,IPR038109,PS51736,cd03768,IPR006118, PF13408,G3DSA:3.40.50.1390,PF07508,Coil
MTSQKSSIERKLSEQRAALYIRVSTHWQIDKDSLPVQREDLINYAKYALGIDKYEIFEDAGYSAKNTDRPAFQQMMSRLRTGEFSHLLVWKIDRISRNLLDFAEMYSEIKKLGITFVSKNEQFDTSNAMGEAMLKIILVFAELERNMTSERVTAVMLSRASNGQWNGGKVPFGYNYDKQTREFTINESEASVINLIYDTYEANNSLTLVARTLNEKGIYPRSGTPWNPTTVSTMLKNPFYTGAYRYNYHDESKSGGNTSSKHIKDRSEWVYIENHHPAIIDAERQSCILEILESNRRSNHRSSKTYIRKNVHIFAGLLYCGYCGSQMQSTIDRERADGYRPSIYACSRKRRFNDCPNKYVSDVTLAPFVLNYIANIIKAQNNFGKSTPLDTFERKLLRGEIFADVDHIEPVGLTEMYNMLKRGNLSDAVFSSARIQDAETDQMAADERDLLASERRKKERALDRLKSLYLYNDEAISERDYLVEKKSLTDSIDKIDKRLEEIERNSSHHFTLTDEEFMAKASVFIVTNQLQGKRFIDAEKLLRQIDTHVVKEFLNSVVQKIVIKDGRVLSIRFKNGLEHKFLHKDAE

SEQ ID NO: 474 - protein, 587 aa, Unknown
  Description of Unknown: Integrase B475 sequence
  cd03768,SM00857,IPR006118,G3DSA:1.10.10.2600,IPR036162, PS51737,G3DSA:3.40.50.1390,IPR006119,IPR038109,PF07508, IPR011109,SSF53041,PTHR30461,PS00397,PS51736, Coil,PF00239
MAKRELMKTLMSDSFRRVAIYIRVSTHYQVDKDSLPLQREELINYCKYVLGIEDFEIFEDAGFSAKNTDRPGYQKMMKMVRAGLFSHVLVWKLDRISRNLLDFAYMYEELKKLDVAFISKNEQFDTSTAMGEAMLKIILVFAELERKTTSERVAATMISRAASGKWNGGRVPYGYSYDYEQKEFSINPEEQKVALLMCDLYEASNSLVFVSRKLNEMGYRSRAGNLWSPVQVRKVLVNPFNTGKYVYNQTSLSTGTQLPNKEEDFIVFENHHASLFPIERQEKLIARLNRNARSKSTANNTVNRKNIHVFSGLIYCENCGNMLTSSVGKKLAGDGWRPSIYLCPSKRRHVSEGCRDTTDSSIGEFVLNFIMNMLNAQRNFQLVQSAADLQRLLLYGKVFDAVDHLDQDSLNDMYTVLSSNLPQNVKAGMKKKMRKPSANPEVTKLSKEKQRLERAMERLKRLYMYSEDSMTEQEYITEKNRIAEAYSEAEARLVEITNYERMERSISDEDFVRQATAFILSKKLSGSSYINYRKLAVSTDPLILKEFFNSILDSITINTDGKIGSIVFKNGLRHEFIYSEDSNSQEN

SEQ ID NO: 475 - protein, 587 aa, Unknown
  Description of Unknown: Integrase B476 sequence
  PTHR30461:SF3,IPR036162,PS51737,IPR011109,PTHR30461, PS00397,PF00239,G3DSA:1.10.10.2600,IPR006119,SSF53041, SM00857,IPR025827,IPR038109,PS51736,cd03768, IPR006118,PF13408,G3DSA:3.40.50.1390,PF07508,Coil
MGKIADKLKQIRVAIYVRVSTHYQIDKDSLPVQKEELIAYAKYVLNADSYEIFEDAGFSAKNTDRPGFQQMMSRIREGEFSHVLVWKLDRISRNLLDFAAMYDELKRLGVTFVSKNEQFDTSSAMGEAMLKIILVFAELERKMTAERVIAVMISRAGNGQWNGGRIPFGYNYDKNTETFSVNETEAAVVLKMFDLYEETHSLLQVAKALNASGSRHRSGKEWTPTTVSIILKSPFYTGAYRYNYYDMSKRNSRQDVKPEGEWVIVEDHHPAIIDPVRWKNVVELLERNRRGWQSAGKTYTRKNIHVFAGLLTCGVCGSIMSATSNARAHKDGYRPSNYACMSHRKNNGCTNKYITDTKIGPFVLNYISNLIRAKESFGKTTSPETLQKKLLRGDMFKDIVRIKEPGLMELYNLYRSQLPGVKYASKVAERSGSSDTASEKDILLSERRRLERALSRLKSLYLYSEEDMSERDYVIEKNRLTESLDKVNERLDKLNDGLSSQFSISDEELLAKASYFIMSQKLLDRRFVDYRRLLKETDPRILKEFINSVSSNFCIKNGRIESITFKNGIIHEFVYADEEPVAEASEG

SEQ ID NO: 476 - protein, 587 aa, Unknown
  Description of Unknown: Integrase B477 sequence
  PTHR30461:SF3,SM00857,G3DSA:1.10.10.2600,IPR036162,PF13408, PS51737,G3DSA:3.40.50.1390,IPR025827,IPR006119,IPR038109, PF07508,IPR011109,SSF53041,PF00239,PTHR30461, PS51736,Coil,cd00338
MKKFPIDLSCLTEEEISQFQEDPYTLYNGDQNVAIYLRYSSTGQSDQSIEGQLRDCRTFCKANHYRIVAIYVDRATTARKDVEKRVHLMEMISDSAKQNWEYVIVWKLDRFARNRNDSAIMKMRLRKNGVKVLSATEHLTDSPESIILESVLEGMAEFFSAELSQKVTRGMRESALKCHSVGGHIPLGYKVENHKLVIDPDTAHIVQEAFSLYANGESVADICRKFNSAGYKTAKNTEFNRSSFKAMFRNTRYIGTYTYKDIVIENGIPAIIDKELFETVQRRLSKTATAPARGKAKVDYLLSGKLFCGHCGASMNGESGAGRHGKVYHYYSCYTKKRKLGCDKRPLKKDYIEGIVARDALNLLTDQLIDEIADMAIRQSEQDLINDTHIPQLTAQLSEVEKSITNITAAIEKGIASETLMNRLVQLEHEKKTLNKEIKAEEKFVYRIDRDQIVFWLSQFKYGNIEDEDFRRRLIDLLVNSVTVWDEPDGYKITTAYNLTSCKTKTFRVEKNPAAEEATGFDFGESECAKGKGHPQGCPFPLASGCREWVSPRQFQISAGRCGLRFHSCYFWAAPVSRGRVIVFFFK

SEQ ID NO: 477 - protein, 587 aa, Unknown
  Description of Unknown: Integrase B478 sequence
  PTHR30461:SF3,IPR036162,PS51737,IPR011109,PTHR30461, PS00397,PF00239,G3DSA:1.10.10.2600,IPR006119,SSF53041, SM00857,IPR025827,IPR038109,PS51736,cd03768, IPR006118,PF13408,G3DSA:3.40.50.1390,PF07508,Coil
MGKITDKLDQVRVAIYVRVSTHYQVDKDSLPVQKEELVAYAKYVLNANSYEIFEDAGFSAKNTDRPDFQQMMARVREGEFSHVLVWKLDRISRNLLDFAAMYDELKRLGVTFVSKNEQFDTSSAMGEAMLKIILVFAELERKMTAERVTAVMISRAGNGQWNGGRIPFGYSYDKSTETFSVNETEASVVLRMYDLYEETHSLLQVAKSLNASGIKHRSGKDWTPTTVGIVLKSPFYTGAYRYNYYDMSKRNSRQDIKPEGEWVIVEDHHPAIIDPVRWKNVVELLERNRRGWQSAGKTYTRKNIHVFAGLLTCGVCGSIMSATSNARAHKDGYRPSNYACMSHRKNNGCTNKYITDTKIGPFVLNYISNLIRAKESFGKTTSPETLQKKLLRGNMFKDIVRIKEPGLMELYNLYRSQVSGVKYESKTAERSGSSDTASERDVLLAERRRLERALSRLKSLYLYSEEDMSERDYVIEKNRLSESLGKVNDRLDKLNDGLSSQFSISDEELLAKASYFIMSQKLLDKRFVDYKRLLKETDPRILKEFINSVSSNFCIKNGRIQSVTFKNGIIHEFVYDDEEPAPEHKED

SEQ ID NO: 478 - protein, 587 aa, Unknown
  Description of Unknown: Integrase B479 sequence
  PTHR30461:SF3,IPR036162,PS51737,IPR011109,PTHR30461, PS00397,PF00239,G3DSA:1.10.10.2600,IPR006119,SSF53041, cd00338,SM00857,IPR025827,IPR038109,PS51736, IPR006118,PF13408,G3DSA:3.40.50.1390,PF07508,Coil
MGYVTKKVAQRFEEKKVAIYVRVSTQYQVDRASLPVQREELIAYCKYVLGIDSFEVFEDPGYSAKNTDRPDYQRMINRVRTGEFSHILVWKIDRISRNLLDFAAMYAELKKLGVTFVSKNEQFDTSSAMGEAMLKIILVFAELERNMTSERVSAIMLSRANGGVWNGGKIPFGYSYDKEQKVFHVLDSEAKVVLYIYDFYESIQSLTTVAKQLNEKGIRSRTGKPWNPVTVRTMLTNPFYAGTYRYNYRDESSRTYSVKPKDEWVMVEDHHPAIVTRERQNHIAGILEKHRRSNFDGRTYQRKNTHIFGGLLRCGYCGSLMSATSDRARSDGWRPSQYLCTRRRRFDDCTNKYIIDTTIGPFVFNFIANMIRASKSFGKSTSIETLEKKLLRGEALASVDHIGRPGLEELYNHLRSGFSEMPFDAPSAAAAESAANIQERELLLSEKRRLERALNRLRTLYLYSDDSMPEKDYIVERKQLMDSLDEVDAKLEAAEKVAADAISLSDEEFMAKASYFILSQQLQDKRFIDYERFIRKIDPKIIKDFLNSIATNFCIKDGLTTSILFRNGLELQFFYKTAETAKSPKTF

SEQ ID NO: 479 - protein, 587 aa, Unknown
  Description of Unknown: Integrase B480 sequence
  PTHR30461:SF3,IPR036162,PS51737,IPR011109,PTHR30461, PS00397,PF00239,G3DSA:1.10.10.2600,IPR006119,SSF53041, SM00857,IPR025827,IPR038109,PS51736,cd03768, IPR006118,PF13408,G3DSA:3.40.50.1390,PF07508,Coil
MSRSKASLENKLSERKAALYIRVSTHWQIDKDSLPVQREDLINYAKYALGIDKYEIFEDAGYSAKNTDRPAFQQMMSRLRTGEFSHLLVWKIDRISRNLLDFAEMYSEIKKLGITFVSKNEQFDTSNAMGEAMLKIILVFAELERNMTSERVTAVMLSRASNGQWNGGRIPFGYDYDKETRTFSINEAEAAVINLIYDTYEETNSLIYVARTLNEKGIRPRSGLPWNPTTISTMLKNPFYTGAYRYNYHDETASGGNTSGKHLKDKTEWIFIKDHHPAIIPSERQAHILETLEQNRRSNQRSSKTYSRKNVHIFAGLLFCHYCGKQMQSTVDRIRTDGYRPSIYACIQKRKFNSCPNKYVSDVTVAPFVLNYIANILKAQNNFGKSTPLDTFERKLLRGEMFSDVSHIEPVGLTEMYDMLKRGNLSDAVFSSARIQDAETDQMAADERDLLASERRKKERALDRLKSLYLYNDEAISERDYLVEKMSLTDAIDKIDKRLEEIEHNSSHHFTLTDEEFMAKASVFIVSNKLQGKRFIDTQKLLRQVDSKVIKEFLNSVIQKIIIKDGRVLSIRFKNGLEHKFVYKSSV

SEQ ID NO: 480 - protein, 587 aa, Unknown
  Description of Unknown: Integrase B481 sequence
  PTHR30461:SF3,IPR036162,PS51737,IPR011109,PTHR30461, PS00397,PF00239,G3DSA:1.10.10.2600,IPR006119,SSF53041, SM00857,IPR025827,IPR038109,PS51736,cd03768, IPR006118,PF13408,G3DSA:3.40.50.1390,PF07508,Coil
MGKIADKLKQIRVAIYVRVSTHYQIDKDSLPVQKEELIAYAKYVLNADSYEIFEDAGFSAKNTDRPGFQQMMSRIREGEFSHVLVWKLDRISRNLLDFAAMYDELKRLGVTFVSKNEQFDTSSAMGEAMLKIILVFAELERKMTAERVIAVMISRAGNGQWNGGRIPFGYNYDKNTETFSVNETEAAVVLKMFDLYEETHSLLQVAKALNASGSRHRSGKEWTPTTVSIILKSPFYTGAYRYNYYDMSKRNSRQDVKPEGEWVVVEDHHPAIIDPVRWKNVVELLERNRRGWQSAGKTYTRKNIHVFAGLLTCGVCGSIMSATSNARAHKDGYRPSNYACMSHRKNNGCTNKYITDTKIGPFVLNYISNLIRAKESFGKTTSPETLQKKLLRGDMFKDIVRIKEPGLMELYNLYRSQLPGVKYASKVAERSGSSDTASEKDILLSERRRLERALSRLKSLYLYSEEDMSERDYVIEKNRLTESLDKVNERLDKLNDGLSSQFSISDEELLAKASYFIMSQKLLDRRFVDYRRLLKETDPQILKEFINSVSSNFCIKNGRIESITFKNGIIHEFVYADEEPVAEASEG

SEQ ID NO: 481 - protein, 587 aa, Unknown
  Description of Unknown: Integrase B482 sequence
  IPR036162,PS51737,IPR011109,PTHR30461,PS00397, PF00239,G3DSA:1.10.10.2600,IPR006119,SSF53041,SM00857, IPR025827,IPR038109,PS51736,cd03768,IPR006118, PF13408,G3DSA:3.40.50.1390,PF07508,Coil
MTARKAISKRTAEILDALNTLKIAIYIRVSTHWQIDKESLPLQRSDLINYCKLILGTDNYVVFEDAGYSAKNFERPDFQRMMSRVRAGEFSHILVWKIDRISRNLLDFATMYKELKELGVTFVSKNEQFDTSTAIGEAMLKIILVFAELERNMTSERVTAAMLSRASDGKWNGGRVPYGYTYDKEAKEFVIAEAEARVVKLMYDLYDEKRSLLAVSKELNTRGYRSRKGVAWSPVTVGNIMRSPFYIGTFRYNYRQENGQSWSFKPESDWIMTEGHHPQLVTHEQWNRVVATMKSQRRGQPGHGKTFNRGNVHIFAGLMTCGYCGGTMTATKDRERKNGWRPSIYSCSSKRRNNDCPNKYISDMIIGPFVLNYIANMIRARKSFGASTSVETLQKKLLRGETFSDVLYIGRPGLEELYQHFKGVQDQEQNFMASPGSTAASEEQERDILLAEKRRKERALSRLKALYLYSEEEQAISEAEYIVERKKLIDSLETIDTRLAEIDEALAQRINLSDDEFIAKASYFIMAQQLTDKRYIDYERFVKTVDPQIVKDFVNSVCANFCIKSGRVASIRFKNGIEHQFFYRDKE

SEQ ID NO: 482 - protein, 587 aa, Unknown
  Description of Unknown: Integrase B483 sequence
  PTHR30461:SF3,IPR036162,PS51737,IPR011109,PTHR30461, PS00397,PF00239,G3DSA:1.10.10.2600,IPR006119,SSF53041, SM00857,IPR025827,IPR038109,PS51736,cd03768, IPR006118,PF13408,G3DSA:3.40.50.1390,PF07508,Coil
MTSQKSSIERKLSEQRAALYIRVSTHWQIDKDSLPVQREDLINYAKYALGIDKYEIFEDAGYSAKNTDRPAFQQMMSRLRTGEFSHLLVWKIDRISRNLLDFAEMYSEIKKLGITFVSKNEQFDTSNAMGEAMLKIILVFAELERNMTSERVTAVMLSRASNGQWNGGKVPFGYNYDKQTREFTINESEASVINLIYDTYEANNSLTLVARTLNEKGIYPRSGTPWNPTTVSTMLKNPFYTGAYRYNYHDESKSGGNTSSKHIKGRSEWVYIENHHPAIIDAERQSRILAILESNRRSNHRSSKTYIRKNVHIFAGLLYCGYCGSQMQSTIDRERADGYRPSIYACSRKRRFNDCQNKYVSDVTLAPFVLNYIANIIKAQNNFGKSTPLDTFERKLLRGKIFADVDHIEPAGLTEMYNMLKRGNLSDAVFSSARIQDAETDQMASDERDLLASERRKKERALDRLKSLYLYNDDAISERDYLVEKKSLTDSIDKIDKRLEEIERNSSHHFTLTDEEFMAKASVFIVTNQLQGKRFIDAEKLLRQIDTHVVKEFLNSVVQKIVIKDGRVLSIRFKNGLEHKFLYKYAE

SEQ ID NO: 483 - protein, 587 aa, Unknown
  Description of Unknown: Integrase B484 sequence
  IPR036162,PS51737,IPR011109,PTHR30461,PS00397, PF00239,G3DSA:1.10.10.2600,IPR006119,SSF53041,SM00857, IPR025827,IPR038109,PS51736,cd03768,IPR006118, PF13408,G3DSA:3.40.50.1390,PF07508,Coil
MKKGIALRTVKKTAEELLNTIKVAIYIRVSTHWQVDKESLPVQRQDLISYCKLILNTDNYVIFEDPGYSAKNTDRPDFQRMMARVRTGEFTHILVWKIDRISRNLLDFAAMYQELKELGVTFVSKNEQFDTSTAIGEAMLKIILVFAELERHMTSERVTAAMLSRATNGKWNGGKVPFGYKYDKGAQEFVIDEAEARVVKLMYDLYDEQRSLLVVSKELNDRGYRSRKGSLWSPVTVGNLMRSPFYIGVMRYNYRDESGATFTFKPEDEWIMIEEHHPQIVTHEQWNRVVDTMKSQRRGQPGHGKSFNRGNVHIFAGLVTCGYCGSLMRATKDRVRADGSRPSIYNCASKRTGSDCPNKYISDLTIGPFVLNYIANIIRARKSFGVSTSIETLEKKLLRGDTFKDVIHIGRPGLEELYRHFQGTRGVEQNFMASPGATASNTEEERDLLLAEKHRKERALNRLKALYLYSEEEQAMSEAEYIVERKRLLDSLEGIDARLAEIDEALAQQIKLSDEEFIQKASYFIMAQQLTEKRQIDYTRFMRKADPQIVKNFIQNVCANFCIKSGRVTSIRFKNGIEHQFFYRDPE

SEQ ID NO: 484 - protein, 587 aa, Unknown
  Description of Unknown: Integrase B485 sequence
  IPR036162,PS51737,IPR011109,PTHR30461,PS00397, PF00239,G3DSA:1.10.10.2600,IPR006119,SSF53041,SM00857, IPR025827,IPR038109,PS51736,cd03768,IPR006118, PF13408,G3DSA:3.40.50.1390,PF07508,Coil
MKSSVTLRSLKKTAEELVNTIKVAIYIRVSTHWQVDKESLPVQRRDLISYCKLILNTENYVIFEDPGYSAKNTDRPDFQKMMARVRTGEFTHILVWKIDRISRNLLDFAAMYQELKELGVTFVSKNEQFDTSTAIGEAMLKIILVFAELERHMTSERVTAAMLSRATNGKWNGGKVPFGYRYDKDAQEFLIDEDEAKVVKLMYDLYDEQRSLLAVSKELNERGYRSRKGALWSPVTVGNLMRSPFYIGVMRYNYRDESGTTFSFKPESEWIMFEEHHPQIVTHEQWSRVVTTMQSQRRGQPGHGKTFNRGNVHIFAGLVTCGYCGSLMRATKDRVRSDGSRPSIYTCASKRTGNSCPNKYISDLTIGPFVLNYIANIIRARKSFGASTSIEVLERKLLRGDTFRDVAHIGRPGLEELYRHFQGTQGVEQNFMASPGATASNEEEERELLLAEKHRKERALNRLKALYLYSEEEQAMSEAEYIVERKRLMDSLEAIDSRLKEIDVALAQQIKLSDEEFIQKASYFIMAQQLTEKRHIDYTRFMRRADPQIVKNFVQNVCANFCIKSGRVTSIRFKNGIEHQFFYKDSE

SEQ ID NO: 485 - protein, 587 aa, Unknown
  Description of Unknown: Integrase B486 sequence
  IPR036162,PS51737,IPR011109,PTHR30461,PS00397, PF00239,G3DSA:1.10.10.2600,IPR006119,SSF53041,SM00857, IPR025827,IPR038109,PS51736,cd03768,IPR006118, PF13408,G3DSA:3.40.50.1390,PF07508,Coil
MTSQKSSIDRKLSEQRAALYIRVSTHWQIDKDSLPVQRGDLINYAKYALGIDKYEIFEDAGYSAKNTDRPAFQQMMSRLRTGEFSHLLVWKIDRISRNLLDFAEMYSEIKKLGITFVSKNEQFDTSNAMGEAMLKIILVFAELERNMTSERVTAVMLSRASNGQWNGGKVPFGYNYDKQTREFTINESEASVINLIYDTYEANNSLTLVARALNEKGIYPRSGTPWNPATVSTILKNPFYTGAYRYNYHDESKSGGNTSSKHIKDRSEWVYIENHHPAIIDAERQSRILAILESNRRSNHRSSKTYIRKNVHIFAGLLFCGYCGSQMQSTIDRERADGYRPSIYACSRKRRFNDCPNKYVSDVTLAPFVLNYIANIIKAQNNFGKSTPLDTFERKLLRGEIFADVDHIEPVGLTEMYNMLKRGNLSDAVFSSARIQDTETDQMASDERDLLASERRKKERALDRLKSLYLYNDEAISERDYLVEKKSLTDSIDKIDKRLEEIERNSSHHFTLTDEEFMAKASVFIVTNQLQGKRFIDAEKLLRQIDTHVVKEFLNSVVQKIVIKDGRVLSIRFKNGLEHKFLYKDAE

SEQ ID NO: 486 - protein, 587 aa, Unknown
  Description of Unknown: Integrase B487 sequence
  PTHR30461:SF3,IPR036162,PS51737,IPR011109,PTHR30461, PS00397,PF00239,G3DSA:1.10.10.2600,IPR006119,SSF53041, cd00338,SM00857,IPR025827,IPR038109,PS51736, IPR006118,PF13408,G3DSA:3.40.50.1390,PF07508,Coil
MGYVTKKVAQRFEEKKVAIYVRVSTQYQVDRASLPVQREELIAYCKYVLGIDSFEVFEDPGYSAKNTDRPDYQRMINRVRTGEFSHILVWKIDRISRNLLDFAAMYAELKKLGVTFVSKNEQFDTSSAMGEAMLKIILVFAELERNMTSERVSAIMLSRANGGVWNGGKIPFGYSYDKEQKVFHVLDGEAKVVLYIYDFYESIQSLTTVAKQLNEKGIRSRTGKPWNPVTVRTMLTNPFYAGTYRYNYRDESSRTYSVKPKDEWVMVEDHHPAIVTRERQNHIAGILEKHRRSNFDGRTYQRKNTHIFGGLLRCGYCGSLMSATSDRARSDGWRPSQYLCTRRRRFDDCTNKYIIDTTIGPFVFNFIANMIRASKSFGKSTSIETLEKKLLRGEALASVDHIGRPGLEELYNHLRSGFSEMPFDAPSAAAAESAANIQERELLLSEKRRLERALNRLRTLYLYSDDSMPEKDYIVERKQLMDSLDEVDAKLEAAEKVAADAISLSDEEFMAKASYFILSQQLQDKRFIDYERFIRKIDPKIVKDFLNSIVTNFCIKDGLTTSILFRNGLELQFFYKTAETAKSPKTF

SEQ ID NO: 487 - protein, 587 aa, Unknown
  Description of Unknown: Integrase B488 sequence
  PTHR30461:SF3,IPR036162,PS51737,IPR011109,PTHR30461, PS00397,PF00239,G3DSA:1.10.10.2600,IPR006119,SSF53041, cd00338,SM00857,IPR025827,IPR038109,PS51736, IPR006118,PF13408,G3DSA:3.40.50.1390,PF07508,Coil
MGYVTKKVAQRFEEKKVAIYVRVSTQYQVDRASLPVQREELIAYCKYVLGIDSFEVFEDPGYSAKNTDRPDYQRMINRVRTGEFSHILVWKIDRISRNLLDFAAMYAELKKLGVTFVSKNEQFDTSSAMGEAMLKIILVFAELERNMTSERVSAIMLSRANGGVWNGGKIPFGYSYDKEQKVFHVLDSEAKVVLYIYDFYESIQSLTTVAKQLNEKGIRSRTGKPWNPVTVRTMLTNPFYAGIYRYNYRDESSRTYSVKPKDEWVMVEDHHPAIVTRERQNHIAGILEKHRRSNFDGRTYQRKNTHIFGGLLRCGYCGSLMSATSDRARSDGWRPSQYLCTRRRRFDDCTNKYIIDTTIGPFVFNFIANMIRASKSFGKSTSIETLEKKLLRGEALASVDHIGRPGLEELYNHLRSGFSEMPFDAPSAAAAESAANIQERELLLSEKRRLERALNRLRTLYLYSDDSMPEKDYIVERKQLMDSLDEVDAKLEAAEKVAADAISLSDEEFMAKASYFILSQQLQDKRFIDYERFIRKIDPKIIKDFLNSIATNFCIKDGLTTSILFRNGLELQFFYKTAETAKSPKTF

SEQ ID NO: 488 - protein, 586 aa, Unknown
  Description of Unknown: Integrase B489 sequence
  PTHR30461:SF3,cd00338,SM00857,IPR006118,G3DSA:1.10.10.2600, IPR036162,PS51737,G3DSA:3.40.50.1390,IPR006119,IPR038109, PF07508,IPR011109,SSF53041,PTHR30461,PS00397, PS51736,Coil,PF00239
MPFKKAIETMPNCCHRAAIYIRVSTNHQIDRDSLPLQREELINYAKYALGIENYEVFEDAGFSAKNTDRPDYQRMMKMIRSGLFSHVLVWKLDRISRNLLDFAAMYEELKRLNVTFVSKNEQFDTSTAMGEAMLKIILVFAELERKMTSERVTATMLSRAASGKWNGGRIPYGFSYDYDRREFSICTEEQNITLLMCDFYESSHSLLYVSRKLNELGHRTRAGNLWSPVQVRKILVNPFSVGDYVYNQTSLSTGTQIPNKEEDYIVFEGHHPALFPKERQQKIVSQLSRNSRLKSGSNVSVKRKNIHVFSGMIFCENCGQMLTSSTGKALSGDGWRPSIYLCPSKRKHISEGCHDTTDSTVGEFTINFILNMLNAQRNFALIRTPEDLQRLLLYGKVFDDVDHLGEEGLNEMFTVLSENLPANTKSGLKKKAKKPVTNPEITKLKKEQKKLERAMERLKRLYMYSEDSMSEHDYITERNRISEAYEDIETRLSEISTCEHTERSISDQDFIQQATAFVLSKKLSGSSYINYRRLAASTDAQILKDFFNSIIDSITINTDGQVGSIVFKNGLLHRFIYSSAEKSQGS

SEQ ID NO: 489 - protein, 586 aa, Unknown
  Description of Unknown: Integrase B490 sequence
  PTHR30461:SF3,IPR036162,PS51737,IPR011109,PTHR30461, PF00239,G3DSA:1.10.10.2600,IPR006119,SSF53041,cd00338, SM00857,IPR025827,IPR038109,mobidb-lite,PS51736, PF13408,G3DSA:3.40.50.1390,PF07508,Coil
MAQQKKAAVAAFDGTPRAVIYARYSSTHQRERSIEDQIADCRAYAERCGLMVVGIYADRAISGKTDERPDFQRMIDDSKKRQFDRVIVWKLDRFARNRYDSALYKHKLKQNGVSVLSAMENIGEGDESIILEAILEASAEYYSRDLRKKVLRGMTTSAKKGLHNTGSVPYGYRLEGESAVPDGDRAEFVKHVFEAYAKGETPAELYREMQRRGLDTKANGRKVSDNIIGSILRNEKYTGRGMWRGIPVEWPRLIDDELFKAARARTEKNRRAPAAYKVAEPFILCGKAFCGYCGAPLMSGGGKGRSGKYYRHYICRTKKRERACGKKTEDKDFLEWYIVEQTCAYVLAPERLEYIADRVVECYKESFDGQRVSALEARIAKLDRDLDKTTDLLFSAPSAAAVDRINKHVVELEAQKSELEAELSWLKIAAAITYTRDEVVAWLKQFCNGDPLEAEFRRRIVETFINSVYVYDDRIVIYFNVRGGKQISYAEMLDSAGDVEPLPPGPENEKSGGPDNGTAASNGKERFLHGKNIEQTAESAVRFCSGLVHQKMLPSLGWGVFLVLPCEESNRTAARRRQKTIQRIVF

SEQ ID NO: 490 - protein, 586 aa, Unknown
  Description of Unknown: Integrase B491 sequence
  PTHR30461:SF3,SM00857,G3DSA:1.10.10.2600,IPR036162,PF13408, PS51737,IPR025827,G3DSA:3.40.50.1390,IPR006119,IPR038109, PF07508,IPR011109,SSF53041,PF00239,PTHR30461, PS51736,Coil,cd00338
MARKKNIAAGQNAVIYARYSSHNQREVSIEQQVRECMKHAAELGLHVVGTYEDRAISGKTDKRPNFQRMMRDAEKGKFQAVVAWKSNRIGRNMLQAMVNEAKLEDCGVKVFYAEEDFDDTAAGRFALRNMMNVNQFYSENMAEDITRGLYDNASKCMANGRQPLGYKRGEDGRVVLDEANAAVVREIFTRVAAGDLFVDIARDLNAQGIKTSKGANWNKGSFQSICQNERYRGIYIYGDVRVADGIPRIVSDDLWYRVQEAMRMKKNPVGTRHRVGAEDYLLTGKLRCGHCGSYMTGVSGTSRNGELHYYYTCQKRRTEHACDKKNIRRDVIEPAVAQAIKMYCLTDDVIAWIADRTVEYWEKHDNDLQIEALEQQLEENKKATSNMLKAIEMGIITEATRTRMVELETEQSRLSVQLNVAKEDVVKIDREQIISYLELLQQGDIHDRDFQMELFKNFLVAVYVYDDNRMKLVFSCMGDQNSVEIPLETGEDPPDGGLSPDAKMFVLTPDSSTKKALYFAGSTVLFFFTEANFGGLYCFACTVFIAVCAFNAQATSANCISQRCRFAQTILQQTAFHLRCVRFSRT

SEQ ID NO: 491 - protein, 586 aa, Unknown
  Description of Unknown: Integrase B492 sequence
  PTHR30461:SF3,IPR036162,PS51737,IPR011109,PTHR30461, PF00239,G3DSA:1.10.10.2600,IPR006119,SSF53041,cd00338, SM00857,IPR025827,IPR038109,mobidb-lite,PS51736, PF13408,G3DSA:3.40.50.1390,PF07508,Coil
MPRAAQAAGAVFDGTPRAVIYARYSSTHQRERSIEDQIADCRAYAERCGLMVVGIYADRAISGKTDERPDFQRMIDDSKKRQFDRVIVWKLDRFARNRYDSALYKHKLKQNGVSVLSAMENIGEGDESIILEAILEASAEYYSRDLRKKVLRGMTTSAKKGLHNTGSVPYGYRLEGESAIPDGDRAEFVKHVFEAYAKGETPAELYREMQRRGLDTKVNGRKVSDNIIGSILRNEKYTGRGMWRGIPVEWPRLIDDELFEAARARTEKNRRAPAAYKAAEPFILCGKAFCGYCGAPLMSGGGKGRSGKYYRHYICRTKKRERACGKKTEDKDFLEWYIVEQTCAYVLAPERLEYIADRVVECYKESFDGQRVSVLEARIAKLDRDLDKTTDLLFAAPSAAAVDRINKHVVELEAQKSELEAELSGLKIAAAITYTRDEVVAWLKQFCNGDPLEAEFRRRIVETFINSVYVYDDRIVIYFNVRGGKQISYAEMLDSAGDVEPLPPGPESKKSGGPDNGTAASNSKERFLHGKNTEQTAESAVRFCSGLVHQKMLPSLGWGVFLVLPCEESNRTAARRRQKAILRIVF

SEQ ID NO: 492 - protein, 586 aa, Unknown
  Description of Unknown: Integrase B493 sequence
  IPR036162,PS51737,IPR011109,PTHR30461,PS00397, PF00239,G3DSA:1.10.10.2600,IPR006119,SSF53041,SM00857, IPR025827,IPR038109,PS51736,cd03768,IPR006118, PF13408,G3DSA:3.40.50.1390,PF07508,Coil
MTAKKLSSIKKTAEELINTIKVAIYIRVSTHWQVDKESLPVQRKDLISYCNLILNTDNYVIFEDPGYSAKNTDRPDFQKMMARVRTGEFTHILVWKIDRISRNLLDFAAMYQELKELGVTFVSKNEQFDTSTAIGEAMLKIILVFAELERHMTSERVTAAMLSRATNGKWNGGKVPFGYKYDKDAQEFVIEEAEARVVKLMYDLYDEQRSLLVVSKELNDRGYRSRKGSLWSPVTVGNLMRSPFYIGVMRYNYRDESGATFTFKPEDEWIMIEEHHPQIVTHEQWNRVVDTMKSQRRGQPGHGKSFNRGNIHIFAGLVTCGYCGSLMRATKDRVRADGSRPSIYICASKRTGSSCPNKYISDLTIGPFILNYIANIIRARKSFGVSTSIETLEKKLLRGDTFKNVEHIGRPGLEELYHHFQGTRGVEQTFTATPGATATNEEEERELLLAEKHRKERALNRLKALYLYSEEEQAMSEAEYIIERKRLLDSLETINGRLKEIDEALAQQIKLSDEEFIQKASYFIMAQQLTDKRYIDYTRFMRKADPQIVKNFVQNVCSNFCIKSGRVTSIRFKNGIEHQFFYHDEE

SEQ ID NO: 493 - protein, 586 aa, Unknown
  Description of Unknown: Integrase B494 sequence
  PTHR30461:SF3,IPR036162,PS51737,IPR011109,PTHR30461, PF00239,G3DSA:1.10.10.2600,IPR006119,SSF53041,cd00338, SM00857,IPR025827,IPR038109,mobidb-lite,PS51736, PF13408,G3DSA:3.40.50.1390,PF07508,Coil
MSTDSEDQLNSYKSQVEHYTTLIKNNNEWIFAGIYADEGITGTQILKRDDFIRLMDECMKGNVDMIITKSISRFARNTLDTLKYVRKLKERGIAVYFEEEGINTLSMESEMALVLLSSVAQQEVENISAHVKKGLKMKALRGEMIGAQECLGYDYSVEKGNIIINAEEVDIVRYIFRRYLEGAGATVIGHELDEMGCATKRGNKQWNSSTVLGILKNEKYRGDVLMGKTYTVDPISKRRMHNYGEEDQYRIANHHEPIISLEEFEAAQQILEKRGRAQRLGIDGEREKLSRKYAFSSMLRCGFCGKVLLRRSWHASSCYQKTIWQCERWARYGKENCPECKGIEERVIEQAFLDSYRYLQKDNDDVLNEFVDRVLKVLKEEEAGSTDAKVEKELRQAVARRKKLVDLRLDETLEPEAFQAKYEELTAQINRLNQRAERFAKLRHDREDLEKRVSDIRKQLKSGVVLENFNRNVFESIVDRVVVGGYDEKGKPDPYLLTFVYKAGGNKSMDGRRYRQSRRKVHDDGKDGDLCPNADDEEEPVCPNCVVDGGRDRRAVGAGKTGLSAEDGRISFCISAAGAFMMESSR

SEQ ID NO: 494 - protein, 586 aa, Unknown
  Description of Unknown: Integrase B495 sequence
  PTHR30461:SF3,cd00338,SM00857,IPR006118,G3DSA:1.10.10.2600, IPR036162,PS51737,G3DSA:3.40.50.1390,IPR006119,IPR038109, PF07508,IPR011109,SSF53041,PTHR30461,PS00397, PS51736,Coil,PF00239
MPFKKAIETMPNCCHRAAIYIRVSTNHQIDRDSLPLQREELINYAKYALGIENYEVFEDAGFSAKNTDRPDYQRMMKMIRSGLFSHVLVWKLDRISRNLLDFAAMYEELKRLNVTFVSKNEQFDTSTAMGEAMLKIILVFAELERKMTSERVTATMLSRAASGKWNGGRIPYGFSYDCDRREFSICTEEQNITLLMCDFYESSHSLLYVSRKLNELGHRTRAGNLWSPVQVRKILVNPFSVGDYVYNQTSLSTGTQIPNKEEDYIVFEGHHPALFPKERQQKIVSQLSRNSRLKSGSNVSVKQKNIHVFSGMIFCENCGQMLTSSTGKALSGDGWRPSIYLCPSKRKHISEGCHDTTDSTVGEFTINFILNMLNAQRNFALIRTPEDLQRLLLYGKVFDDVDHLGEEGLNEMFTVLSENLPANTKSGLKKKAKKPVTNPEITKLKKEQKKLERAMERLKRLYMYSEDSMSEHDYITERNRISEAYEDIETRLSEISTCEHTERSISDQDFIQQATAFVLSKKLSGSSYINYRRLAASTDAQILKDFFNSIIDSITINTDGQVGSIVFKNGLLHRFIYSSAEKSQGS

SEQ ID NO: 495 - protein, 586 aa, Unknown
  Description of Unknown: Integrase B496 sequence
  PTHR30461:SF3,SM00857,G3DSA:1.10.10.2600,IPR036162,PF13408, IPR025827,PS51737,G3DSA:3.40.50.1390,IPR006119,IPR038109, PF07508,IPR011109,SSF53041,PF00239,PTHR30461, PS51736,Coil,cd00338
MAKKKKPAGGNAIIYARYSSHNQRDVSIEQQIEACRKHAAELGLTITDTYEDRAISGRTDNRPAFQRMMHDAENGKFSYVLAWKSNRMGRNMMQAMVNESRLMDCGIKVYYAEEDFDDSAAGRFALRSMMNVNQFYSDNLAEDVRRGLMDNASKCMANGKQPLGYKRGEDGKVVVDEPAAAIVREVYTRVASGELFTDIARDLNRRGIKTADKGEWNKNSFHRLCSNEKYRGIYIYGDVRIEGGIPTIIDDTLWYKVQEALRVKKLKRNGRHRPGDEDYLLTGKLRCGKCGGYMIGMSGRSKTGDIHYYYACQNRRVGRTCDKKNIRRDVIEPAVAQAIKDYCLTDDAIEWIADKTVEYWEKADRNLQLDSIEGDLAAVQSSISNVMKAIEMGVVTETTRDRLIELEKQRTDLKSKLALAKEEVVHVDRKKLISSLLLFRNGNIHDRQYQEDLFKTFLISVYVYDDDDNGHLKIVFNAFGDNNTVDLPIDFGETDNQSGFSDGAEKFDYALHRSAIHLLYQRGDLFRQADGLRQQFPCPPEQPLAVDCRAALIKGILPGIQHRADGCLHRLRAAAPGVAVQTANAL

SEQ ID NO: 496 - protein, 586 aa, Unknown
  Description of Unknown: Integrase B497 sequence
  PTHR30461:SF3,cd00338,SM00857,G3DSA:1.10.10.2600,IPR036162, PF13408,PS51737,IPR025827,G3DSA:3.40.50.1390,IPR006119, IPR038109,PF07508,SSF53041,IPR011109,PTHR30461, PS51736,Coil,PF00239
MSSVDKIAVVYARYSSHGQTEQSIEGQIAAAQKYAEQHGYTIIHVYADRAMTGRNDDREQFQKMLSDTAMHQFGVILLWKIDRFGRNREEIAFNRYRCKKNGVRVERVAEDVPDGPEGVILDSVLEGMAEYYSLQLAQNVRRGQRESAKKSMSIGGNKMLGYIVNPETKRYESDPKTASYVTEIFKRYANGETISEIVAWLNAQGIRTTRGSEFTVNSLHRLLKNEKYTGVYIFHDIRNEGGMPALTDRTTFDKVQEMLKVNRRAPARVWSKTEYLLTDKLFCGHCGAMMVGESGHGRNGIKHSYYTCLNRKKKKSCDKKPVRQDVIESLVLRAIGKLLENPATLENIADQVWAAYERSDTSGDAIKALDKQIADVDRALSNVMKAIEMGIINEMTKTRMDELTNQKQALSTARAEAGLAEGFKLTRDMILFFLQEISALDMADRDSQKRLIKTFVNAIYLYDDHFDIAFNYTDNGNVVVRMREINDAARGEMFGRCAQCPTKKNPQLRLRVLFCAGAGRIRTGRPSADGKKQSCGLFFRPRLANPPAPTKKLWHKCVTAFFVVSLKNDELISPFFQTFFTVLSNT

SEQ ID NO: 497 - protein, 586 aa, Unknown
  Description of Unknown: Integrase B498 sequence
  PTHR30461:SF3,IPR036162,PS51737,IPR011109,PTHR30461, PF00239,G3DSA:1.10.10.2600,IPR006119,SSF53041,cd00338, SM00857,IPR025827,IPR038109,mobidb-lite,PS51736, PF13408,G3DSA:3.40.50.1390,PF07508,Coil
MAQQKKAAGAEFDGTPRAVIYARYSSTHQRERSIEDQIADCRAYAERCGLMVVGIYADRAISGKTDERPDFQRMIDDSKKRQFDRVIVWKLDRFARNRYDSALYKHKLKQNGVSVLSAMENIGEGDESIILEAILEASAEYYSRDLRKKVLRGMTTSAKKGLHNTGSVPYGYRLEGESAVPDGDRAEFVKHVFEAYAKGETPAELYREMQRRGLDTKVNGRKVSDNIIGSILRNEKYTGRGMWRGIPVEWPRLIDDELFEAARARTEKNRRAPAAYKAAEPFILCGKAFCGYCGAPLMSGGGKGRSGKYYRHYICRTKKRERACGKKTEDKDFLEWYIVEQTCAYVLAPERLEYIADRVVECYKESFDGQRVSALEARIAKLDRDLDKTTDLLFAAPSAAAVDRINKHVVELEAQKSELEAELSGLKIAAAITYTRDEVVAWLKQFCNGDPLEAEFRRRIVETFINSVYVYDDRIVIYFNVRGGKQISYVEMLDSVGDVEPLPPGPENKKSGGPDNGTAASNSKERFLHGKNTEQTTESAVRFCSGLVHQKMLPSLGWGVFLVLPCEESNRTAARRRQKTILRIVF

SEQ ID NO: 498 - protein, 586 aa, Unknown
  Description of Unknown: Integrase B499 sequence
  PTHR30461:SF3,cd00338,SM00857,G3DSA:1.10.10.2600,IPR036162, PF13408,PS51737,G3DSA:3.40.50.1390,IPR025827,IPR006119, IPR038109,PF07508,IPR011109,SSF53041,PTHR30461, PS51736,Coil,PF00239
MEVEIIKAKGAGEDTSTGRKIDRLRVAAYCRVSTDDEDQIKSYNSMVRYYTDLIKSNKQWVFAGVFADKAITGTKTDKREEFQLLIQECLSGNIDLVIAKSIPRFARNTLDTLKYVRMLRERNIAVYFEVEKINTLKDGEFLLTILSSVAQQEVENTSAYVKKGLKMKMKRGELVGFQGCLGYDYDVVTKSLSINEEGAETVRYIFDRYVAGAGSTMIARELNEQGISTIKGNPWTSSSVMGIINNEKYKGDILLGKTFTVDPISKRRLENLGEEDRFYIKNHHEPIVSEETFARAQEIRERRNGGRKKGVAPGKREKFSRQYAFSCMLECGFCGANLSRRRWHSSSKYTKTIWQCVESTKHGKRFCPDSKGIPEQVIEDAFIESYRMLCTDHKDVLEEFIRRVEKTLSEDSIEDKIEKLNISVYNIQYKRKKLLENYLEGVVAKDIYEETDVGYEKKLSEAKAQLSMLEQQYDNEGSLQRRLADFRKALSKNQILEEFDRGIFESIIEKVIVGGYDENGEKDPYKIIFIYKTGFKNEIGNAKERFGKKSKAVEKAKEMCSHIVDEVKDVCSYVSDNTRRNRVSTF

SEQ ID NO: 499 - protein, 586 aa, Unknown
  Description of Unknown: Integrase B500 sequence
  PTHR30461:SF3,cd00338,SM00857,G3DSA:1.10.10.2600,IPR036162, PS51737,G3DSA:3.40.50.1390,IPR006119,IPR038109,PF07508, IPR011109,SSF53041,PTHR30461,PS51736,Coil, PF00239
MINSDFVKKRVVIYARVSTEHEAQISALENQMDWYKPILAARPEWTLVGQYVDEGITGTSAAKRPQFMKMIADAKKKQFDMIITREVSRFARNTVDTLQYTRQLKSLGVEVFFINDNIKTFDGDGELRLTIMATLAQDESRKTSVRVKSGQQTSMNNGVIYGNGNILGYKRVAKIVDDNKKEVEWTVDPEQAKTVKMIYAMYLDGMGLMQIKDELERRGRKTSAGLDRWYCTVISHILKNSFYCGIITYHKEYTPDYLTQKKVKNYGEIEFTKVQGSHEALVSVADYERVQIIMESKRSKCKNLDTGRKATGKRPRTTVWGKLLICECGHKFSMRVWDRKDRVANAAYQCYSSVHTGSYESRKKRGLSLDGICQTPMIPEWRLQMMANYIFRNYLTEKDKVLALANSMLEAHIGDTESREDHTETLRCKRAELEKLNTKLDNFIEMRAEGEISKELFKKKTSELELTMQKLDSEIKELESKQEPEIQIEDYAEKLTVLQYALEQYTNWDDKDVPESVIEAFVVKIVASKDGFDWYLRFSGNPDDPLHCTVGGKRKSTAKISVAGECSPAIHKGDTGSYQGTAPIKS

SEQ ID NO: 500 - protein, 586 aa, Unknown
  Description of Unknown: Integrase B501 sequence
  PTHR30461:SF3,IPR036162,PS51737,IPR011109,PTHR30461, PF00239,G3DSA:1.10.10.2600,IPR006119,SSF53041,cd00338, SM00857,IPR025827,IPR038109,mobidb-lite,PS51736, PF13408,G3DSA:3.40.50.1390,PF07508,Coil
MAQQKKAAGSEFDGTPRAVIYARYSSTHQRERSIEDQIADCRAYAERCGLMVVGIYADRAISGKTDERPDFQRMIDDSKKRQFDRVIVWKLDRFARNRYDSALYKHKLKQNGVSVLSAMENIGEGDESIILEAILEASAEYYSRDLRKKVLRGMTTSAKKGLHNTGSVPYGYRLEGESAVPDGDRAEFVKHVFEAYARGETPAELYREMQRRGLDTKVNGRKVSDNIIGSILRNEKYTGRGMWRGIPVEWPRLIDDELFEAARARTEKNRRAPAAYKAAEPFILCGKAFCGYCGAPLMSGGGKGRSGKYYRHYICRTKKRERACGKKTEDKDFLEWYIVEQTCAYVLAPERLEYIADRVVECYKESFDGQRVSVLEARIAKLDRDLDKTTDLLFAAPSAAAVDRINKHVVELEAQKSELDAELSGLKIAAAITYTRDEVVAWLKQFCNGDPLEAEFRRRIVETFINSVYVYDNRIVIYFNVRGGKQISYAEMLDSAGDVEPLPPGPENEKSGGPDNGTAASNSKERFLHGKNTEQTAESAVRFCSGLVHQKMLPSLGWGVFLVLPCEESNRTAARRRQKTILRIVF

SEQ ID NO: 501 - protein, 585 aa, Unknown
  Description of Unknown: Integrase B502 sequence
  PTHR30461:SF3,cd00338,SM00857,IPR006118,G3DSA:1.10.10.2600, IPR036162,PS51737,G3DSA:3.40.50.1390,IPR006119,IPR038109, PF07508,SSF53041,IPR011109,PTHR30461,PS00397, PS51736,Coil,PF00239
MAFKKTIDTMPTLCRRVAIYIRVSTNHQIDRDSLPLQREELINYAKYALNIEDYEVFEDAGFSAKNTDRPDYQRMMKMIRSGLFSHVLVWKLDRISRNLLDFAAMYEELKRLNVTFVSKNEQFDTSTAMGEAMLKIILVFAELERKMTSERVTATMLSRAASGKWNGGRIPYGFSYDYDTREFSICSEEQKVVLLMCDFYESSHSLLYVSRILNELGHRTRAGNLWSPVQVHKILVNPFSVGDYVYNQTSLSTGTQIPNKEEDFIVFENHHPALFPKERQQKIVSQLSRNSRLKSGSNVSVKRKNIHVFSGMIFCENCGQMLTSSTGRALSGDGWRPSIYLCPSKRRHISEGCHDTTDSTVGEFTINFILNMLNAQRNFALIRTQEDLQRMLLYGKVFDNVDHLGEEGIKEMFTVLSENLPENTKSGLKKKSRKPAANPEVTKLKKEQQKLERAMERLKRLYMYSEDSISEQEYITERNRISEAYEDIEMRLSEISTCERTERSITDQDFIRQATAFIISKKLSGSSYINYRRLAANTDVQILKDFFNSIIDSITINSNGQIGSIVFKNGLLHRFIYSSVDKSQE

SEQ ID NO: 502 - protein, 585 aa, Unknown
  Description of Unknown: Integrase B503 sequence
  PTHR30461:SF3,IPR036162,PS51737,IPR011109,PTHR30461, PS00397,PF00239,G3DSA:1.10.10.2600,IPR006119,SSF53041, SM00857,IPR025827,IPR038109,PS51736,cd03768, IPR006118,PF13408,G3DSA:3.40.50.1390,PF07508,Coil
MAYAALRKAGLVPAAAPDLRTVALYVRVSTGYQVDKDSLPFQKKELKNYCKHVLHIDESRIEIFEDAGKSGKNTNRPAFERMMKKVRAGQISHVIVYKIDRISRNLVDFSLMYDDFKYNRVTFISLNEQFDTSSAIGEAVLKIILVFAELERKLASERVMDIMIGRALSGQWNGARVPFGWDWDEEAKFPKHSEVEAVFGRLMYDMYEETRSTCKVRDYNNTHDIPTKRGGEWTSKTVADFIRNPINRGDYRYNYRESARGRKKPEEEVIYLEGVFPPLVPPEQWDRCNAIMDENAAKKRSAGFSHKRIHVHAFAGLLVCGDCGAFFQVIKKDKTRENGFSPSLYRCGARYRKRACNSPGCSDVVLGPFVFNYISGMVRVASMRSKISSPEELEQLLLTGPEFEAVAGIASEGLNATFALLSGRPATGGAAYVPDLLAAPSGCINTGEVEELKQKITRIERALERLKKAFLFDDQAMGEKEYLETKLALETERIAAENRMKDLNEATFSTDAGELAFIKSASSFLLAHQIQTGEHIQYSDFAPLVGDETMKEFLNLVIERIVIQNGRPVEITFKNGLTHKFLYRD

SEQ ID NO: 503 - protein, 585 aa, Unknown
  Description of Unknown: Integrase B504 sequence
  PTHR30461:SF3,cd00338,SM00857,IPR006118,G3DSA:1.10.10.2600, IPR036162,PS51737,G3DSA:3.40.50.1390,IPR006119,IPR038109, PF07508,IPR011109,SSF53041,PTHR30461,PS00397, PS51736,Coil,PF00239
MAFKKTIDTMPTLCRRVAIYIRVSTNHQIDRDSLPLQREELINYAKYALNIEDYEVFEDAGFSAKNTDRPDYQRMMKMIRSGLFSHVLVWKLDRISRNLLDFAAMYEELKRLNVTFVSKNEQFDTSTAMGEAMLKIILVFAELERKMTSERVTATMLSRAASGKWNGGRIPYGFSYDYDTREFSICSEEQKVVLLMCDFYESSHSLLYVARKLNELGHRTRAGNLWSPVQVHKILVNPFSIGDYVYNQTSLSTGTQIPNKEEDFIVFENHHPALFPKERQQKIVSQLSRNSRLKSGSNVSVKRKNIHVFSGMIFCENCGQMLTSSTGKALSGDGWRPSIYLCPSKRRHISEGCHDTTDSTVGEFTINFILNMLNAQRNFALIRTQEDLQRMLLYGKVFDNVDHLGEEGIKEMFTVLSENLPENTKSGLKKKSRKPVANPEVTKLKKEQQKLERAMERLKRLYMYSEDSISEQEYITERNRISEAYEDIEMRLSEISTCERTERSITDQDFIRQATAFIISKKLSGSSYINYRRLAANTDVQILKDFFNSIIDSITINSNGQIGSIVFKNGLLHRFIYSSVDKSQE

SEQ ID NO: 504 - protein, 585 aa, Unknown
  Description of Unknown: Integrase B505 sequence
  SM00857,G3DSA:1.10.10.2600,IPR036162,PF13408,IPR025827, G3DSA:3.40.50.1390,PS51737,IPR006119,IPR038109,PF07508, SSF53041,IPR011109,PTHR30461,Coil,mobidb-lite, cd00338,PF00239
MAYRKITDIKDTIGMRAVFYARVSTAEEEQLNAIELQIEENRGCIKDHGWKLVGEYIDRSKSGTMVKGRDDYQRLYEDLYEDLFDIVVIKDQERLQRNTLDWYLFINRVVQTGKLLFMYMDGKFYSPDDALITGVRAIIAEEFSRNLSKKLHNYHDHRIEKARQGQEIALQGSGNVYGWDKKDGKYYINPEQAKVRRLMCEGIMARKGSTLIAKELNDAGYRNTVGKPWKPMDIPKFVYDCKNVGTMIINKERHDFESKQTIKLPKEEWVYVENALPPIVTQEEWDLICKIHEERVIATGSDRRGKKTSGYSFSGKLVCGICGAPYWRKQRVSKDEYWVCSTKQTKGRRTRKRDSTMGKAGEINPLGCDNENISYNSLMEIMGVVSERLQANTDTIKQDMINWLTKLRKQLLEANGGHTEADLQRELSRKSKLLDAYLDGILNKQEYQKKAEELDERIIQLKAETEKNKANSGDIEEIDKVLANIDEEVSRYVDGNEKLKVEYLLEHLEQVQIFPDKVIVIVPILSEGIVVEKTQYVSREKRCGKNNDAAHYFRAFKERRRRSVAGRRADDKKYSEAEKPDRLCA

SEQ ID NO: 505 - protein, 585 aa, Unknown
  Description of Unknown: Integrase B506 sequence
  PTHR30461:SF3,cd00338,SM00857,IPR006118,G3DSA:1.10.10.2600, IPR036162,PS51737,G3DSA:3.40.50.1390,IPR006119,IPR038109, PF07508,IPR011109,SSF53041,PTHR30461,PS00397, PS51736,Coil,PF00239
MAFKKTIDTMPTLCRRVAIYIRVSTNHQIDRDSLPLQREELINYAKYVLNIEDYEVFEDAGFSAKNTDRPDYQRMMKMIRSGLFSHVLVWKLDRISRNLLDFAAMYEELKRLNVTFVSKNEQFDTSTAMGEAMLKIILVFAELERKMTSERVTATMLSRAASGKWNGGRIPYGFSYNYDTREFSICSEEQKVVLLMCDFYESSHSLLYVSRKLNELGHRTRAGNLWSPVQVHKILVNPFSIGDYVYNQTSLSTGTQIPNKEEDFIVFENHHPALFPKERQQKIVSQLSRNSRLKSGSNVSVKRKNIHVFSGMIFCENCGQMLTSSTGRALSGDGWRPSIYLCPSKRRHISEGCHDTTDSTVGEFTINFILNMLNAQRNFALIRTQEDLQRMLLYGKVFDNVDHLGEEGIREMFTVLSENLPENTKSGLKKKSKKSAANPEVTKLKKEQQKLERAMERLKRLYMYSEDSISEQEYITERNRISEVYEDIEMRLSEISTCERTERSITDQDFIRQATAFIISKKLSGSSYINYRRLAANTDVQILKDFFNSIIDSITINSNGQIGSIVFKNGLLHRFIYSSVDKSQE

SEQ ID NO: 506 - protein, 585 aa, Unknown
  Description of Unknown: Integrase B507 sequence
  PTHR30461:SF3,cd00338,SM00857,G3DSA:1.10.10.2600,IPR036162, PF13408,PS51737,G3DSA:3.40.50.1390,IPR025827,IPR006119, IPR038109,PF07508,IPR011109,SSF53041,PTHR30461, PS51736,Coil,PF00239
MARKKNIAAGLDAVIYARYSSHNQREVSIEQQIAECTKHAAALGLRIVGTYEDRAISGKTDNRPRFQQMMRDAEKGKFQAVVAWKSNRIGRNMLQAMVNEAKLDDYGVKVFYAEEDFDDTAAGRFALRNMMNVNQFYSENMAEDITRGLYDNANKCMANGRQPLGYKRGADGKVMLDEPAAAVVREIFTRVAAGDLFVDIARDLNAKGIKTSKGAAWNKGSFQSICQNERYKGIYIYGNVRIVDGIPRIVSDELWYRVQEAMRMKKNPVGTRHRVGAEDYLLTGKLRCGHCGSYMTGVSGTSRNGELHYYYTCQKRRTEHACNKKNVRRDVIEPAIAQAIKMYCLTDDVIEWMADQTVQYWEKHDNDLQIEALEQQLAENKKATSNMLKAIEMGIITEATRSRMVELETENSKLTAQLSAAKRDVVKINREDLIDELHILRSKDIHDRDVQAELFKDFLVAAYIYDDNRLKLVFSFMGKDNSVEIPLETGEDPPDGKNSPDAKMFVLTPDCSTRTKSTTQKCVVLFVSAKRVRVQFTRESAVHGLQEGHRDLNRPGNLHQKEKHCTEMCGAYLLSACHAKQLMIR

SEQ ID NO: 507 - protein, 585 aa, Unknown
  Description of Unknown: Integrase B508 sequence
  PTHR30461:SF3,SM00857,G3DSA:1.10.10.2600,IPR036162,PS51737, G3DSA:3.40.50.1390,IPR006119,IPR038109,PF07508,SSF53041, IPR011109,PF00239,PTHR30461,PS51736,Coil, cd00338
MDIYEARRTMQTQRKNIFDLNLRVTFYARVSTTRDEQENSIENQIIHFENMIKENKNWTYVSGYADRIRGESAANRVEFQKMVDDAKAGAFDLVLTKEVSRFARNTIDSLTYTRDLLQCGVGVFFQNDNICTIDPDSELRLTIMSSIAADEVRKLSERIKFGHKRAAESGRLLGNSRIFGYTKVNCKLIIDEKEAEMVRLIFNLYETGSWSTRSIATELEKRGYLGRNGTPIHHNTVSGIIQNPKYKGYYCANKVTITDYRTKAQRFNPEEEWIMYKDETGETVPAIVSEDQWNACNVIFKERSSAIKARTRSIKSQSPLSGKIKCSEHGTYWRTSYSNSVSQGKPIYQWICREKKRQTASCCKSFALMESEIYKILNDVYKSIISDIDEWVSEFLKIYESVTTTESGKSKIAVLESNIQKLKVKQDRLLDLYMDEAITKSEYSDKASELNAKLDDAKSELESLKNPDNGESIIDPAKRIKTYIQEICGPESRDMTIDELNDISRVVLDFINVIPVDRQTMKLEIKLKSSELKSVDVSSHRSGRCNCCSGHITKKISPEQQYQFVRSGIKNGMSLYLVYIVCVGF

SEQ ID NO: 508 - protein, 585 aa, Unknown
  Description of Unknown: Integrase B509 sequence
  PTHR30461:SF3,IPR036162,PS51737,IPR011109,PTHR30461, PS00397,PF00239,G3DSA:1.10.10.2600,IPR006119,SSF53041, SM00857,IPR025827,IPR038109,PS51736,cd03768, IPR006118,PF13408,G3DSA:3.40.50.1390,PF07508,Coil
MAYAKLQKSGHLPDPAANMQIVALYVRVSTGYQVERDSLPFQKKELLNYCKHVLHIPPDRIEIFEDAGRSGKNTKRPAYERMMKKVREGLVSHVIVYKIDRITRNLVDFSLMYDDFKYTRVAFISLCEQFDTSSAIGEAVLKIILVFAELERKMTSERVKDIMINRAHEGKWNGARVPYGWEWDTENQFPKHHEVEAVFGRLMYDMYKDTHSTCKVRDYNNTHDVPTKRGGEWTSKTVADFIRNPMNRGDLRYNYRESARGRKKPENEVVYLEGVFPPLVDPVLWDECNEIMDANNRRKFSNSFFTIRSNCNIFAGLLICGECGANFQVTKKDRRRKNGFQPSLYACGAKHQKRSCTAAGCSDVTLGPFVLNYIAAMVQSTNERSNIHTPEELESLLLSRPEFAHIAGIASEGLNNTFAMLSGRPAAAGGSYSPSLFSSSAPSASAADIEELKQKLARITRAQERLKNVYLFDDNAMSEKEYLETKTALDLSRIETENIIQDLLSGTCCSEDDDTEFLKSASSFLLAHEIQNGQHIKYSDFAACVEEEVLKDFVNLVIDHIVIAGGRPIELVFKNGLSHKFLYRD

SEQ ID NO: 509 - protein, 585 aa, Unknown
  Description of Unknown: Integrase B510 sequence
  PTHR30461:SF3,IPR036162,PS51737,IPR011109,PTHR30461, PS00397,PF00239,G3DSA:1.10.10.2600,IPR006119,SSF53041, cd00338,SM00857,IPR038109,mobidb-lite,PS51736, IPR006118,G3DSA:3.40.50.1390,PF07508,Coil
MAFKKTIDTMPTLCRRVAIYIRVSTNHQIDRDSLPLQREELINYAKYALNIEDYEVFEDAGFSAKNTDRPDYQRMMKMIRSGLFSHVLVWKLDRISRNLLDFAAMYEELKRLNVTFVSKNEQFDTSTAMGEAMLKIILVFAELERKMTSERVTATMLSRAASGKWNGGRIPYGFSYNYDTREFSICSEEQKVVLLMCDFYESSHSLLYVSRKLNELGHRTRAGNLWSPVQVHKILVNPFSIGDYVYNQTSLSTGTQIPNKEEDFIVFENHHPALFPKERQQKIVSQLSRNSRLKSGSNVSVKRKNIHVFSGMIFCENCGQMLTSSTGKALSGDGWRPSVYLCPSKRRHISEGCHDTTDSTVGEFTINFILNMLNAQRNFALIRTQEDLQRMLLYGKVFDNVDHLSEEGLSEMFTVLSENLPSSTKSGLKKKSKKPAANPEVTKLKKEQQKLERAMERLKRLYMYSEDSISEQEYITERNRISEAYEDIEMRLSEISTCERTERSITDQDFIRQATAFVISKKLSGSSYINYRRLAANTDVQILKDFFNSIIDSITINSNGQIGSIVFKNGLLHRFIYSSVEKSQE

SEQ ID NO: 510 - protein, 585 aa, Unknown
  Description of Unknown: Integrase B511 sequence
  PTHR30461:SF3,IPR036162,PS51737,IPR011109,PTHR30461, PS00397,PF00239,G3DSA:1.10.10.2600,IPR006119,SSF53041, SM00857,IPR025827,IPR038109,PS51736,cd03768, IPR006118,PF13408,G3DSA:3.40.50.1390,PF07508,Coil
MAYAAMRRAGLVPAAAPDLRIVALYVRVSTGYQVDKDSLPFQKKELKNYCEHVLHIPADRIEIFEDAGKSGKNTKRPGFERMMKKVKAGQVSHVLVYKIDRISRNLVDFSLMYDDFRESRVTFISLNEQFDTSSAIGEAVLKIILVFAELERKLTSERVTDIMINRALAGEWNGARVPYGWDWDEEGKKPVHSETEAVFARLMYELYDKTRSTCKVRDYCNTHSIPTKRGGEWTSKTVADFIRNPLNRGDYRYNYRGSARGKKKPESEVVYVPGIFPPLVDPEVWDRCNKIMTENAAKRHCIGVSHQRKHVHPFASLLYCGACGAAFQVAKTDKPRLNGFRPVMYRCGARYRKNTCDAPGCSDVTVGPFVFNYVSAMVRAAGQRRKIETPAELEKLLLSDPVFENVAGIATEGLDATFALLSGRPAAAGASFVPDLLTVSSGATDTSELDELRQKVTRLDRALDRLKKLFLFDETAMDEKEYLESKMQLTVERTAAENRIRELEDLSFTTSSSELSFIRSASSFLLAHELQAGAHIQYSDFAPLIGNETLKEFLNLVIGRVTIRDGRVSEITFANGLTHVFLYRD

SEQ ID NO: 511 - protein, 585 aa, Unknown
  Description of Unknown: Integrase B512 sequence
  PTHR30461:SF3,cd00338,SM00857,IPR006118,G3DSA:1.10.10.2600, IPR036162,PS51737,G3DSA:3.40.50.1390,IPR006119,IPR038109, PF07508,IPR011109,SSF53041,PTHR30461,PS00397, PS51736,Coil,PF00239
MAFKKTIDTMPTLCRRVAIYIRVSTNHQIDRDSLPLQREELINYAKYVLNIEDYEVFEDAGFSAKNTDRPDYQRMMKMIRSGLFSHVLVWKLDRISRNLLDFAAMYEELKRLNVTFVSKNEQFDTSTAMGEAMLKIILVFAELERKMTSERVTATMLSRAASGKWNGGRIPYGFSYNYDTREFSICSEEQKVVLLMCDFYESSHSLLYVSRKLNELGHRTRAGNLWSPVQVHKILVNPFSIGDYVYNQTSLSTGTQIPNKEEDFIVFENHHPALFPKERQQKIVSQLSRNSRLKSGSNVSVKRKNIHVFSGMIFCENCGQMLTSSTGRALSGDGWRPSIYLCPSKRRHISEGCHDTTDSTVGEFTINFILNMLNAQRNFALIRTQEDLQRMLLYGKVFDNVDHLGEEGIKEMFTVLSENLPENTKSGLKKKSRKPAANPEVTKLKKEQQKLERAMERLKRLYMYSEDSISEQEYITERNRISESYEDIEIRLSEISTCERTERSISDQDFIRQATAFIISKKLSGSSYINYRRLAANTDVQILKDFFNSIIDSITINSNGQIGSIVFKNGLLHRFIYSSVDKSQE

SEQ ID NO: 512 - protein, 585 aa, Unknown
  Description of Unknown: Integrase B513 sequence
  PTHR30461:SF3,cd00338,SM00857,IPR006118,G3DSA:1.10.10.2600, IPR036162,PS51737,G3DSA:3.40.50.1390,IPR006119,IPR038109, PF07508,SSF53041,IPR011109,PTHR30461,PS00397, PS51736,Coil,PF00239
MAFKKTIDTMPTLCRRVAIYIRVSTNHQIDRDSLPLQREELINYAKYALNIEDYEVFEDAGFSAKNTDRPDYQRMMKMIRSGLFSHVLVWKLDRISRNLLDFAAMYEELKRLNVTFVSKNEQFDTSTAMGEAMLKIILVFAELERKMTSERVTATMLSRAASGKWNGGRIPYGFSYNYDTREFSICSEEQKVVLLMCDFYESSHSLLYVSRKLNELGHRTRAGNLWSPVQVHKILVNPFSIGDYVYNQTSLSTGTQIPNKEEDFIVFENHHPALFPKERQQKIVSQLSRNSRLKSGSNVSVKRKNIHVFSGMIFCENCGQMLTSSTGRALSGDGWRPSIYLCPSKRRHISEGCHDTTDSTVGEFTINFILNMLNAQRNFALIRTQEDLQRMLLYGKVFDNVDHLGEEGIREMFTVLSENLPENKKSGLKKKSKKPAANPEVTKLKKEQQKLERAMERLKRLYMYSEDSISEQEYITERNRISEVYEDIEMRLSEISTCERTERSITDQDFIRQATAFIISKKLSGSSYINYRRLAANTDVQILKDFFNSIIDSITINSNGQIGSIVFKNGLLHRFIYSSVDKSQE

SEQ ID NO: 513 - protein, 585 aa, Unknown
  Description of Unknown: Integrase B514 sequence
  PTHR30461:SF3,IPR036162,PS51737,IPR011109,PTHR30461, PS00397,PF00239,G3DSA:1.10.10.2600,IPR006119,SSF53041, SM00857,IPR025827,IPR038109,PS51736,cd03768, IPR006118,PF13408,G3DSA:3.40.50.1390,PF07508,Coil
MKQSKKVSDKLSNQKCALYVRVSTHWQIDKDSLPVQREDLINYSKYALNIDKYEIFEDAGYSAKNTDRPAFQQMMARLRTGEFSHLVVWKIDRISRNLLDFAEMYAEIKKLGITFVSKNEQFDTSNAMGEAMLKIILVFAELERNMTSERVTAVMLSRASNGQWNGGRVPYGYNYDKETGLFSINEAEASVINMIYDTYERVHSLLVVARTLNEKGILPRSGTPWSPTTISTILKNPFYTGAYRYNYHDESKSGGNTSSKFLKPKADWISVQEHHPAIVSAERQERVCAILEDNRRSNKRSSKTYVRKNIHIFAGILYCGYCGNQMQSTIDRERADGYRPSIYACSRKRRFDDCENKYISDVVVAPFVLNYIANVIKAQNNFGKSTSIETFERKLLRGPTFSEVEHIEQVGLQEMYDMLRSGISDAVYTSRTLSDIAGAEELADERDLLLAEHRKKERALARLKSLYLYNDEAISESDYIIERKNLSDSIASIDKRLEEIEKHSSRQFTLSDDEFLAKASMFIMTHHLQDKRYVDFEKLIRKVEPIIIKEFINSVTQKIVIKQGRIISIRFKNGIEHKFLYKTQE

SEQ ID NO: 514 - protein, 585 aa, Unknown
  Description of Unknown: Integrase B515 sequence
  PTHR30461:SF3,cd00338,SM00857,IPR006118,G3DSA:1.10.10.2600, IPR036162,PS51737,G3DSA:3.40.50.1390,IPR006119,IPR038109, PF07508,IPR011109,SSF53041,PTHR30461,PS00397, PS51736,Coil,PF00239
MALKKTIDTMPTLCRRVAIYIRVSTNHQIDRDSLPLQREELINYAKYALNIEDYEVFEDAGFSAKNTDRPDYQRMMKMIRSGLFSHVLVWKLDRISRNLLDFAAMYEELKRLNVTFVSKNEQFDTSTAMGEAMLKIILVFAELERKMTSERVTATMLSRAASGKWNGGRIPYGFSYNYDTREFSICSEEQKVVLLMCDFYESSHSLLYVSRRLNELGHRTRAGNLWSPVQVHKILVNPFSIGDYVYNQTSLSTGTQIPNKEEDFIVFENHHPALFPKERQQKIVSQLSRNSRLKSGSNVSVKRKNIHVFSGMIFCENCGQMLTSSTGKALSGDGWRPSIYLCPSKRKHISEGCHDTTDSTVGEFTINFILNMLNAQRNFALIRTQEDLQRMLLYGKVFDNVDHLGEEGIREMFTVLSENLPENTKSGLKKKSRKPAANPEVTKLKKEQQKLERAMERLKRLYMYSEDSISEQEYITERNRISEAYEDIEMRLSEISTCERTERSITDQDFIRQATAFIISKKLSGSSYINYRRLAANTDVQILKDFFNSIIDSITINSSGQIGSIVFKNGLLHRFIYSSVDKSQE

SEQ ID NO: 515 - protein, 585 aa, Unknown
  Description of Unknown: Integrase B516 sequence
  cd03768,SM00857,IPR006118,G3DSA:1.10.10.2600,IPR036162, PS51736,PS51737,G3DSA:3.40.50.1390,IPR006119,IPR038109, PF07508,SSF53041,IPR011109,PTHR30461,PS00397, mobidb-lite,Coil,PF00239
MKDIVAYLRVSTEAQDFERQRVDIDNWCRINEWKLNNTFTDKLSGFVEEREGLSELKEYLITNNIKNVIVWELSRLGRDKFNLMTLFKWFVDNQINIFFYTQNFWLLDVNGNLSSNVSLQIMILSNYAETEALMIKERMKSGKERAKKEGRWVHGAVAIGYKLSDDKRVYIDEENAKYVRQAFQLYANGDTSIKQLAVYCIKNNFPSSFGNYQSLRFILKNMIYTGQLNYVNIPAIIDIELYMKVQSIMEEKHTNKNKEYNNNKFLLEKLVTCPKCGAKYGGGGGHRYSCVNRVSSSAKVKCKSSSFDVRVLDAIVWYITKQIAAAQELYVQSNEEQIKDFEQQKELLNNKLETLEKKKKKQNTKFDLDAISIDEYKVIIKNLNSQINLIKNEIESLNIKINQSNFEMQNNNRATRVANNMDALNKLRDLETMRNLMKIIFKSIHVYKYHNNFNIIELETRMNYIYCFYNSHSSRNKTFTTNIALKQCWDDENKLLNDKNIDAEFYRDGIPIEIISDYKYKVKSQETIDKKRAQARERERRYRENRREEYNKHARELRHKRNELKKEAEERRNNISISKPKSKPD

SEQ ID NO: 516 - protein, 585 aa, Unknown
  Description of Unknown: Integrase B517 sequence
  PTHR30461:SF3,IPR036162,PS51737,IPR011109,PTHR30461, PF00239,G3DSA:1.10.10.2600,IPR006119,SSF53041,cd00338, SM00857,IPR025827,IPR038109,mobidb-lite,PS51736, PF13408,G3DSA:3.40.50.1390,PF07508,Coil
MAKKKKPAGGNAIIYARYSSHNQRDVSIEQQIEACRKHAAELGLTITDTYEDRAISGRTDNRPAFQRMMRDAEDGKFQYVLAWKSNRMGRNMMQAMVNESRLMDCGVKVFYAEEDFDDSAAGRFALRSMMNVNQFYSDNLAEDVRRGLMDNASKCMANGRQPLGYKRGEDGKVVVDEPAAAIVREIYTRIASGEMFMDIARDLNRRGIKTQSGSEWNKSSFKVLCRNERYRGIYIYGDTRIEGGIPPIVDDVLWYKVQEVLKVKKSKNRHHCPSDEDYLLTGKLRCGKCGGYMIGMSGRSKTGDVHHYYACQNRRVGHTCDKKNIRRDVVEPAVAQAIKQYCLTDDAIEWITDQTIAYWEDEDRKLQIDSIENDLSAVQSSISNVMKAIEMGVITETTRDRLIELERQQTDLKSKLALAKEEIVHVDRKDLISSLLAFRHGNVHDRAYQEKLFNAFLIAVYVYDDDHLKLVFNSFGKDDTVNIALDLGENDDNSGLSDVSKSSPILSNGQPKKNQSNMFGWFFFLFVSPMNRSAPLSRFTASVQKPQIETAEHFILWFCETLFKQQNQDRPFNASPFGRGGIAKQ

SEQ ID NO: 517 - protein, 585 aa, Unknown
  Description of Unknown: Integrase B518 sequence
  PTHR30461:SF3,IPR036162,PS51737,IPR011109,PTHR30461, PS00397,PF00239,G3DSA:1.10.10.2600,IPR006119,SSF53041, SM00857,IPR025827,IPR038109,PS51736,cd03768, IPR006118,PF13408,G3DSA:3.40.50.1390,PF07508,Coil
MKQSKNVSDKLSNQKCALYVRVSTHWQIDKDSLPVQREDLINYAKYALNIDKYEIFEDAGYSAKNTDRPAFQQMMARLRTGEFSHLVVWKIDRISRNLLDFAEMYAEIKKLGITFVSKNEQFDTSNAMGEAMLKIILVFAELERNMTSERVTAVMLSRASNGQWNGGRVPYGYNYDKETGLFSINEAEASVINMIYDTYERVHSLLVVARTLNEKGILPRSGTPWSPTTISTILKNPFYTGAYRYNYHDESKSGGNTSSKFLKPKADWISVQEHHPAIVSAERQERVCAILEDNRRSNKRSSKTYVRKNIHIFAGILYCGYCGNQMQSTIDRERADGYRPSIYACSRKRRFDDCENKYISDVVVAPFVLNYIANVIKAQNNFGKSTSIETFERKLLRGPTFSEVEHIEQVGLQEMYDMLRSGISDAVYTSRTLSDIAGAEELADERDLLLAEHRKKERALARLKSLYLYNDEAISESDYIIERKNLSDSIASIDKRLEEIEKHSSRQFTLSDDEFLAKASMFIMTHHLQDKRYVDFEKLIRKVEPIIIKEFINSVTQKIVIKQGRIISIRFKNGIEHKFLYKTQE

SEQ ID NO: 518 - protein, 585 aa, Unknown
  Description of Unknown: Integrase B519 sequence
  PTHR30461:SF3,cd00338,SM00857,G3DSA:1.10.10.2600,IPR036162, PF13408,IPR025827,G3DSA:3.40.50.1390,PS51737,IPR006119, IPR038109,PF07508,SSF53041,IPR011109,PTHR30461, mobidb-lite,Coil,PF00239
MPRKPAKHPAKPKRGKKLEIEEPGVLYGRYSSHNQKDISVEQQFEKGYELAAEYGIRIIDTYADRAVSGRTDKRRDFQRMMTDAAKGKFRYVIAWKSNRMGRNMLEALINEARLQDLGVRVLYVEEDFDDTAAGRFAARSMMNVNQFYSENMAEDIKRGLYDNAANCMVANGHLPYGYKADETLHYAIDEPKAAVIREIFTRVSCGEAFVDIMASLNARGIKTSYGRPWGRSSFQKILSNERYRGIYIYGDVRKEGGIPRIVSDELYFKVQEVITTKKNPQGRHRVNGDYLLTGKLFCGHCKSPMTGVSGTGRSGNLHYYYVCQKRRTEKTCDKKNVRRDEIELQVAQAIKDYALKDDVIEWIADSTVAYNERKEAESKVGILEDQLAGTEHGIKNIMSAIEQGIITETTKSRLVELESERATIKAKIAAARADIVTVSRDDIISGLEMFRDGDVHDKKYQARLFDTFLVAVYAYDDDLRLVFSFSGNKNTIQIPIESAVNAVENNEAECSFKLCSAPPKIPIVLLDGRYFSLRGRWSRSLSPSGEIHLPPPKIPITRLGGRYFLCLLPAGTVGPCAAFSSRRRC

SEQ ID NO: 519 - protein, 584 aa, Unknown
  Description of Unknown: Integrase B520 sequence
  PTHR30461:SF3,SM00857,G3DSA:1.10.10.2600,IPR036162,PF13408, PS51737,IPR025827,G3DSA:3.40.50.1390,IPR006119,IPR038109, PF07508,IPR011109,SSF53041,PF00239,PTHR30461, PS51736,Coil,cd00338
MARKKNIAAGQNAVIYARYSSHNQREVSIEQQVRECMKHAAELGLHVVGTYEDRAISGKTDKRPNFQRMMRDAEKGKFQAVVAWKSNRIGRNMLQAMVNEAKLEDCGVKVFYAEEDFDDTAAGRFALRNMMNVNQFYSENMAEDITRGLYDNASKCMANGRQPLGYKRGEDGRVVLDEANAAVVREIFTRVAAGDLFVDIARDLNAQGIKTSKGANWNKGSFQSICQNERYRGIYIYGDVRVADGIPRIVSDDLWYRVQEAMRMKKNPVGTRHRVGAEDYLLTGKLRCGHCGSYMTGVSGTSRNGELHYYYTCQKRRTEHACDKKNIRRDVIEPAVAQAIKMYCLTDDVIAWIADRTVEYWEKHDNDLQIEALEQQLEENKKATSNMLKAIEMGIITEATRTRMVELETEQSRLSVQLNVAKEDVVKIDREQIISYLELLQQGDIHDRDFQMELFKNFLVAVYVYDDNRMKLVFSCMGDQNSVEIPLETGEDPPDGGLSPDAKMFVLTPDSSTKKALYFVGSMVLFFLLKLVFGGCIASPAPFLGFCRRFLYNPQLLTLHRFQKGMFAGRFFSRLLHHPLQCTA

SEQ ID NO: 520 - protein, 584 aa, Unknown
  Description of Unknown: Integrase B521 sequence
  PTHR30461:SF3,SM00857,G3DSA:1.10.10.2600,IPR036162,PF13408, PS51737,IPR025827,G3DSA:3.40.50.1390,IPR006119,IPR038109, PF07508,IPR011109,SSF53041,PTHR30461,PS51736, cd00338,PF00239
MRCLPLQHSTLFGYGQAKAPALVRCSAGDNMECSTKPDKENFMLAGVSIPRSLHMGNRPEGSVIMPRKKSTAADAPRLVAYYRYSGGSRQTEQSIEGQRRDCEAYARAHGMTILREYVDRHISGKTDDRPAFQQLVADSAAHTFDAVICWKTDRLARNRYDSAVYKKKLRDNGVEILYAAESNISGAEGIIIEGLMEALAEYYSAELAEKARRGMRESALKGKALGSSRPLGLTVDADKHYIIEPTGAEAVRYIFEQYAAGLSSSSIVERLNAMGLRTSHGGPFNKSSINRIIQNEMYRGVYVSKKFDVRIEGAIPAIIDNDLWERAQKMFERNRQSRTPHASRADYILSGKLYCGECGCLMKGVCGRSSGNGQMYHYYACPGRSIGRACTRKNIPQDELEAMVVNSVADLLLEPDLLEQIADAIVELQQAEAARPDPEKQALEKSLSDVRSKIQNILTAIENGTSSAALSARLADLEQQESTLSYQLSSLTAKKPLTFTRDQILFLLQQFRVSPSERTKAYCRRLVDTFVDHIELTNTELILYFNISDETIDKNKKAPRSNPSKESSTEKRLVRVARIELTAS

SEQ ID NO: 521 - protein, 584 aa, Unknown
  Description of Unknown: Integrase B522 sequence
  SM00857,G3DSA:1.10.10.2600,IPR036162,PF13408,IPR025827, G3DSA:3.40.50.1390,PS51737,IPR006119,IPR038109,PF07508, SSF53041,IPR011109,PTHR30461,Coil,cd00338, PF00239
MAYRKITDIRDTIGMRAVFYARVSTAEEEQLNAIELQIEENRGCIKDHGWKLVGEYIDRSKSGTMVKGRDDYQRLYEDLYEDLFDIVVIKDQERLQRNTLDWYLFINRVVQTGKLLFMYMDGKFYSPDDALITGVRAIIAEEFSRNLSKKLHNYHDHRIEKARQGQEIALQGSGNVYGWDKKDGKYYINPEQAKVRRLMCEGIMARKGSTLIAKELNDAGYRNTVGKPWKPMDIPKFVYDCKNVGTMIINKERHDFESKQTIKLPKEEWVYVENALPPIVTQEEWDLICKIHEERVIATGSDRRGKKTSGYSFSGKLVCGICGAPYWRKQRVSKDEYWVCSTKQTKGRRTRKRDSTMGKAGEINPLGCDNENISYNSLMEIMGVVSERLQANTDTIKHDMINWLTKLRKQLLEANGGHTEADLQRELSRKSKLLDAYLDGILNKQEYQKKAEELDERIIQLKAETEKNKANSGDIAEIDKVLANIDEEVSRYVDGNEKLKVEYLLEHLEQVQIFPDKVIVIVPILSEGIVVEKTQYVSREKRCRQDYLYENDRRSGKADKRRNIYVWIHRKGFVEGTLKSGLPD

SEQ ID NO: 522 - protein, 584 aa, Unknown
  Description of Unknown: Integrase B523 sequence
  PTHR30461:SF3,IPR036162,PS51737,IPR011109,PTHR30461, PS00397,PF00239,G3DSA:1.10.10.2600,IPR006119,SSF53041, SM00857,IPR025827,IPR038109,PS51736,cd03768, IPR006118,PF13408,G3DSA:3.40.50.1390,PF07508,Coil
MPISKPAFDLIQKVAIYIRVSTQYQVDRASLPVQREELIAYCKYVLGIDSFEVFEDPGYSAKNTDRPDYQRMINRVRTGEFSHILVWKIDRISRNLLDFAAMYAELKKLGVTFVSKNEQFDTSSAMGEAMLKIILVFAELERNMTSERVSAIMLSRANGGVWNGGKIPFGYSYDKEQKVFHVLDDEAKIVLYIYDLYESIQSLTTVAKQLNEKGIRSRTGKPWNPVTVRTMLTNPFYAGTYRYNYRDESSRTYAVKPKDEWVMVEDHHPAIVTRERQNHIAGILEKRRRSNFDSRTYQRKNTHIFGGLLRCGYCGSMMSATSDRARSDGWRPSQYLCTRRRRFNDCTNKYITDMTIGPFVFNFIANMIRASKSFGKSTSIETLEKKLLRGEALAAVDHIGRPGLEELYNHLRSGFSEMPFDAPSAAAAESAANIQERELLLSEKRRLERALNRLRTLYLYSDDSMPEKDYIVERKQLMDSLDEVDAKLEAAEKVAADAISLSDEEFMAKASYFILSQQLQDKRFIDYERFIRKIDPKIVKDFLNSIATNFCIKDGLTTSILFRNGLELQFFYKPAETAKSPETF

SEQ ID NO: 523 - protein, 584 aa, Unknown
  Description of Unknown: Integrase B524 sequence
  SM00857,G3DSA:1.10.10.2600,IPR036162,PF13408,IPR025827, G3DSA:3.40.50.1390,PS51737,IPR006119,IPR038109,PF07508, SSF53041,IPR011109,PTHR30461,Coil,cd00338, PF00239
MAYRKITDIRDTIGMRAVFYARVSTAEEEQLNAIELQIEENRGCIKEHGWKLVGEYIDRSKSGTMVKGRDDYQRLYEDLYEDLFDIVVIKDQERLQRNTLDWYLFINRVVQTGKLLFMYMDGKFYSPDDALITGVRAIIAEEFSRNLSKKLHNYHDHRIEKARQGQEIALQGSGNVYGWDKKDGKYYINPEQAKVRRLMCEGIMARKGSTLIAKELNDAGYRNTVGKPWKPMDIPKFVYDCKNVGTMIINKERHDFESKQTIKLPKEEWVYVENALPPIVTQEEWDLICKIHEERVIATGSDRRGKKTSGYSFSGKLVCGICGAPYWRKQRVSKDEYWVCSTKQTKGRRTRKRDSTMGKAGEINPLGCDNENISYNSLMEIMGVVSERLQANTDTIKHDMINWLTKLRKQLLEANGGHTEADLQRELSRKSKLLDAYLDGILNKQEYQKKAEELDERIIQLKAETEKNKANSGDIAEIDKVLANIDEEVSRYVDGNEKLKVEYLLEHLEQVQIFPDKVIVIVPILSDGIVVEKAQYVSREKRCRQDYLYENDRWSGKADKRRDIHVWIRWKGFVKGTLKSGLPD

SEQ ID NO: 524 - protein, 584 aa, Unknown
  Description of Unknown: Integrase B525 sequence
  PTHR30461:SF3,IPR036162,PS51737,IPR011109,PTHR30461, PF00239,G3DSA:1.10.10.2600,IPR006119,SSF53041,cd00338, SM00857,IPR025827,IPR038109,mobidb-lite,PS51736, PF13408,G3DSA:3.40.50.1390,PF07508,Coil
MAQQKKAAGAEFDGTPRAVIYARYSSTHQRERSIEDQIADCRAYAERCGLMVVGIYADRAISGKTDERPDFQRMIDDSKKRQFDRVIVWKLDRFARNRYDSALYKHKLKQNGVSVLSAMENIGEGDESIILEAILEASAEYYSRDLRKKVLRGMTTSAKKGLHNTGSVPYGYRLEGESAVPDGDRAEFVKHVFEAYAKGETPAELYREMQRRGLDTKVNGRKVSDNIIGSILRNEKYTGRGMWRGIPVEWPRLICDELFEAARARTKKNRRAPAAYKAAEPFILCGKAFCGYCGAPLMSGGGKGRSGKYYRHYICRTKKRERACGKKTEDKDFLEWYIVEQTCAYVLAPERLEYIADRVVECYKESFDGQRVSALEARIAKLDRDLDKTTDLLFAAPSAAAVDRINKHVVELEAQKSELEAELSGLKIAAAITYTRDEVVAWLKQFCNGDPLEAEFRRRIVETFINSVYVYDDRIVIYFNVRGGKQISYAEMLESAGDVEPLPPGPESKKSGGPDNGTAASNSKERFLHGKNTEQTAESAVRFCSGLVHHKSSASSEAELFVMCSRSYRTEGDRRLKLMKQTRI

SEQ ID NO: 525 - protein, 584 aa, Unknown
  Description of Unknown: Integrase B526 sequence
  SM00857,G3DSA:1.10.10.2600,IPR036162,PF13408,IPR025827, G3DSA:3.40.50.1390,PS51737,IPR006119,IPR038109,PF07508, SSF53041,IPR011109,PTHR30461,Coil,cd00338, PF00239
MAYRKITDIKDTIGMRAVFYARVSTAEEEQLNAIELQIEENRGCIKDHGWKLVGEYIDRSKSGTMVKGRDDYQRLYEDLYEDLFDIVVIKDQERLQRNTLDWYLFINRVVQTGKLLFMYMDGKFYSPDDALITGVRAIIAEEFSRNLSKKLHNYHDHRIEKARQGQEIALQGSGNVYGWDKKDGKYYINPEQAKVRRLMCEGIMARKGSTLIAKELNDAGYRNTVGKPWKPMDIPKFVYDCKNVGTMIINKERHDFESKQTIKLPKEEWVYVENALPPIVTQEEWDLICKIHEERVIATGSDRRGKKTSGYSFSGKLVCGICGAPYWRKQRVSKDEYWVCSTKQTKGRRTRKRDSTMGKAGEINPLGCDNENISYNSLMEIMGVVSERLQANTDTIKQDMINWLTKLRKQLLEANGGHTEADLQRELSRKSKLLDAYLDGILNKQEYQKKAEELDERIIQLKAETEKNKANSGDIAEIDKVLANIDEEVARYVDGNEKLKVEYLLEHLEQVQIFPDKVIVIVPILSEGIVVEKTQYVSREKRCRQDYLYENDRWSGKADKRRDIHVWIRWKGFVKGTLKSGLPD

SEQ ID NO: 526 - protein, 584 aa, Unknown
  Description of Unknown: Integrase B527 sequence
  SM00857,G3DSA:1.10.10.2600,IPR036162,PF13408,IPR025827, G3DSA:3.40.50.1390,PS51737,IPR006119,IPR038109,PF07508, SSF53041,IPR011109,PTHR30461,Coil,cd00338, PF00239
MAYRKITDIRDTIGMRAVFYARVSTAEEEQLNAIELQIEENRGCIKDHGWKLVGEYIDRSKSGTMVKGRDDYQRLYEDLYEDLFDIVVIKDQERLQRNTLDWYLFINRVVQTGKLLFMYMDGKFYSPDDALITGVRAIIAEEFSRNLSKKLHNYHDHRIEKARQGQEIALQGSGNVYGWDKKDGKYYINPEQAKVRRLMCEGIMARKGSTLIAKELNEAGYRNTVGKLWKPMDIPKFVYDCKNVGTMIINKERHDFESKQTIKLPKEEWVYVENALPPIVTQEEWDLICKIHEERVIATGSDRRGKKTSGYSFSGKLVCGICGAPYWRKQRVSKDEYWVCSTKQTKGRRTRKRDSTMGKAGEINPLGCDNENISYNSLMEIMGVVSERLQANTDTIKHDMINWLTKLRKQLLEANGGHTEADLQRELSRKSKLLDAYLDGILNKQEYQKKAEELDERIIQLKAETEKNKANSGDIAEIDKVLANIDEEVSRYVDGNEKLKVEYLLEHLEQVQIFPDKVIVIVPILSEGIVVEKTQYVSREKRCRQDYLYENDRWSGKADKRRDIHVWIRWKGFVKGTLKSGLPD

SEQ ID NO: 527 - protein, 584 aa, Unknown
  Description of Unknown: Integrase B528 sequence
  SM00857,G3DSA:1.10.10.2600,IPR036162,PF13408,IPR025827, G3DSA:3.40.50.1390,PS51737,IPR006119,IPR038109,PF07508, SSF53041,IPR011109,PTHR30461,Coil,cd00338, PF00239
MAYRKITDIRDTIGMRAVFYARVSTAEEEQLNAIELQIEENRGCIKDHGWKLVGEYIDRSKSGTMVKGRDDYQRLYEDLYEDLFDIVVIKDQERLQRNTLDWYLFINRVVQTGKLLFMYMDGKFYSPDDALITGVRAIIAEEFSRNLSKKLHNYHDHRIEKARQGQEIALQGSGNVYGWDKKDGKYYINPEQAKVRRLMCEGIMARKGSTLIAKELNDAGYRNTVGKPWKPMDIPKFVYDCKNVGTMIINKERHDFESKQTIKLPKEEWVYVENALPPIVTQEEWDLICKIHEERVIATGSDRRGKKTSGYSFSGKLVCGICGAPYWRKQRVSKDEYWVCSTKQTKGRRTRKRDSTMGKAGEINPLGCDNENISYNSLMEIMGVVSERLQANTDTIKQDMINWLTKLRKQLLEANGGHTEADLQRELSRKSKLLDAYLDGILNKQEYQKKAEELDERIIQLKAETEKNKVNSGDIAEIDKVLANIDEEVSRYVDGNEKLKVEYLLEHLEQVQIFPDKVIVIVPILSEGIVVEKTQYVSREKRCRQDYLYENDRWSGKADKRRDIHVWIRWKGFVKGTLKSGLPD

SEQ ID NO: 528 - protein, 584 aa, Unknown
  Description of Unknown: Integrase B529 sequence
  PTHR30461:SF3,cd00338,SM00857,G3DSA:1.10.10.2600,IPR036162, PF13408,PS51737,IPR025827,G3DSA:3.40.50.1390,IPR006119, IPR038109,PF07508,IPR011109,SSF53041,PTHR30461, PS51736,Coil,PF00239
MARKKNIAAGLDAVIYARYSSHNQREVSIEQQIAECTKHAAALGLRIVGTYEDRAISGKTDNRPRFQQMMRDAEKGKFQAVVAWKSNRIGRNMLQAMVNEAKLDDYGVKVFYAEEDFDDTAAGRFALRNMMNVNQFYSENMAEDITRGLYDNASKCMANGRQPLGYKRGEDGRVVLDEANAAVVREIFTRVAAGDLFVDIARDLNAQGIKTSKGANWNKGSFQSICQNERYRGIYIYGDVRVADGIPRIVSDDLWYRVQEAMRMKKNPVGTRHRVGAEDYLLTGKLRCGHCGSYMTGVSGTSRNGELHYYYTCQKRRTEHACDKKNIRRDVIEPAVAQAIKMYCLTDDVIAWIADRTVEYWEKHDNDLQIEALEQQLEENKKATSNMLKAIEMGIITEATRTRMVELETEQSRLSVQLNVAKEDVVKIDREQIISYLELLQQGDIHDRDFQMELFKNFLVAVYVYDDNRMKLVFSCMGDQNSVEIPLETGEDPPDGGLSPDAKMFVLTPDSSTKKALYFVGSTVLFFLLKLVFGGCIASPAPFLGFCRRFLYNPQLLTLHHFQKGMFAARFFSRLLHHPLQCTA

SEQ ID NO: 529 - protein, 584 aa, Unknown
  Description of Unknown: Integrase B530 sequence
  SM00857,G3DSA:1.10.10.2600,IPR036162,PF13408,PS51737, G3DSA:3.40.50.1390,IPR025827,IPR006119,IPR038109,PF07508, SSF53041,IPR011109,PTHR30461,Coil,cd00338, PF00239
MAYRKITDIKDTIGMRAVFYARVSTAEEEQLNAIELQIEENRGCIKDHGWKLVGEYIDRSKSGTMVKGRDDYQRLYEDLYEDLFDIVVIKDQERLQRNTLDWYLFINRVVQTGKLLFMYMDGKFYSPDDALITGVRAIIAEEFSRNLSKKLHNYHNHRIEKARQGQEIALQGSGNVYGWDKKDGKYYINPEQAKVRRLMCEGIMARKGSTLIAKELNEAGYRNTVGKPWKPMDIPKFVYDCKNVGTMIINKERHDFESKQTIKLPKEEWVYVENALPPIVTQEEWDLICKIHEERVIATGSDRRGKKTGGYSFSGKLVCGICGAPYWRKQRVSKDEYWVCSTKQTKGRKTRKRDSTMGKAGEINPLGCDNENISYNSLMEIMGVVSERLQANTDTIKQDMINWLTKLRKQLLEANGGHTEADLQRELSRKSKLLDAYLDGILNKQEYQKKAEELDERIIQLKAETEKNKANAGDLAEIDKVLANIDEEVARYVDGNEKLKVEYLLEHLEQVQIFPDKVIVIVPILSEGIVVEKTQYVSREKRCRQDYLYENDRWSGKADKRRDIHVWIRWKGFVKGTLKSGLPD

SEQ ID NO: 530 - protein, 584 aa, Unknown
  Description of Unknown: Integrase B531 sequence
  SM00857,G3DSA:1.10.10.2600,IPR036162,PF13408,IPR025827, PS51737,G3DSA:3.40.50.1390,IPR006119,IPR038109,PF07508, SSF53041,IPR011109,PTHR30461,Coil,cd00338, PF00239
MAYRKITDIKDTIGMRAVFYARVSTAEEEQLNAIELQIEENRGCIKDHGWKLVGEYIDRSKSGTMVKGRDDYQRLYEDLYEDLFDIVVIKDQERLQRNTLDWYLFINRVVQTGKLLFMYMDGKFYSPDDALITGVRAIIAEEFSRNLSKKLHNYHDHRIEKARQGQEIALQGSGNVYGWDKKDGKYYINPEQSKVRRLMCEGIMARKGSTLIAKELNEAGYRNTVGKPWKPMDIPKFVYDCKNVGTMIINKERHDFESKQTIKLPKEEWVYVENALPPIVTQEEWDLICKIHEERVIATGSDKRGKKTSGYSFSGKLVCGICGAPYWRKQRVSKDEYWVCSTKQTKGRRTRKRDSTMGKAGEINPLGCDNENISYNSLMEIMGVVSERLQANTDTIKQDMINWLTKLRKQLLEANGGHTEADLQREISRKSKLLDAYLDGILNKQEYQKKAEELDERIIQLKAETEKNKANSGDIAEIDKVLANIDEEVARYVDGNEKLKVEYLLEHLEQVQIFPDKVIVIVPILSEGIVVEKTQYVSREKRCRQDYLYENDRWSGKADKRRDIHVWIRWKGFVKGTLKSRLPD

SEQ ID NO: 531 - protein, 584 aa, Unknown
  Description of Unknown: Integrase B532 sequence
  PTHR30461:SF3,SM00857,G3DSA:1.10.10.2600,IPR036162,PF13408, IPR025827,G3DSA:3.40.50.1390,PS51737,IPR006119,IPR038109, PF07508,IPR011109,SSF53041,PTHR30461,Coil, PS51736,cd00338,PF00239
MSNIYQLRELLRTQTIYDLPLRVAYYARVSTDHDEQKTSIKNQDDYFKELIKSKPNWKFMGGYIDEGISGIAVKKREDFLRMIDDAKNGKIDLILTKEISRFARNTLDSIKYTRELLACGVCVWFMNDGINTIDEDSELRLTIMAAMAQDEIRKMSSRIKFGQAQSIKNGVVMGNSRLYGYDKKDGKLTINEAEAEMVRFIFESYASGNWTTPQIERYLYEKGYRNYNGGKINRGVIKNIIKNPKYKGYYAGGKVKVIDMFTKKQMFLPKDQWVYYKDDGSTVPQIIDEKTWEDANYYMKSRGDNIRSHRTVFKYGNVFTGKVICGIDGASYWLREHKIRGKESDPRWVCSHKIKNGANSCLSVPVRESDLKQMVASAISQAAGNSKDVIDSYMNYYLKAIDDSKEKEEEIAVLRKNIESTKLKMEKILDYNLNGSISDDEFLKRNAAYKKEIENAEEKILKLSKKPEEPDSIARKIEQIREYLANTEIVSADDITKQIVEKLIEKIVILPEEEKGMKVIKSEIYLINKELYKFRKEMGTKTSCSDNVTLIMFPKQRMEITNENAHCVNQYKRFSIEFSLFVRF

SEQ ID NO: 532 - protein, 584 aa, Unknown
  Description of Unknown: Integrase B533 sequence
  SM00857,G3DSA:1.10.10.2600,IPR036162,PF13408,IPR025827, G3DSA:3.40.50.1390,PS51737,IPR006119,IPR038109,PF07508, SSF53041,IPR011109,PTHR30461,Coil,cd00338, PF00239
MAYRKITDIRDTIGMRAVFYARVSTAEEEQLNAIELQIEENRGCIKDHGWKLVGEYIDRSKSGTMVKGRDDYQRLYEDLYEDLFDIVVIKDQERLQRNTLDWYLFINRVVQTGKLLFMYMDGKFYSPDDALITGVRAIIAEEFSRNLSKKLHNYHDHRIEKARQGQEIALQGSGNVYGWDKKDGKYYINPEQAKVRRLMCEGIMARKGSTLIAKELNEAGYRNTVGKPWKPMDIPKFVYDCKNVGTMIINKERHDFESKQTIKLPKEEWVYVENALPPIVTQEEWDLICKIHEERVIATGSDKRGKKTSGYSFSGKLVCGICGAPYWRKQRVSKDEYWVCSTKQTKGRKTRKRDSTMGKAGEINPLGCDNENISYNSLMEIMGVVSERLQANTDTIKQDMINWLTKLRKHLLEANGGHTEADLQRELSRKSKLLDAYLDGILNKQEYQKKAEELDERIIQLKAETEKNKANSGDIAEIDKVLANIDEEVARYVDGNEKLKVEYLLEHLEQVQIFPDKVIVIVPILSDGIVVEKTQYVSREKRCRQDYLYENDRWFGKADKRRDIHVWIRWKGFVKGTLKSGLSD

SEQ ID NO: 533 - protein, 584 aa, Unknown
  Description of Unknown: Integrase B534 sequence
  PTHR30461:SF3,IPR036162,PS51737,IPR011109,PTHR30461, PS00397,PF00239,G3DSA:1.10.10.2600,IPR006119,SSF53041, SM00857,IPR025827,IPR038109,PS51736,cd03768, IPR006118,PF13408,G3DSA:3.40.50.1390,PF07508,Coil
MPISKPIFDLVQKVAIYIRVSTQYQVDRASLPVQREELIAYCKYVLGIDNFEVFEDPGYSAKNTDRPDYQRMINRVRTGEFSHILVWKIDRISRNLLDFAAMYAELKKLGVTFVSKNEQFDTSSAMGEAMLKIILVFAELERNMTSERVSAIMLSRANGGVWNGGKIPFGYSYDKEQKVFHVLDDEAKIVLYIYDLYESIQSLTTVAKQLNEKGIRSRTGKPWNPVTVRTMLTNPFYAGTYRYNYRDESSRTYAVKPKDEWVMVEDHHPAIVTRERQNHIAGILEKRRRSNFDSRTYQRKNTHIFGGLLRCGYCGSMMSATSDRARSDGWRPSQYLCTRRRRFNDCTNKYITDMTIGPFVFNFIANMIRASKSFGKSTSIETLEKKLLRGEALAAVDHIGRPGLEELYNHLRSGFSEMPFDAPSAAAAESAANIQERELLLSEKRRLERALNRLRTLYLYSDDSMPEKDYIVERKQLMDSLDEVDAKLEAAEKVAADAISLSDEEFMAKASYFILSQQLQDKRFIDYERFIRKIDPKIVKDFLNSIATNFCIKDGLTTSILFRNGLELQFFYKPAETAKSPETF

SEQ ID NO: 534 - protein, 584 aa, Unknown
  Description of Unknown: Integrase B535 sequence
  PTHR30461:SF3,cd00338,SM00857,G3DSA:1.10.10.2600,IPR036162, PF13408,IPR025827,PS51737,G3DSA:3.40.50.1390,IPR006119, IPR038109,PF07508,IPR011109,SSF53041,PTHR30461, PS51736,Coil,PF00239
MARKKNIAAGLDAVIYARYSSHNQREVSIEQQIAECTKHAAALGLRIVGTYEDRAISGKTDNRPRFQQMMRDAEKGKFQAVVAWKSNRIGRNMLQAMVNEAKLDDYGVKVFYAEEDFDDTAAGRFALRNMMNVNQFYSENMAEDITRGLYDNANKCMANGRQPLGYKRGADGKVMLDEPAAAVVREIFTRVAAGDLFVDIARDLNAKGIKTSKGAAWNKGSFQSICQNERYKGIYIYGNVRIVDGIPRIVSDELWYRVQEAMRMKKNPVGTRHRVGAEDYLLTGKLRCGHCGSYMTGVSGTSRNGELHYYYTCQKRRTEHACSKKNVRRDVIEPAIAQAIKMYCLTDDIIEWMADQTVQYWEKHDNDLQIEALEQQLAENKKATSNMLKAIEMGIITEATRSRMVELETENSKLTAQLSAAKRDVVKINREDLIDELHILRSKDIHDREVQAELFKDFLVAAYIYDDNRLKLVFSFMGKDNSVEIPLETGEDPPDGEDSPDAKMFVLTPDCSTKKALYFAGSTVLFFLLKPIFGGCIASPAPFSGFCRQFLYTPLFLTLHRFQKRMFVARLFSRQLHHPPQCTA

SEQ ID NO: 535 - protein, 584 aa, Unknown
  Description of Unknown: Integrase B536 sequence
  SM00857,G3DSA:1.10.10.2600,IPR036162,PF13408,IPR025827, G3DSA:3.40.50.1390,PS51737,IPR006119,IPR038109,PF07508, SSF53041,IPR011109,PTHR30461,Coil,cd00338, PF00239
MAYRKITDIRDTIGMRAVFYARVSTAEEEQLNAIELQIEENRGCIKDHGWKLVGEYIDRSKSGTMVKGRDDYQRLYEDLYEDLFDIVVIKDQERLQRNTLDWYLFINRVVQTGKLLFMYMDGKFYSPDDALITGVRAIIAEEFSRNLSKKLHNYHDHRIEKARQGQEIALQGSGNVYGWDKKDGKYYINPEQAKVRRLMCEGIMARKGSTLIAKELNDAGYRNTVGKPWKPMDIPKFVYDCKNVGTMIINKERHDFESKQTIKLPKEEWVYVENALPPIVTQEEWDLICKIHEERVIATGSDRRGKKTSGYSFSGKLVCGICGAPYWRKQRVSKDEYWVCSTKQTKGRRTRKRDSTMGKAGEINPLGCDNENISYNSLMEIMEVVSERLQANTDTIKQDMINWLTKLRKQLLEANGGHTEADLQRELSRKSKLLDAYLDGILNKQEYQTKAEELDERIIQLKAETEKNKANSGDIAEIDKVLANIDEEVSRYVDGNEKLKVEYLLEHLEQVQIFPDKVIVIVPILSEGIVVEKTQYVSREKRCRQDYLYENDRWSGKADKRRDIHVWIRWKGFVKGTLKSGLPD

SEQ ID NO: 536 - protein, 584 aa, Unknown
  Description of Unknown: Integrase B537 sequence
  SM00857,G3DSA:1.10.10.2600,IPR036162,PF13408,IPR025827, PS51737,G3DSA:3.40.50.1390,IPR006119,IPR038109,PF07508, SSF53041,IPR011109,PTHR30461,Coil,PS51736, cd00338,PF00239
MAYRKITDIRDTIGMRAIFYARVSTAEEEQLNAIELQIEENRGCIKDHGWKLVGEYIDRSKSGTMVKGRDDYQRLYEDLYEDLFDIVVIKDQERLQRNTLDWYLFINRVVQTGKLLFMYMDGKFYSPDDALITGVRAIIAEEFSRNLSKKLHNYHDHRIEKARQGQEIALQGSGNVYGWDKKDGKYYINPEQAKVRRLMCEGIMARKGSTLIAKELNDAGYRNTVGKPWKPMDIPKFVYDCKNVGTMIINKERHDFESKQTIKLPKEEWVYVENALPPIVTQEEWDLICKIHEERVIATGSDRRGKKTSGYSFSGKLVCGICGAPYWRKQRVSKDEYWVCSTKQTKGRRTRKRDSTMGKAGEINPLGCDNENISYNSLMEIMGVVSERLQANTDTIKQDMINWLTKLRKQLLEANGGHTEADLQRELSRKSKLLDAYLDGILNKQEYQTKAEELDERIIQLKAETEKNKANSGDIAEIDKVLANIDEEVSRYVDGNEKLKVEYLLEHLEQVQIFPDKVIVIVPILSEGIVIEKTQYVSREKRCRQDYLYENDRWSGKADKRRDIHVWIRWKGFVKGTLKSGLPD

SEQ ID NO: 537 - protein, 584 aa, Unknown
  Description of Unknown: Integrase B538 sequence
  PTHR30461:SF3,cd00338,SM00857,G3DSA:1.10.10.2600,IPR036162, PF13408,PS51737,IPR025827,G3DSA:3.40.50.1390,IPR006119, IPR038109,PF07508,IPR011109,SSF53041,PTHR30461, PS51736,Coil,PF00239
MARKKNIAAGLDAVIYARYSSHNQREVSIEQQIAECTKHAAALGLRIVGTYEDRAISGKTDNRPRFQQMMRDAEKGKFQAVVAWKSNRIGRNMLQAMVNEAKLDDYGVKVFYAEEDFDDTAAGRFALRNMMNVNQFYSENMAEDITRGLYDNASKCMANGRQPLGYKRGEDGRVVLDEANAAVVREIFTRVAAGDLFVDIARDLNAQGIKTSKGANWNKGSFQSICQNERYRGIYIYGDVRVADGIPRIVSDDLWYRVQEAMRMKKNPVGTRHRVGAEDYLLTGKLRCGHCGSYMTGVSGTSRNGELHYYYTCQKRRTEHACDKKNIRRDVIEPAVAQAIKMYCLTDDVIEWMADRTVEYWEKHDNDLQIEALEQQLEENKKATSNMLKAIEMGIITEATRTRMVELETEQSRLSVQLNAAKEDVVKIDREQIISYLELLQQGDIHDRDFQMELFKNFLVAVYVYDDNRMKLVFSCMGDQNSVEIPLETGEDPPDGGLSPDAKMFVLTPDSSTKKALYFVGSTVLFFLLKLVFGGCIASPAPFLGFCRWFLYNPQLLTLHRFQKGMFAGRFFSRLLHHPLQCTA

SEQ ID NO: 538 - protein, 584 aa, Unknown
  Description of Unknown: Integrase B539 sequence
  PTHR30461:SF3,SM00857,G3DSA:1.10.10.2600,IPR036162,PF13408, PS51737,G3DSA:3.40.50.1390,IPR025827,IPR006119,IPR038109, PF07508,IPR011109,SSF53041,PTHR30461,Coil, PS51736,cd00338,PF00239
MSNIYQLRELLRTQTIYDLPLRVAYYARVSTDHDEQKTSIKNQDDYFKELIKSKPNWKFMGGYIDEGISGIAVKNREDFLRMIDDAKNGKIDLILTKEISRFARNTLDSIKYTRELLACGVCVWFMNDGINTIDEDSELRLTIMAAMAQDEIRKMSSRIKFGQAQSIKNGVVMGNSRLYGYDKKDGKLTINEAEAEMVRFIFESYASGKWTTPQIERYLYEKGYRNYNGGKINRGVIKNIIKNPKYKGYYAGGKVKVIDMFTKKQMFLPKDQWVYYKDDGSTVPQIIDEKTWEDANYYMKSRGDNIRSHRTVFKYGNVFTGKVICGIDGASYWLREHKIRGKESDPRWVCSHKIKNGANSCLSVPVRESDLKQMVASAISQAAGNSKDVIDSYMNYYLKAIDDSKEKEGEIAVLRKNIESTKLKMEKILDYNLNGSISDDEFLKRNAAYKKEIENAEEKILKLSKKPEEPDSIARKIEQIREYLANTEIVSADDITKQIVEKLIEKIIILPEEENGIKVIKSEIYLINKELYKFCKDMGTKNSCSDNVTLIMFPKQRMEITNENAHCVNQYKRFSIEFSLFVRF

SEQ ID NO: 539 - protein, 584 aa, Unknown
  Description of Unknown: Integrase B540 sequence
  PTHR30461:SF3,SM00857,G3DSA:1.10.10.2600,IPR036162,PF13408, PS51737,IPR025827,G3DSA:3.40.50.1390,IPR006119,IPR038109, PF07508,IPR011109,SSF53041,PF00239,PTHR30461, PS51736,Coil,cd00338
MKAVIYARFSSHNQREESIEGQVRACQRFAKEHDMTVIEIYADRGLSGLHADNRPEFQRMIADSDRHKFQALIMWNLDRFSRDKYDTAVYKSRLKKNGVTLYYSDQNIPDTPEGIILESLLEGFAQYYSANLSRNAKRGLQENARKCLWNGGGLPLGYTIDETKHFVIDPAGAACVRLIFQMYADNHSIKEIVSTLNEKGYRTVKGNKFRLGSIQGVLRNRKYIGEYHASGITVPNGVPAIVDVELFNAVQEKIGVVSTAKARNKAEIPYLLTTKVFCGHCGSPMIGESGTGKGGSTYRYYKCSCRKNRKGQCDKRTEQKEWLEETVVAQTVEKFLHPNVIEDVSNACAAVLEQDCQNNALLKALNAQLADVEKSSRNLIKAIEAGVFTASMRERLAELEQQKEDITVQIAREQLRKPQLSAEQIAFFLRSFLDGDAHDPNFQERIIESLVRRVDVYDEGSGNRKLTVFYNLKKNNHSSVSVKCSDSESVGLPKGRLRKQPIFLFASCICPAYFPRLRPNYRRRCFFMSPKELLYIDDALGHEQFLIAQCQEAEAALSDPKLKQRVRQLQSAHQQLFNRLMALV

SEQ ID NO: 540 - protein, 584 aa, Unknown
  Description of Unknown: Integrase B541 sequence
  SM00857,G3DSA:1.10.10.2600,IPR036162,PF13408,IPR025827, G3DSA:3.40.50.1390,PS51737,IPR006119,IPR038109,PF07508, SSF53041,IPR011109,PTHR30461,Coil,cd00338, PF00239
MAYRKITDIKDTIGMRAVFYARVSTAEEEQLNAIELQIEENRGCIKDHGWKLVGEYIDRSKSGTMVKGRDDYQRLYEDLYEDLFDIVVIKDQERLQRNTLDWYLFINRVVQTGKLLFMYMDGKFYSPDDALITGVRAIIAEEFSRNLSKKLHNYHDHRIEKARQGQEIALQGSGNVYGWDKKDGKYYINPEQAKVRRLMCEGIMARKGSTLIAKELNDAGYRNTVGKPWKPMDIPKFVYDCKNVGTMIINKERHDFESKQTIKLPKEEWVYVENALPPIVTQEEWDLICKIHEERVIATGSDRRGKKTSGYSFSGKLVCGICGAPYWRKQRVSKDEYWVCSTKQTKGRRTRKRDSTMGKAGEINPLGCDNENISYNSLMEIMGVVSERLQANTDTIKQDMINWLTKLRKQLLEANGGHTEADLQRELSRKSKLLDAYLDGILNKQEYQKKAEELDERIIQLKTETEKNKANSGDIAEIDKVLANIDEEVARYVDGNEKLKVEYLLEHLEQVQIFPDKVIVIVPILSEGIVVEKTQYVSRYKRCRQDYLYENDRWSGKADKRRDIHVWILWKGFVKGTLKSGLPD

SEQ ID NO: 541 - protein, 584 aa, Unknown
  Description of Unknown: Integrase B542 sequence
  PTHR30461:SF3,cd00338,SM00857,G3DSA:1.10.10.2600,IPR036162, PF13408,IPR025827,PS51737,G3DSA:3.40.50.1390,IPR006119, IPR038109,PF07508,IPR011109,SSF53041,PTHR30461, PS51736,Coil,PF00239
MARKKNIAAGLDAVIYARYSSHNQREVSIEQQIAECTKHAAALGLRIVGTYEDRAISGKTDNRPRFQQMMRDAEKGKFQAVVAWKSNRIGRNMLQAMVNEAKLDDYGVKVFYAEEDFDDTAAGRFALRNMMNVNQFYSENMAEDITRGLYDNANKCMANGRQPLGYKRGADGKVMLDEPAAAVVREIFNRVAAGDLFVDIARDLNAKGIKTSKGATWNKGSFQSICQNERYKGIYIYGNVRIVDGIPRIVSDELWYKVQEAMRMKKNPVGTRHRVGAEDYLLTGKLRCGHCGSYMTGVSGTSRNGELHYYYTCQKRRTEHACNKKNVRRDVIEPAIAQAIKMYCLTDDVIEWVANRTVEYWEKHDNDLHIEALEQQLEENKKATSNMLKAIEMGIITDATRSRMIELETEQSKLAVQLNAAKADVVKIDRDDLIDELQIFRDMDVNNRSVQAELFKDFLVAAYIYDDNRLKLVFSFMGKDNSVEIPLETGEDPPDGGDSPDAKMFVLTPDCSTKKALYFVGSMVLFFLLKPIFGGCIASPAPFSGFCRRFLYNPQLLTLHHFQKGMFSARFFSRLLYHPLQCTA

SEQ ID NO: 542 - protein, 584 aa, Unknown
  Description of Unknown: Integrase B543 sequence
  PTHR30461:SF3,SM00857,G3DSA:1.10.10.2600,IPR036162,PF13408, PS51737,G3DSA:3.40.50.1390,IPR025827,IPR006119,IPR038109, PF07508,IPR011109,SSF53041,PTHR30461,Coil, PS51736,cd00338,PF00239
MSNIYQLRELLRTQTIYDLPLRVAYYARVSTDHDEQKTSIKNQDDYFKELIKSKPNWKFMGGYIDEGISGIAVKKREDFLRMIDDAKNGKIDLILTKEISRFARNTLDSIKYTRELLACGVCVWFMNDGINTIDEDSELRLTIMAAMAQDEIRKMSSRIKFGQAQSIKNGVVMGNSRLYGYDKKDGKLTINEAEAEMVRFIFESYASGKWTTPQIERYLYEKGYRNYNGGKINRGVIKNIIKNPKYKGYYAGGKVKVIDMFTKKQMFLPKDQWVYYKDDGSTVPQIIDEKTWEDANYYMKSRGDNIRSHRTVFKYGNVFTGKVICGIDGASYWLREHKIRGKESDPRWVCSHKIKNGANSCLSVPVRESDLKQMVASAISQAAGNSKDVIDSYMNYYLKAIDDSKEKEGEIAVLRKNIESTKLKMEKILDYNLNGSISDDEFLKRNAAYKKEIENAEEKILKLSKKPEEPDSIARKIEQIREYLANTEIVSADDITKQIVEKLIEKIIILPEEENGIKVIKSEIYLINKELYKFCKDMGTKNSCSDNVTLIMFPKQRMEITNENAHCVNQYKRFSIEFSLFVRF

SEQ ID NO: 543 - protein, 584 aa, Unknown
  Description of Unknown: Integrase B544 sequence
  PTHR30461:SF3,SM00857,G3DSA:1.10.10.2600,IPR036162,PS51737, G3DSA:3.40.50.1390,IPR006119,IPR038109,PF07508,IPR011109, SSF53041,PTHR30461,Coil,PS51736,cd00338, PF00239
MDIYETANRMKYEQKTIFDLKLRVTFYARVSTTREEQENSIENQITYFTDFIKSNKNWTYVEGYIDRIRGENAINRTNFIQMIEDGKAGRFDLVLTKEVSRFARNTVDSLVYTRELLRAGVGVFFQNDNICTIDTDSELRLTIMSSIAADEVRKLSERVRWGHKRSIENGTVMGNNRIYGYDKDNCKLVINEKEAEMIRLIFDRYATGAYSVRKLEDILYNKGYRSRNGTRLHHNTISGIIQNPKYKGYYCGNKVKIIDYRTKEQRFLPENEWIVYKDETGEIVPAIVSEELWDKCNKIFRERSAVVKSHSRSFKDRSALSGKIWCGADDKAYWRTSYSNSVSKGTPIYQWICSEKRRFGAGACASFAILESDIYQMLSEHFKNIAENIDDYVATFLKIYRETDTSSENQRELNALKAKIEKEKAKREKLLDAYTEDIITKKEFKERNDASNILINELEEEVSAIEKRNCSSEAYAKELEKIEKYFKEMYHPDRIMTKEEVDEIVTTVVDRITIIPRNEECMKIEIKLKTGESNNYTCIRDKHHCCSGNITKKMTTKQQWSFIHPDMRHIGHCRKITFTVQTGI

SEQ ID NO: 544 - protein, 584 aa, Unknown
  Description of Unknown: Integrase B545 sequence
  PTHR30461:SF3,SM00857,G3DSA:1.10.10.2600,IPR036162,PF13408, IPR025827,PS51737,G3DSA:3.40.50.1390,IPR006119,IPR038109, PF07508,IPR011109,SSF53041,PTHR30461,PS51736, cd00338,PF00239
MRCLPLQHSTLFGYGQAKAPALVRCSAGDNMECSTKPDKENFMLAGVSIPRSLHMGNRPEGSVIMPRKKSTAADAPRLVAYYRYSGGSRQTEQSIEGQRRDCEAYARAHGMTILREYVDRHISGKTDDRPAFQQLVADSAAHTFDAVICWKTDRLARNRYDSAVYKKKLRDNGVEILYAAESNISGAEGIIIEGLMEALAEYYSAELAEKARRGMRESALKGKALGSSRPLGLTVDADKHYIIEPTGAEAVRYIFEQYAAGLSSSSIVERLNAMGLRTSHGGPFNKSSINRIIQNEMYRGVYVSKKFDVRIEGAIPAIIDNDLWKRAQNMFERNRQSRTPHASRADYILSGKLYCGECGCLMKGVCGRSSGNGQMYHYYACPGRSIGRACTRKNIPQDELEAMVVNSVADLLLEPELLEQIADAIVELQQAEAARPDPEKQALEKSLSDVRSKIQNILTAIENGTSSAALSARLADLEQQESTLSYQLSSLTAKKPLTFTRDQILFLLQQFRVSSSERTKAYCRRLVDTFVDHIELTNTELILYFNISDETIDKNKKAPRSNPSKESSTEKRLVRVARIELTAS

SEQ ID NO: 545 - protein, 584 aa, Unknown
  Description of Unknown: Integrase B546 sequence
  SM00857,G3DSA:1.10.10.2600,IPR036162,PF13408,PS51737, G3DSA:3.40.50.1390,IPR025827,IPR006119,IPR038109,PF07508, SSF53041,IPR011109,PTHR30461,Coil,cd00338, PF00239
MAYRKITDIKDTIGMRAVFYARVSTAEEEQLNAIELQIEENRGCIKDHGWKLVGEYIDRSKSGTMVKGRDDYQRLYEDLYEDLFDIVVIKDQERLQRNTLDWYLFINRVVQTGKLLFMYMDGKFYSPDDALITGVRAIIAEEFSRNLSKKLHNYHDHRIEKARQGQEIALQGSGNVYGWDKKDGKYYINPEQAKVRRLMCEGIMARKGSTLIAKELNDAGYRNTVGKPWKPMDIPKFVYDCKNVGTMIINKERHDFESKQTIKLPKEEWVYVENALPPIVTQEEWDLICKIHEERVIATGSDRRGKKTSGYSFSGKLVCGICGAPYWRKQRVSKDEYWVCSTKQTKGRRTRKRDSTMGKAGEINPLGCDNENISYNSLMEIMGVVSERLQANTDTIKHDMINWLTKLRKQLLEANGGHTEADLQRELSRKSKLLDAYLDGILNKQEYQKKAEELDERIIQLKAETEKNKANSGDIAEIDKVLANIDEEVSRYVDGNEKLKVEYLLEHLEQVQIFPDKVIVIVPILSEGIVVEKTQYVSREKWSWEDNLSEDDQWTFQANLWRNRDVRIQGKGFAKSSITDRMSD

SEQ ID NO: 546 - protein, 584 aa, Unknown
  Description of Unknown: Integrase B547 sequence
  PTHR30461:SF3,SM00857,G3DSA:1.10.10.2600,IPR036162,PF13408, PS51737,IPR025827,G3DSA:3.40.50.1390,IPR006119,IPR038109, PF07508,IPR011109,SSF53041,PTHR30461,Coil, PS51736,cd00338,PF00239
MSNIYQLRELLRTQTIYDLPLRVVYYARVSTDHDEQKTSIKNQDDYFKELIKSKPNWKFMGGYIDEGISGIAVKKREDFLRMIDDAKNGKIDLILTKEISRFARNTLDSIKYTRELLACGVCVWFMNDGINTIDEDSELRLTIMAAMAQDEIRKMSSRIKFGQAQSIKNGVVMGNSRLYGYDKKDGKLTINEAEAEMVRFIFESYASGNWTTPQIERYLYEKGYRNYNGGKINRGVIKNIIKNPKYKGYYAGGKVKVIDMFTKKQMFLPKDQWVYYKDDGSTVPQIIDEKTWEDANYYMKSRGDNIRSHRTVFKYGNVFTGKVICGMDGASYWLREHKIRGKESDPRWVCSHKIKNGSNSCLSVPVRESDLKQMVASAISQAAGNSKDVIDSYMNYYLKAIDDSKEKEEEIAVLRKNIESTKLKMEKILDYNLNGSISDDEFLKRNATYKKEIENAEEKILKLSKKPEDPDSIARKIEQIREYLANTEIVSANDITKQIVEKLIEKIIILPEEENGIKVIKSEIYLINKELYKFCKDMGTKNSCSDNVTLIMFPKQRMEITNENAHCVNQYKRFSIEFSLFVRF

SEQ ID NO: 547 - protein, 584 aa, Unknown
  Description of Unknown: Integrase B548 sequence
  SM00857,G3DSA:1.10.10.2600,IPR036162,PF13408,IPR025827, G3DSA:3.40.50.1390,PS51737,IPR006119,IPR038109,PF07508, SSF53041,IPR011109,PTHR30461,Coil,cd00338, PF00239
MAYRKITDIRDTIGMRAVFYARVSTAEEEQLNAIELQIEENRGCIKDHGWKLVGEYIDRSKSGTMVKGRDDYQRLYEDLYEDLFDIVVIKDQERLQRNTLDWYLFINRVVQTGKLLFMYMDGKFYSPDDALITGVRAIIAEEFSRNLSKKLHNYHDHRIEKARQGQEIALQGSGNVYGWDKKDGKYYINPEQAKVRRLMCEGIMARKGSTLIAKELNDAGYRNTVGKPWKPMDIPKFVYDCKNVGTMIINKERHDFESKQTIKLPKEEWVYVENALPPIVTQEEWDLICKIHEERVIATGSDRRGKKTSGYSFSGKLVCGICGAPYWRKQRVSKDEYWVCSTKQTKGRRTRKRDSTMGKAGEINPLGCDNENISYNSLMEIMGVVSERLQANTDTIKHDMINWLTKLRKQLLEANGGHTEADLQRELSRKSKLLDAYLDGILNKQEYQKKAEELDERIIQLKAETEKNKANSGDIAEIDKVLANIDEEVSRYVDGNEKLKVEYLLEHLEQVQIFPDKVIVIVPILSEGIVVEKAQYVSREKRCWQDYLYENDRWSGKADKRRDIHVWIRWKGFVKGTLKSGLPD

SEQ ID NO: 548 - protein, 584 aa, Unknown
  Description of Unknown: Integrase B549 sequence
  SM00857,G3DSA:1.10.10.2600,IPR036162,PF13408,IPR025827, G3DSA:3.40.50.1390,PS51737,IPR006119,IPR038109,PF07508, SSF53041,IPR011109,PTHR30461,Coil,cd00338, PF00239
MAYRKITDIRDTIGMRAVFYARVSTAEEEQLNAIELQIEENRGCIKDHGWKLVGEYIDRSKSGTMVKGRDDYQRLYEDLYEDLFDIVVIKDQERLQRNTLDWYLFINRVVQTGKLLFMYMDGKFYSPDDALITGVRAIIAEEFSRNLSKKLHNYHDHRIEKARQGQEIALQGSGNVYGWDKKDGKYYINSEQAKIRRLMCEGIMARKGSTLIAKELNDAGYRNTVGKPWKPMDIPKFVYDCKNVGTMIINKERHDFESKQTIKLPKEEWVYVENALPPIVTQEEWDLICKIHEERVIATGSDRRGKKTSGYSFSGKLVCGICGAPYWRKQRVSKDEYWVCSTKQTKGRRTRKRDSTMGKAGEINPLGCDNENISYNSLMEIMGVVSERLQANTDTIKHDMINWLTKLRKQLLEANGGHTEADLQRELSRKSKLLDAYLDGILNKQEYQKKAEELDERIIQLKAETEKNKANSGDIEEIDKVLANIDEEVSRYVDGNEKLKVEYLLEHLEQVQIFPDKVIVIVPILSEGIVVEKTQYVSREKRCRQDYLYENDRWSGKADKRRDIHVWIRWKGFVKGTLKSGLPD

SEQ ID NO: 549 - protein, 584 aa, Unknown
  Description of Unknown: Integrase B550 sequence
  SM00857,G3DSA:1.10.10.2600,IPR036162,PF13408,IPR025827, G3DSA:3.40.50.1390,PS51737,IPR006119,IPR038109,PF07508, IPR011109,SSF53041,PTHR30461,Coil,PS51736, cd00338,PF00239
MAKPEVSELAVVYARYSSHSQGEQSIEGQLSNARDYAAAHGYTIVHEYVDRAKSGRTDNRAEFQQMLKDTAKRQFSVIILWKVDRFGRNREEIAINKMKCRKNGVRVEYVAETIPDSPEGVILESVLEGFAEYYSLQLSQNIRRGRAESAEKCQSLGGNRPLGYKTGPDKKFVIDENTAPTVKMIFTMYADGKTVTEIVDKLNEMGLRTLRGGPFTKNSLHSILKNKKYIGVYEYQGREIKDGVPRIIEDDVFNKVQEMLKINKRAPAKTWSRADYILTDKLFCGKCGALMFGESGTSKTGVKHNYYICSNKKRFRSCDKKAVRQADIEDTVLNATHELLQDDELLDYIVDRTWEYYLAQDNSQEKLRNLQRQLAQTDTAISNLIRAIEAGILTEETKKRMDELTQQKADLKASIADREIARGFHLQKSHIAFYLRSLRDADWSDKEAQKRLIQTFVNAVFVYDDHITLTYNFSGDKSTITLHDMQRFEDGEEFGCRASRSTIAEPDEPCRFVWLFVMLKDLHGQRYFRAALSGVTPFGWFFHANRNHAAYFPSECAGLCTWERWQELRLIQVSLAIFFGTTLL

SEQ ID NO: 550 - protein, 583 aa, Unknown
  Description of Unknown: Integrase B551 sequence
  PTHR30461:SF3,cd00338,SM00857,G3DSA:1.10.10.2600,IPR036162, PF13408,IPR025827,PS51737,G3DSA:3.40.50.1390,IPR006119, IPR038109,PF07508,IPR011109,SSF53041,PTHR30461, PS51736,Coil,PF00239
MPRKNKSAGSDQRLVAYYRYSGGSGQTEQSIEGQRRDCMAWAKAHGLTICHEYIDRHISGKTDNRAQFQRMMQDSDKGAFDSLICWKTDRLARNRYDSAIYKSRLRKNGVKIYYAAESSVDGPEGIILEGLMESLAEYYSAELSQKLRRGIRESALKCKCLGGYRALGLTSDKDHNYVIDESQAPAVRYIFEQYAAGRTAAEIVADLNAKGVRTATGGAFNKNSILRIVTNEQYIGTYISRAHNVRVENAIPAIIDRELWDKAQAMVQRNKAGRGVKSKAANYMLSGKLYCQMCGGTMKGICGTGKHGDKHYYYACSNHTAHSCAKRNVEKSFLEDLIVSATAEHILAPGKLEQIADRVVQVQEAEQHIENPEKEMLEAELLECTKKQDNILRAIEDGTGSARLSSRLRELEEQEAALRYRIESIEEPLAAPIYSRDQLLFMLEQFRRAADEQDETYKQRLVNTFVHDIYLSDDSAFVQFNISAQENEKSTTLESVVLSLNGGGPDGENPDKSRLPAGFDRVSLGGDDGNRTRVRKEVHASISGCSSPTGFPHRQAGKRAAASVASSVHGSKQSLMLLTCTAK

SEQ ID NO: 551 - protein, 583 aa, Unknown
  Description of Unknown: Integrase B552 sequence
  cd03768,PTHR30461:SF3,SM00857,IPR006118,G3DSA:1.10.10.2600, IPR036162,PS51737,G3DSA:3.40.50.1390,IPR006119,IPR038109, PF07508,SSF53041,IPR011109,PTHR30461,PS00397, PS51736,Coil,PF00239
MAFKKLMDTHPDKRLRVAIYIRVSTNHQIDRDSLPLQREELINYAKYVLNIEDFEVFEDAGFSAKNTDRPGYQNMMKLVRTCVFSHILVWKLDRISRNLLDFAAMYDELKRLGVTFISKNEQFDTSTAMGEAMLKIILVFAELERKMTSERVTATMLSRAANGKWNGGRIPYGYSYDFEERIFSICTEEQKVALLMCDLYESSNSLLFVSRKLNEMGYRSRAGNLWSPVQVRKILTNPFNTGAYVYNQTSMSTGTQLPNRKEDFVVIEDHHPALFPKERQDKIIARLARNTKSRSGAHNSVNRKNTHVFSGLIFCENCGMMLTSSTGKKMAGDGWRPSIYLCPSKRRHVSVGCHDTTDSTVGEFVINFIMNMLNTQKNFQLIRSTDDLQRSLLYGKVFDDVDHLDPDSLNDMFNVLSSNLPQSVKSGLRKSSKRKVNPELTKLRREMQKLDRAMDRLKHLYMYSEESMSDQEYLTERNRITEAYKEAEARIEEISSYDTIEHSISDADFIREATSFILAKKLSGNSYINYRRLAVSTDTQVLKDFFNSVLDSITINTDGKIGSIVFKNGLRHRFIYKENAPNG

SEQ ID NO: 552 - protein, 583 aa, Unknown
  Description of Unknown: Integrase B553 sequence
  SM00857,G3DSA:1.10.10.2600,IPR036162,PF13408,IPR025827, G3DSA:3.40.50.1390,PS51737,IPR006119,IPR038109,PF07508, IPR011109,SSF53041,PTHR30461,Coil,cd00338, PF00239
MAYRKITDIKDTIGMRAVFYARVSTAEEEQLNAIELQIEENRGCIKDHGWKLVGEYIDRSKSGTTVKGRDDYQRLYEDLYEDLFDIVVIKDQERLQRNTLDWYLFINRVVQTGKLLFMYMDGKFYSPDDALITGVRAIIAEEFSRNLSKKLHNYHDHRIEKARQGQEIALQGSGNVYGWDKKDGKYYINPEQAKVRRLMCEGIMARKGSTLIAKELNDAGYRNTVGKPWKPMDIPKFVYDCKNVGTMIINKERHDFESKQTIKLPKEEWVYVENALPPIVTQEEWDLICKIHEERVIATGSDRRGKKTSGYSFSGKLVCGICGAPYWRKQRVSKDEYWVCSTKQTKGRRTRKRDSTMGKAGEINPLGCDNENISYNSLMEIMGVVSERLQANTDTIKHDMINWLTKLRKQLLEANGGHTEADLQRELSRKSKLLDAYLDGILNKQEYQKKAEELDERIIQLKAETEKNKANSGDIAEIDKVLANIDEEVSRYVDGNEKLKVEYLLEHLEQVQIFPDKVIVIVPILSEGIVVEKTQYVSREKRLWKVYVNEDYCRHYSTGFRAGYYRTDRENGILCTGNSLRKK

SEQ ID NO: 553 - protein, 583 aa, Unknown
  Description of Unknown: Integrase B554 sequence
  PTHR30461:SF3,IPR036162,PS51737,IPR011109,PTHR30461, PS00397,PF00239,G3DSA:1.10.10.2600,IPR006119,SSF53041, SM00857,IPR025827,IPR038109,PS51736,cd03768, IPR006118,PF13408,G3DSA:3.40.50.1390,PF07508,Coil
MNRKTRVKPGKATSGLSKRRKVAIYIRVSTMYQVDKDSLPMQRKDLIAYASLILGIEDYEIFEDAGYSGKNTDRPAYQEMMNRARNGEFSHILVWKIDRISRNLLDFAEMYEELKELGVTFVSKNEQFDTSTAMGEAMLKIILVFAELERNITSERVTATMISRASSGLWNGGRVPFGYDYDPDKTEFSIREDEAAICRLIKDDYLENKSLVHTSRMLNEAGYKTRAGVDWSPTAVWIICSSPFYAGIYRYNRYKGTDRRTENPEDEWVMVDNHHPAIFTLEEHERLLAILDENARSRSVVGQKHRGVNVHIFSSLAYCGKCGCKMVSTPGRLHANGYRPSNYSCPKHRKTKECDNPTVSDTQVGEFVINYILNILNAKTAFSAISTPEKLEDQLLFGSTFSNVDSIDNNGLNELYNLLSRYGSDNSFVFSSRAPKKKKAAVDPEIEALRKEKEKQERALRRLQDLYLYSENAMSEKDFIVRKAEIAQRISEINSMLGMVAKNVDNSLSDEEFIRQASHLLISKQLSNRKYIYFKNLAQSVSPEILKAYMDTILDSVQLSDGRVVAITFKNGLTHKFAYRLLE

SEQ ID NO: 554 - protein, 583 aa, Unknown
  Description of Unknown: Integrase B555 sequence
  PTHR30461:SF3,IPR036162,PS51737,IPR011109,PTHR30461, PF00239,G3DSA:1.10.10.2600,IPR006119,PF14287,SSF53041, IPR025378,SM00857,IPR025827,cd03770,IPR038109, PF13408,G3DSA:3.40.50.1390,PF07508,Coil
MTQTQIHATISSCTPILSADPTVKEDAMLDQQKITILYCRLSNEDALDGESNSIQNQKEFLTRYAAEHGYTNLKILVDDGYTGTNFDRPGVQEGFALVKQGLVGCWLVKDLSRFGRDYLTVGQYTDIIFPSYDVRFIAVNDGVDSEQGDSDGFAAIRNLFNEWYPRDTSKKVRVVFRQKGTSGKHLGKPPYGYRTDPADKDHWIIDEDAAPVVKRIFDLAIDGKGPEQIARILEKDKVLTTKALYAKQSENHPDPKKRKKMPERPYHWIGQSVAGILERMEYTGCTCNFKTYSKSYKLKKRIPNAIEDMCIFPDTQEAIVSQAQWDRVQELRKNKRRPTKAERQGLFSGLLFCPDCGNKLHFATCKSFDGKQDHYVCSSYKSGRGTCSAHYIREDVLRELVLERIRAVNTYIRQDVEGFQEEWLQCSRSDQERNIREDRKRVEQAKKRLADLDVLLSRLYEDFVLGDLSKERYKKMTADYETEQERLKLEIEVTEEWLETQETMSADVDAFVTLTQKYVDVPELTPTIVNEYIKKIEVFAPDKSSGKRVQKVKIYFNFVDDVEIPVISEPVVAKSTSGRRKTA

SEQ ID NO: 555 - protein, 583 aa, Unknown
  Description of Unknown: Integrase B556 sequence
  PTHR30461:SF3,SM00857,G3DSA:1.10.10.2600,IPR036162,PF13408, IPR025827,PS51737,G3DSA:3.40.50.1390,IPR006119,IPR038109, PF07508,IPR011109,SSF53041,PTHR30461,PS51736, cd00338,PF00239
MNRAVIYARYSSDMQREESVEAQIRACKYYAQQNGIDIIGIYADRAKSGMYHSEKREEFQALLNAAPRKEYDIVLVHKLNRFGRAGVKALNDRDYLERLGIEIISVTERLENTPEGRLMLYVITGMNEYYSRNLAGEVLKGLRENAYKGITTGGIPALGYNLSADKKLVINEQEASAVRLIFNMYLSGAGYGEIIDELNSRGFRTKRGARFGKNSIYAILRNERYAGRFTYGKTKRINGYRNQHKIEKEYISIEDGCPAIISADEWEMVQRLMDVKKHDAASGKAKELYILSGKLFCGHCSARMVGNSRVSRGERYLYYDCNAKLRKKTCTKHAVKKNEIEQAVIQKLNQLAFSDDLIERFVDETYKAQDNEMPDIGGKIADIDKKISNLVTAIENGADVGPIKQRMADLSAQKDALLSSNVPKGDFLTRDEIRSRFKKFLNIADLPPAQQKFIISEYVTRIDVFDSDGGGHFCRITLSNNTSVDTDVLAPPAPRRNGLCSIQKAQPVGWAFLIPLRHSSFSPQNFAAQTFAGAPPYGPRRKAGIHFITPTQPLKPLGKAIPGRFCFCNNTLYNHFCPDAGQG

SEQ ID NO: 556 - protein, 582 aa, Unknown
  Description of Unknown: Integrase B557 sequence
  PTHR30461:SF3,IPR036162,PS51737,IPR011109,PTHR30461, PF00239,G3DSA:1.10.10.2600,IPR006119,SSF53041,cd00338, SM00857,IPR025827,IPR038109,PS51736,mobidb-lite, PF13408,G3DSA:3.40.50.1390,PF07508,Coil
MAKKKKPAGGIAVIYARYSSHNQRDVSIEQQIEACRKHAAELGLTIIATYEDRAISGRTDNRPAFQRLMHDAEKGKFSYVLAWKSNRMGRNMMQAMVNESRLMDCGIKVYYAEEDFDDSAAGRFALRSMMNVNQFYSDNLAEDVRRGLMDNANKCMVNGRQPLGYKRGKDGKVVVDEPAAAIVREVYTRVASGELFTDIARDLNRRGIKTADKGEWNKNSFHRLCSNEKYRGIYIYGDIRIEGGIPTIIDDTLWYKVQEALRVKKLKRNGRHRPGDEDYLLTGKLRCGKCGGYMIGMSGRSKTGDIHYYYACQNRRVGRTCDKKNIRRDVIEPAVAQAIKEYCLTDDAIEWIADKTVEYWEKADRNLQLDSIEGDLAAVQSSISNVMKAIEMGVVTETTRDRLIELEKQRTDLKSKLALAKEEVVHVDRKKLISSLLLFRNGDIHDRQYQEDLFKTFLISVYVYDDDDNGHLKIVFNAFGDNNTVDLPIDFGETDNQSAFSDGAEKFDYSLHRSTKKPSDSFRWLFCFISRCVFGPVRHKALIFSRLPGLYCFLMQQGMQQGNTEDRSQANEHLGRIRQRTV

SEQ ID NO: 557 - protein, 582 aa, Unknown
  Description of Unknown: Integrase B558 sequence
  PTHR30461:SF3,IPR036162,PS51737,IPR011109,PTHR30461, PS00028,PS00397,PF00239,G3DSA:1.10.10.2600,IPR006119, SSF53041,IPR013087,cd00338,SM00857,IPR025827,IPR038109 ,PS51736,IPR006118,PF13408,G3DSA:3.40.50.1390,PF07508,Coil
MAKHAITIPQNPKAALYIRVSTDMQADKDSLPLQESDLRKLADLNGIKDIEVFSDAGFSGKNLNRPAFRSMMDRIRAREFSHLYVWKLDRISRNLLDFLELYDELKCYGVAFASKNECFDTQSPGGEAMLKILLIFAELERKTIAERVTAVMLGRANENKWNGGRVPFGYMPGPVTTDANGKKCKSWPVPDPIEAPIVRAIFELYLREKALKKVAKALNAAGYRSRKGTQWSDTTVRCILKNHFYKGEYVYNRQNPNANRREDFYRSENDWVVVTGQHEAIVPEETWRRCNEMLSKNRNWLAPIGSLVSAQDKYIFGGLLQCAECGYTMNSKDRTRIHNHTHSSYYYCTGRWKAPAVCTGEHSGYASDRVLLPQILKLIARMIEACANAIKFASAEQLVSYLLNDNLIPGATGIKEAQRIYMIVRAHVKHIYGVDQTNQYNPNALLVEQSQKEKEKQERALSRLKRAYLFDDGDMSEAEYFEQKAAIEGTIAKLDKQIKSLSGNDIGADEAYFAQLSKLIMIKKLQDTNSDFDYYKLAKAISRKPIHDFLAEIISRIIMGEQNRIIKIIFKNGVSITFQYAK

SEQ ID NO: 558 - protein, 582 aa, Unknown
  Description of Unknown: Integrase B559 sequence
  PTHR30461:SF3,IPR036162,PS51737,IPR011109,PTHR30461, PS00028,PS00397,PF00239,G3DSA:1.10.10.2600,IPR006119, SSF53041,IPR013087,cd00338,SM00857,IPR038109, PS51736,IPR006118,G3DSA:3.40.50.1390,PF07508,Coil
MAKHAITILQNPKAALYIRVSTDMQADKDSLPLQESDLRKLADLNGIKDIEVFCDAGFSGKNLNRPAFRSMMDRIRAREFSHLYVWKLDRISRNLLDFLELYDELKDYGVAFASKNESFDTQSPGGEAMLKILLIFAELERKTIAERVTAVMLGRANENKWNGGRVPFGYMPGPVTTDANGKKCKSWPVPDPIEAPIVRAIFELYLREKALKKVAAALNNAGYRSRKGTLWSDTTVRCILKNHFYKGEYVYNRQNPNAGRREDFYRSENDWVVVTGQHEAIVPEETWRRCNEMLSKNRSWLAPIGSLVSAQDKYIFGGLLQCAECGYTMNSKDRTRIHDHTHSSYYYCTGRWKAPVVCTGEHSGYASDRVLLPQILKLIARMIEACANAIKFANAEQLVSYLLNDNLIPGATGIEEAQRIYMIVRAHVKHIYGVDQANQYNPNALLVEQSQKEKEKQERALSRLKRAYLFDDGDMSEAEYFEQKAAIEGTIAKLDKQIKSLSGNDIGADEAYLAQLSKLIMIKKLQNTNSDFDYYKLAKAIGRKPIHDFLTEIISRIIIGEQNRIIKIIFKNGVSITLQYEK

SEQ ID NO: 559 - protein, 582 aa, Unknown
  Description of Unknown: Integrase B560 sequence
  PTHR30461:SF3,IPR036162,PS51737,IPR011109,PTHR30461, PS00028,PS00397,PF00239,G3DSA:1.10.10.2600,IPR006119, SSF53041,IPR013087,cd00338,SM00857,IPR025827,IPR038109 ,PS51736,IPR006118,PF13408,G3DSA:3.40.50.1390,PF07508,Coil
MAKHAITIPQNPKAALYIRVSTDMQADKDSLPLQESDLRKLADLNGIKDIEVFSDAGFSGKNLNRPAFRSMMDRIRAREFSHLYVWKLDRISRNLLDFLELYDELKCYGVAFASKNECFDTQSPGGEAMLKILLIFAELERKTIAERVTAVMLGRANENKWNGGRVPFGYMPGPVTTDANGKKCKSWPVPDPIEAPIVRAIFELYLREKALKKVAAALNTAGYRSRKGTLWSDTTVRCILKNHFYKGEYVYNRQNPNAGRREDFYRSENDWVIVTGQHEAIVPEETWRRCNEMLSKNRSWLAPIGSLVSAQDKYIFGGLLQCAECGYTMNSKDRTRIHDHTHSSYYYCTGRWKAPAVCTREHSGYASDRVLLPQILKLIARMIEACANAIKFASAEQLVSYLLNDNLIPGATGIEEAQRIYMIVRAHVKHIYGVDQANQYNPNALLVEQSQKEKEKQERALSRLKRAYLFDDGDMSEAEYFDQKSAIEDTIAKLDKQIKSLSGNDIGADEAYLAQLSKLIMIKKLQDTNSDFDYYKLAKAIGRKPIHDFLTEIISRIIIGEQNRIIKIIFKNGVSITLQYEK

SEQ ID NO: 560 - protein, 582 aa, Unknown
  Description of Unknown: Integrase B561 sequence
  PTHR30461:SF3,IPR036162,PS51737,IPR011109,PTHR30461, PS00028,PS00397,PF00239,G3DSA:1.10.10.2600,IPR006119, SSF53041,IPR013087,cd00338,SM00857,IPR038109, PS51736,IPR006118,G3DSA:3.40.50.1390,PF07508,Coil
MAKHAISIPQNPKAALYIRVSTDMQADKDSLPLQESDLRKLADLNGIKDIEVFSDAGFSGKNLNRPAFCSMMDRIRAREFSHLYVWKLDRISRNLLDFLELYDELKCYGVAFASKNECFDTQSPGGEAMLKILLIFAELERKTIAERVTAVMLGRANENKWNGGRVPFGYMPGPVTTDANGKKCKSWPVPDPIEAPIVRAIFELYLREKSLKKVAAALNTAGYRSRKGTLWSDTTVRCILKNHFYKGEYVYNRQNPNASRREDFYRSENDWVVVTGQHEAIVPEETWRRCNEMLSKNRSWLAPIGSLVSAQDKYIFGGLLQCAECGYTMNSKDRTRIHDHTHSSYYYCTGRWKAPVVCTGEHSGYASDRVLLPQILKLIARIIEACANAIKFASAEQLVSYLLNDNLIPGATGIEEAQRIYMIVRAHVKHIYGIEQANQYNPNALLVEQSQKEKEKQERALSRLKRAYLFDDGDMSEAEYFEQKAAIEGTIAKLEKQIKSLSGNDIGADEAYLAQLSKLIMIKKLQDTNSDFDYYKLAKAIGRKPIHDFLTEIISRIIIGEQNRIIKIIFKNGVSITLQYEK

SEQ ID NO: 561 - protein, 582 aa, Unknown
  Description of Unknown: Integrase B562 sequence
  PTHR30461:SF3,IPR036162,PS51737,IPR011109,PTHR30461, PS00028,PS00397,PF00239,G3DSA:1.10.10.2600,IPR006119, SSF53041,IPR013087,cd00338,SM00857,IPR025827,IPR038109 ,PS51736,IPR006118,PF13408,G3DSA:3.40.50.1390,PF07508,Coil
MAKHTISIPQTTKAALYIRVSTDMQADKDSLPLQESDLRKLADLNGIKDIEVFSDAGFSGKNLNRPAFRSMMDRIRAREFSHLYVWKLDRISRNLLDFLELYDELKDYGVAFASKNESFDTQSPGGEAMLKILLIFAELERKTIAERVTAVMLGRANENKWNGGRVPFGYMPGPVTTDANGKKCKSWPVPDPIEAPIVRAIFELYLREKALKKVAAALNTAGYRSRKGTLWSDTTVRCILKNHFYKGEYVYNRQNPNAGRREDFYRSENDWVVVTGQHEAIVPEKTWRRCNEMLSKNRSWLAPIGSLVSAQDKYIFGGLLQCAECGYTMNSKDRTRIHDHTHSSYYYCTGRWKAPAVCTGEHSGYASDRVLLPQILKLIARMIEACANAIKFASAEQLVSYLLNDNLIPGATGIEEAQRIYMIVRAHVKHIYGVDQTNQYNPNALLVEQSQKEKEKQERALSRLKRAYLFDDGDMSEAEYFEQKAAIEGTIIKLEKQIKSLSGNDIGADEAYLAQLSKLIMIKKLQDTNSDFDYYKLAKAIGRKPIHNFLTEIISRIIIGEKNRIIKIIFKNGVPITFQYAK

SEQ ID NO: 562 - protein, 582 aa, Unknown
  Description of Unknown: Integrase B563 sequence
  PTHR30461:SF3,IPR036162,PS51737,IPR011109,PTHR30461, PS00028,PS00397,PF00239,G3DSA:1.10.10.2600,IPR006119, SSF53041,IPR013087,cd00338,SM00857,IPR025827,IPR038109 ,PS51736,IPR006118,PF13408,G3DSA:3.40.50.1390,PF07508,Coil
MAKHAITIPQNPKAALYIRVSTDMQADKDSLPLQESDLRKLADLNGIKDIEVFSDAGFSGKNLNRPAFRSMMDRIRAREFSHLYVWKLDRISRNLLDFLELYDELKCYGVAFASKNECFDTQSPGGEAMLKILLIFAELERKTIAERVTAVMLGRANENKWNGGRVPFGYMPGPVTTDANGKKCKSWPVPDPIEAPIVRAIFELYLREKALKKVAAALNTAGYRSRKGTLWSDTTVRCILKNHFYKGEYVYNRQNPNAGRREDFYRSENDWVVVTGQHEAIVPEETWRRCNEMLSKNRSWLAPIGSLVSAQDKYIFGGLLQCAECGYTMNSKDRTRIHDHTHSSYYYCTGRWKAPAVCTGEHSGYASDRVLLPQILKLIARMIEACANAIKFASAEQLVSYLLNDNLIPGTTGIKEAQRIYMIVRAHVKHIYGVDQTNQYNPNALLVEQSQKEKEKQERALSRLKRAYLFDDGDMSEAEYFEQKAAIEGTIAKLDKQIKSLSGNDIGADEAYLAQLSKLIMIKKLQDTNSDFDYYKLAKAIGRKPIHDFLTEIISRIIIGEQNRIIKIIFKNGVSITLQYEK

SEQ ID NO: 563 - protein, 582 aa, Unknown
  Description of Unknown: Integrase B564 sequence
  PTHR30461:SF3,IPR036162,PS51737,IPR011109,PTHR30461, PS00397,PF00239,G3DSA:1.10.10.2600,IPR006119,SSF53041, cd00338,SM00857,IPR025827,IPR038109,PS51736, IPR006118,PF13408,G3DSA:3.40.50.1390,PF07508,Coil
MNQDKLTDKLSSQKCALYIRVSTHWQVDKASLPVQREDLINYAKYALGIDKYEVFEDAGYSAKNTDRPAFQQMMARLRTGEFSHLLVWKIDRISRNLLDFAGMYSEIKKLGITFVSKNEQFDTSNAMGEAMLKIILVFAELERNMTSERVTAIMLSRANNGQWNGGKVPFGYDYDKENRTFTINEAEASVVNLIYDAYEANNSLLTVSRTLNEKGLLSRKGSPWTPTTISIILKNPFYIGVYRYNYHDETKSGGNARSTQLKNKSEWIYVKDHHPAIIDAERQARIISLLERNRRSNKDSAKSYVRKNTHIFAGLLYCGCCGSQMQSTIDRERSDGYRPSIYACTRKRRFNDCENKYISDVTIAPFVLNYIANILKAQNNFGKSTSIETFERKLLRGKMFEDVEHIERIGLTEMYDILKRGNLSDAVYSTRLQGTIDEQAIIDERNLLSVEKRKKERALARLKSLYLYNDDAISERDYIIEKKTLTDSIERIDKRLEEIERNSSQHFTMTDDEFMTKASVFIMTHHLQGKRYIEFEKLIRKIDSRVIKDFVSSVVQKVVIKNGRVMSIRFRNGIEHNFLYKT

SEQ ID NO: 564 - protein, 582 aa, Unknown
  Description of Unknown: Integrase B565 sequence
  PTHR30461:SF3,IPR036162,PS51737,IPR011109,PTHR30461, PS00028,PS00397,PF00239,G3DSA:1.10.10.2600,IPR006119, SSF53041,IPR013087,cd00338,SM00857,IPR025827,IPR038109 ,PS51736,IPR006118,PF13408,G3DSA:3.40.50.1390,PF07508,Coil
MAKHAITIPQNPKAALYIRVSTDMQADKDSLPLQESDLRKLADLNGIKDIEVFCDAGFSGKNLNRPAFRSMMDRIRAREFSHLYVWKLDRISRNLLDFLELYDELKCYGVAFASKNESFDTQSPGGEAMLKILLIFAELERKTIAERVTAVMLGRANENKWNGGRVPFGYMPGPVTTDANGKKCKSWPVPDPIEAPIVRAIFELYLREKALKKVAAALNTAGYRSRKGTLWSDTTVRCILKNHFYKGEYVYNRQNPNAGRREDFYRSENDWVVVTGQHEAIVPEETWRRCNEMLSKNRSWLAPIGSLVSAQDKYIFGGLLQCAECGYTMNSKDRTRIHDHTHSSYYYCTGRWKAPAVCTGEHSGYASDRVLLPQILKLIARIIEACANAIKFASAEQLVSYLLNDNLIPGATGIEEAQRIYMIVRAHVKHIYGIEQANQYNPNALLVEQSQKEKEKQERALSRLKRAYLFDDGDMSEAEYFEQKAAIEGTIAKLEKQIKSLSGNDIGADEAYLAQLSKLIMIKKLQDTNSDFDYYKLAKAIGRKPIHDFLTEIISRIIIGEQNRIIKIIFKNGVSITLQYEK

SEQ ID NO: 565 - protein, 582 aa, Unknown
  Description of Unknown: Integrase B566 sequence
  PTHR30461:SF3,cd00338,SM00857,G3DSA:1.10.10.2600,IPR036162, PF13408,PS51737,IPR025827,G3DSA:3.40.50.1390,IPR006119, IPR038109,PF07508,IPR011109,SSF53041,PTHR30461, PS51736,Coil,PF00239
MARKKNIAAGLDAVIYARYSSHNQREVSIEQQIAECTKHAAALGLRIVGTYEDRAISGKTDNRPRFQQMMRDAEKGKFQAVVAWKSNRIGRNMLQAMVNEAKLDDYGVKVFYAEEDFDDTAAGRFALRNMMNVNQFYSENMAEDITRGLYDNANKCMANGRQPLGYKRGADGKVMLDEPAAAVVREIFTRVATGDLFVNIARDLNAKGIKTSKGAAWNKGSFQSICQNERYKGIYIYGNVRIVDGIPRIVSDELWYKVQEAMRMKKNPVGTRHRVGAEDYLLTGKLRCGHCGSYMTGVSGTSRNGELHYYYTCQKRRTEHACNKKNVRRDVIEPAIAQAIKMYCLTDDVIEWVADRTVEYWEKHDNDLHIEALEQQLEENKKATSNMLKAIEMGIITDATRSRMIELETEQSKLAVQLNAAKADVVKIDRDDLIDELQIFRDMDVNNRSVQAELFKDFLVAAYLYDDNRLKLVFSFMGKEKNVEIPLETGEDPPDGGDSPDTKMFVFAPDCSTIQFVLEPDSLRKRVRVRFLFTRGSEKALLGTVSRNEQRQGITMAVVSCLLLCGIKFALCELGRPPYMAH

SEQ ID NO: 566 - protein, 582 aa, Unknown
  Description of Unknown: Integrase B567 sequence
  PTHR30461:SF3,IPR036162,PS51737,IPR011109,PTHR30461, PS00028,PS00397,PF00239,G3DSA:1.10.10.2600,IPR006119, SSF53041,IPR013087,cd00338,SM00857,IPR025827,IPR038109 ,PS51736,IPR006118,PF13408,G3DSA:3.40.50.1390,PF07508,Coil
MAKYAISIPQTQKAALYIRVSTDMQADKDSLPLQESDLRKLADLNGINDTEVFCDAGFSGKNLNRPAFRAMMERIRAREFSHLYVWKLDRISRNLLDFLELYDELKCYGVAFASKNECFDTQSPGGEAMLKILLIFAELERKTIAERVTAVMLGRANENKWNGGRVPFGYMPGPVTTDANGKKCKSWPVPDPIEAPIVRAIFELYLREKALKKVAAALNTAGYRSRKGTLWSDTTVRCILKNHFYKGEYVYNRQNPNAGRREDFYRSENDWVVVTGQHEAIVPEETWRRCNEMLSKNRSWLAPIGSLVSAQDKYIFGGLLQCAECGYTMNSKDRTRIHDHTHSSYYYCTGRWKAPAVCTGEHSGYASDRVLLPQILKLIARMIEACANAIKFASAEQLVSYLLNDNLIPGATGIEEAQRIYMIVRAHVKHIYGVDQTNQYNPNALLVEQSQKEKEKQERALSRLKRAYLFDDGDMSEAEYFEQKAAIEGTIAKLDKQIKSLSGNDIGADEAYLAQLSKLIMIKKLQDTNSDFDYYKLAKAIGRKPIHDFLTEIISRIIIGEQNRIIKIIFKNGVSITLQYEK

SEQ ID NO: 567 - protein, 582 aa, Unknown
  Description of Unknown: Integrase B568 sequence
  PTHR30461:SF3,IPR036162,PS51737,IPR011109,PTHR30461, PS00028,PS00397,PF00239,G3DSA:1.10.10.2600,IPR006119, SSF53041,IPR013087,cd00338,SM00857,IPR025827,IPR038109 ,PS51736,IPR006118,PF13408,G3DSA:3.40.50.1390,PF07508,Coil
MAKHAITIPQNPKAALYIRVSTDMQADKDSLPLQESDLRKLADLNGIKDIEVFSDAGFSGKNLNRPAFRSMMDRIRAREFSHLYVWKLDRISRNLLDFLELYDELKCYGVAFASKNECFDTQSPGGEAMLKILLIFAELERKTIAERVTAVMLGRANENKWNGGRVPFGYMPGPVTTDANGKKCKSWPVPDPIEAPIVRAIFELYLREKALKKVAVALNTAGYRSRKGTLWSDTTVRCILKNHFYKGEYVYNRQNPNAGRREDFYRSENDWVVVTGQHEAIVPEETWRRCNEMLSKNRSWLAPIGSLVSAQDKYIFGGLLQCAECGYTMNSKDRTRIHDHTHSSYYYCTGRWKAPAVCTGEHSGYASDRVLLPQILKLIARMIEACANAIKFASAEQLVSYLLNDNLIPGATGIEEAQRIYMIVRAHVKHIYGVDQTNQYNPNALLVEQSQKEKEKQERALSRLKRAYLFDDGDMSEAEYFEQKAAIEGTIAKLDKQIKSLSGNDIGADEAYLAQLSKLIMIKKLQDTNSDFDYYKLAKAIGRKPIHDFLTEIISRIIIGEQNRIIKIIFKNGVSITLQYEK

SEQ ID NO: 568 - protein, 582 aa, Unknown
  Description of Unknown: Integrase B569 sequence
  PTHR30461:SF3,IPR036162,PS51737,IPR011109,PTHR30461, PS00397,PF00239,G3DSA:1.10.10.2600,IPR006119,SSF53041, cd00338,SM00857,IPR025827,IPR038109,PS51736, IPR006118,PF13408,G3DSA:3.40.50.1390,PF07508,Coil
MNQDKLTDKLSSQKCALYIRVSTHWQVDKASLPVQREDLINYAKYALGIDKYEVFEDAGYSAKNTDRPAFQQMMARLRTGEFSHLLVWKIDRISRNLLDFAGMYSEIKKLGITFVSKNEQFDTSNAMGEAMLKIILVFAELERNMTSERVTAIMLSRANNGQWNGGKVPFGYDYDKENRTFTINEAEASVVNLIYDAYEANNSLLTVSRTLNEKGLLSRKGSPWTPTTISIILKNPFYIGVYRYNYHDETKSGGNARSTQLKNKSEWIYVKDHHPAIIDAERQARIISLLERNRRSNKDSAKSYVRKNTHIFAGLLYCGCCGSQMQSTIDRERSDGYRPSIYACTRKRRFNDCDNKYISDVTIAPFVLNYIANILKAQNNFGKSTSIETFERKLLRGKMFEDVEHIERIGLTEMYDILKRGNLSDAVYSTRLQGTIDEQAIIDERNLLSVEKRKKERALARLKSLYLYNDDAISERDYIIEKKTLTDSIERIDKRLEEIERNSSQHFTMTDDEFMTKASVFIMTHHLQGKRYIEFEKLIRKIDSRVIKDFVSSVIQKVVIKNGRVMSIRFRNGIEHNFLYKT

SEQ ID NO: 569 - protein, 582 aa, Unknown
  Description of Unknown: Integrase B570 sequence
  PTHR30461:SF3,IPR036162,PS51737,IPR011109,PTHR30461, PS00028,PS00397,PF00239,G3DSA:1.10.10.2600,IPR006119, SSF53041,IPR013087,cd00338,SM00857,IPR038109, PS51736,IPR006118,G3DSA:3.40.50.1390,PF07508,Coil
MAKHAITIPQNPKAALYIRVSTDMQADKDSLPLQESDLRKLADLNGIKDIEVFCDAGFSGKNLNRPAFRSMMDRIRAREFSHLYVWKLDRISRNLLDFLELYDELKCYGVAFASKNESFDTQSPGGEAMLKILLIFAELERKTIAERVTAVMLGRANENKWNGGRVPFGYMPGPVTTDANGKKCKSWPVPDPIEAPIVRAIFELYLREKALKKVAAALNTAGYRSRKGTLWSDTTVRCILKNHFYKGEYVYNRQNPNAGRREDFYRSENDWVVVTGQHEAIVPEETWRRCNEMLSKNRSWLAPIGSLVSAQDKYIFGGLLQCAECGYTMNSKDRTRIHDHTHSSYYYCTGRWKAPVVCTGEHSGYASDRVLLPQILKLIARMIEACANAIKFANAEQLVSYLLNDNLIPGATGIEEAQRIYMIVRAHVKHIYGVDQANQYNPNALLVEQSQKEKEKQERALSRLKRAYLFDDGDMSEAEYFEQKAAIEGTIAKLDKQIKSLSGNDIGADEAYLAQLSKLIMIKKLQNTNSDFDYYKLAKAIGRKPIHDFLTEIISRIIIGEQNRIIKIIFKNGVSITLQYEK

SEQ ID NO: 570 - protein, 582 aa, Unknown
  Description of Unknown: Integrase B571 sequence
  PTHR30461:SF3,IPR036162,PS51737,IPR011109,PTHR30461, PS00028,PS00397,PF00239,G3DSA:1.10.10.2600,IPR006119, SSF53041,IPR013087,cd00338,SM00857,IPR025827,IPR038109 ,PS51736,IPR006118,PF13408,G3DSA:3.40.50.1390,PF07508,Coil
MAKHAITIPQNPKAALYIRVSTDMQADKDSLPLQESDLRKLADLNGIKDIEVFSDAGFSGKNLNRPAFRSMMDRIRAREFSHLYVWKLDRISRNLLDFLELYDELKCYGVAFASKNECFDTQSPGGEAMLKILLIFAELERKTIAERVTAVMLGRANENKWNGGRVPFGYMPGPVTTDANGKKCKSWPVPDPIEAPIVRAIFELYLREKALKKVAKALNAAGYRSRKGTQWSDTTVRCILKNHFYKGEYVYNRQNPNANRREDFYRSENDWVVVTGQHEAIVPEETWRRCNEMLSKNRNWLAPIGSLVSAQDKYIFGGLLQCAECGYTMNSKDRTRIHNHTHSSYYYCTGRWKAPAVCTGEHSGYASDRVLLPQILKLIARMIEACANAIKFASAEQLVSYLLNDNLIPGATGIKEAQRIYMIVRAHVKHIYGVDQTNQYNPNALLVEQSQKEKEKQERALSRLKRAYLFDDGDMSEAEYFEQKAAIEGTIAKLDKQIKSLSGNDIGADEAYFAQLSKLIMIKKLQDTNSDFDYYKLAKAIGRKPIHDFLTEIISRIIIGEQNRIIKIIFKNGVSITLQYEK

SEQ ID NO: 571 - protein, 582 aa, Unknown
  Description of Unknown: Integrase B572 sequence
  PTHR30461:SF3,IPR036162,PS51737,IPR011109,PTHR30461, PF00239,G3DSA:1.10.10.2600,IPR006119,SSF53041,cd00338, SM00857,IPR025827,IPR038109,PS51736,mobidb-lite, PF13408,G3DSA:3.40.50.1390,PF07508,Coil
MAKKKKPAGGVAIIYARYSSHNQRDVSIEQQIEACRKHAAELGLTITDTYEDRALSGRTDNRPAFQRMMRDAKDGKFQYVLAWKSNRMGRNMMQAMVNESRLMDCGVKVFYAEEDFDDSAAGRFALRSMMNVNQFYSDNLAEDVRRGLMDNASKCMANGRQPLGYKRGENGKIVVDEPAATIVREVYARVASGEMFMDIARDLNRRGIKTADKGEWNKNSFHKMCSNERYRGIYIYGETRIEGGIPPIVDDVLWYKVQEAIKVKKSKNRHHRPDDEDYLLTGKLRCGKCGGYMIGMSGRSKTGDVHHYYACQNRRVGHTCGKKNIRRDVIEPAVAQAIKQYCLTDDAIEWITDQTIAYWEDKDRKLQIDSIENDLATVQSSISNVMKAIEMGVITETTRDRLIELEKQQADLKSKLVLAKEEIVHVDRKDLISSLLAFRHGNVHDRAYQEKLFNAFLIAVYVYDDDHLKLVFNSFGKDDTVSIALDLVENDDSSELSDVSKSSPVISNGQPEQSHPMNNRVAFLFCFLPISRSEHTALYQRSLGKSNTRTAFPFLGRCSAGAFSFVSQRAESSYRMLMRPAP

SEQ ID NO: 572 - protein, 582 aa, Unknown
  Description of Unknown: Integrase B573 sequence
  cd03768,PTHR30461:SF3,SM00857,G3DSA:1.10.10.2600,IPR036162, PF13408,IPR025827,PS51737,G3DSA:3.40.50.1390,IPR006119, IPR038109,PF07508,IPR011109,SSF53041,PTHR30461, PS51736,Coil,PF00239
MNTIAIYTRKSKFTGKGESIENQIEKCKKFIEFKFNIDSENVNIFIDEGFSGKNENRPQYQLMMEKIKKKEIDSIVIYQLNRLGRNARDIHNTMQLCDDLGVIIYSATEGFDSSTSFGRAVIGILASLAQLEREQLAERVKDNMYTLAKMGRWLGGQSPLGFDGSREYYIDETGKERSITKLKKNEEELKLVKLLYDKYLEEKSLSQVGKWALINHLTGKNGGNLNKNAINVILQNPVYVKSSKEVFEYLSNEGYEVCGEPNGNGLLRYGKDDEQIVATAKHKGVIPSDKWIEVQKILKDNVSKAPRMGKTNTALLTGLLRCKCGSTMRISYGQKRKDGTKPFYYICNMKINSGGARCNLKNLNGNLFEKNFIQFLKNYSKETLFAELQKLLNNSKDLESTISSNKIDLEIEKSNKAIKQILNKLKLTDDDELSKILLQEIKVENNKLKALSKQKEELLNDQSEVVITQSEVLAILDDLDNFQKTFDDLNLEDKQKALKSLIESITLTDDKFIVDFNIKKKLDNAIKKLSSLFAKYKSSQLRHPCRSYMYRHSSWSQCSKASTWITTSYSSKFNCHWRYNFI

SEQ ID NO: 573 - protein, 582 aa, Unknown
  Description of Unknown: Integrase B574 sequence
  PTHR30461:SF3,IPR036162,PS51737,IPR011109,PTHR30461, PS00028,PS00397,PF00239,G3DSA:1.10.10.2600,IPR006119, SSF53041,IPR013087,cd00338,SM00857,IPR025827,IPR038109 ,PS51736,IPR006118,PF13408,G3DSA:3.40.50.1390,PF07508,Coil
MAKHAITIPQNPKAALYIRVSTDMQADKDSLPLQESDLRKLADLNGIKDIEVFSDAGFSGKNLNRPAFRSMMDRIRAREFSHLYVWKLDRISRNLLDFLELYDELKCYGVAFASKNECFDTQSPGGEAMLKILLIFAELERKTIAERVTAVMLGRANEKKWNGGRVPFGYMPGPVTTDANGKKCKSWPVPDPIEAPIVRAIFELYLREKALKKVAVALNTAGYRSRKGTLWSDTTVRCILKNHFYKGEYVYNRQNPNAGRREDFYRSENDWVVVTGQHEAIVPEETWRRCNEMLSKNRSWLAPIGSLVSAQDKYIFGGLLQCAECGYTMNSKDRTRIHDHTHSSYYYCTGRWKAPAVCTGEHSGYASDRVLLPQILKLIARMIEACANAIKFASAEQLVSYLLNDNLIPGATGIEEAQRIYMIVRAHVKHIYGVDQANQYNPNALLIEQSQKEKEKQERALSRLKRAYLFDDGDMSEAEYFEQKAAIEDSITKLNKQIKSLSVNDIGADEAYLAQLSKLIMIKKLQDTNSDFDYYKLAKAIGRKPIHDFLTEIISRIIIGEQNRIIKIIFKNGVSITLQYEK

SEQ ID NO: 574 - protein, 582 aa, Unknown
  Description of Unknown: Integrase B575 sequence
  PTHR30461:SF3,IPR036162,PS51737,IPR011109,PTHR30461, PS00028,PS00397,PF00239,G3DSA:1.10.10.2600,IPR006119, SSF53041,IPR013087,cd00338,SM00857,IPR038109, PS51736,IPR006118,G3DSA:3.40.50.1390,PF07508,Coil
MAKHAITIPQNPKAALYIRVSTDMQADKDSLPLQESDLRKLADLNGIKDIEVFSDAGFSGKNLNRPAFRSMMDRIRAREFSHLYVWKLDRISRNLLDFLELYDELKDYGVAFASKNESFDTQSPGGEAMLKILLIFAELERKTIAERVTAVMLGRANENKWNGGRVPFGYMPGPVTTDANGKKCKSWPVPDPIEAPIVRAIFELYLREKALKKVATALNTAGYRSRKGTLWSDTTVRCILKNHFYKGEYVYNRQNPNAGRREDFYRSENDWVVVTGQHEAIVPEETWRRCNEMLSKNRSWLAPIGSLVSAQDKYIFGGLLQCAECGYTMNSKDRTRIHDHTHSSYYYCTGRWKAPVVCTGEHSGYASDRVLLPQILKLIARMIEACANAIKFASAEQLVSYLLNDNLIPGATGIEEAQRIYMIVRAHVKHIYGVDQANQYNPNALLVEQSQKEKEKQERALSRLKRAYLFDDGDMSEAEYFEQKAAIEGTIAKLEKQIKSLSGNDIGADEAYLAQLSKLIMIKKLQNTNSDFDYYKLAKAIGRKPIHDFLTEIISRIIIGEQNRIIKIIFKNGVSITLQYEK

SEQ ID NO: 575 - protein, 582 aa, Unknown
  Description of Unknown: Integrase B576 sequence
  PTHR30461:SF3,IPR036162,PS51737,IPR011109,PTHR30461, PS00028,PS00397,PF00239,G3DSA:1.10.10.2600,IPR006119, SSF53041,IPR013087,cd00338,SM00857,IPR025827,IPR038109 ,PS51736,IPR006118,PF13408,G3DSA:3.40.50.1390,PF07508,Coil
MAKHAITIPQNPKAALYIRVSTDMQADKDSLPLQESDLRKLADLNGIKDIEVFSDAGFSGKNLNRPAFRSMMDRIRAREFSHLYVWKLDRISRNLLDFLELYDELKCYGVAFASKNECFDTQSPGGEAMLKILLIFAELERKTIAERVTAVMLGRANENKWNGGRVPFGYMPGPVTTDANGKKCKSWPVPDPIEAPIVRAIFELYLREKALKKVAAALNTAGYRSRKGTLWSDTTVRCILKNHFYKGEYVYNRQNPNAGRREDFYRSENDWVVVTGQHEAIVPEETWRRCNEMLSKNRSWLAPIGSLVSAQDKYIFGGLLQCAECGYTMNSKDRTRIHDHTHSSYYYCTGRWKAPAVCTGEHSGYASDRVLLPQILKLIARMIEACANAIKFASAEQLVSYLLNDNLIPGATGIEEAQRIYMIVRAHVKHIYGVDQANQYNPNALLVEQSQKEKEKQERALSRLKRAYLFDDGDMSEAEYFDQKSAIEDTITKLDKQIKSLSGNDIGADEAYLAQLSKLIMIKKLQDTNSDFDYYKLAKAIGRKPIHDFLTEIISRIIIGEQNRIIKIIFKNGVSITLQYEK

SEQ ID NO: 576 - protein, 582 aa, Unknown
  Description of Unknown: Integrase B577 sequence
  PTHR30461:SF3,IPR036162,PS51737,IPR011109,PTHR30461, PS00028,PS00397,PF00239,G3DSA:1.10.10.2600,IPR006119, SSF53041,IPR013087,cd00338,SM00857,IPR025827,IPR038109 ,PS51736,IPR006118,PF13408,G3DSA:3.40.50.1390,PF07508,Coil
MAKHAITIPQNPKAALYIRVSTDMQADKDSLPLQESDLRKLADLNGIKDIEVFSDVGFSGKNLNRPAFRSMMERIRAREFSHLYVWKLDRISRNLLDFLELYDELKDYGVAFASKNESFDTQSPGGEAMLKILLIFAELERKTIAERVTAVMLGRANENKWNGGRVPFGYMPGPVTTDANGKKCKSWPVPDPIEAPIVRAIFELYLREKALKKVATALNTAGYRSRKGTLWSDTTVRCILKNHFYKGEYVYNRQNPNAGRREDFYRSENDWVVVTGQHEAIVPEETWRRCNEMLSKNRSWLAPIGSLVSAQDKYIFGGLLQCAECGYTMNSKDRTRIHDHTHSSYYYCTGRWKAPAVCTGEHSGYASDRVLLPQILKLIARMIEACANAIKFASAEQLVSYLLNDNLIPGATGIEEAQRIYMIVRAHVKHIYGVDQTNQYNPNALLVEQSQKEKEKQERALSRLKRAYLFDDGDMSEAEYFEQKAAIEGTIIKLEKQIKSLSGNDIGADEAYLAQLSKLIMIKKLQDTNSDFDYYKLAKAIGRKPIHNFLTEIISRIIIGEKNRIIKIIFKNGVPITFQYAK

SEQ ID NO: 577 - protein, 582 aa, Unknown
  Description of Unknown: Integrase B578 sequence
  cd03768,PTHR30461:SF3,SM00857,IPR036162,PF13408, IPR025827,G3DSA:3.40.50.1390,IPR006119,PF07508,IPR011109, SSF53041,PTHR30461,PS51736,Coil,PF00239
MEKVKIAIYSRKSKYSDKGDSVGNQVEIAMKYITQHYPSSEYDVESIIYEDDGFSGGNIDRPKFKEFLTEENKKPFDILICYRLDRISRNIAHFSNLMNYITNLGTNFVSIKEQFDTKTPMGRAMMYIASVFAQLEREVIAERIRDNMIELAKTGRWLGGKTPTGYKSERIELVDVYEQSEDSVLEKKKKKATKLISIDEELELIQEIGYKFLELKSLTKLEAYFVKNKIATKNNLDFSVSTLRRILVNPVYAPNDKDVLEYFNKNGVTIYADGDRANFDGKYGLIGYGKKDGKKDRNIKDWIVSVGFHQPAFKEGIVWVKIQELLEKNKEKRYRADCKHDFLFSGILRCSECGSYMRPKIAQGERFYYICELKEKSRGMRCHSKNINGRALDELMMKKLEKIFVPTSEVYQELSKLTIKKDRIELDTKVEELNKKVKTNDEAMKNLIDKLKYMDIEVIDLINSELKRLKQENKELEDEVIKLKTNKETEENFRDEESKMAELILDIINNCFKTFNYLDIKSKKDILRILIEDMQGSGQNVEVDILNTKISQNDKRLFSDMFEETANKKDKNVVSRLGLQFL

SEQ ID NO: 578 - protein, 582 aa, Unknown
  Description of Unknown: Integrase B579 sequence
  PTHR30461:SF3,IPR036162,PS51737,IPR011109,PTHR30461, PS00397,PF00239,G3DSA:1.10.10.2600,IPR006119,SSF53041, cd00338,SM00857,IPR025827,IPR038109, PS51736,IPR006118,PF13408,G3DSA:3.40.50.1390,PF07508,Coil
MNQDKLTDKLSSQKCALYIRVSTHWQVDKASLPVQREDLINYAKYALGIDKYEVFEDAGYSAKNTDRPSFQQMMARLRTGEFSHLLVWKIDRISRNLLDFAGMYSEIKKLGITFVSKNEQFDTSNAMGEAMLKIILVFAELERNMTSERVTAIMLSRANNGQWNGGKVPFGYDYDKENRTFTINEAEASVVNLIYDAYEANNSLLTVSRTLNEKGLLSRKGSPWTPTTISIILKNPFYIGVYRYNYHDETKSGGNARSTQLKNKSEWIYVKDHHPAIIDAERQARIISLLERNRRSNKDSAKSYVRKNTHIFAGLLYCGCCGSQMQSTIDRERSDGYRPSIYACTRKRRFNDCDNKYISDVTIAPFVLNYIANILKAQNNFGKSTSIETFERKLLRGKMFEDVEHIERIGLTEMYDILKRGNLSDAVYSTRLQGTIDEQAIIDERNLLSVEKRKKERALARLKSLYLYNDDAISERDYIIEKKTLTDSIERIDKRLEEIERNSSQHFTMTDDEFMTKASVFIMTHHLQGKRYIEFEKLIRKIDSRVIKDFVSSVIQKVVIKNGRVMSIRFRNGIEHNFLYKT

SEQ ID NO: 579 - protein, 582 aa, Unknown
  Description of Unknown: Integrase B580 sequence
  PTHR30461:SF3,IPR036162,PS51737,IPR011109,PTHR30461, PS00397,PF00239,G3DSA:1.10.10.2600,IPR006119,SSF53041, SM00857,IPR025827,IPR038109,PS51736,cd03768, IPR006118,PF13408,G3DSA:3.40.50.1390,PF07508,Coil
MKKDHAPVGVWSLVVKQKSAGPLERVSALAACYKGATSWKRSLGCILLEQGRAVHGQLTWKTTAFIVTRRPQFEKGVLSFMRVICYVRVSTREQAEKGYSVSEQQERLKAYCLAKDWVVAQVITDPGFSGAKLERPGMQQMISLVQAKKCDAVLVWKLDRLSRSQKDTLYLIEDVFLKNGCAFVSMNENFDTSTAFGRAMIGILSVFAQLEREQIRERMAVGRVGRAKAGLFHGGGFAPIGYDYKTIAEGGAGLVVNEYEAMQVREVFSLYLQGWPVNRIRKYMTARYTTKDGDWGSDTTVRDVLKNPLYTGKINWAKKVYDGQHEPLISQETFDAAAARLATSSWKRTCSDGMERNSPFKSTHLLGGIIWCARCGARYFASGNYSGRGENKHYWPYYVCYSRAKSAKHMIRDPNCRNDRWAVAKLDAIIEGEIRKLAFDPAALELAVSGPQQDEDVAQRRAALQQRLNDLRAQMGRVLDLYQMGGSLPASMVGDRVAKLQAEIDGVEAALAEAVEEPPTQRLDAARAALVGAEDVLDNGTLDERRELVHSLIRRIDLDGENIDIHWSFAPEAAEVIPGRSA

SEQ ID NO: 580 - protein, 582 aa, Unknown
  Description of Unknown: Integrase B581 sequence
  PTHR30461:SF3,IPR036162,PS51737,IPR011109,PTHR30461, PS00028,PS00397,PF00239,G3DSA:1.10.10.2600,IPR006119, SSF53041,IPR013087,cd00338,SM00857,IPR025827,IPR038109 ,PS51736,IPR006118,PF13408,G3DSA:3.40.50.1390,PF07508,Coil
MAKHAITIPQNPKAALYIRVSTDMQADKDSLPLQESDLRKLADLNGIKDIEVFSDAGFSGKNLNRPAFQSMMERIRAREFSHLYVWKLDRISRNLLDFLELYDELKCYGVAFASKNECFDTQSPGGEAMLKILLIFAELERKTIAERVTAVMLGRANENKWNGGRVPFGYMPGPVTTDANGKKCKSWPVPDPIEAPIVRAIFELYLREKALKKVAAALNTAGYRSRKGTLWSDTTVRCILKNHFYKGEYVYNRQNPNAGRREDFYRSENDWVVVTGQHEAIIPEETWRRCNEMLSKNRSWLAPIGSLVSAQNKYIFGGLLQCAECGYTMNSKDRTRIHDHTHSSYYYCTGRWKAPAVCTGEHSGYASDRVLLPQILKLIARMIEACANAIKFASAEQLVSYLLNDNLIPGATGIEEAQRIYMIVRAHVKHIYGVDQANQYNPNALLVEQSQKEKEKQERALSRLKRAYLFDDGDMSEAEYFEQKAAIEGTIAKLEKQIKSLSGNDIGADEAYLAQLSKLIMIKKLQDTNSDFDYYKLAKAIGRKPIHDFLTEIISRIIIGEQNRIIKIIFKNGVSITLQYAK

SEQ ID NO: 581 - protein, 582 aa, Unknown
  Description of Unknown: Integrase B582 sequence
  PTHR30461:SF3,SM00857,IPR006118,G3DSA:1.10.10.2600,IPR036162, PS51737,G3DSA:3.40.50.1390,Coil,IPR006119,IPR038109, PF07508,IPR011109,SSF53041,PTHR30461,PS00397, PS51736,cd00338,PF00239
MAKHAITIPKTPKAALYIRVSTDMQADKDSLPLQESDLRKLADLNGIKDIEVFSDVGFSGKNLNRPAFQSMMERIRAREFSHLYVWKLDRISRNLLDFLELYDDLKDYGVAFASKNESFDTQSPGGEAMLKILLIFAELERKTIAERVTAVMLGRANENKWNGGRVPFGYMPGPITTDANGKKCKSWPVPDPIEAPVVRAIFELYLREKALKKVAAALNAAGYRSRKGTQWSDTTVRCILKNHFYKGEYVYNRQNSNASRREDFYRSENDWVVVTGQHEAIVPEETWRKCNDMLSKNRSWLAPIGSLVSAQDKYIFGGLLECAACGYTLNSKDRARGHDHTRSTYYYCNGRWKVPAVCAAEHPGYASDCVLLPRLLKLIARIIEACANAIKFASAEQLVSYLLNDNLVPGAIGIEEAQKIYMIVRAHVKHIYGVDQADHYNPNALLVEQSKKEKEKQERALSRLKRAYLFDDGDMSEAEYFEQKAAIEGTIAKLDKQIKSLSGNDIGADEAYLAQLSKLIMIKKLQDTNSDFDYYKLAKAIGRKPIHDFLAEIISRIIMGEQNRIIKIIFKNGVSITLQYEK

SEQ ID NO: 582 - protein, 582 aa, Unknown
  Description of Unknown: Integrase B583 sequence
  PTHR30461:SF3,cd00338,SM00857,G3DSA:1.10.10.2600,IPR036162, PF13408,PS51737,IPR025827,G3DSA:3.40.50.1390,IPR006119, IPR038109,PF07508,IPR011109,SSF53041,PTHR30461, PS51736,Coil,PF00239
MARKKNIAAGLDAVIYARYSSHNQREVSIEQQIAECTKHAAALGLRIVGTYEDRAISGKTDNRPRFQQMMRDAEKGKFQAVVAWKSNRIGRNMLQAMVNEAKLDDYGVKVFYAEEDFDDTAAGRFALRNMMNVNQFYSENMAEDITRGLYDNASKCMANGRQPLGYKRGEDGRVVLDEANAAVVREIFTRVAAGDLFVDIARDLNAQGIKTSKGANWNKGSFQSICQNERYRGIYIYGDVRVADGIPRIVSDDLWYRVQEAMRMKKNPVGTRHRVGAEDYLLTGKLRCGHCGSYMTGVSGTSRNGELHYYYTCQKRRTEHACDKKNIRRDVIEPAVAQAIKMYCLTDDVIAWIADRTVEYWEKHDNDLQIEALEQQLEENKKATSNMLKAIEMGIITEATRTRMVELETEQSRLSVQLNAAKEDVVKIDREQIISYLELLQQGDIHDRDFQMELFKNFLVAVYVYDDNRMKLVFSCMGDQNSVEIPLETGEDPPDGGLSPDAKMFVLTPDSSTKQFVLEPNSLRKRVRVRFLFIGGSAEGLHRALNEQRQGIIVVMVSCLLFCGIKVALCELDRPPIWRVWG

SEQ ID NO: 583 - protein, 582 aa, Unknown
  Description of Unknown: Integrase B584 sequence
  PTHR30461:SF3,cd00338,SM00857,G3DSA:1.10.10.2600,IPR036162, PF13408,IPR025827,G3DSA:3.40.50.1390,PS51737,IPR006119, IPR038109,PF07508,SSF53041,IPR011109,PTHR30461, PS51736,Coil,PF00239
MIDNCVRAVFYARVSTQEEEQLKALPKQVEECKDIIASKGWRLIDGYVDEGKSGTKKDGRKAYIKLLEDMQEDKFDIVVVKSQDRLQRNTFDWYKFTDLLNKNNKRLYLYMDNKFYEPSEDALITGIKAILAEEYSRDLSKKLNNSNKRRIEKAKAGEEVSAMGNGQTYGYSIVNGKWVVDESQREVVRRMYELYTELHSVRKVRDALNEQGYRNQRGNLFTDENIGRIVKNVMHKGWVILNRHHRDFDSKEIIEKSEEEWVIVKNDHEAIVSEELWDAVNDEIQSHRNKGNSGTRGKRGGTDPLSGKMVCSCCGRVLWKHASQGSYKSKEGRKYTYKRYTQWYCSGKMGRGELACTDPATISGVKLQKYLVEMADMFLDYSTVEYSKNLLKRRTISWLEDLKDKLTTPNDNEKIEQDLKALEGKRGNLIDLYTDGLISKEEFKSRSVDLDAEMEKKRAFLVPVEENPDIKAIEDTIANIDAEIEALFEDEAMVEEKKVQFIQEHIKKIYVSKNSDVFIVLDNVAGAFLFIDKEDTRIEVVPVAEYNPEELSEEGITENDFVPFDRESMPQHHVPICIPRHD

SEQ ID NO: 584 - protein, 582 aa, Unknown
  Description of Unknown: Integrase B585 sequence
  PTHR30461:SF3,cd00338,SM00857,G3DSA:1.10.10.2600,IPR036162, PF13408,IPR025827,G3DSA:3.40.50.1390,PS51737,IPR006119, IPR038109,PF07508,SSF53041,IPR011109,PTHR30461, mobidb-lite,Coil,PF00239
MPRKPAKHPAKPKRGKKLEVEEPGVLYGRYSSHNQKDISVEQQFEKGYELAAEYGIRIIDTYADRAVSGRTDKRRDFQRMMTDAAKGKFRYVIAWKSNRMGRNMLEALINEARLQDLGVRVLYVEEDFDDTAAGRFAARSMMNVNQFYSENMAEDIKRGLYDNAANCMVANGHLPYGYKADETLHYAIDEPKAAVIREIFTRVSCGEAFVDIMASLNARGIKTSYGRPWGRSSFQRILSNERYRGIYIYGDVRKEGGIPRIVSDELYFKVQEVITTKKNPQGRHRVNGDYLLTGKLFCGHCKSPMTGISGTSRSGNLHYYYVCQKRRTEKTCEKKNLRRDDIELQVAKAIKRRTLDDDTINWIADSVVEYSQHQESASGIGLLEDQLKDTQRSIKNLMAAIEQGIITPTTKARLMELEKEQSDIDRKITMAKADVIPVNRDQLVGWLKKLQAGDVHDKKYQAELFDTFLIAVYVYDNPDGQDYMKVVFNYAGSKNTVEIPLDPSVIDNVENIETGAVRLSSAQVHQNTQVRTLLVSECVRPDKKTAAEVIVLCGSFIYFASGIRSRNAAAVSKSQPNAAKAL

SEQ ID NO: 585 - protein, 582 aa, Unknown
  Description of Unknown: Integrase B586 sequence
  PTHR30461:SF3,IPR036162,PS51737,IPR011109,PTHR30461, PS00028,PS00397,PF00239,G3DSA:1.10.10.2600,IPR006119, SSF53041,IPR013087,cd00338,SM00857,IPR025827,IPR038109 ,PS51736,IPR006118,PF13408,G3DSA:3.40.50.1390,PF07508,Coil
MAKHAITIPQNPKAALYIRVSTDMQADKDSLPLQESDLRKLADLNGIKDIEVFSDAGFSGKNLNRPAFRSMMDRIRAREFSHLYVWKLDRISRNLLDFLELYDELKCYGVAFASKNECFDTQSPGGEAMLKILLIFAELERKTIAERVTAVMLGRANENKWNGGRVPFGYMPGPVTTDANGKKCKSWPVPDPIEAPIVRAIFELYLREKALKKVAAALNTAGYRSRKGTLWSDTTVRCILKNHFYKGEYVYNRQNPNAGRREDFYRSENDWVVVTGQHEAIVPEETWRRCNEMLSKNRSWLAPIGSLVSAQDKYIFGGLLQCAECGYTMNSKDRTRIHDHTHSSYYYCTGRWKAPAVCTGEHSGYASDRVLLPQILKLIARMIEACANAIKFASAEQLVSYLLNDNLIPGATGIEEAQRIYMIVRAHVKHIYGVDQTNQYNPNALLVEQSQKEKEKQERALSRLKRAYLFDDGDMSEAEYFEQKAAIEGTIVKLDKQIKSLSGNDIGADEAYLAQLSKLIMIKKLQDTNSDFDYYKLAKAIGRKPIHDFLTEIISRIIIGEQNRIIKIIFKNSVSITLQYEK

SEQ ID NO: 586 - protein, 582 aa, Unknown
  Description of Unknown: Integrase B587 sequence
  PTHR30461:SF3,IPR036162,PS51737,IPR011109,PTHR30461, PS00397,PF00239,G3DSA:1.10.10.2600,IPR006119,SSF53041, cd00338,SM00857,IPR025827,IPR038109,PS51736, IPR006118,PF13408,G3DSA:3.40.50.1390,PF07508,Coil
MNQDKLTDKLSSQKCALYIRVSTHWQVDKASLPVQREDLINYAKYALGIDKYEVFEDAGYSAKNTDRPAFQQMMARLRTGEFSHLLVWKIDRISRNLLDFAGMYSEIKKLGITFVSKNEQFDTSNAMGEAMLKIILVFAELERNMTSERVTAIMLSRANNGQWNGGKVPFGYDYDKENRTFTINEAEASVVNLIYDAYEANNSLLTVSRTLNEKGLLSRKGSPWTPTTISIILKNPFYIGVYRYNYHDETKSGGNARSTQLKNKSEWIYVKDHHPAIIDAERQARIISLLERNRRSNKDSAKSYVRKNTHIFAGLLYCGCCGSQMQSTIDRERSDGYRPSIYACTRKRRFNDCDNKYISDVTIAPFVLNYIANILKAQNNFGKSTSIETFERKLLRGKMFEDVEHIERIGLTEMYDILKRGNLSDAVYSTRLQGTIDEQAIIDERNLLSVEKRKKERALARLKSLYLYNDDAISERDYIIEKKTLTDSIERIDKRLEEIERNSSQQFTMTDDEFMTKASVFIMTHHLQGKRYIEFEKLIRKIDSRVIKDFVSSVVQKVVIKNGRVMSIRFRNGIEHNFLYKT

SEQ ID NO: 587 - protein, 582 aa, Unknown
  Description of Unknown: Integrase B588 sequence
  PTHR30461:SF3,IPR036162,PS51737,IPR011109,PTHR30461, PS00028,PS00397,PF00239,G3DSA:1.10.10.2600,IPR006119, SSF53041,IPR013087,cd00338,SM00857,IPR025827,IPR038109 ,PS51736,IPR006118,PF13408,G3DSA:3.40.50.1390,PF07508,Coil
MAKHAITIPQNPKAALYIRVSTDMQADKDSLPLQESDLRKLADLNGINDTEVFCDAGFSGKNLNRPAFQSMMERIRAREFSHLYVWKLDRISRNLLDFLELYDELKCYGVAFASKNECFDTQSPGGEAMLKILLIFAELERKTIAERVTAVMLGRANENKWNGGRVPFGYMPGPVTTDANGKKCKSWPVPDPIEAPIVLGIFELYLREKALKKVAAALNTAGYRSRKGTLWSDTTVRCILKNHFYKGEYVYNRQNPNAGRREDFYRSENDWVVVTGQHEAIVPEETWRRCNEMLSKNRSWLAPIGSLVSAQDKYIFGGLLQCAECGYTMNSKDRTRIHDHTHSSYYYCTGRWKAPAICTGEHSGYASDRVLLPQILKLIARMIEACANAIKFASAEQLVSYLLNDNLIPGATGIEEAQRIYMIVRAHVKHIYGVDQANQYNPNALLIEQSQKEKEKQERALSRLKRAYLFDDGDMSEAEYFEQKAAIEDTIAKLDKQIKSLSGNDIGADEAYLAQLSKLIMIKKLQDTNSDFDYYKLAKAIGRKPIHDFLTEIISRIIIGEQNRIIKIIFKNGVSITLQYEK

SEQ ID NO: 588 - protein, 582 aa, Unknown
  Description of Unknown: Integrase B589 sequence
  PTHR30461:SF3,cd00338,SM00857,G3DSA:1.10.10.2600,IPR036162, PF13408,IPR025827,G3DSA:3.40.50.1390,PS51737,IPR006119, IPR038109,PF07508,SSF53041,IPR011109,PTHR30461, PS51736,Coil,PF00239
MFVRHKKNMKYALYGRVSSIKQKDEETIEMQKDELHSYVEQHHLDVYDEYYDEAQSGTLPFSERPEGKRLLTDAKAGHFNAVIFYRTDRLGRSAFEGLRVCQQLMDLGVAIQSINETYDTYTSTGKFIFTQMLAIAEMELSTIKTRMNDGKQRKLRRGMAGARGRALYGYKTDENGYYILDNTIVYADKTPVDIIRYIYQSTIDENASSITLSNRLNTMQVPGPIKYWNSKKILDIIKNPAYKGILDYYNTRSELYDDRIEIPVPPIVSPEIWQKANDGIKQRQIYNRQAHNHHHYLLGQGIVRCGNCGYAYTGIYYKDRAPTATKKFYKCNGRTLTKYKKLQNKPVCTMSRPVPGEWLENIVWAECCKLLTSKSYAEQVIVAYYDTTQQQNSFTDTVNILQSSLDKLEQERQDLITLCLKKIISDDDLAQRLPPLDQQITAIKAELKSHPEALSQADVTKEIRNTKEMIHLLQKMLPMTNDFYVKRALVQLLVHSVVVTTHEDNSFTIDINLNFGPQGLGNKLKGEIKDFCKGMTTRARYGVENAMEILKNAVSFNTCIGQAGIDRADGQRAIGDELVLRR

SEQ ID NO: 589 - protein, 582 aa, Unknown
  Description of Unknown: Integrase B590 sequence
  PTHR30461:SF3,IPR036162,PS51737,IPR011109,PTHR30461, PS00028,PS00397,PF00239,G3DSA:1.10.10.2600,IPR006119, SSF53041,IPR013087,cd00338,SM00857,IPR025827,IPR038109 ,PS51736,IPR006118,PF13408,G3DSA:3.40.50.1390,PF07508,Coil
MTKYAISIPQTQKAALYIRVSTDMQADKDSLPLQESDLRKLADLNGINDTEVFCDAGFSGKNLNRPAFRAMMERIRAREFSHLYVWKLDRISRNLLDFLELYDELKCYGVAFASKNECFDTQSPGGEAMLKILLIFAELERKTIAERVTAVMLGRANENKWNGGRVPFGYMPGPVTTDANGKKCKSWPVPDPIEAPIVRAIFELYLREKALKKVAAALNAAGYRSRKGTLWSDTTVRCILKNHFYKGEYVYNRQNPNAGRREDFYRSENDWVVVTGQHEAIVPEETWRRCNEMLSKNRNWLAPIGSLVSAQDKYIFGGLLQCAECGYTMNSKDRTRNHDHTHSSYYYCTGRWKAPAVCTGEHSGYASDRVLLPQILKLIARMIEACANAIKFASAEQLVSYLLNDNLIPGATGIEEAQRIYMIVRAHVKHIYGVDQTNQYNPNALLVEQSQKEKEKQERALSRLKRAYLFDDGDMSEAEYFEQKAAIEGTIAKLDKQIKSLSGNDIGADEAYLAQLSKLIMIKKLQDTNSDFDYYKLAKAIGRKPIHDFLTEIISRIIIGEQNRIIKIIFKNGVSITLQYEK

SEQ ID NO: 590 - protein, 582 aa, Unknown
  Description of Unknown: Integrase B591 sequence
  PTHR30461:SF3,IPR036162,PS51737,IPR011109,PTHR30461, PS00028,PS00397,PF00239,G3DSA:1.10.10.2600,IPR006119, SSF53041,IPR013087,cd00338,SM00857,IPR038109, PS51736,IPR006118,G3DSA:3.40.50.1390,PF07508,Coil
MAKHTITIPQNTKAALYIRVSTDMQADKDSLPLQESDLRKLADLNGIKDIEVFCDAGFSGKNLNRPAFRSMMDRIRAREFSHLYVWKLDRISRNLLDFLELYDELKCYGVAFASKNECFDTQSPGGEAMLKILLIFAELERKTIAERVTAVMLGRANENKWNGGRVPFGYMPGPVTTDANGKKCKSWPVPDPIEAPIVRAIFELYLREKALKKVAAALNTAGYRSRKGTLWSDTTVRCILKNHFYKGEYVYNRQNPNASRREDFYRSENDWVVVTGQHEAIVPKETWRRCNEMLSKNRSWLAPIGSLVSAQDKYIFGGLLQCAECSYTMNSKDRTRIHDHTHSSYYYCTGRWKAPAVCTGEHSGYASDRVLLPQILKLIARMIEACANAIKFASAEQLVSYLLNDNLIPGATGIEEAQRIYMIVRAHVKHIYGVDQANQYNPNALLVEQSQKEKEKQERALSRLKRAYLFDDGDMSEAEYFEQKAAIEGTIAKLDKQIKSLSGNDICADEAYLAQLSKLIMIKKLQDTNSDFDYYKLAKAIGRKPIHDFLTEIISRIIIGEQNRIIKIIFKNGVSITLQYEK

SEQ ID NO: 591 - protein, 582 aa, Unknown
  Description of Unknown: Integrase B592 sequence
  PTHR30461:SF3,IPR036162,PS51737,IPR011109,PTHR30461, PS00028,PS00397,PF00239,G3DSA:1.10.10.2600,IPR006119, SSF53041,IPR013087,cd00338,SM00857,IPR025827,IPR038109 ,PS51736,IPR006118,PF13408,G3DSA:3.40.50.1390,PF07508,Coil
MAKHAITIPQNPKAALYIRVSTDMQADKDSLPLQESDLRKLADLNGIKDIEVFSDAGFSGKNLNRPAFQSMMERIRAREFSHLYVWKLDRISRNLLDFLELYDELKCYGVAFASKNECFDTQSPGGEAMLKILLIFAELERKTIAERVTAVMLGRANENKWNGGRVPFGYMPGPVTTDANGKKCKSWPVPDPIEAPIVRAIFELYLREKALKKVAAALNTAGYRSRKGTLWSDTTVRCILKNHFYKGEYVYNRQNPNAGRREDFYRSENDWVVVTGQHEAIIPEETWRRCNEMLSKNRSWLAPIGSLVSAQNKYIFGGLLQCAECGYTMNSKDRTRIHDHTHSSYYYCTGRWKAPAVCTGEHSGYASDRVLLPQILKLIARMIEACANAIKFASAEQLVSYLLNDNLIPGATGIEEAQRIYMIVRAHVKHIYGVDQANQYNPNALLVEQSQKEKEKQERALSRLKRAYLFDDGDMSEAEYFEQKAAIEGTIAKLEKQIKSLSGNDIGADEAYLAQLSKLIMIKKLQDTNSDFDYYTLAKAIGRKPIHDFLTEIISRIIIGEQNRIIKIIFKNGVSITLQYEK

SEQ ID NO: 592 - protein, 582 aa, Unknown
  Description of Unknown: Integrase B593 sequence
  PTHR30461:SF3,IPR036162,PS51737,IPR011109,PTHR30461, PS00397,PF00239,G3DSA:1.10.10.2600,IPR006119,SSF53041, cd00338,SM00857,IPR025827,IPR038109,PS51736, IPR006118,PF13408,G3DSA:3.40.50.1390,PF07508,Coil
MNQDKLTDKLSSQKCALYIRVSTHWQVDKASLPVQREDLINYAKYALGIDKYEVFEDAGYSAKNTDRPAFQQMMARLRTGEFSHLLVWKIDRISRNLLDFAGMYSEIKKLGITFVSKNEQFDTSNAMGEAMLKIILVFAELERNMTSERVTAIMLSRANNGQWNGGKVPFGYDYDKENRTFTINEAEASIVNLIYDAYEANNSLLTVSRTLNEKGLLSRKGSPWTPTTISIILKNPFYIGVYRYNYHDETKSGGNARSTQLKNKSEWIYVKDHHPAIIDAERQARIISLLERNRRSNKDSAKSYVRKNTHIFAGLLYCGCCGSQMQSTIDRERSDGYRPSIYACTRKRRFNDCDNKYISDVTIAPFVLNYIANILKAQNNFGKSTSIETFERKLLRGKMFEDVEHIERIGLTEMYDILKRGNLSDAVYSTRLQGTIDEQAIIDERNLLSVEKRKKERALARLKSLYLYNDDAISERDYIIEKKTLTDSIERIDKRLEEIERNSSQQFTMTDDEFMTKASVFIMTHHLQGKRYIEFEKLIRKIDSRVIKDFVSSVVQKVVIKNGRVMSIRFRNGIEHNFLYKT

SEQ ID NO: 593 - protein, 582 aa, Unknown
  Description of Unknown: Integrase B594 sequence
  cd00338,SM00857,G3DSA:1.10.10.2600,IPR036162,PF13408, IPR025827,G3DSA:3.40.50.1390,PS51737,IPR006119,IPR038109, PF07508,IPR011109,SSF53041,PTHR30461,PS51736, Coil,PF00239
MSVDIKWQVPKAQPEASELAVVYARYSSHSQGEQSIEGQLSNARDYAAAHGYTIVHEYVDRAKSGRTDNRAEFQQMLKDTAKRQFSVIILWKVDRFGRNREEIAINKMKCRKNGVRVEYVAETIPDSPEGVILESVLEGFAEYYSLQLSQNIRRGRAESAEKCQSLGGNRPLGYKTGPDKKFVIDENTAPTVKMVFTMYADGKTVTEIVDKLNEMGLRTLRGGPFTKNSLHSILKNKKYIGIYEYQGREIKNGVPRIIEDDVFNKVQEMLKINKRAPAKTWSRADYILTDKLFCGKCGALMFGESGTSKTGAKHNYYICSNKKRFRSCDKKAVRQADIEDTVLNATHELLQDDELLDYIVDRTWEYYLAQDNSQEELRNLQRQLAQTDTAISNLIRAIEAGILTEETKKRMDELTQQKADLKASIADREIARGFHLQKSHIAFYLRSLRDADWSDKEAQKRLIQTFVNAVFVYDDHITLTYNFSGDKNTVTLRDMQRFEDGEEFGCRASRSTKMKDQKPRRFLVFSFYPCGFSGFTILQNATGFYSSCALFALKTHTEMHTKTGLLVRVKNGLQPFLDGIVI

SEQ ID NO: 594 - protein, 582 aa, Unknown
  Description of Unknown: Integrase B595 sequence
  PTHR30461:SF3,IPR036162,PS51737,IPR011109,PTHR30461, PS00028,PS00397,PF00239,G3DSA:1.10.10.2600,IPR006119, SSF53041,IPR013087,cd00338,SM00857,IPR038109, PS51736,IPR006118,G3DSA:3.40.50.1390,PF07508,Coil
MAKHAITIPQNPKAALYIRVSTDMQADKDSLPLQESDLRKLADLNGIKDIEVFCDAGFSGKNLNRPAFRSMMDRIRAREFSHLYVWKLDRISRNLLDFLELYDELKCYGVAFASKNESFDTQSPGGEAMLKILLIFAELERKTIAERVTAVMLGRANENKWNGGRVPFGYMPGPVTTDANGKKCKSWPVPDPIEAPIVRAIFELYLREKALKKVAAALNTAGYRSRKGTLWSDTTVRCILKNHFYKGEYVYNRQNPNAGRREDFYRSENDWVVVTGQHEAIVAEETWRRCNEMLSKNRSWLAPIGSLVSAQDKYIFGGLLQCAECGYTMNSKDRTGAHDHIHSSYYYCTGRWKAPAVCTGEHSGYASDRTLLPQTLKLIARMIEACANAIKFASAEQLVSYLLNDNLIPGAIGIEESQRIFMIVRSHVKHVYGVDQADQFNPNALLVEQSQKEKEKQERALSRLKRAYLFDDGDMSEAEYFEQKAAIEDTIAKLEKQIKSLSGNDIGADEAYLAQLSKLIMIKKLQDTNSDFDYYKLAKAIGRKPIHDFLTEIISRIIIGEQNRIIKIIFKNGVSITLQYEK

SEQ ID NO: 595 - protein, 582 aa, Unknown
  Description of Unknown: Integrase B596 sequence
  PTHR30461:SF3,SM00857,G3DSA:1.10.10.2600,IPR036162,PF13408, PS51737,G3DSA:3.40.50.1390,IPR025827,IPR006119,IPR038109, PF07508,IPR011109,SSF53041,PF00239,PTHR30461, PS51736,Coil,cd00338
MRVSVNLNAQKPDTTTNAVIYARYSSHGQTEQSIEGQLAKGHEYAAAQGYTVVHEYIDRAMTGRNDNREAFQKMLSDTGKHQFQVVIVWKVDRFGRNREEIAFNKHTCKKNGVRVEYVAESLPNSPEAVILESVLEGMAEYYSIQLSQNIRRGQLESAKKCQCVGGSVPLGYTLDSDKHFVIDPQTAPVVKKIFDLYAEGATISEITGQLNEQGIRTIRKQLFTKNSLTKLLKNEKYIGVYTYKDIVRVEGGVPAIVDKSTFDRVQELLKINRRAPSHTWTKVEYLLTDKLFCGHCGSPMVGESGFSHTGAKYSYYGCIKRRREKACDKKPVRQDWIEALVLDETVKLLHDDELMEYIIDRTWEYYQVTDKVQEEKAVLEAQLAEVDKAINNLVRAIEAGIFNAATKSRMDELDAQKAALTASLADLELTSGIRITRDHIEYFLLRLRDLDVKDRECQKRLVQTFVNAVFIYDDGRVKITYNYSGQSSTITLNQIASAEKGKGFVCCLPCSTSSPRFPRGVAALFLFWGKSGVNRLPISAVLCYNGSENGRGGRKNEKAACCVPDGARLLGLCGVRGRNAGR

SEQ ID NO: 596 - protein, 582 aa, Unknown
  Description of Unknown: Integrase B597 sequence
  PTHR30461:SF3,IPR036162,PS51737,IPR011109,PTHR30461, PS00028,PS00397,PF00239,G3DSA:1.10.10.2600,IPR006119, SSF53041,IPR013087,cd00338,SM00857,IPR038109, PS51736,IPR006118,G3DSA:3.40.50.1390,PF07508,Coil
MAKHAISIPQNPKAALYIRVSTDMQADKDSLPLQESDLRKLADLNGIKDIEVFSDAGFSGKNLNRPAFRAMMERIRAREFSHLYVWKLDRISRNLLDFLELYDELKDYGVAFASKNESFDTQSPGGEAMLKILLIFAELERKTIAERVTAVMLGRANENKWNGGRVPFGYMPGPVTTDANGKKCKSWPVPDPIEAPIVRAIFELYLREKALKKVAAALNTAGYRSRKGTLWSDTTVRCILKNHFYKGEYVYNRQNPNAGRREDFYRSENDWVVVTGQHEAIVPEETWRRCNEMLSKNRSWLAPIGSLVSAQDKYIFGGLLQCAECGYTMNSKDRTRIHDHTHSSYYYCTGRWKAPVVCTGEHSGYASDRVLLPQILKLIARMIEACANAIKFASAEQLVSYLLNDNLIPGATGIEEAQRIYMIVRAHVKHIYGVDQANQYNPNALLVEQSQKEKEKQERALSRLKRAYLFDDGDMSEAEYFEQKAAIEGTIAKLEKQIKSLSGNDIGADEAYLAQLSKLIMIKKLQNTNSDFDYYKLAKAIGRKPIHDFLTEIISRIIIGEQNRIIKIIFKNGVSITLQYEK

SEQ ID NO: 597 - protein, 581 aa, Unknown
  Description of Unknown: Integrase B598 sequence
  PTHR30461:SF3,IPR036162,PS51737,IPR011109,PTHR30461, PS00397,PF00239,G3DSA:1.10.10.2600,IPR006119,SSF53041, SM00857,IPR025827,IPR038109,PS51736,cd03768, IPR006118,PF13408,G3DSA:3.40.50.1390,PF07508,Coil
MAYATKVPAASADDRIVAIYVRVSTGYQVDKDSLPFQKKELKAYCKHILHIDMSRVEIFEDAGRSGKNTKRPAYERMMQKVRAGLVSHVLVYKIDRISRNLVDFSLMYDDFKYNRVTFVSLNEQFDTSSAIGEAVLKIILVFAELERKLTSERVKDIMIGRANDGKWNGARVPYGWDWDSSAGCPVHSEKEAPFARAMYEMYLEVKSTGKIRDYNNAHKIPTKRGGEWTSKTVGDFLRNPMNKGDYRYNYRESARGRKKPADEIVYLEGVFDPLVDPEIWEKVNKIMDINRDQRNMGGLHPIEKNCNVFAGLIQCGSCGSGYLVGKKDKRRKNGFTPSLYYCGAKTRAIHCQNPNVSDVKIGPFVINYISAMVRVSNERQKIKSPEGLEEMLLSDKAVFADIMGLSSDSLNTTFELLTGKSATGGALWRADLVDQEGSAADPAEIENLKGQIRKYERAKERLEDAYYFSDDGMSEKEYLEKKNRFDSMRVSAENKLKELTETHIASGVDESSFMKSASAFLLTHKIRAGSHIVYSDLAGMVEEESIKEFFNLVLDHIVVKDRRVTEIIFANGLSHKFIYRD

SEQ ID NO: 598 - protein, 581 aa, Unknown
  Description of Unknown: Integrase B599 sequence
  SM00857,G3DSA:1.10.10.2600,IPR036162,PF13408,PS51737, G3DSA:3.40.50.1390,IPR025827,IPR006119,IPR038109,PF07508, IPR011109,SSF53041,PTHR30461,PS51736,cd00338, PF00239
MSEKIINCAIYTRKSTEEGLEQDFNSLDNQYEFCTNYLKSLNDPALQLLPARYDDGGYSGGSLNRPALQRLLADIQCGLVNRVIIYKIDRLTREIRDFFKLLDIFEKYNVEFVSVKENQYYNTTTAIGRLMVNMFLVFAQFERENAGDRIRDKIATSKAKGMWMGGCPPYGYDIGDRCLVINETEAQNVRFIYQTFCNTHSLADTTDALNSGGIRTKRYTTRQGRTFGGRKFSVKTVQRILQNPLYKGMVAHRGKQYPGQHAAIIDAAQFDMVQAVFAAHKEKRKTRRPKMPSSGGERETAALTGFIFCGCCGSAMTPSYCCKGDIRYHYYRCYRRASKLEDKCPINQIRTSEIDRVVMEQVLAILKSRDFFVQYISHHHEFDVSTAFALFNSLDDVWNSLFETEKRRILRELLAKVTIYKDKIVLDVKKAGLAGVFAELSQNNRLAEVEYKENETFQISVAYRATRLANGAKIIVPATAKEESRFNGSLRLARQIAKGFAWRKMMESGLSLQELTASAKTNERDIRFAMRLSMIDPAVVESVLSGKSPEFLTYAFMKKHPIPLLWSDQRKLYGFEERKQQ

SEQ ID NO: 599 - protein, 581 aa, Unknown
  Description of Unknown: Integrase B600 sequence
  PTHR30461:SF3,IPR036162,PS51737,IPR011109,PTHR30461, PS00397,PF00239,G3DSA:1.10.10.2600,IPR006119,SSF53041, SM00857,IPR025827,IPR038109,PS51736,cd03768, IPR006118,PF13408,G3DSA:3.40.50.1390,PF07508,Coil
MSRTTNKRPGKAKSGLSRKQKVAIYIRVSTLYQVDRDSLPMQRKDLIAYASLILGIEEYEIFEDAGYSGKNTDRPAFQEMMQRIRKGEFTHVLVWKIDRISRNLLDFAEMYEELQDLRVTFVSKNEQFDTSTAIGEAMLKIILVFAELERNMTSERVTATMISRANSGLWNGGRIPYGYDYDPDKTEFSIREDEEKVCQMIKNDYMEHKSLVHTSRMLNAAGYKTRAGVEWSPTAVWIIISSPFYAGIYRYNRYKGTERRVENPEDEWIMIQNHHPAIFSLEEHEKMLAILDENSRNHRSVGQRHQTERIHIFGGIAYCGKCGSKMVSTPGRLHVNGYRPTNYSCPKHRKTKECDNPTVSDTQVGEFVINYILNMLGAKKKFSTIENPEDLERCLLYGNTFSEVEHIDGNGLNEYFNLLSRYGSDDSYTFSVKKSRKKKAEVDPEVEALRKEKEKQERAMKRLQDLYLYSDTSMSEKDFIIRKTEISKRLEEINAMLGMVAKNSEPSLSDEEFVRQASHLLISRELQNRQYIYFKNLAQSVSPEILKVYMETVLDSVLLVDGRVSSIVFRNGLTHKFKYKS

SEQ ID NO: 600 - protein, 581 aa, Unknown
  Description of Unknown: Integrase B601 sequence
  PTHR30461:SF3,IPR036162,PS51737,IPR011109,PTHR30461, PS00397,PF00239,G3DSA:1.10.10.2600,IPR006119,SSF53041, SM00857,IPR025827,IPR038109,PS51736,cd03768, IPR006118,PF13408,G3DSA:3.40.50.1390,PF07508,Coil
MAYAMKVPAASADDRIVAIYVRVSTGYQVDKDSLPFQKKELKAYCKHILHVDMSRVEIFEDAGRSGKNTKRPAYERMMQKVRAGLVSHVLVYKIDRISRNLVDFSLMYDDFKYNRVTFVSLNEQFDTSSAIGEAVLKIILVFAELERKLTSERVKDIMIGRANEGKWNGARVPYGWDWDSSAGWPVHSKKEAPFGRAMYEMYLEVKSTGKIRDYNNAHKIPTKRGGEWTSKTVGDFLRNPMNKGDYRYNYRESAHGRKKPINEVVYLEGVFDPLIDPEIWEKVNKIMDSNRDKRNMGGLHPVEKNCNVFAGLIQCGSCGSGYLVGKKDKRRKNGFTPSMYYCGAKTRAIHCQNLNVSDVKIGPFVINYISAMVRVSNERRKIKAPEDLEEMLLSDKAVFADIMGLSSDSLNNTFELLTGKSATGGALWRADLVDQEGAAADPAEIESLKDQIRKYERAKERLEDAYYFSDDGMSEKEYLEKKNRFDSGRVAAENKLKELTETHIASGVDESAFMKSASAFLLTHKIRAGSHIVYSDLAGMVEEESIKEFFNLVLDHITVKDRCVTEIVFANGLSHKFIYRD

SEQ ID NO: 601 - protein, 581 aa, Unknown
  Description of Unknown: Integrase B602 sequence
  PTHR30461:SF3,IPR036162,PS51737,IPR011109,PTHR30461, PS00397,PF00239,G3DSA:1.10.10.2600,IPR006119,SSF53041, SM00857,IPR025827,IPR038109,PS51736,cd03768, IPR006118,PF13408,G3DSA:3.40.50.1390,PF07508,Coil
MAYAMKVPAASADDRAVAIYVRVSTGYQVDKDSLPFQKKELKAYCKHILHVDMSRVEIFEDAGRSGKNTKRPAYERMMQKVRAGLVSHVLVYKIDRISRNLVDFSLMYDDFKYNRVTFVSLNEQFDTSSAIGEAVLKIILVFAELERKLTSERVKDIMIGRANEGKWNGARVPYGWDWDSSAGWPVHSEKEAPFGRAMYEMYLKVKSTGKIRDYNNAHGIPTKRGGEWTSKTVGDFLRNPMNKGDYRYNYRESARGRKKPIDEVVYLEGVFDPLIDPEIWEKVNKIMDINRDKRNMGGSHPVEKNCNVFAGLIQCGSCGSGYLVGKKDKRRKNGFTPSMYYCSAKTRAIHCQNLNVSDVKIGPFVINYISAMVRVSNERRKIKTPEDLEEMLLSDKAVFADIMGLSSDSLNNTFELLTGKSATGGALWRADLVDQEGAAADPAEIENLKDQIRKYERAKERLEDAYYFSDDGMSEKEYLEKKNRFDSGRVAAENKLKELTETHIASGVDESAFMKSASAFLLTHKIRAGSHIVYSDLAGMVEEESIKEFFNLVLDHITVKDRRVTEIVFANGLSHKFIYRD

SEQ ID NO: 602 - protein, 581 aa, Unknown
  Description of Unknown: Integrase B603 sequence
  PTHR30461:SF3,IPR036162,PS51737,IPR011109,PTHR30461, PS00397,PF00239,G3DSA:1.10.10.2600,IPR006119,SSF53041, SM00857,IPR025827,IPR038109,PS51736,cd03768, IPR006118,PF13408,G3DSA:3.40.50.1390,PF07508,Coil
MARKRTNLIGNTPSVRETKVAIYIRVSTIHQVDKDSIPMQKKDLIAYCQLILGTDNYEIFEDAGYSGKNTDRPAFQNMMGRIRKGEFTHVLVWKIDRVSRNLLDFAEMYEELRSLRVTFVSKNEQFDTSTAIGEAMLKIILVFAELERNMTSERVTATMISRANSGQWNGGRIPFGYSYDPKEKVFSIREDEASICRELKDLYLLNRSLAYVSRALNEKGYKTRAGVSWSPHSVWIIASSPFYAGIYRYNRYKGVESRTINPEEEWVMIQNHHPAIFTLEEHQAMRSIMKSNKRNMDNLPGRVHLSTKTHIFQGIMYCDKCGSKMVSTPGRLHVDGYRTSNYGCPLRRNTKKCNNPTVNDIVIGEFVINYILNMLNAKKTFSTINTPDELNVALLSGSVFSEVSSVEENGLNSFFNLLSRYGSDRSYIFSVKSPRKKKAAVDPELSKLRKEKEKQERALQRLQNLYLYSETSMSEKDFIIRKSEISSHLDNINRQLGLMTQDQASFLSDEEFIKQASHLLIQKELKNKKYIYFKKLVSTVDPDILKAYMETILDSIYTADGKITAITFKNGLTHRFIYKDK

SEQ ID NO: 603 - protein, 581 aa, Unknown
  Description of Unknown: Integrase B604 sequence
  PTHR30461:SF3,IPR036162,PS51737,IPR011109,PTHR30461, PS00397,PF00239,G3DSA:1.10.10.2600,IPR006119,SSF53041, SM00857,IPR025827,IPR038109,PS51736,cd03768, IPR006118,PF13408,G3DSA:3.40.50.1390,PF07508,Coil
MAYAMKVPAASADDRIVAIYVRVSTGYQVDKDSLPFQKKELKAYCKHILHVDMSRVEIFEDAGRSGKNTKRPAYERMMQKVRAGLVSHVLVYKIDRISRNLVDFSLMYDDFKYNRVTFISLNEQFDTSSAIGEAVLKIILVFAELERKLTSERVKDIMIGRANEGKWNGARVPYGWDWDSSAMWPVHSEKEAPFGRAMYEMYLEVKSTGKIRDYNNSHGIPTKRGGEWTSKTVGDFLRNPMNKGDYRYNYRESARGRKKPVDEVVYLEGVFDPLIDPEIWEKVNKIMDINRDQRNIVGSHPVEKNCNVFAGLIQCGSCGSGYLVGKKDKRRKNGFTPSMYYCGAKTRAIHCQNLNVSDVKIGPFVINYISAMVRVSNERRKIKSPEDLEEMLLSDKAVFADIIGLSSDSLNNTFELLTGKSATGGALWRADLVDQEGAAADPAEIENLKDRIRKYERAKERLEDAYYFSDDGMSEKEYLEKKNRFDSGRVAAENKLKELTETHIASGVDESAFMKSASAFLLTHKIRAGSHIVYSDLAGMVEEESIKEFFNLVLDHIVVKDRRITEIVFANGLSHKFVYRD

SEQ ID NO: 604 - protein, 581 aa, Unknown
  Description of Unknown: Integrase B605 sequence
  PTHR30461:SF3,IPR036162,PS51737,IPR011109,PTHR30461, PS00397,PF00239,G3DSA:1.10.10.2600,IPR006119,SSF53041, SM00857,IPR025827,IPR038109,PS51736,cd03768, IPR006118,PF13408,G3DSA:3.40.50.1390,PF07508,Coil
MARKRTNLIGNTPSVRETKVAIYIRVSTIHQVDKDSIPMQKKDLIAYCQLILGTDNYEIFEDAGYSGKNTDRPAFQNMMGRIRKGEFTHVLVWKIDRVSRNLLDFAEMYEELRSLRVTFVSKNEQFDTSTAIGEAMLKIILVFAELERNMTSERVTATMISRANSGQWNGGRIPFGYSYDPKEKVFSIREDEASICRELKDLYLLNRSLAYVSRALNEKGYKTRAGVSWSPHSVWIIASSPFYAGIYRYNRYNGVESRTINPEEEWVMIQNHHPAIFTLEEHQAMRSIMKSNKRNMDNLPGRVHLSTKTHIFQGIMYCDKCGSKMVSTPGRLHVDGYRTSNYGCPLRRNTKKCNNPTVNDIVIGEFVINYILNMLNAKKTFSTINTPDELNAALLSGSVFSEVSSVEENGLNSFFNLLSRYGSDRSYIFSVKSPRKKKAAVDPELSKLRKEKEKQERALQRLQDLYLYSETSMSEKDFIIRKSEISSHLDNINRQLGLMTQDQASFLSDEEFIKQASHLLIQKELKNKKYIYFKKLVSTVDPDILKAYMETILDSIYTADGKITAITFKNGLTHRFIYKDK

SEQ ID NO: 605 - protein, 581 aa, Unknown
  Description of Unknown: Integrase B606 sequence
  PTHR30461:SF3,IPR036162,PS51737,IPR011109,PTHR30461, PS00397,PF00239,G3DSA:1.10.10.2600,IPR006119,SSF53041, SM00857,IPR025827,IPR038109,PS51736,cd03768, IPR006118,PF13408,G3DSA:3.40.50.1390,PF07508,Coil
MARKRTNLIGNTPSVRETKVAIYIRVSTIHQVDKDSIPMQKKDLIAYCQLILGTDNYEIFEDAGYSGKNTDRPAFQNMMGRIRKGEFTHVLVWKIDRVSRNLLDFAEMYEELRSLRVTFVSKNEQFDTSTAIGEAMLKIILVFAELERNMTSERVTATMISRANSGQWNGGRIPFGYSYDPKEKVFSIREDEASICRELKDLYLLNRSLAYVSRALNEKGYKTRAGVSWSPHSVWIIASSPFYAGIYRYNRYKGVESRTINPEEEWVMIQNHHPAIFTLEEHQTMRSIMKSNQRNMDNFPGRVHLSTKTHIFQGIMYCDKCGSKMVSTPGRLHVDGYRTSNYGCPLRRNTKKCNNPTVNDIVIGEFVINYILNMLNAKKTFSTINTPDELNAALLSGSVFSEVSSVEENGLNSFFNLLSRYGSDRSYIFSVKSPRKKKAAVDPELSKLRKEKEKQERALQRLQDLYLYSETSMSEKDFIIRKSEISSHLDNINRQLGLMTQDQASFLSDEEFIKQASHLLIQKELKNKKYIYFKKLVSTMDPDILKAYMETILDSIYTADGKITAITFKNGLTHRFIYKDK

SEQ ID NO: 606 - protein, 581 aa, Unknown
  Description of Unknown: Integrase B607 sequence
  PTHR30461:SF3,IPR036162,PS51737,IPR011109,PTHR30461, PS00397,PF00239,G3DSA:1.10.10.2600,IPR006119,SSF53041, SM00857,IPR025827,IPR038109,PS51736,cd03768, IPR006118,PF13408,G3DSA:3.40.50.1390,PF07508,Coil
MARKRTNLIGNTPSVRETKVAIYIRVSTIHQVDKDSIPMQKKDLIAYCQLILGTDNYEIFEDAGYSGKNTDRPAFQNMMGRIRKGEFTHVLVWKIDRVSRNLLDFAEMYEELRSLRVTFVSKNEQFDTSTAIGEAMLKIILVFAELERNMTSERVTATMISRANSGQWNGGRIPFGYSYDPKEKVFSIREDEASICRELKDLYLLNRSLVYVSRALNEKGYKTRAGANWSPHSVWIIASSPFYAGIYRYNRYKGVENRTINPEKEWVMIQNHHPAIFTLEEHHTMQSLLKSNQRNMDNLPGRIHTSEKTHIFQGLMYCDKCGSKMVSTPGRLHVDGYRASNYSCPLRRNTKKCNNPTINDIIVGEFVINYILNMLNAKKTFSTINTPDELNTALLSGSVFSEVSSIEENGLNSFFNLLSRYGSDRSYVFSVKSPRRKKAAVNPELSRLRKEKEKQERALQRLQDLYLYSETSMPEKDFIIRQSEISSHLNNINRQLGLMTQDQASFLSDEEFIKQASHLLIQKELKNKKYIYFKKLVSTVDPDILKAYMETILDSIYTADGKITAITFKNGLTHRFIYKDK

SEQ ID NO: 607 - protein, 581 aa, Unknown
  Description of Unknown: Integrase B608 sequence
  PTHR30461:SF3,IPR036162,PS51737,IPR011109,PTHR30461, PS00397,PF00239,G3DSA:1.10.10.2600,IPR006119,SSF53041, SM00857,IPR025827,IPR038109,PS51736,cd03768, IPR006118,PF13408,G3DSA:3.40.50.1390,PF07508,Coil
MSRTTNKRPGNAKSGLSRKQKVAIYIRVSTLYQVDRDSLPMQRKDLIAYASLILGIEEYEIFEDAGYSGKNTDRPAFQEMMQRIRKGEFTHVLVWKIDRISRNLLDFAEMYEELQDLRVTFVSKNEQFDTSTAIGEAMLKIILVFAELERNMTSERVTATMISRANNGLWNGGRIPFGYVYDPDKTAFSIREDEEKVCQMIKNDYMEHKSLVHTSRMLNASGYKTRAGVEWSPTAVWIIISSPFYAGIYRYNRYKGTERRVENPEDEWIMIQNHHPAIFSLEEHEKMLAILDENSRNRRSVGQRHQTERVHIFGGIAYCGKCGSKMVSTPGRLHVNGYRPTNYSCPKHRKTKECDNPTVSDTQVGEFVINYILNMLGAKKKFSAIENPEDLERCLLYGNTFSEVEHIDSNGLNEYFNLLSRYSSDDSYTFSVKKSRKKKAEVDPEVAALRKEKEKQERAMKRLQDLYLYSDTSMSEKDFIIRKTEISKRLEEINAMLGMVAKNSEPSLSDEEFVRQASHLLISRELQNRQYIYFKNLAQNVSPEILKAYMETVLDSVLLVDGRVSSIVFRNGLTHKFKYKS

SEQ ID NO: 608 - protein, 581 aa, Unknown
  Description of Unknown: Integrase B609 sequence
  PTHR30461:SF3,IPR036162,PS51737,IPR011109,PTHR30461, PS00397,PF00239,G3DSA:1.10.10.2600,IPR006119,SSF53041, SM00857,IPR025827,IPR038109,PS51736,cd03768, IPR006118,PF13408,G3DSA:3.40.50.1390,PF07508,Coil
MARKRTNLIGNTPSVRETKVAIYIRVSTIHQVDKDSIPMQKKDLIAYCQLILGTDNYEIFEDAGYSGKNTDRPAFQNMMGRIRKGEFTHVLVWKIDRVSRNLLDFAEMYEELRSLRVTFVSKNEQFDTSTAIGEAMLKIILVFAELERNMTSERVTATMISRANSGQWNGGRIPFGYSYDPKEKIFSIREDEASICRELKDLYLLNRSLAYVSRALNEKGYKTRAGVSWSPHSVWIIASSPFYAGIYRYNRYKGVESRTINPEEEWVMIQNHHPAIFTLEEHQAMRSIMKSNQRNMDNLPGRVHLSTKTHIFQGIMYCDKCGSKMVSTPGRLHVDGYRTSNYGCPLRRNTKKCNNPTVNDIVIGEFVINYILNMLNAKKTFSTINTPDELNAALLSGSVFSEVSSVEENGLNSFFNLLSRYGSDRSYIFSVKSPRKKKAAVDPELSKLRKEKEKQERALQRLQNLYLYSETSMSEKDFIIRKSEISSHLDNINRQLGLMTQDQASFLSDEEFIKQASHLLIQKELKNKKYIYFKKLVSTVDPDILKAYMETILDSIYTADGKITAITFKNGLTHRFIYKDK

SEQ ID NO: 609 - protein, 581 aa, Unknown
  Description of Unknown: Integrase B610 sequence
  PTHR30461:SF3,IPR036162,PS51737,IPR011109,PTHR30461, PS00397,PF00239,G3DSA:1.10.10.2600,IPR006119,SSF53041, SM00857,IPR025827,IPR038109,PS51736,cd03768, IPR006118,PF13408,G3DSA:3.40.50.1390,PF07508,Coil
MAYAMKISAASADDRIVAIYVRVSTGYQVDKDSLPFQKKELKAYCKHILHIDLSRVEIFEDAGRSGKNTKRPAYERMMQKVRAGLVSHVLVYKIDRISRNLVDFSLMYDDFKYNRVTFVSLNEQFDTSSAIGEAVLKIILVFAELERKLTSERVKDIMIGRANDGKWNGARVPYGWDWESSAGCPVHSKKEASFARAMYDMYLEVKSTGKIRDYNNAHGIPTKRGGEWTSKTVGDFLRNPMNKGDYRYNFRESARGRKKPEEEVVYLEGVFDPLVDPDVWEKVNKIMDSNRDKRNIGGLHPIESNCNVFAGLIQCGLCGSGYLVGKKDKRRKNGFTPSMYYCGAKTRAIHCQNLNVSDVKIGPFVINYISAMVRVSNERRKIKTPEDLEEILLSDKAVFADIMGLSSDSLNNTFELLTGKSATGGALWRADLVDQEGAAADPAEIENLKDQIRKYERAKERLEDAYYFSDDGMSEKEYLEKKNRFDSGRVAAENKLKELTETHIASGVDESAFMKSASAFLLTHKIRAGSHIIYSDLAGMVEEESIKEFFNLVLDHITVKDRRVTEIVFANGLSHKFIYRD

SEQ ID NO: 610 - protein, 581 aa, Unknown
  Description of Unknown: Integrase B611 sequence
  PTHR30461:SF3,IPR036162,PS51737,IPR011109,PTHR30461, PS00397,PF00239,G3DSA:1.10.10.2600,IPR006119,SSF53041, SM00857,IPR025827,IPR038109,PS51736,cd03768, IPR006118,PF13408,G3DSA:3.40.50.1390,PF07508,Coil
MARKRTNLIGNTPSVRETKVAIYIRVSTIHQVDKDSIPMQKKDLIAYCQLILGTDNYEIFEDAGYSGKNTDRPAFQNMMGRIRKGEFTHVLVWKIDRVSRNLLDFAEMYEELRSLRVTFVSKNEQFDTSTAIGEAMLKIILVFAELERNMTSERVTATMISRANSGQWNGGRIPFGYSYDPKEKVFSIREDEASICRELKDLYLLNRSLVYVSRALNEKGYKTRAGVSWSPHSVWIIASSPFYAGIYRYNRYKGVESRTINPEEEWVMIQNHHPAIFTLEEHQAMRSIMKSNQRNMDNLPGRVHLSTKTHIFQGIMYCDKCGSKMVSTPGRLHVDGYRTSNYGCPLRRNTKKCNNPTVNDIIIGEFVINYILNMLNAKKTFSTINTPDELNAALLSGSVFSEVSSVEENGLNSFFNLLSRYGSDRSYIFSVKSPRKKKAAVDPELSKLRKEKEKQERALQRLQDLYLYSETSMSEKDFIIRKSEISSHLDNINRQLGLMTQDQASFLSDEEFIKQASHLLIQKELKNKKYIYFKKLVSTVDPDILKAYMETILDSIYTADGKITAITFKNGLTHRFIYKDK

SEQ ID NO: 611 - protein, 581 aa, Unknown
  Description of Unknown: Integrase B612 sequence
  PTHR30461:SF3,IPR036162,PS51737,IPR011109,PTHR30461, PS00397,PF00239,G3DSA:1.10.10.2600,IPR006119,SSF53041, SM00857,IPR025827,IPR038109,PS51736,cd03768, IPR006118,PF13408,G3DSA:3.40.50.1390,PF07508,Coil
MSRTTNKRPGNAKSGLSRKQKVAIYIRVSTLYQVDRDSLPMQRKDLIAYASLILGIEEYEIFEDAGYSGKNTDRPAFQEMMQRIRKGEFTHVLVWKIDRISRNLLDFAEMYEELQDLRVTFVSKNEQFDTSTAIGEAMLKIILVFAELERNMTSERVTATMISRANSGLWNGGRIPFGYDYDPDKTAFSIREDEEKVCQMIKNDYMEHKSLVHTSRMLNASGCKTRAGAEWSPTAVWIIISSPFYAGIYRYNRYKGTERRVENPEDEWIMIQNHHPAIFSLEEHEKMLAILDENSRNHRSVGQKHQTERVHIFGGIAYCGKCGSKMVSTPGRLHANGYRPTNYSCPKHRKTKECDNPTVSDTQVGEFVINYILNMLGAKKKFSTIENPEDLERCLLYGNTFSEVEHIDSNGLNEYFNLLSRYSSDDSYTFSVKKSRKKKAEVDPEVEALRKEKEKQERAMKRLQDLYLYSDTSMSEKDFIIRKTEISKRLEEINAMLGMVAKNSEPSLSDEEFVRQASHLLISRELQNRQYIYFKNLAQNVSPEILKAYMETVLDSVLLVDGRVSSIVFRNGLTHKFKYKS

SEQ ID NO: 612 - protein, 581 aa, Unknown
  Description of Unknown: Integrase B613 sequence
  PTHR30461:SF3,IPR036162,PS51737,IPR011109,PTHR30461, PS00397,PF00239,G3DSA:1.10.10.2600,IPR006119,SSF53041, SM00857,IPR025827,IPR038109,PS51736,cd03768, IPR006118,PF13408,G3DSA:3.40.50.1390,PF07508,Coil
MSRTTNKRPGKAKSGLSRKQKVAIYIRVSTLYQVDRDSLPMQRKDLIAYASLILGIEEYEIFEDAGYSGKNTDRPAFQEMMQRIRKGEFTHVLVWKIDRISRNLLDFAEMYEELQDLRVTFVSKNEQFDTSTAIGEAMLKIILVFAELERNMTSERVTATMISRANSGLWNGGRIPFGYDYDPDKTAFSIREDEEKVCQMIKNDYMEHKSLVHTSRMLNASGYKTRAGAEWSPTAVWIIISSPFYAGIYRYNRYKGTERRVENPEDEWIMIQNHHPAIFSLEEHEKMLAILDENSRNRRSVGQRHQTERVHIFGGIAYCGKCGSKMVSTPGRLHVNGYRPTNYSCPKHRKTKECDNPTVSDTQVGEFVINYILNMLGAKKKFSAIENPEDLERCLLYGNTFSEVEHIDSNGLNEYFNLLSRYSSDDSYTFSVKKSRKKKAEVDPEVAALRKEKEKQERAMKRLQDLYLYSDTSMSEKDFIIRKTEISKRLEEINAMLGMVAKNSEPSLSDEEFVRQASHLLISRELQNRQYIYFKNLAQNVSPEILKAYMETVLDSVLLVDGRVSSIVFRNGLTHKFKYKS

SEQ ID NO: 613 - protein, 581 aa, Unknown
  Description of Unknown: Integrase B614 sequence
  PTHR30461:SF3,IPR036162,PS51737,IPR011109,PTHR30461, PS00397,PF00239,G3DSA:1.10.10.2600,IPR006119,SSF53041, SM00857,IPR025827,IPR038109,PS51736,cd03768, IPR006118,PF13408,G3DSA:3.40.50.1390,PF07508,Coil
MARKRTNLIGNTPSVRETKVAIYIRVSTIHQVDKDSIPMQKKDLIAYCQLILGTDNYEIFEDAGYSGKNTDRPAFQNMMGRIRKGEFTHVLVWKIDRVSRNLLDFAEMYEELRSLRVTFVSKNEQFDTSTAIGEAMLKIILVFAELERNMTSERVTATMISRANSGQWNGGRIPFGYSYDPKEKVFSIREDEASICRELKDLYLLNRSLAYVSRALNEKGYKTRAGVNWSPHSVWIIASSPFYAGIYRYNRYKGVESRTINPEEEWVMIQNHHPAIFTLEEHQAMRSIMKSNQRNMDNLPGRVHLSTKTHIFQGIMYCDKCGSKMVSTPGRLHVDGYRTSNYGCPLRRNTKKCNNPTVNDIVIGEFVINYILNMLNAKKTFSTINTPDELNAALLSGSVFSEVSSVEENGLNSFFNLLSRYGSDRSYIFSVKSPRKKKAAVDPELSKLRKEKEKQERALQRLQDLYLYSETSMSEKDFIIRKSEISSHLDNINRQLGLMTQDQASFLSDEEFIKQASHLLIQKELKNKKYIYFKKLVSTVDPDILKAYMETILDSIYTADGKITAITFKNGLTHRFIYKDK

SEQ ID NO: 614 - protein, 581 aa, Unknown
  Description of Unknown: Integrase B615 sequence
  PTHR30461:SF3,IPR036162,PS51737,IPR011109,PTHR30461, PS00397,PF00239,G3DSA:1.10.10.2600,IPR006119,SSF53041, SM00857,IPR025827,IPR038109,PS51736,cd03768, IPR006118,PF13408,G3DSA:3.40.50.1390,PF07508,Coil
MSRTTNKRPGKAKSGLSRKQKVAIYIRVSTLYQVDRDSLPMQRKDLIAYASLILGIEEYEIFEDAGYSGKNTDRPAFQEMMQRIRKGEFTHVLVWKIDRISRNLLDFAEMYEELQELRVTFVSKNEQFDTSTAIGEAMLKIILVFAELERNMTSERVTATMISRANSGLWNGGRIPFGYDYDPDKTAFSIREDEEKVCQMIKNDYMEHKSLVHTSRMLNASGYKTRAGAEWSPTAVWIIISSPFYAGIYRYNRYKGTERRVENPEDEWIMIQNHHPAIFSLEEHEKMLAILDENSRNHRSVGQKHQTERVHIFGGIAYCGKCGSKMVSTPGRLHANGYRPTNYSCPKHRKTKECDNPTVSDTQVGEFVINYILNMLRAKKRFSTIENPEDLERCLLYGNTFSEVEHIDGNGLNEYFNLLSRYGSDDSYTFSVKKSRKKKAEVDPEVETLRKEKEKQERAMKRLQDLYLYSDTSMSEKDFIIRKTEISKRLEEINAMLGMVAKNSEPSLSDEEFVRQASHLLISRELQNRQYIYFKNLAQNVSPEILKAYMETVLDSVLLVDGRVSSIVFRNGLTHKFKYKS

SEQ ID NO: 615 - protein, 581 aa, Unknown
  Description of Unknown: Integrase B616 sequence
  PTHR30461:SF3,cd00338,SM00857,G3DSA:1.10.10.2600,IPR036162, PF13408,IPR025827,PS51737,G3DSA:3.40.50.1390,IPR006119, IPR038109,PF07508,IPR011109,SSF53041,PTHR30461, PS51736,Coil,PF00239
MEDFYKIKEALKIMPITQIPLRVVIYSRVSTDSEEQLTSITNQKTYYKKLIENTPKWTLIEEYVDEGITGTSTKKREAFQRMISDGIEGKFDMIITKSVSRFARNTLDSLQNVRILTAHGVGVWFHSDGILTFEADGELRLSIMSAFAQGESEKKSEAVRFGLQESIKRGTVFGFDNMFGYRLRGGKLEIDEAEVPMIQKIFELYATDRYSMNQIEKILYDDGYRNHNGNRISHATLSHIIRNPKYKGVFAGRKVRKKDLFDDRVEMLPQNEWVIIDGEKGRSIVPPIVSEELWAKANRVLEARSIDVKTRQNKCNHPNLLTGKLWCVHCNLPYHRKASKTSNAVLNSAWVCAGKIRNGTASCPSIYLYENEVKQCLYELFIEDDFDIDDYIDQYIKLVSEASSSEKNTNRQNELEKELALIEKKKTKILEFNVLGQVSDQDYIAQNNALNEEYKRKSEELANVRLALDTKKRTEEDFEKMRGALQQLKGRKNIDFIDPTFVRTYIERIDVSMIDGRTMNMDVILKTGDKISRILKKNLSSVNRRKHIYTGRRLTFRRKTPYGRGSHEIPIQINICFFSLN

SEQ ID NO: 616 - protein, 581 aa, Unknown
  Description of Unknown: Integrase B617 sequence
  PTHR30461:SF3,IPR036162,PS51737,IPR011109,PTHR30461, PS00397,PF00239,G3DSA:1.10.10.2600,IPR006119,SSF53041, SM00857,IPR025827,IPR038109,PS51736,cd03768, IPR006118,PF13408,G3DSA:3.40.50.1390,PF07508,Coil
MARKRTNLIGNTPSVRETKVAIYIRVSTIHQVDKDSIPMQKKDLIAYCQLILGTDNYEIFEDAGYSGKNTDRPAFQNMMGRIRKGEFTHVLVWKIDRVSRNLLDFAEMYEELRSLRVTFVSKNEQFDTSTAIGEAMLKIILVFAELERNMTSERVTATMISRANSGQWNGGRIPFGYSYDPKEKVFSIREDEASICRELKDLYLLNRSLVYVSRALNEKGYKTRAGVSWSPHSVWIIASSPFYAGIYRYNRYNGVESRTINPEEEWVMIQNHHPAIFTLEEHQAMRSIMKSNKRNMDNLPGRVHLSTKTHIFQGIMYCDKCGSKMVSTPGRLHVDGYRTSNYGCPLRRNTKKCNNPTVNDIVIGEFVINYILNMLNAKKTFSTINTPDELNAALLSGSVFSEVSSVEENGLNSFFNLLSRYGSDRSYIFSVKSPRKKKAAVDPELSKLRKEKEKQERALQRLQDLYLYSETSMSEKDFIIRKSEISSHLDNINRQLGLMTQDQASFLSDEEFIKQASHLLIQKELKNKKYIYFKKLVSTVDPDILKAYMETILDSIYTADGKITAITFKNGLTHRFIYKDK

SEQ ID NO: 617 - protein, 581 aa, Unknown
  Description of Unknown: Integrase B618 sequence
  PTHR30461:SF3,IPR036162,PS51737,IPR011109,PTHR30461, PS00397,PF00239,G3DSA:1.10.10.2600,IPR006119,SSF53041, SM00857,IPR025827,IPR038109,PS51736,cd03768, IPR006118,PF13408,G3DSA:3.40.50.1390,PF07508,Coil
MAYAMKVPAASADDRIVAIYVRVSTGYQVDKDSLPFQKKELKAYCKHILHVDMSRVEIFEDAGRSGKNTKRPAYERMMQKVRAGLVSHVLVYKIDRISRNLVDFSLMYDDFKYNRVTFVSLNEQFDTSSAIGEAVLKIILVFAELERKLTSERVKDIMIGRANEGKWNGARVPYGWDWDSSAGWPVHSEKEAPFGRAMYEMYLEVKSTGKIRDYNNAHKIPTKRGGEWTSKTVGDFLRNPMNKGDYRYNYRESARGRKKPIDEVVYLEGVFDPLIDPEIWEKVNKIMDINRDKRNMVGSHPVEKNCNVFAGLIQCGSCGSGYLVGKKDKRRKNGFTPSMYYCGAKTRAIHCQNLNVSDVKIGPFVINYISAMVRVSNERRKIKTPEDLEEMLLSDKVVFADIMGLSSDSLNNTFELLTGKSATGGALWRADLVDQEGAAADPAEIESLKDQIRKYERAKERLEDAYYFSDDGMSEKEYLEKKNRFDSGRVAAENKLKELTETHIASGVDESAFMKSASAFLLTHKIRAGSHIVYSDLAGMVEEESIKEFFNLVLDHITVKDRCVTEIVFANGLSHKFIYRD

SEQ ID NO: 618 - protein, 581 aa, Unknown
  Description of Unknown: Integrase B619 sequence
  PTHR30461:SF3,IPR036162,PS51737,IPR011109,PTHR30461, PS00397,PF00239,G3DSA:1.10.10.2600,IPR006119,SSF53041, SM00857,IPR025827,IPR038109,PS51736,cd03768, IPR006118,PF13408,G3DSA:3.40.50.1390,PF07508,Coil
MSRTTNKRPGKAKSGLSRKQKVAIYIRVSTLYQVDRDSLPMQRKDLIAYASLILGIEEYEIFEDAGYSGKNTDRPAFQEMMQRIRKGEFTHVLVWKIDRISRNLLDFAEMYEELQDLRVTFVSKNEQFDTSTAIGEAMLKIILVFAELERNMTSERVTATMISRANSGLWNGGRIPFGYDYDPDKTAFSIREDEEKVCQMIKNDYMEHKSLVHTSRMLNASGYKTRAGAEWSPTAVWIIISSPFYAGIYRYNRYKGTERRVENPEDEWIMIQNHHPAIFSLEEHEKMLAILDENSRNHRSVGQKHQTERVHIFGGIAYCGKCGSKMVSTPGRLHANGYRPTNYSCPKHRKTKECDNPTVSDTQVGEFVINYILNMLGAKKKFSTIENPEDLERCLLYGNTFSEVEHIDSNGLNEYFNLLSRYSSDDSYTFSVKKSRKKKAEVDPEVEALRKEKEKQERAMKRLQNLYLYSDTSMSEKDFIIRKTEISKRLEEINAMLGMVAKNSEPSLSDEEFVRQASHLLISRELQNRQYIYFKNLAQNVSPEILKAYMETVLDSVLLVDGRVSSIVFRNGLTHKFKYKS

SEQ ID NO: 619 - protein, 581 aa, Unknown
  Description of Unknown: Integrase B620 sequence
  PTHR30461:SF3,IPR036162,PS51737,IPR011109,PTHR30461, PS00397,PF00239,G3DSA:1.10.10.2600,IPR006119,SSF53041, SM00857,IPR025827,IPR038109,PS51736,cd03768, IPR006118,PF13408,G3DSA:3.40.50.1390,PF07508,Coil
MAYAMKVPAASADDRIVAIYVRVSTGYQVDKDSLPFQKKELKAYCKHILHVDMSRVEIFEDAGRSGKNTKRPAYERMMQKVRAGLVSHVLVYKIDRISRNLVDFSLMYDDFKYNRVTFVSLNEQFDTSSAIGEAVLKIILVFAELERKLTSERVKDIMIGRANEGKWNGARVPYGWDWDSSAGWPVHSKKEAPFGRAMYEMYLEVKSTGKIRDYNNAHKIPTKRGGEWTSKTVGDFLRNPMNKGDYRYNYRESARGRKKPIDEVVYLEGVFDPLIDPEIWEKVNKIMDSNRDKRNMVGSHPVEKNCNVFAGLIQCGSCGSGYLVGKKDKRRKNGFTPSMYYCGAKTRAIHCQNLNVSDVKIGPFVINYISAMVRVSNERRKIKTPEDLEEMLLSDKAVFADIMGLSSGSLNNTFELLTGKSATGGALWRADLVDQKGVAADPAEIESLKDQIRKYERAKERLEDAYYFSDDGMSEKEYLEKKNRFDSGRVAAENKLKELTETHIASGVDESAFMKSASAFLLTHKIRAGSHIVYSDLAGMVEEESIKEFFNLVLDHIAVKDRCVTEIVFANGLSHKFIYRD

SEQ ID NO: 620 - protein, 581 aa, Unknown
  Description of Unknown: Integrase B621 sequence
  PTHR30461:SF3,IPR036162,PS51737,IPR011109,PTHR30461, PS00397,PF00239,G3DSA:1.10.10.2600,IPR006119,SSF53041, SM00857,IPR025827,IPR038109,PS51736,cd03768, IPR006118,PF13408,G3DSA:3.40.50.1390,PF07508,Coil
MSRTTNKRPVKAKSGLSRKQKVAIYIRVSTLYQVDRDSLPMQRKDLIAYASLILGIEEYEIFEDAGYSGKNTDRPAFQEMMQRIRKGEFTHVLVWKIDRISRNLLDFAEMYEELQDLRVTFVSKNEQFDTSTAIGEAMLKIILVFAELERNMTSERVTATMISRANSGLWNGGRIPYGYDYDPDKTEFSIREDEEKVCQMIKNDYMEHKSLVHTSRMLNAAGYKTRAGVEWSPTAVWIIISSPFYAGIYRYNRYKGTERRVENPEDEWIMIQNHHPAIFSLEEHEKMLAILDENSRNHRSVGQRHQTERIHIFGGIAYCGKCGSKMVSTPGRLHVNGYRPTNYSCPKHRKTKECDNPTVSDTQVGEFVINYILNMIGAKKKFSTIENPEDLERCLLYGNTFSEVEHIDGNGLNEYFNLLSRYGSDDSYTFSVKKSRKKKAEVDPEVEALRKEKEKQERAMKRLQDLYLYSDTSMSEKDFIIRKTEISKRLEEINAMLGMVAKNSEPSLSDEEFVRQASHLLISRELQNRQYIYFKNLAQSVSPEILKVYMETVLDSVLLVDGRVSSIVFRNGLTHKFKYKS

SEQ ID NO: 621 - protein, 581 aa, Unknown
  Description of Unknown: Integrase B622 sequence
  PTHR30461:SF3,IPR036162,PS51737,IPR011109,PTHR30461, PS00397,PF00239,G3DSA:1.10.10.2600,IPR006119,SSF53041, SM00857,IPR025827,IPR038109,PS51736,cd03768, IPR006118,PF13408,G3DSA:3.40.50.1390,PF07508,Coil
MACAMKVPATSVDDRIVAIYVRVSTGYQVDKDSLPFQKKELKAYCKHILHVDMSRVEIFEDAGRSGKNTKRPAYERMMQKVRAGLVSHVLVYKIDRISRNLVDFSLMYDDFKYNRVTFVSLNEQFDTSSAIGEAVLKIILVFAELERKLTSERVKDIMIGRANEGKWNGARVPYGWDWDSSAGWPVHSEKEAPFGRAMYEMYLEVKSTGKIRDYNNAHNIPTKRGGEWTSKTVGDFLRNPMNKGDYRCNYRESARGRKKPVDEVVYLEGVFDPLIDPEIWEKVNKIMDINRDKRNMCGSHPVEKNCNVFAGLIQCGSCGSGYLVGKKDKRRKNGFTPSMYHCSAKTRAIHCQNLNVSEVKIGPFVINYISAMVRVSNERRKIKTPEDLEEMLLSDKAVFADIMGLSSDSLNNTFELLTGKSATGGALWRADLVDQEGAAADPAEIESLKDQIRKYERAKERLEDAYYFSDDGMSEKEYLEKKNRFDSGRVAAENKLKELTETHIASGVDESAFMKSASAFLLTHKIRAGSHIVYSDLAGMVEEESIKEFFNLVLDHITVKDRRVTEIVFANGLSHKFIYRD

SEQ ID NO: 622 - protein, 581 aa, Unknown
  Description of Unknown: Integrase B623 sequence
  PTHR30461:SF3,IPR036162,PS51737,IPR011109,PTHR30461, PS00397,PF00239,G3DSA:1.10.10.2600,IPR006119,SSF53041, SM00857,IPR025827,IPR038109,PS51736,cd03768, IPR006118,PF13408,G3DSA:3.40.50.1390,PF07508,Coil
MSRTTNKRPGKAKSGLSRKQKVAIYIRVSTLYQVDRDSLPMQRKDLIAYASLILGIEEYEIFEDAGYSGKNTDRPAFQEMMQRIRKGEFTHVLVWKIDRISRNLLDFAEMYEELQDLRVTFVSKNEQFDTSTAIGEAMLKIILVFAELERNMTSERVTATMISRANSGLWNGGRIPFGYDYDPDKTAFSIREDEEKVCQMIKNDYMEHKSLVHTSRMLNASGYKTRAGAEWSPTAVWIIISSPFYAGIYRYNRYKGTERRVENPEDEWIMIQNHHPAIFSLEEHEKMLAILDENSRNHRSVGQKHQTERVHIFGGIAYCGKCGSKMVSTPGRLHANGYRPTNYSCPKHRKTKECDNPTVSDTQVGEFVINYILNMLGAKKKFSTIENPEDLERCLLYGNTFSEVEHIDSNGLNEYFNLLSRYSSDDSYTFSVKKSRKKKAEVDPEVAALRKEKEKQERAMKRLQDLYLYSDTSMSEKDFIIRKTEISKRLEEINAMLGMVAKNSEPSLSDEEFVRQASHLLISRELQNRQYIYFKNLAQNVSPEILKAYMETVLDSVLLVDGRVSSIVFRNGLTHKFKYKS

SEQ ID NO: 623 - protein, 581 aa, Unknown
  Description of Unknown: Integrase B624 sequence
  PTHR30461:SF3,IPR036162,PS51737,IPR011109,PTHR30461, PS00397,PF00239,G3DSA:1.10.10.2600,IPR006119,SSF53041, SM00857,IPR025827,IPR038109,PS51736,cd03768, IPR006118,PF13408,G3DSA:3.40.50.1390,PF07508,Coil
MARKRTNLIGNTPSVRETKVAIYIRVSTIHQVDKDSIPMQKKDLIAYCQLILGTDNYEIFEDAGYSGKNTDRPAFQNMMGRIRKGEFTHVLVWKIDRVSRNLLDFAEMYEELRSLRVTFVSKNEQFDTSTAIGEAMLKIILVFAELERNMTSERVTATMISRANSGQWNGGRIPFGYSYDPKEKIFSIREDEASICRELKDLYLLNRSLAYVSRALNEKGYKTRAGVSWSPHSVWIIASSPFYAGIYRYNRYKGVESRTINPEEEWVMIQNHHPAIFTLEEHQAMRSIMKSNQRNMDNLPGRVHLSTKTHIFQGIMYCDKCGSKMVSTPGRLHVDGYRTSNYGCPLRRNTKKCNNPTVNDIVIGEFVINYILNMLNAKKTFSTINTPDELNAALLSGSVFSEVSSVEENGLNSFFNLLSRYGSDRSYIFSVKNPRKKKAAVDPELSKLRKEKEKQERALQRLQDLYLYSETSMSEKDFIIRKSEISSHLDNINRQLGLMTQDQASFLSDEEFIKQASHLLIQKELKNKKYIYFKKLVSTVDPDILKAYMETILDSIYTADGKITAITFKNGLTHRFIYKDK

SEQ ID NO: 624 - protein, 581 aa, Unknown
  Description of Unknown: Integrase B625 sequence
  PTHR30461:SF3,IPR036162,PS51737,IPR011109,PTHR30461, PS00397,PF00239,G3DSA:1.10.10.2600,IPR006119,SSF53041, SM00857,IPR025827,IPR038109,PS51736,cd03768, IPR006118,PF13408,G3DSA:3.40.50.1390,PF07508,Coil
MARKRTNLIGNTPSVRETKVAIYIRVSTIHQVDKDSIPMQKKDLIAYCQLILGTDNYEIFEDAGYSGKNTDRPAFQNMMGRIRKGEFTHVLVWKIDRVSRNLLDFAEMYEELRSLRVTFVSKNEQFDTSTAIGEAMLKIILVFAELERNMTSERVTATMISRANSGQWNGGRIPFGYSYDPKEKVFSIREDEASICRELKDLYLLNRSLAYVSRALNEKGYKTRAGVSWSPHSVWIIASSPFYAGIYRYNRYKGVESRTINPEEEWVMIQNHHPAIFTLEEHQTMRSIMKSNQRNMDNLPGRVHLSTKTHIFQGIMYCDKCGSKMVSTPGRLHVDGYRTSNYGCPLRRNTKKCNNPTVNDIVIGEFVINYILNMLNAKKTFSTINTPDELNAALLSGSVFSEVSSVEENGLNSFFNLLSRYGSDRSYIFSVKSPRKKKAAVDPELSKLRKEKEKQERALQRLQDLYLYSETSMSEKDFIIRKSEISSHLDNINRQLGLMTQDQASFLSDEEFIKQASHLLIQKELKNKKYIYFKKLVSTVDPDILKAYMETILDSIYTADGKITAITFKNGLTHRFIYKDK

SEQ ID NO: 625 - protein, 581 aa, Unknown
  Description of Unknown: Integrase B626 sequence
  PTHR30461:SF3,IPR036162,PS51737,IPR011109,PTHR30461, PS00028,PS00397,PF00239,G3DSA:1.10.10.2600,IPR006119, SSF53041,IPR013087,cd00338,SM00857,IPR025827,IPR038109 ,PS51736,IPR006118,PF13408,G3DSA:3.40.50.1390,PF07508,Coil
MAKHAITIPQNPKAALYIRVSTDMQADKDSLPLQESDLRKLADLNGIKDIEVFSDAGFSGKNLNRPAFRSMMDRIRAREFSHLYVWKLDRISRNLLDFLELYDELKCYGVAFASKNECFDTQSPGGEAMLKILLIFAELERKTIAERVTAVMLGRANENKWNGGRVPFGYMPGPVTTDANGKKCKSWPVPDPIEAPIVRAIFELYLREKALKKVAAALNTAGYRSRKGTLWSDTTVRCILKNHFYKGEYVYNRQNPNAGRREDFYRSENDWVIVTGQHEAIVPEETWRRCNEMLSKNRSWLAPIGSLVSAQDKYIFGGLLQCAECGYTMNSKDRTRIHDHTHSSYYYCTGRWKAPAVCTGEHSGYASDRVLLPQILKLIARMIEACANAIKFASAEQLVSYLLNDNLIPGATGIEEAQRIYMIVRAHVKHIYGVDQANQYNPNALLVEQSQKEKEKQERALSRLKRAYLFDDGDMSEAEYFDQKSAIEDTIAKLDKQINSLSGNDIGADEAYLAQLSKLIMIKKLQDTNSDFDYYKLAKAIGRKPIHDFLTEIISRIIIGEQNRIIKIIFKNGVPITFQYA

SEQ ID NO: 626 - protein, 581 aa, Unknown
  Description of Unknown: Integrase B627 sequence
  SM00857,IPR036162,PF13408,IPR025827,G3DSA:3.40.50.1390, PF14287,IPR006119,PF07508,cd03770,IPR011109, SSF53041,PTHR30461,PS51736,Coil,IPR025378, PF00239
MNRTRQTTDKSKNRITALYERLSRDDELAGDSNSIVNQKKMLEDYAKSNGYTDLVHFTDDGYSGGNFDRPGWKEMLRQIEDGSIGAVIVKDMSRVGRDYLQVGFYTEVFFREKGVHFVAISNGVDSDINTSSEFAPFLNIMNEWYLRDCSRKIKAVLQAKGRDGKPITNNPPYGYIKDPEDKNRCDMSKPYEWAGVSVVRMLEKPEYMGDTVNFRTKKLSYKDKVAVKNDSDEIVVFTDTHEAIIDRKTWYMVQELRKTKRRINTEGESNPFVGKIFCADCGGKMHYRNEGKRAGRKWRGLLDGSVRTTPACYNCGNYNNSHDQSGKVCCSHNIQAKVIDQFVLETIQYACKSVRMDERAFVESIRSASEIWEQSEAKKLKAALKHQEKRYAELDILLKKVYEDNALGRLPDKRYEMLSAGYEKEQAELEQSIKACREQLTQYDEDTDRTEEFLALVHKYTDITELTPVIINEFVDKILVHKAEKIDGERVMEIEIYLNFIGKVELPAQELTEEELAEIKEKQRLRERNAMYQRRRRAKFMPKTKAIRAKVQEAEIKETLENASAKAENCLWQIMMHISQR

SEQ ID NO: 627 - protein, 581 aa, Unknown
  Description of Unknown: Integrase B628 sequence
  PTHR30461:SF3,IPR036162,PS51737,IPR011109,PTHR30461, PS00397,PF00239,G3DSA:1.10.10.2600,IPR006119,SSF53041, SM00857,IPR025827,IPR038109,PS51736,cd03768, IPR006118,PF13408,G3DSA:3.40.50.1390,PF07508,Coil
MSRTTNKRPGKAKSGLSRKQKVAIYIRVSTLYQVDRDSLPMQRKDLIAYASLILGIEEYEIFEDAGYSGKNTDRPAFQEMMQRIRKGEFTHVLVWKIDRISRNLLDFAEMYEELQELRVTFVSKNEQFDTSTAIGEAMLKIILVFAELERNMTSERVTATMISRANSGLWNGGRIPFGYDYDPDKTAFSIREDEEKVCQMIKNDYMEHKSLVHTSRMLNASGYKTRAGAEWSPTAVWIIISSPFYAGIYRYNRYKGTERRVENPEDEWIMIQNHHPAIFSLEEHEKMLAILDENSRNHRSVGQKHQTERVHIFGGIAYCGKCGSKMVSTPGRLHANGYRPTNYSCPKHRKTKECDNPTVSDTQVGEFVINYILNMLRAKKRFSTIENPEDLERCLLYGNTFSEVEHIDGNGLNEYFNLLSRYGSDDSYTFSVKKSRKKKAEVDPEVETLRKEKEKQERAMKRLQDLYLYSDTSMSEKDFIIRKTEISKRLEGINAMLGMVAKNSEPSLSDEEFVRQASHLLISRELQNRQYIYFKNLAQNVSPEILKAYMETVLDSVLLVDGRVSSIVFRNGLTHKFKYKS

SEQ ID NO: 628 - protein, 581 aa, Unknown
  Description of Unknown: Integrase B629 sequence
  PTHR30461:SF3,IPR036162,PS51737,IPR011109,PTHR30461, PS00397,PF00239,G3DSA:1.10.10.2600,IPR006119,SSF53041, SM00857,IPR025827,IPR038109,PS51736,cd03768, IPR006118,PF13408,G3DSA:3.40.50.1390,PF07508,Coil
MSRTTNKRPGKAKSGLSRKQKVAIYIRVSTLYQVDRDSLPMQRKDLIAYASLILGIEEYEIFEDAGYSGKNTDRPAFQEMMQRIRKGEFTHVLVWKIDRISRNLLDFAEMYEELQVLRVTFVSKNEQFDTSTAIGEAMLKIILVFAELERNMTSERVTATMISRANSGLWNGGRIPFGYDYDPDKTAFSIREDEEKVCQMIKNDYMEHKSLVHTSRMLNASGYKTRAGVEWSPTAVWIIISSPFYAGIYRYNRYKGTERRVENPEDEWIMIQNHHPAIFSLEEHEKMLAILDENSRNRRSVGQKHQTERVHIFGGIAYCGKCGSKMVSTPGRLHANGYRPTNYSCPKHRKTKECDNPTVSDTQVGEFVINYILNMLRAKKKFSTVENPEDLEHCLLYGNTFSEVEHIDGNGLNEYFNLLSRYGSDDSYTFSIKKSRKKKAEVDPEVEALRKEKEKQERAMKRLQDLYLYSDTSMSEKDFIIRKTEISKRLKEINAMLGMVAKNSEPSLSDEEFVRQASHLLISRELQNRQYIYFKNLAQSVSPEILKAYMETVLDSVLLVDGRVSSIVFRNGLTHKFKYKS

SEQ ID NO: 629 - protein, 581 aa, Unknown
  Description of Unknown: Integrase B630 sequence
  PTHR30461:SF3,IPR036162,PS51737,IPR011109,PTHR30461, PS00397,PF00239,G3DSA:1.10.10.2600,IPR006119,SSF53041, SM00857,IPR025827,IPR038109,PS51736,cd03768, IPR006118,PF13408,G3DSA:3.40.50.1390,PF07508,Coil
MSRTTNKRPGKAKSGLSRKQKVAIYIRVSTLYQVDRDSLPMQRKDLIAYASLILGIEEYEIFEDAGYSGKNTDRPAFQEMMQRIRKGEFTHVLVWKIDRISRNLLDFAEMYEELQDLRVTFVSKNEQFDTSTAIGEAMLKIILVFAELERNMTSERVTATMISRANSGLWNGGRIPFGYDYDPDKTAFSIREDEEKVCQMIKNDYMEHKSLVHTSRMLNASGYKTRAGAEWSPTAVWIIISSPFYAGIYRYNRYKGTERRVENPEDEWIMIQNHHPAIFSLEEHEKMLAILDENSRNHRSVGQKHQTERVHIFGGIAYCGKCGSKMVSTPGRLHANGYRPTNYSCPKHRKTKECDNPTVSDTQVGEFVINYILNMLGAKKKFSTIENPEDLERCLLYGNTFSEVEHIDSNGLNEYFNLLSRYSSDDSYTFSVKKSRKKKAEVDPEVEALRKEKEKQERAMKRLQDLYLYSDTSMSEKDFIIRKTEISKRLEEINAMLGMVAKNSEPSLSDEEFVRQASHLLISRELQNRQYIYFKNLAQNVSPEILKAYMETVLDSVLLVDGRVSSIVFRNGLTHKFKYKS

SEQ ID NO: 630 - protein, 581 aa, Unknown
  Description of Unknown: Integrase B631 sequence
  PTHR30461:SF3,IPR036162,PS51737,IPR011109,PTHR30461, PS00397,PF00239,G3DSA:1.10.10.2600,IPR006119,SSF53041, SM00857,IPR025827,IPR038109,PS51736,cd03768, IPR006118,PF13408,G3DSA:3.40.50.1390,PF07508,Coil
MARKRTNLIGNTPSVRETKVAIYIRVSTIHQVDKDSIPMQKKDLIAYCQLILGTDNYEIFEDAGYSGKNTDRPAFQNMMGRIRKGEFTHVLVWKIDRVSRNLLDFAEMYEELRSLRVTFVSKNEQFDTSTAIGEAMLKIILVFAELERNMTSERVTATMISRANSGQWNGGRIPFGYSYDPKEKVFSIREDEASICRELKDLYLLNRSLAYVSRALNEKGYKTRAGVSWSPHSVWIIASSPFYAGIYRYNRYKGVESRTINPEEEWVMIQNHHPAIFTLEEHQAMRSIMKSNKRNMDNLPGRVHLSTKTHIFQGIMYCDKCGSKMVSTPGRLHVDGYRTSNYGCPLRRNTKKCNNPTVNDIVIGEFVINYILNMLNAKKTFSTINTPDELNVALLSGSVFSEVSSVEENGLNSFFNLLSRYGSDRSYIFSVKSPRKKKAAVDPELSKLRKEKEKQERALQRLQNLYLYSETSMSEKDFIIRKSEISSHLDNINRQLGLMTQDQASFLSDEEFIKQASHLLIQKELKNKKYIYFKKLVSTVDPDILKSYMETILDSIYTADGKITAITFKNGLTHRFIYKDK

SEQ ID NO: 631 - protein, 581 aa, Unknown
  Description of Unknown: Integrase B632 sequence
  PTHR30461:SF3,IPR036162,PS51737,IPR011109,PTHR30461, PS00397,PF00239,G3DSA:1.10.10.2600,IPR006119,SSF53041, SM00857,IPR025827,IPR038109,PS51736,cd03768, IPR006118,PF13408,G3DSA:3.40.50.1390,PF07508,Coil
MSRTTNKRPGKAKSGLSRKQKVAIYIRVSTLYQVDRDSLPMQRKDLIAYASLILGIEEYEIFEDAGYSGKNTDRPAFQEMMQRIRKGEFTHVLVWKIDRISRNLLDFAEMYEELQELRVTFVSKNEQFDTSTAIGEAMLKIILVFAELERNMTSERVTATMISRANSGLWNGGRIPFGYDYDPDKTAFSIREDEEKVCQMIKNDYMEHKSLVHTSRMLNASGYKTRAGAEWSPTAVWIIISSPFYAGIYRYNRYKGTDRRVENPEDEWIMIQNHHPAIFSLEEHEKMLAILDENSRNRRSVGQRHQTERVHIFGGIAYCGKCGSKMVSTPGRLHVNGYRPTNYSCPKHRKTKECDNPTVSDTQVGEFVINYILNMLGAKKKFSTIENPEDLERCLLYGNTFSEVEHIDSNGLNEYFNLLSRYSSDDSYTFSVKKSRKKKAEVDPEVEALRKEKEKQERAMKRLQDLYLYSDTSMSEKDFIIRKTEISKRLEEINAMLGMVARNNEPSLSDEEFVRQASHLLISRELQNRQYIYFKNLAQNVSPEILKAYMETVLDSVLLVDGRVSSIVFRNGLTHKFKYKS

SEQ ID NO: 632 - protein, 581 aa, Unknown
  Description of Unknown: Integrase B633 sequence
  PTHR30461:SF3,IPR036162,PS51737,IPR011109,PTHR30461, PS00397,PF00239,G3DSA:1.10.10.2600,IPR006119,SSF53041, cd00338,SM00857,IPR025827,IPR038109,PS51736, IPR006118,PF13408,G3DSA:3.40.50.1390,PF07508,Coil
MAYAMKVPAASADDRIVAIYVRVSTGYQVDKDSLPFQKKELRAYCKHILHVDMSRVEIFEDAGRSGKNTKRPAYERMMQKVRAGLVSHVLVYKIDRISRNLVDFSLMYDDFKYNRVTFVSLNEQFDTSSAIGEAVLKIILVFAELERKLTSERVKDIMIGRANEGKWNGARVPYGWDWDSSAMWPVHSEKEAPFGRAMYEMYLEVKSTGKIRDYNNAHGIPTKRGGEWTSKTVGDFLRNPMNKGDYRYNYRESARGRKKPIDEVVYLEGVFDPLIDPEIWEKVNKIMDINRDKRNMGGLHPVEKNCNVFAGLIQCGSCGSGYLVGKKDKRRKNGFTPSMYYCSAKTRAIHCQNLNVSDVKIGPFVINYISAMVRVSNERRKIKTPEDLEEMLLSDKAVFADIMGLSSDSLNSTYKLLTGKSATGGALWRADLVDQEGTVSDPVEIENLKDQIRKYERAKERLEDAYYFSDDGMSEKEYLEKKNRFDSGRVAAENKLKELTETHIASGVDESAFMKSASAFLLTHKIRAGSHIVYSDLAGMVKEESIKEFFNLVLDHITVKDRRVTEIVFANGLSHKFIYRD

SEQ ID NO: 633 - protein, 581 aa, Unknown
  Description of Unknown: Integrase B634 sequence
  PTHR30461:SF3,IPR036162,PS51737,IPR011109,PTHR30461, PS00397,PF00239,G3DSA:1.10.10.2600,IPR006119,SSF53041, SM00857,IPR025827,IPR038109,PS51736,cd03768, IPR006118,PF13408,G3DSA:3.40.50.1390,PF07508,Coil
MAYAMKVPAASADDRIVAIYVRVSTGYQVDKDSLPFQKKELKAYCKHILHVDMSRVEIFEDAGRSGKNTKRPAYERMMQKVRAGLVSHVLVYKIDRISRNLVDFSLMYDDFKYNRVTFVSLNEQFDTSSAIGEAVLKIILVFAELERKLTSERVKDIMIGRANEGKWNGARVPYGWDWDSSAMWPVHSEKEAPFGRAMYEMYLEVKSTGKIRDYNNAHGIPTKRGGEWTSKTVGDFLRNPMNKGDYRYNYRESARGRKKPIDEVVYLEGVFDPLIDPEIWEKVNKIMDINRDKRNMVGSHPVEKNCNVFAGLIQCGSCGSGYLVGKKDKRRKNGFTPSMYYCGAKTRAIHCQNLNVSDVKIGPFVINYISAMVRVSNERRKIKTPEDLEEMLLSDKAVFADIMGLSSDSLNNTFELLTGKSATGGALWRADLVDQEGAAADPAEIESLKDQIRKYERAKERLEDAYYFSDDGMSEKEYLEKKNRFDSGRVAAENKLKELTETHIASGVDESAFMKSASAFLLTHKIRAGSHIVYSDLAGMVEEESIKEFFNLVLDHITVKDRCVTEIVFANGLSHKFIYRD

SEQ ID NO: 634 - protein, 581 aa, Unknown
  Description of Unknown: Integrase B635 sequence
  PTHR30461:SF3,cd00338,SM00857,G3DSA:1.10.10.2600,IPR036162, PF13408,PS51737,IPR025827,G3DSA:3.40.50.1390,IPR006119, IPR038109,PF07508,SSF53041,IPR011109,PTHR30461, PS51736,Coil,PF00239
MEDFYKIKEALKIMPITQIPLRVVIYSRVSTDSEEQLTSITNQKTYYKKLIENTPKWTLIEEYVDEGITGTSTKKREAFQRMISDGIEGKFDMIITKSVSRFARNTLDSLQNVRILTAHGVGVWFHSDGILTFEADGELRLSIMSAFAQGESEKKSEAVRFGLQESIKRGTVFGFDNMFGYRLHGGKLEIDEAEVPMIQKIFELYATDRYSMNQIEKILYDDGYRNHNGKRISHATLSHIIRNPKYKGVFAGRKVRKKDLFDDRVEMLPQNEWVIIDGEKGRSIVPPIVSEELWAKANRVLEARSIDVKTRQNKCNHPNLLTGKLWCVHCNLPYHRKASKTSNAVLNSAWVCSGKIRNGTASCPSIYLYENEVKQCLYELFIEDDFDIDDYIDQYIKLVSEASSSEKNTNRQNELEKELALIEKKKTKILEFNVLGQVSDQDYIAQNNALNEEYQRKSEELANVRLALDTKKRTEEDFEKMRGALQQLKGRKNIDFIDPAFVRTYIERIDVSMIDGRTMNMDVILKTGDKISRILKKNLSSVNRRKHIYTGRRLTFRRKTPYGRGSHEIPIQINICFFSLN

SEQ ID NO: 635 - protein, 581 aa, Unknown
  Description of Unknown: Integrase B636 sequence
  PTHR30461:SF3,IPR036162,PS51737,IPR011109,PTHR30461, PS00397,PF00239,G3DSA:1.10.10.2600,IPR006119,SSF53041, SM00857,IPR025827,IPR038109,PS51736,cd03768, IPR006118,PF13408,G3DSA:3.40.50.1390,PF07508,Coil
MARKRTNLIGNTPSVRETKVAIYIRVSTIHQVDKDSIPMQKKDLIAYCQLILGTDNYEIFEDAGYSGKNTDRPAFQNMMGRIRKGEFTHVLVWKIDRVSRNLLDFAEMYEELRSLRVTFVSKNEQFDTSTAIGEAMLKIILVFAELERNMTSERVTATMISRANSGQWNGGRIPFGYSYDPKEKVFFIREDEASICRELKDLYLLNRSLAYVSRALNEKGYKTRAGVSWSPHSVWIIASSPFYAGIYRYNRYKGVESRTINPEEEWVMIQNHHPAIFTLEEHQAMRSIMKSNKRNMDNLPGRVHLSTKTHIFQGIMYCDKCGSKMVSTPGRLHVDGYRTSNYGCPLRRNTKKCNNPTVNDIVIGEFVINYILNMLNAKKTFSTINTPDELNAALLSGSVFSEVSSVEENGLNSFFNLLSRYGSDRSYIFSVKSPRKKKAAVDPELSKLRKEKEKQERALQRLQDLYLYSETSMSEKDFIIRKSEISSHLDNINRQLGLMTQDQASFLSDEEFIKQASHLLIQKELKNKKYIYFKKLVSTVDPDILKAYMETILDSIYTADGKITAITFKNGLTHRFIYKDK

SEQ ID NO: 636 - protein, 581 aa, Unknown
  Description of Unknown: Integrase B637 sequence
  PTHR30461:SF3,IPR036162,PS51737,IPR011109,PTHR30461, PS00397,PF00239,G3DSA:1.10.10.2600,IPR006119,SSF53041, SM00857,IPR025827,IPR038109,PS51736,cd03768, IPR006118,PF13408,G3DSA:3.40.50.1390,PF07508,Coil
MAYATKVPAASADDRIVAIYVRVSTGYQVDKDSLPFQKKELKAYCKHILHIDMSRVEIFEDAGRSGKNTKRPAYERMMQKVRAGLVSHVLVYKIDRISRNLVDFSLMYDDFKYNRVTFVSLNEQFDTSSAIGEAVLKIILVFAELERKLTSERVKDIMIGRANDGKWNGARVPYGWDWDSSAGCPVHSEKEAPFARAMYEMYLEVKSTGKIRDYNNAHKIPTKRGGEWTSKTVGDFLRNPMNKGDYRYNYRESARGRKKPADEIVYLEGVFDPLVDPEIWEKVNKIMDINRDQRNMGGLHPIEKNCNVFAGLIQCGSCGSGYLVGKKDKRRKNGFTPSLYYCGAKTRAIHCQNPNVSDVKIGPFVINYISAMVRVSNERQKIKSPEELEEMLLSDKAVFADIMGLSSDSLNTTFELLTGKSATGGALWRADLVDQEGSAADPAEIENLKGQIRKYERAKERLEDAYYFSDDGMSEKEYLEKKNRFDSMRVSAENKLKELTETHIASGVDESSFMKSAFAFLLTHKIRAGSHIVYSDLAGMVEEESIKEFFNLVLDHIVVKDRRVTEIIFANGLSHKFIYRD

SEQ ID NO: 637 - protein, 581 aa, Unknown
  Description of Unknown: Integrase B638 sequence
  PTHR30461:SF3,cd00338,SM00857,G3DSA:1.10.10.2600,IPR036162, PF13408,IPR025827,PS51737,G3DSA:3.40.50.1390,IPR006119, IPR038109,PF07508,SSF53041,IPR011109,PTHR30461, PS51736,Coil,PF00239
MEDFYKIKEALKIMPITQIPLRVVIYSRVSTDSEEQLTSITNQKTYYKKLIENTPKWTLIEEYVDEGITGTSTKKREAFQRMISDGIEGKFDMIITKSVSRFARNTLDSLQNVRILTAHGVGVWFHSDGILTFEADGELRLSIMSAFAQGESEKKSEAVRFGLQESIKRGTVFGFDNMFGYRLRGGKLEIDEAEVPMIQKIFELYATDRYSMNQIEKILYDDGYRNHNGNRISHATLSHIIRNPKYKGVFAGRKVRKKDLFDDRVEMLPQNEWVIIDGEKGRSIVPPIVSEELWAKANRVLEARSIDVKTRQNKCNHPNLLTGKLWCVHCNLPYHRKASKTSNAVLNSAWVCAGKIRNGTASCPSIYLYENEVKQCLYELFIEDDFDIDDYIDQYIKLVSEASSLEKNTNRQNELEKELALIEKKKTKILEFNVLGQVSDQDYIAQNNALNEEYQRKSEELANVRLALDTKKRTEEDFEKMRGALQQLKGRKNIDFIDPAFVRTYIERIDVSMIDGRTMNMDVILKTGDKISRILKKNLSSVNRRKHIYTGRRLMFRRKTPYGRGSHEIPIQINICFFSLN

SEQ ID NO: 638 - protein, 581 aa, Unknown
  Description of Unknown: Integrase B639 sequence
  PTHR30461:SF3,IPR036162,PS51737,IPR011109,PTHR30461, PS00397,PF00239,G3DSA:1.10.10.2600,IPR006119,SSF53041, SM00857,IPR025827,IPR038109,PS51736,cd03768, IPR006118,PF13408,G3DSA:3.40.50.1390,PF07508,Coil
MAYASQNTAARFDDRIVAIYVRVSTGYQVDKDSLPFQKKELKAYCKHILHVDMSRVEIFEDAGRSGKNTKRPAYERMMQKVRAGLVSHVLVYKIDRISRNLVDFSLMYDDFKYNRVTFVSLNEQFDTSSAIGEAVLKIILVFAELERKLTSERVKDIMIGRANEGKWNGARVPYGWDWDSSAMRPVHSEKEAPFGRAMYEMYLEVKSTGKIRDYNNAHKIPTKRGGEWTSKTVGDFLRNPMNKGDYRYNYRESARGRKKPVDEVVYLEGVFEPLVNPEIWEKVNKIMDINRDQRNIGGSHPIEKNCNVFAGLIQCGSCGSGYLVGKKDKRRKNGFTPSMYYCSAKTRAIHCQNLNVSDVKIGPFVINYISAMVRVSNERRKIKTSEDLEEMLLSDKAVFADIMGLSSDSLNNTFELLTGKSSTSGALWRADLVDQEGASADPAEIESLKDQIRKYERAKERLEDAYYFSDDGMSEKEYLEKKNRFDSGRVAAENKLKELTETHIASGVDESAFMKSASAFLLTHKIRAGSHIVYSDLAGMVEEESIKEFFNLVLDHITVKDRRVTEIVFANGLSHKFIYRD

SEQ ID NO: 639 - protein, 581 aa, Unknown
  Description of Unknown: Integrase B640 sequence
  PTHR30461:SF3,IPR036162,PS51737,IPR011109,PTHR30461, PS00397,PF00239,G3DSA:1.10.10.2600,IPR006119,SSF53041, SM00857,IPR025827,IPR038109,PS51736,cd03768, IPR006118,PF13408,G3DSA:3.40.50.1390,PF07508,Coil
MAYAMKVPAASADDRIVAIYVRVSTGYQVDKDSLPFQKKELKAYCKHILHVDMSRVEIFEDAGRSGKNTKRPAYERMMQKVRAGLVSHVLVYKIDRISRNLVDFSLMYDDFKYNRVTFVSLNEQFDTSSAIGEAVLKIILVFAELERKLTSERVKDIMIGRANEGKWNGARVPYGWDWDSSAGWPVHSKKEAPLARAMYEMYLEVKSTGKIRDYNNAHKIPTKRGGEWTSKTVGDFLRNPMNKGDYRYNYRESARGRKKPADEIVYLEGVFDPLVDPDVWEKVNKIMDSNRDKRNMGGLHPIESNCNVFAGLIQCGLCGSGYLVGKKDKRRKNGFTPSLYYCGAKTRAIHCQNLNVSDVKIGPFVINYISAMVRVSNERRKIKSPEELEEMLLSDKAVFADIMGLSSDSLNTTFELLTGKSATGGALWRADLVDQEGAAADPAEIESLKDQIRKYERAKERLEDAYYFSDDGMSEKEYLEKKNRFDSMRVAAENKLKELTETHIASGVDESAFMKSASAFLLTHKIRAGSHIVYSDLAGMVEEESIKDFFNLVLDHIVVKDRRVTEIVFANGLSHKFIYRD

SEQ ID NO: 640 - protein, 581 aa, Unknown
  Description of Unknown: Integrase B641 sequence
  PTHR30461:SF3,IPR036162,PS51737,IPR011109,PTHR30461, PS00397,PF00239,G3DSA:1.10.10.2600,IPR006119,SSF53041, SM00857,IPR025827,IPR038109,PS51736,cd03768, IPR006118,PF13408,G3DSA:3.40.50.1390,PF07508,Coil
MAYAMKVPAASADDRIVAIYVRVSTGYQVDKDSLPFQKKELKAYCKHILHVDMSRVEIFEDAGRSGKNTKRPAYERMMQKVRAGLVSHVLVYKIDRISRNLVDFSLMYDDFKYNRVTFVSLNEQFDTSSAIGEAVLKIILVFAELERKLTSERVKDIMIGRANEGKWNGARVPYGWDWDSSAGWPVHSEKEAPFGRAMYEMYLKVKSTGKIRDYNNAHGIPTKRGGEWTSKTVGDFLRNPMNKGDYRYNYRESARGRKKPIDEVVYLEGVFDPLIDPEIWEKVNKIMDINRDKRNMVGSHPVEKNCNVFAGLIQCGSCGSGYLVGKKDKRRKNGFTPSMYYCGAKTRAIHCQNLNVSDVKIGPFVINYISAMVRVSNERRKIKTPEDLEEILLSDKAVFADIMGLSFDSLNNTFELLTGKSATGGALWHADLVDQEGVVADPAEIESLKDQIQKYERAKERLEDAYYFSDDGMSEKEYLEKKNQFDSGRVAAENKLKELTETHIASGVDESAFMKSASAFLLTHKIRAGSHIVYSDLAGMVEEESIKEFFNLVLDHITVKDRRVTEIVFANGLSHKFIYRD

SEQ ID NO: 641 - protein, 581 aa, Unknown
  Description of Unknown: Integrase B642 sequence
  PTHR30461:SF3,IPR036162,PS51737,IPR011109,PTHR30461, PS00397,PF00239,G3DSA:1.10.10.2600,IPR006119,SSF53041, SM00857,IPR025827,IPR038109,PS51736,cd03768, IPR006118,PF13408,G3DSA:3.40.50.1390,PF07508,Coil
MSRTTNKRPGKAKSGLSRKQKVAIYIRVSTLYQVDRDSLPMQRKDLIAYASLILGIEEYEIFEDAGYSGKNTDRPAFQEMMQRIRKGEFTHVLVWKIDRISRNLLDFAEMYEELQDLRVTFVSKNEQFDTSTAIGEAMLKIILVFAELERNMTSERVTATMISRANSGLWNGGRIPFGYDYDPDKTAFSIREDEEKVCQMIKNDYMEHKSLVHTSRMLNASGYKTRSGVEWSPTAVWIIVSSPFYAGIYRYNRYKGTERRVENPEDEWIMIQNHHPAIFSLEEHEKMLAILDENSRNRRSVGQRHQTERVHIFGGIAYCGKCGSKMVSTPGRLHVNGYRPTNYSCPKHRKTKECDNPTVSDTQVGEFVINYILNMLGAKKKFSTIENPEDLERCLLYGNTFSEVEHIDSNGLNEYFNLLSRYSSDDSYTFSVKKSRKKKAEVDPEVEALRKEKEKQERAMKRLQDLYLYSDTSMSEKDFIIRKTEISKRLEEINAMLGMVAKNSEPSLSDEEFVRQASHLLISRELQNRQYIYFKNLAQNVSPEILKAYMETVLDSVLLVDGRVSSIVFRNGLTHKFKYKS

SEQ ID NO: 642 - protein, 581 aa, Unknown
  Description of Unknown: Integrase B643 sequence
  PTHR30461:SF3,IPR036162,PS51737,IPR011109,PTHR30461, PS00397,PF00239,G3DSA:1.10.10.2600,IPR006119,SSF53041, SM00857,IPR025827,IPR038109,PS51736,cd03768, IPR006118,PF13408,G3DSA:3.40.50.1390,PF07508,Coil
MSRTTNKRPGKAKSGLSRKQKVAIYIRVSTLYQVDRDSLPMQRKDLIAYASLILGIEEYEIFEDAGYSGKNTDRPAFQEMMQRIRKGEFTHVLVWKIDRISRNLLDFAEMYEELQDLRVTFVSKNEQFDTSTAIGEAMLKIILVFAELERNMTSERVTATMISRANSGLWNGGRIPFGYDYDPDKTAFSIREDEEKVCQMIKNDYMEHKSLVHTSRMLNASGYKTRSGVEWSPTAVWIIVSSPFYAGIYRYNRYKGTERRVENPEDEWIMIQNHHPAIFSLEEHEKMLAILDENSRNRRSVGQRHQTERVHIFGGIAYCGKCGSKMVSTPGRLHVNGYRPTNYSCPKHRKTKECDNPTVSDTQVGEFVINYILNMLGAKKKFSTIENPEDLERCLLYGNTFSEVEHIDSNGLNEYFNLLSRYSSDDSYTFSVKKSRKKKAEVDPEVAALRKEKEKQERAMKRLQDLYLYSDTSMSEKDFIIRKTEISKRLEEINAMLGMVAKNSEPSLSDEEFVRQASHLLISRELQNRQYIYFKNLAQSVSPEILKVYMETVLDSVLLVDGRVSSIVFRNGLTHKFKYKS

SEQ ID NO: 643 - protein, 581 aa, Unknown
  Description of Unknown: Integrase B644 sequence
  PTHR30461:SF3,IPR036162,PS51737,IPR011109,PTHR30461, PS00397,PF00239,G3DSA:1.10.10.2600,IPR006119,SSF53041, cd00338,SM00857,IPR025827,IPR038109,PS51736, IPR006118,PF13408,G3DSA:3.40.50.1390,PF07508,Coil
MAYAMKVPTASADDRIVAIYVRVSTGYQVDKDSLPFQKKELKAYCKHILHVDMSRVEVFEDAGRSGKNTKRPAYERMMQKVRAGLVSHVLVYKIDRISRNLVDFSLMYDDFKYNRVTFVSLNEQFDTSSAIGEAVLKIILVFAELERKLTSERVKDIMIGRANEGKWNGARVPYGWDWDSSAGWPVHSEKEAPFGRAMYEMYLKVKSTGKIRDYNNAHGIPTKRGGEWTSKTVGDFLRNPMNKGDYRYNYRESARGRKKPIGEVVYLEGVFDPLIDPEIWEKVNKIMDINRDKRNMGGSHPVEKNCNVFAGLIQCGSCGSGYLVGKKDKRRKNGFTPSMYHCSAKTRAIHCQNLNVSEVKIGPFVINYVSAMVRVSNERRKIKTPEDLEEMLLSDKAVFADIMGLSSDSLNNTFELLTGKSATGGALWRADLVDQEGAVADPAEIENLKDQIRKYERAKERLEDAYYFSDDGMSEKEYLEKKNLFDSGRVAAENKLKELTETHIASGVDESAFMKSASAFLLTHKIRAGSHIVYSDLAGMVEEESIKEFFNLVLDHITVKDRRVTEIVFANGLSHKFIYRD

SEQ ID NO: 644 - protein, 581 aa, Unknown
  Description of Unknown: Integrase B645 sequence
  PTHR30461:SF3,IPR036162,PS51737,IPR011109,PTHR30461, PS00397,PF00239,G3DSA:1.10.10.2600,IPR006119,SSF53041, SM00857,IPR025827,IPR038109,PS51736,cd03768, IPR006118,PF13408,G3DSA:3.40.50.1390,PF07508,Coil
MSRTTNKRPGKAKSGLSRKQKVAIYIRVSTLYQVDRDSLPMQRKDLIAYASLILGIEEYEIFEDAGYSGKNTDRPAFQEMMQRIRKGEFTHVLVWKIDRISRNLLDFAEMYEELQDLRVTFVSKNEQFDTSTAIGEAMLKIILVFAELERNMTSERVTATMISRANSGLWNGGRIPFGYDYDPDKTAFSIREDEEKVCQMIKNDYMEHKSLVHTSRMLNASGYKTRAGAEWSPTAVWIIISSPFYAGIYRYNRYKGTERRVENPEDEWIMIQNHHPAIFSLEEHEKMLAILDENSRNRRSVGQKHQTERVHIFGGIAYCGKCGSKMVSTPGRLHANGYRPTNYSCPKHRKTKECDNPTVSDTQVGEFVINYILNMLGAKKKFSTIENPEDLERCLLYGNTFSEVEHIDSNGLNEYFNLLSRYSSDDSYTFSVKKSRKKKAEVDPEVEALRKEKEKQERAMKRLQDLYLYSDTSMSEKDFIIRKTEISKRLEEINAMLGMVAKNSEPSLSDEEFVRQASHLLISRELQNRQYIYFKNLAQNVSPEILKAYMETVLDSVLLVDGRVSSIVFRNGLTHKFKYKS

SEQ ID NO: 645 - protein, 581 aa, Unknown
  Description of Unknown: Integrase B646 sequence
  PTHR30461:SF3,IPR036162,PS51737,IPR011109,PTHR30461, PS00397,PF00239,G3DSA:1.10.10.2600,IPR006119,SSF53041, cd00338,SM00857,IPR025827,IPR038109,PS51736, IPR006118,PF13408,G3DSA:3.40.50.1390,PF07508,Coil
MSRTTNKRPGKAKSGLSRKQKVAIYIRVSTLHQVDRDSLPMQRKDLIAYASLILGIEEYEIFEDAGYSGKNTDRPAFQEMMQRIRKGEFTHVLVWKIDRISRNLLDFAEMYEELQDLRVTFVSKNEQFDTSTAIGEAMLKIILVFAELERNMTSERVTATMISRANSGLWNGGRIPFGYDYDPDKTAFSIREDEEKVCQMIKNDYMEHKSLVHTSRMLNASGYKTRAGAEWSPTAVWIIISSPFYAGIYRYNRYKGTERRVENPEDEWIMIQNHHPAIFSLEEHEKMLAILDENSRNHRSVGQKHQTERVHIFGGIAYCGKCGSKMVSTPGRLHANGYRPTNYSCPKHRKTKECDNPTVSDTQVGEFVINYILNMLGAKKKFSTIENPEDLERCLLYGNTFSEVEHIDSNGLNEYFNLLSRYSSDDSYTFSVKKSRKKKAEVDPEVEALRKEKEKQERAMKRLQDLYLYSDTSMSEKDFIIRKTEISKRLEEINAMLGMVAKNSEPSLSDEEFVRQASHLLISRELQNRQYIYFKNLAQNVSPEILKAYMETVLDSVLLVDGRVSSIVFRNGLTHKFKYKS

SEQ ID NO: 646 - protein, 581 aa, Unknown
  Description of Unknown: Integrase B647 sequence
  PTHR30461:SF3,IPR036162,PS51737,IPR011109,PTHR30461, PS00397,PF00239,G3DSA:1.10.10.2600,IPR006119,SSF53041, SM00857,IPR025827,IPR038109,PS51736,cd03768, IPR006118,PF13408,G3DSA:3.40.50.1390,PF07508,Coil
MAYAMKVPAASADDRIVAIYVRVSTGYQVDKDSLPFQKKELKAYCKHILHVDMSRVELFEDAGRSGKNTKRPAYERMMQKVRAGLVSHVLVYKIDRISRNLVDFSLMYDDFKYNRVTFVSLNEQFDTSSAIGEAVLKIILVFAELERKLTSERVKDIMIGRANEGKWNGARVPYGWDWDSSAGWPVHSEKEAPFGRAMYEMYLEVKSTGKIRDYNNAHGIPTKRGGEWTSKTVGDFLRNPMNKGDYRYNYRESARGRKKPIDEVVYLEGVFDPLIDPEIWEKVNKIMDINRDKRNMGGLHPVEKNCNVFAGLIQCGSCGSGYLVGKKDKRRKNGFTPSMYYCSAKTRAIHCQNLNVSDVKIGPFVINYISAMVRVSNERRKIKTPEDLEEILLSDKAVFADIMGLSSDSLNNTFELLTGKSATGGALWRADLVDQEGVAADPAEIESLKDQIRKYERAKERLEDAYYFSDDGMSEKEYLEKKNRFDSGRVAAENKLKELTETHIASGVDESAFMKSASAFLLTHKIRAGSHIVYSDLAGMVEEESIKEFFNLVLDHITVKDRRVTEIVFANGLSHKFIYRD

SEQ ID NO: 647 - protein, 581 aa, Unknown
  Description of Unknown: Integrase B648 sequence
  PTHR30461:SF3,IPR036162,PS51737,IPR011109,PTHR30461, PS00397,PF00239,G3DSA:1.10.10.2600,IPR006119,SSF53041, SM00857,IPR025827,IPR038109,PS51736,cd03768, IPR006118,PF13408,G3DSA:3.40.50.1390,PF07508,Coil
MARKRTNLIGNTPSVRETKVAIYIRVSTIHQVDKDSIPMQKKDLIAYCQLILGTDNYEIFEDAGYSGKNTDRPAFQNMMGRIRKGEFTHVLVWKIDRVSRNLLDFAEMYEELRSLRVTFVSKNEQFDTSTAIGEAMLKIILVFAELERNMTSERVTATMISRANSGQWNGGRIPFGYSYDPKEKVFSIREDEASICRELKDLYLLNRSLAYVSRALNEKGYKTRAGVSWSPHSVWIIASSPFYAGIYRYNRYKGVESRTINPEEEWVMIQNHHPAIFTLEEHQTMRSIMKSNQRNMDNLPGRVHLSTKTHIFQGIMYCDKCGSKMVSTPGRLHVDGYRTSNYGCPLRRNTKKCNNPTVNDIVIGEFVINYILNMLNAKKTFSTINTPDELNAALLSGSVFSEVSSVEENGLNSFFNLLSRYGSDRSYIFSVKNPRKKKAAVDPELSKLRKEKEKQERALQRLQDLYLYSETSMSEKDFIIRKSEISSHLDNINRQLGLMTQDQASFLSDEEFIKQASHLLIQKELKNKKYIYFKKLVSTVDPDILKAYMETILDSIYTADGKITAITFKNGLTHRFIYKDK

SEQ ID NO: 648 - protein, 581 aa, Unknown
  Description of Unknown: Integrase B649 sequence
  PTHR30461:SF3,IPR036162,PS51737,IPR011109,PTHR30461, PS00397,PF00239,G3DSA:1.10.10.2600,IPR006119,SSF53041, SM00857,IPR025827,IPR038109,PS51736,cd03768, IPR006118,PF13408,G3DSA:3.40.50.1390,PF07508,Coil
MARKRTNLIGNTPSVRETKVAIYIRVSTIHQVDKDSIPMQKKDLIAYCQLILGTDNYEIFEDAGYSGKNTDRPAFQNMMGRIRKGEFTHVLVWKIDRVSRNLLDFAEMYEELRSLRVTFVSKNEQFDTSTAIGEAMLKIILVFAELERNMTSERVTATMISRANSGQWNGGRIPFGYSYDPKEKVFSIREDEASICRELKDLYLLNRSLVYVSRALNEKGYKTRAGVSWSPHSVWIIASSPFYAGIYRYNRYKGVESRTINPEEEWVMIQNHHPAIFTLEEHQAMRSIMKSNQRNMDNLPGRVHLSTKTHIFQGIMYCDKCGSKMVSTPGRLHVDGYRTSNYGCPLRRNTKKCNNPTVNDIIIGEFVINYILNMLNAKKTFSTINTPDELNAALLSGSVFSEISSVEENGLNSFFNLLSRYGSDRSYIFSVKSPRKKKAAVDPELSKLRKEKEKQERALQRLQDLYLYSETSMSEKDFIIRKSEISSHLDNINRQLGLMTQDQASFLSDEEFIKQASHLLIQKELKNKKYIYFKKLVSTVDPDILKAYMETILDSIYTADGKITAITFKNGLTHRFIYKDK

SEQ ID NO: 649 - protein, 581 aa, Unknown
  Description of Unknown: Integrase B650 sequence
  SM00857,G3DSA:1.10.10.2600,IPR036162,PF13408,PS51737, G3DSA:3.40.50.1390,IPR025827,IPR006119,IPR038109,IPR011109, SSF53041,PTHR30461,Coil,PS51736,cd00338, PF00239
MAIEHRGDGKARRERVKGKLIGPYKRKKNAPHANPPRFVQGKAIPSQRRQVHHIMPKKDRAAIYARFSSHNQREESIEIQVEKSREYCEAHALEVVRIYTDSAKTGRNTNRDGFQRMMEDAKSGIFDFVVIYKVTRIMRNRDEMAVARIMLRKAGVEILYAGETLGEGSTRIMHLGMLEVLAEYESAVNAERVRDGIAKNAERGLANGQVRYGWDIVDGRYQINEHEAAVMRKMRSMLFSGHTVADIVLALKGELTHRGNPLGRNTAVRLLRREQNCGVYDYAGTRIEGGMPALWSREDQDMIESILDRRRVPHRQIDAEQECPLSGKLWCTECGRAMIGVSGTSKSGKVYRYYKCRKCRRAHRREVVEEAVYDCIVESLGQQETRDRIAEVLALYWVDNPEPDPEVQRKAEASRIRKEIREVDAAIENIWKAVESGTVLPGVSERMASLNQRKAELENEMENLGDGEDDRVTLDHVTAWLDYARTEADPTDILNMFVGRIDICGDELRIYCNFDPIDPVGEDEKTDINENTRLEDGCSHDSLWRPTSSTARTLTTININGSRAHIDVAKDYFVVVTLFGK

SEQ ID NO: 650 - protein, 581 aa, Unknown
  Description of Unknown: Integrase B651 sequence
  PTHR30461:SF3,SM00857,IPR006118,G3DSA:1.10.10.2600,IPR036162, PS51737,G3DSA:3.40.50.1390,Coil,IPR006119,IPR038109, PF07508,SSF53041,IPR011109,PTHR30461,PS00397, PS51736,cd00338,PF00239
MAYRSTITTPSAASRKVKAALYIRVSTLYQIDKDSLPFQRQELINLAKYMLGTDDYEVFEDAGYSGKNTDRPSYQRMMTRIRQKEFSHLCVWKIDRISRNLLDFAAMYDELKKYNVTFVSKNEQFDTSSAMGEAMLKIILVFAELERKLTSERVMGVMLDRASKGLWNGARMPLGYKWDTNAKFPVIDADEAVTIRFIFDKYEEVKSTLQISRILNRNHIKTKRGGEWTSKTVNDIVRNPFYKGTYRYNYRESARGAIKNEEEWIIVPNALPAIITEEQWTRCNALMDSHHETKDTSSFRVCHTHIFAGILKCCDCGGGFSSNRDRPRLSGWRPSTYRCTRSAKMQDCPTFGISDVVLGPFIFNYIANFVRLQRKGTNYTVESIEKALLSGKPFENIIGIDSTSLEETLLALKQYNLSSNAANYSPDLLEELPNQSDNGSNIDIELLRQEENKYKTALQRLLDLYLFDPTAMPQKDYLLRKEELEGKLQEVQASIKRNSASTPEVAGATDISFIKKASAFIISQRILSKQDIDFEDLIQKCTPELLKDLVNSTIKEIGIRGRRVEYIEFQSGLRHTFIYKD

SEQ ID NO: 651 - protein, 581 aa, Unknown
  Description of Unknown: Integrase B652 sequence
  PTHR30461:SF3,IPR036162,PS51737,IPR011109,PTHR30461, PS00397,PF00239,G3DSA:1.10.10.2600,IPR006119,SSF53041, SM00857,IPR025827,IPR038109,PS51736,cd03768, IPR006118,PF13408,G3DSA:3.40.50.1390,PF07508,Coil
MAKLAKRISEVLSELKAAIYIRVSTQYQVDRASLPVQREELINYAKYALGIDNYVVFEDPGYSAKNTDRPDYQRMMARVRTGEFSHILVWKIDRISRNLLDFAAMYAELKQLGVTFVSKNEQFDTSNAMGEAMLKIILVFAELERNMTSERVSAVMLSRASDGVWNGGKTPFGYSYDKETKRFSIVDDEAKVVLHIYDLYEMAQSLVTVAKTLNEKGIRSRTGKPWNPTTVRTMLTNPFYAGTYRYNYRDESKGKTFSVKSESEWVMVEDHHPAIVTRERQNHIAAILRSKQRGGVGSGETYQRKNTHIFAGLLKCGCCGSTMVSTVDRPRSDGWRPSVYICARRRRFNDCQNKYVSDITLGPFVLNFIANLIRVSRSFGKSTSIETLEKKLLRGDMFSNVDHIERAGLEELYNHLRSGFDGLSFEAHSVNAAESGANLQERDLLLSEKRRLERALNRLKSLFLYGEEAIAEKDYLTERKQITDSLEEIDARLAELDVASASSLSMSDEEFIAKASYFILTQQLQDKRFIDYEKFIRKINPHIVKDFLNSVVSNFCIENGLTTSVLFKNGLEIRFSYKQAE

SEQ ID NO: 652 - protein, 581 aa, Unknown
  Description of Unknown: Integrase B653 sequence
  PTHR30461:SF3,IPR036162,PS51737,IPR011109,PTHR30461, PS00397,PF00239,G3DSA:1.10.10.2600,IPR006119,SSF53041, SM00857,IPR025827,IPR038109,PS51736,cd03768, IPR006118,PF13408,G3DSA:3.40.50.1390,PF07508,Coil
MSRTTNKRPGKAKSGLSRKQKVAIYIRVSTLYQVDRDSLPMQRKDLIAYASLILGIEEYEIFEDAGYSGKNTDRPAFQEMMQRIRKGEFTHVLVWKIDRISRNLLDFAEMYEELQELRVTFVSKNEQFDTSTAIGEAMLKIILVFAELERNMTSERVTATMISRANSGLWNGGRIPFGYDYDPDKTAFSIREDEEKVCQMIKNDYMEHKSLVHTSRMLNASGYKTRAGAEWSPTAVWIIISSPFYAGIYRYNRYKGTERRVENPEDEWIMIQNHHPAIFSLEEHEKMLAILDENSRNHRSVGQKHQTERVHIFGGIAYCGKCGSKMVSTPGRLHANGYRPTNYSCPKHRKTKECDNPTVSDTQVGEFVINYILNMLGAKKKFSTIENPEDLERCLLYGNTFSEVEHIDSNGLNEYFNLLSRYSSDDSYTFSVKKSRKKKAEVDPEVEALRKEKEKQERAMKRLQDLYLYSDTSMSEKDFIIRKTEISKRLEEINAMLGMVAKNSEPSLSDEEFVRQASHLLISRELQNRQYIYFKNLAQNVSPEILKAYMETVLDSVLLVDGRVSSIVFRNGLTHKFKYKS

SEQ ID NO: 653 - protein, 581 aa, Unknown
  Description of Unknown: Integrase B654 sequence
  PTHR30461:SF3,IPR036162,PS51737,IPR011109,PTHR30461, PS00397,PF00239,G3DSA:1.10.10.2600,IPR006119,SSF53041, SM00857,IPR025827,IPR038109,PS51736,cd03768, IPR006118,PF13408,G3DSA:3.40.50.1390,PF07508,Coil
MAYAMKAPATSADDRIVAIYVRVSTGYQVDKDSLPFQKKELKAYCKHILHVDMSRVEIFEDAGRSGKNTKRPAYERMMQKVRAGLVSHVLVYKIDRISRNLVDFSLMYDDFKYNRVTFVSLNEQFDTSSAIGEAVLKIILVFAELERKLTSERVKDIMIGRANEGKWNGARVPYGWDWDSSAGWPVHSKKEAPFGRAMYEMYLEVKSTGKIRDYNNAHGIPTKRGGEWTSKTVGDFLRNPMNKGDYRYNYRESARGRKKPIDEVVYLEGVFEPLVDPEIWEKVNKIMDINRDKRNMCGSHPVEKNCNVFAGLIQCGSCGSGYLVGKKDKRRKNGFTPSMYYCSAKTRAIHCQNLNVSDVKIGPFAINYISAMVRVSNERRKVKTPEDLEEMLLSDKAVFADIMGLSSDSLNSTFELLTGKSATGGALWRADLVDQEGAAADPAEIESLKDQIRKYERAKERLEDAYYFSDDGMSEKEYLEKKNRFDSWRVAAENKLKELTETHIASGVDESAFMKSASAFLLTHKIRAGSHIVYSDLAGMVEEESIKEFFNLVLDHITVKDRRVTEIVFANGLSHKFIYRD

SEQ ID NO: 654 - protein, 581 aa, Unknown
  Description of Unknown: Integrase B655 sequence
  PTHR30461:SF3,IPR036162,PS51737,IPR011109,PTHR30461, PS00397,PF00239,G3DSA:1.10.10.2600,IPR006119,SSF53041, SM00857,IPR025827,IPR038109,PS51736,cd03768, IPR006118,PF13408,G3DSA:3.40.50.1390,PF07508,Coil
MARKRTNLIGNTPSVRETKVAIYIRVSTIHQVDKDSIPMQKKDLIAYCQLILGTDNYEIFEDAGYSGKNTDRPAFQNMMGRIRKGEFTHVLVWKIDRVSRNLLDFAEMYEELRSLRVTFVSKNEQFDTSTAIGEAMLKIILVFAELERNMTSERVTATMISRANSGQWNGGRIPFGYSYDPKEKVFSIREDEASICRELKDLYLLNRSLAYVSRALNEKGYKTRAGVSWSPHSVWIIASSPFYAGIYRYNRYKGVEGRTINPEEEWVMIQNHHPAIFTLEEHQAMRSIMKSNKRNMDNLPGRVHLSTKTHIFQGIMYCDKCGSKMVSTPGRLHVDGYRTSNYGCPLRRNTKKCNNPTVNDIVIGEFVINYILNMLNAKKTFSTINTPDELNAALLSGSVFSEVSSVEENGLNSFFNLLSRYGSDRSYIFSVKNPRKKKAAVDPELSKLRKEKEKQERALQRLQDLYLYSETSMSEKDFIIRKSEISSHLDNINRQLGLMTQDQASFLSDEEFIKQASHLLIQKELKNKKYIYFKKLVSTVDPDILKAYMETILDSIYTADGKITAITFKNGLTHRFIYKDK

SEQ ID NO: 655 - protein, 581 aa, Unknown
  Description of Unknown: Integrase B656 sequence
  PTHR30461:SF3,IPR036162,PS51737,IPR011109,PTHR30461, PS00397,PF00239,G3DSA:1.10.10.2600,IPR006119,SSF53041, cd00338,SM00857,IPR025827,IPR038109,PS51736, IPR006118,PF13408,G3DSA:3.40.50.1390,PF07508,Coil
MAYAMKVPAASADDRIVAIYVRVSTGYQVDKDSLPFQKKELKAYCKHILHVDMSRVEIFEDAGRSGKNTKRPAYERMMQKVRAGLVSYVLVYKIDRISRNLVDFSLMYDDFKYNRVTFVSLNEQFDTSSAIGEAVLKIILVFAELERKLTSERVKDIMIGRANEGKWNGARVPYGWDWDSSAGWPVHSEKEAPFGRAMYEMYLEVKSTGKIRDYNNAHNIPTKRGGEWTSKTVGDFLRNPMNKGDYRYNYRESARGRKKPVDEVVYLEGVFEPLVDPEIWEKVNKIMDINRDQRNMGGSHPVEKNCNVFAGLIQCGSCGSGYLVGKKDRRRKNGFTPSMYYCGAKTRAIHCQNLNVSDVKIGPFVINYISAMVRVSNERRKIKTPEDLEEMLLSDKTVFADIMGLSSDSLNNTFELLTGKSATGGALWRADLVDQEGVAADPAEIESLKDQIRKYERAKERLEDAYYFSDDGMSEKEYLEKKNRFDSGRVAAENKLKELTETHIASGVDESAFMKSASAFLLTHKIRAGSHIVYSDLAGMVEEESIKEFFNLVLDHITVKDRRVTEIVFANGLSHKFIYRD

SEQ ID NO: 656 - protein, 581 aa, Unknown
  Description of Unknown: Integrase B657 sequence
  PTHR30461:SF3,IPR036162,PS51737,IPR011109,PTHR30461, PS00397,PF00239,G3DSA:1.10.10.2600,IPR006119,SSF53041, SM00857,IPR025827,IPR038109,PS51736,cd03768, IPR006118,PF13408,G3DSA:3.40.50.1390,PF07508,Coil
MSRTTNKRPGKAKSGLSRKQKVAIYIRVSTLYQVDRDSLPMQRKDLIAYASLILGIEEYEIFEDAGYSGKNTDRPAFQEMMQRIRKGEFTHVLVWKIDRISRNLLDFAEMYEELQDLRVTFVSKNEQFDTSTAIGEAMLKIILVFAELERNMTSERVTATMISRANSGLWNGGRIPFGYDYDPDKTTFSIREDEEKVCQMIKNDYMEHKSLVHTSRMLNASGYKTRSGVEWSPTAVWIIVSSPFYAGIYRYNRYKGTERRVENPEDEWIMIQNHHPAIFSLEEHEKMLAILDENSRNRRSVGQRHQTERVHIFGGIAYCGKCGSKMVSTPGRLHVNGYRPTNYSCPKHRKTKECDNPTVSDTQVGEFVINYILNMLGAKKKFSTIENPEDLERCLLYGNTFSEVEHIDSNGLNEYFNLLSRYSSDDSYTFSVKKSRKKKAEVDPEVAALRKEKEKQERAMKRLQDLYLYSDTSMSEKDFIIRKTEISKRLEEINAMLGMVARNSEPSLSDEEFVRQASHLLISRELQNRQYIYFKNLAQNVSPEILKAYMETVLDSVLLVDGRVSSIVFRNGLTHKFKYKS

SEQ ID NO: 657 - protein, 581 aa, Unknown
  Description of Unknown: Integrase B658 sequence
  PTHR30461:SF3,IPR036162,PS51737,IPR011109,PTHR30461, PS00397,PF00239,G3DSA:1.10.10.2600,IPR006119,SSF53041, SM00857,IPR025827,IPR038109,PS51736,cd03768, IPR006118,PF13408,G3DSA:3.40.50.1390,PF07508,Coil
MAYAAKTLAASADDRIVAIYVRVSTGYQVDKDSLPFQKKELKAYCKHILHIDMSRVEIFEDAGRSGKNTKRPAYERMMQKVRAGLVSHVLVYKIDRISRNLVDFSLMYDDFKYNRVTFVSLNEQFDTSSAIGEAVLKIILVFAELERKLTSERVKDIMIGRANEGKWNGARVPYGWDWDSSAGWPVHSKKEAPFARAMYEMYLEVKSTGKIRDYNNAHKIPTKRGGEWTSKTVGDFLRNPMNKGDYRYNYRESARGRKKPIDEIVYLEGVFDPLVDPDVWEKVNKIMDINRDQRNIGGSHPIEKNCNVFAGLIQCGSCGSGYLVGKKDKRRKNGFTPSLYYCGAKTRAIHCQNLNVSDVKIGPFVINYISAMVRVSNERRKIKSPEELEEMLLFDKAVFADIMGLSSDSLNTTFELLTGKSATGGALWRADLVDREGAAADPAEIENLKDQIRKYERAKERLEDAYYFSDDGMSEKEYLEKKNRFDSMRVSAENKLKELTETHIASGVDESAFMKSASAFLLTHKIRAGSHIVYSDLAGMVEEESIKEFFNLVLDHITVKDRRVTEIVFSNGLSHKFIYRD

SEQ ID NO: 658 - protein, 581 aa, Unknown
  Description of Unknown: Integrase B659 sequence
  PTHR30461:SF3,IPR036162,PS51737,IPR011109,PTHR30461, PS00397,PF00239,G3DSA:1.10.10.2600,IPR006119,SSF53041, SM00857,IPR025827,IPR038109,PS51736,cd03768, IPR006118,PF13408,G3DSA:3.40.50.1390,PF07508,Coil
MAYAMKVPAASADDRIVAIYVRVSTGYQVDKDSLPFQKKELKAYCKHILHIDMSRVEIFEDAGRSGKNTKRPAYERMMQKVRAGLVSHVLVYKIDRISRNLVDFSLMYDDFKYNRVTFVSLNEQFDTSSAIGEAVLKIILVFAELERKLTSERVKDIMIGRANEGKWNGARVPYGWDWDSSAGWPVHSKKEAPFARAMYEMYLEVKSTGKIRDYNNAHKIPTKRGGEWTSKTVGDFLRNPMNKGDYRYNYRESARGRKKPADEIVYLEGVFDPLVDPDVWEKVNKIMDSNRDKRNMGGLHPIESNCNVFAGLIQCGLCGSGYLVGKKDKRRKNGFTPSLYYCGAKTRAIHCQNLNVSDVKIGPFVINYISAMVRVSNERLKIKTPEDLEEMLLSDKAVFADIMGLSSDSLNSTFELLTGKSATGSALWRADLVDQEGAAADPAEIESLKDQIRKYERAKERLEDAYYFSDDGMSEKEYLEKKNRFDSGRVAAENKLKELTETHIASGVDESSFMKSASAFLLTHKIRAGSHIVYSDLAGMVEEESIKEFFNLVLDHITVKDRRVTEIVFANGLSHKFIYRD

SEQ ID NO: 659 - protein, 581 aa, Unknown
  Description of Unknown: Integrase B660 sequence
  PTHR30461:SF3,IPR036162,PS51737,IPR011109,PTHR30461, PS00397,PF00239,G3DSA:1.10.10.2600,IPR006119,SSF53041, cd00338,SM00857,IPR025827,IPR038109,PS51736, IPR006118,PF13408,G3DSA:3.40.50.1390,PF07508,Coil
MAYRFSQQTAAPDTRTVALYVRVSTGYQVDKDSLPFQKQELRNYCRHVLHIEESRLEVFEDAGKSGKNTKRPAFERMMAKVKAGLVSHVIVYKIDRISRNLVDFSLMYDDFKYNRVTFISLNEQFDTSSAIGEAVLKIILVFAELERKLTSERVKDIMIGRANEGKWNGARVPYGWDWDSVACRPVHSEKEAPFARAMYEMYLEVKSTGKIRDYNNAHGVPTKRGGEWTSKTVSDFLRNPLNKGDYRYNYRESAKGRKKPEDEVVYLEGVFDPLVDPELWDKVNKIMDSNRDKRNMGGLHPIEKNCNIFAGLIRCSVCGADYLVGKKDKRRKNGFTPSIYYCGSKTKAIHCKNLNVSDVKIGPFMINYISAMVRVSNERRKIKSPEDLESMLLSDKAVFGEIAGLSSDSLNSTYELLTGKSVTSGALWHADLVDQGGTADGSAEIAELKNQIQKYERAKERLEDAYYFSDDSMSEKEYLEKKNRFDSGRVAAENKLKKLTETHIAAGVDESSFIKSASAFLLTHKIRAGSHIVYSDLAGMIEEESIKEFFNLVLDHIIVKDRRIIEVVFANGLSHKFIYRE

SEQ ID NO: 660 - protein, 581 aa, Unknown
  Description of Unknown: Integrase B661 sequence
  PTHR30461:SF3,IPR036162,PS51737,IPR011109,PTHR30461, PS00397,PF00239,G3DSA:1.10.10.2600,IPR006119,SSF53041, SM00857,IPR025827,IPR038109,PS51736,cd03768, IPR006118,PF13408,G3DSA:3.40.50.1390,PF07508,Coil
MAYAMKVPAASADDRIVAIYVRVSTGYQVDKDSLPFQKKELKAYCKHILHVDMSLVEIFEDAGRSGKNTKRPAYERMMQKVRAGLVSHVLVYKIDRISRNLVDFSLMYDDFKYNRVTFVSLNEQFDTSSAIGEAVLKIILVFAELERKLTSERVKDIMIGRANEGKWNGARVPYGWDWDSSAGWPVHSEKEAPFGRAMYEMYLKVKSTGKIRDYNNAHGIPTKRGGEWTSKTVGDFLRNPMNKGDYRYNYRESARGRKKPIDEVVYLEGVFDPLIDPEIWEKVNKIMDINRDKRNMAGSHPVEKNCNVFAGLIQCGSCGSGYLVGKKDKRRKNGFTPSMYYCSAKTRAIHCQNLNVSDVKIGPFVINYISAMVRVSNERRKIKTPEDLEETLLSDKAVFADIMGLSSDSLNNTFELLTGKSATGGALWRADLVDQEGVAADPAEIESLKDQIRKYERAKERLEDAYYFSDDGMSEKEYLEKKNRFDSGRVAAENKLKELTETHIASGVDESAFMKSASAFLLTHKIRAGSHIVYSDLAGMVEEESIKEFFNLVLDHITVKDRRVTEIVFANGLSHKFIYRD

SEQ ID NO: 661 - protein, 581 aa, Unknown
  Description of Unknown: Integrase B662 sequence
  PTHR30461:SF3,IPR036162,PS51737,IPR011109,PTHR30461, PS00397,PF00239,G3DSA:1.10.10.2600,IPR006119,SSF53041, SM00857,IPR025827,IPR038109,PS51736,cd03768, IPR006118,PF13408,G3DSA:3.40.50.1390,PF07508,Coil
MAYAMKVPAASADDRAVAIYVRVSTGYQVDKDSLPFQKKELKAYCKHILHVDMSRVEIFEDAGRSGKNTKRPAYERMMQKVRAGLVSHVLVYKIDRISRNLVDFSLMYDDFKYNRVTFVSLNEQFDTSSAIGEAVLKIILVFAELERKLTSERVKDIMIGRANEGKWNGARVPYGWDWDSSAGWPVHSEKEAPFGRAMYEMYLKVKSTGKIRDYNNAHGIPTKRGGEWTSKTVGDFLRNPMNKGDYRYNYRESARGRKKPIDEVVYLEGVFDPLIDPEIWEKVNKIMDINRDKRNMGGLHPVEKNCNVFAGLIQCGSCGSGYLVGKKDKRRKNGFTPSMYYCSAKTRAIHCQNLNVSDVKIGPFVINYISAMVRVSNERRKIKTPEDLEEILLSDKAVFADIMGLSSDSLNNTFELLTGKSATGGALWRADLVDQEGVTADPAEIESLKDQIRKYERAKERLEDAYYFSDDGMSEKEYLEKKNRFDSGRVAAENKLKELTETHIASGVDESAFMKSASAFLLTHKIRAGSHIVYSDLAGMVEEESIKEFFNLVLDHITVKDRRVTEIVFANGLSHKFIYRD

SEQ ID NO: 662 - protein, 581 aa, Unknown
  Description of Unknown: Integrase B663 sequence
  PTHR30461:SF3,IPR036162,PS51737,IPR011109,PTHR30461, PF00239,G3DSA:1.10.10.2600,IPR006119,SSF53041,cd00338, SM00857,IPR025827,IPR038109,mobidb-lite,PS51736, PF13408,G3DSA:3.40.50.1390,PF07508,Coil
MRQKFNTDLSMLTPEEQQQFHDDPTTLTKGEVDVALYLRFSSERQKEQSIEGQLRDCIAYCKRKSFRIVAIYVDRATTARKDVEKRVHFQEMISDSAHHLWNFVVVWKLDRFARNREDSAVFKMRLRKNGVRVKSATETISDNPEGIILESVLEGIAEYYSADLSQKITRGLRESAMKGHSVGGHVPLGYKIEDHRLVINPATAHIVQEAFQLYANGESMAEICRIFNSKGYRTAKNSEFNRSSFKSMFKNVRYIGTYIYKDIKKENAIPAIIDKDLFETVQRRLSLAADAPARGKAKVDYLLSGKLFCGHCGATMNGESGTSKTGAIHNYYTCYSRKRRKGCNKKPLKKDFIERVVAQDAMALLTDDVIEELADMAMSQADRDLKENTRIPELSTRLTEIEQGINNITKAIEKGIASDTLLNRLTELEKEKKDLTSQLHEEEKYICRIDRDQIIFWLTKFQGGNIEDEDCRRRVIDLLVNSVTVWDEPDGYKITTAYNLTSCKTKTFRVSNNADSPSGEGFGFGELSSTIAEPDEPAWFVWLFYARRSARSAVFSRCPIRCHTARRAFSRKPKPSCVFSV

SEQ ID NO: 663 - protein, 581 aa, Unknown
  Description of Unknown: Integrase B664 sequence
  PTHR30461:SF3,IPR036162,PS51737,IPR011109,PTHR30461, PS00397,PF00239,G3DSA:1.10.10.2600,IPR006119,SSF53041, SM00857,IPR025827,IPR038109,PS51736,cd03768, IPR006118,PF13408,G3DSA:3.40.50.1390,PF07508,Coil
MAYAMKVPAASADDRIVAIYVRVSTGYQVDKDSLPFQKKELKAYCKHILHVDMSRVEIFEDAGRSGKNTKRPAYERMMQKVRAGLVSHVLVYKIDRISRNLVDFSLMYDDFKYNRVTFVSLNEQFDTSSAIGEAVLKIILVFAELERKLTSERVKDIMIGRANEGKWNGARVPYGWDWDSSAGWPVHSEKEAPFGRAMYEMYLKVKSTGKIRDYNNAHCIPTKRGGEWTSKTVGDFLRNPMNKGDYRYNYRESARGRKKPIDEVVYLEGVFDPLIDPEIWEKVNKIMDINRDKRNMVGSHPVEKNCNVFAGLIQCGSCGSGYLVGKKDKRRKNGFTPSMYYCGAKTRAIHCQNLNVSDVKIGPFVINYISAMVRVSNERRKIKTPEDLEKMLLSDKAVFADIMGLSSDSLNNTFELLTGKSATGGALWRADPVDQEGVAADPAEIESLKDQIRKYERAKERLEDAYYFSDDGMSEKEYLEKKNRFDSGRVAAENKLKELTETHIASGVDESAFMKSASAFLLTHKIRAGSHIVYSDLAGMVEEESIKEFFNLVLDHITVKDRCVTEIVFANGLSHKFIYRD

SEQ ID NO: 664 - protein, 581 aa, Unknown
  Description of Unknown: Integrase B665 sequence
  PTHR30461:SF3,IPR036162,PS51737,IPR011109,PTHR30461, PS00397,PF00239,G3DSA:1.10.10.2600,IPR006119,SSF53041, SM00857,IPR025827,IPR038109,PS51736,cd03768, IPR006118,PF13408,G3DSA:3.40.50.1390,PF07508,Coil
MAYAMKVPAASADDRIVAIYVRVSTGYQVDKDSLPFQKKELKAYCKHILHVDMSRVEIFEDAGRSGKNTKRPAYERMMQKVRAGLVSHVLVYKIDRISRNLVDFSLMYDDFKYNRVTFVSLNEQFDTSSAIGEAVLKIILVFAELERKLTSERVKDIMIGRANEGKWNGARVPYGWDWDSSAGWPVHSEKEAPFGRAMYEMYLKVKSTGKIRDYNNAHGIPTKRGGEWTSKTVGDFLRNPMNKGDYRYNYRESARGRKKPIDEVVYLEGVFDPLIDPEIWEKVNKIMDINRDKRNMAGSHPVEKNCNVFAGLIQCGSCGSGYLVGKKDKRRKNGFTPSMYYCSAKTRAIHCQNLNVSDVKIGPFVINYISAMVRVSNERRKIKTPEDLEETLLSDKAVFADIMGLSSDSLNNTFELLTGKSATGGALWRADLVDQEGAAADPAEIESLKDQIRKYERAKERLEDAYYFSDDGMSEKEYLEKKNRFDSGRVAAENKLKELTETHIASGVDESAFMKSASAFLLTHKIRAGSHIVYSDLAGMVEEESIKEFFNLVLDHITVKDRRVTEIVFANGLSHKFIYRD

SEQ ID NO: 665 - protein, 581 aa, Unknown
  Description of Unknown: Integrase B666 sequence
  PTHR30461:SF3,IPR036162,PS51737,IPR011109,PTHR30461, PS00397,PF00239,G3DSA:1.10.10.2600,IPR006119,SSF53041, SM00857,IPR025827,IPR038109,PS51736,cd03768, IPR006118,PF13408,G3DSA:3.40.50.1390,PF07508,Coil
MSRTTNKRPGKAKSGLSRKQKVAIYIRVSTLYQVDRDSLPMQRKDLIAYASLILGIEEYEIFEDAGYSGKNTDRPAFQEMMQRIRKGEFTHVLVWKIDRISRNLLDFAEMYEELQDLRVTFVSKNEQFDTSTAIGEAMLKIILVFAELERNMTSERVTATMISRANSGLWNGGRIPFGYDYDPDKTAFSIREDEEKVCQMIKNDYMEHKSLVHTSRMLNASGYKTRAGAEWSPTAVWIIISSPFYAGIYRYNRYKGTERRVENPEDEWIMIQNHHPAIFSLEEHEKMLAILDENSRNHRSVGQKHQTERVHIFGGIAYCGKCGSKMVSTPGRLHANGYRPTNYSCPKHRKTKECDNPTMSDTQVGEFVINYILNMLGAKKKFSTIENPEDLERCLLYGNTFSEVEHIDSNGLNEYFNLLSRYSSDDSYTFSVKKSRKKKAEVDPEVEALRKEKEKQERAMKRLQDLYLYSDTSMSEKDFIIRKTEISKRLEEINAMLGMVAKNSEPSLSDEEFVRQASHLLISRELQNRQYIYFKNLAQNVSPEILKAYMETVLDSVLLVDGRVSSIVFRNGLTHKFKYKS

SEQ ID NO: 666 - protein, 581 aa, Unknown
  Description of Unknown: Integrase B667 sequence
  PTHR30461:SF3,IPR036162,PS51737,IPR011109,PTHR30461, PS00397,PF00239,G3DSA:1.10.10.2600,IPR006119,SSF53041, SM00857,IPR025827,IPR038109,PS51736,cd03768, IPR006118,PF13408,G3DSA:3.40.50.1390,PF07508,Coil
MARKRTNLIGNTPSVRETKVAIYIRVSTIHQVDKDSIPMQKKDLIAYCQLILGTDNYEIFEDAGYSGKNTDRPAFQNMMGRIRKGEFTHVLVWKIDRVSRNLLDFAEMYEELRSLRVTFVSKNEQFDTSTAIGEAMLKIILVFAELERNMTSERVTATMISRANGGQWNGGRIPFGYSYDPKEKVFSIREDEASICRELKDLYLLNRSLAYVSRALNEKGYKTRAGVSWSPHSVWIIASSPFYAGIYRYNRYKGVESRTINPEEEWVMIQNHHPAIFTLEEHQAMRSIMKSNKRNMDNLPGRVHLSTKTHIFQGIMYCDKCGSKMVSTPGRLHVDGYRTSNYGCPLRRNTKKCNNPTVNDIVIGEFVINYILNMLNAKKTFSTINTPDELNAALLSGSVFSEVSSVEENGLNSFFNLLSRYGSDRSYIFSVKSPRKKKAAVDPELSKLRKEKEKQERALQRLQDLYLYSETSMSEKDFIIRKSEISSHLDNINRQLGLMTQDQASFLSDEEFIKQASHLLIQKELKNKKYIYFKKLVNTVDPDILKAYMETILDSIYTADGKITAITFKNGLTHRFIYKDK

SEQ ID NO: 667 - protein, 581 aa, Unknown
  Description of Unknown: Integrase B668 sequence
  PTHR30461:SF3,SM00857,G3DSA:1.10.10.2600,IPR036162,PF13408, PS51737,G3DSA:3.40.50.1390,IPR025827,IPR006119,IPR038109, PF07508,IPR011109,SSF53041,PTHR30461,Coil, PS51736,cd00338,PF00239
MRQKFKIDLSMLTPEEQQQFRDDSTTLTKGEVDVALYLRFSSERQKEQSIEGQLRDCIAYCKRKSFRIVAIYVDRATTARKDVEKRVHFQEMISDSAHHLWNFVVVWKLDRFARNREDSAVFKMRLRKNGVRVKSATETISDNPEGIILESVLEGIAEYYSADLSQKITRGLRESAMKGHSVGGHVPLGYKIEDHRLVINPATAHIVQEAFQLYANGESVAEICRIFNGKGYRTAKNSEFNRSSFKSIFKNVRYIGTYIYKDIEKENAIPAIIDKDLFETVQRRLSLAADAPARGKAKVDYLLSGKLFCGHCGATMNGESGTSKTGAIHNYYTCYSRKRRKGCNKKPLKKDFIERVVAQDAMALLTDDVIEELADMAMSQADKDLKENTRIPELSARLTEVEQGINNITKVVEKGIASDALLNRLTELEKEKKDLTSQLREEEKYICRIDRDQIIFWLTKFQGGDIEDEDCRRRIIDLLVNSVTVWDEPDGYKITTAYNLTSCKTKTFRVSNNADSPSGEGFGFGELSSTIAEPDEPAWFVWLFYARRSAWSAVFSRCPIRCHTARWAFSRKAKPCCVFSV

SEQ ID NO: 668 - protein, 581 aa, Unknown
  Description of Unknown: Integrase B669 sequence
  PTHR30461:SF3,IPR036162,PS51737,IPR011109,PTHR30461, PS00397,PF00239,G3DSA:1.10.10.2600,IPR006119,SSF53041, SM00857,IPR025827,IPR038109,PS51736,cd03768, IPR006118,PF13408,G3DSA:3.40.50.1390,PF07508,Coil
MARKRTNLIGNTPSVRETKVAIYIRVSTIHQVDKDSIPMQKKDLIAYCQLILGTDNYEIFEDAGYSGKNTDRPAFQNMMGRIRKGEFTHVLVWKIDRVSRNLLDFAEMYEELRSLRVTFVSKNEQFDTSTAIGEAMLKIILVFAELERNMTSERVTATMISRANSGQWNGGRIPFGYSYDPKEKVFSIREDEASICRELKDLYLLNRSLAYVSRALNEKGYKTRAGASWSPHSVWIIASSPFYAGIYRYNRYNGVESRTINPEEEWVMIQNHHPAIFTLEEHQAMRSIMKSNKRNMDNLPGRVHLSTKTHIFQGIMYCDKCGSKMVSTPGRLHVDGYRTSNYGCPLRRNTKKCNNPTVNDIIIGEFVINYILNMLNAKKTFSTINTPDELNAALLSGSVFSEVSSVEENGLNSFFNLLSRYGSDRSYIFSVKSPRKKKAAVDPELSKLRKEKEKQERALQRLQDLYLYSETSMSEKDFIIRKSEISSHLDNINRQLGLMTQDQASFLSDEEFIKQASHLLIQKELKNKKYIYFKKLVSTVDPDILKAYMETILDSIYTADGKITAITFKNGLTHRFIYKDK

SEQ ID NO: 669 - protein, 581 aa, Unknown
  Description of Unknown: Integrase B670 sequence
  PTHR30461:SF3,IPR036162,PS51737,IPR011109,PTHR30461, PS00397,PF00239,G3DSA:1.10.10.2600,IPR006119,SSF53041, SM00857,IPR025827,IPR038109,PS51736,cd03768, IPR006118,PF13408,G3DSA:3.40.50.1390,PF07508,Coil
MAYAMKVPAASADDLIVAIYVRVSTGYQVDKDSLPFQKKELKAYCKHILHVDMSRVEIFEDAGRSGKNTKRPAYERMMQKVRAGLVSHVLVYKIDRISRNLVDFSLMYDDFKYNRVTFVSLNEQFDTSSAIGEAVLKIILVFAELERKLTSERVKDIMIGRANEGKWNGARVPYGWDWDSSAGWPVHSEKEAPFGRAMYEMYLKVKSTGKIRDYNNAHGIPTKRGGEWTSKTVGDFLRNPMNKGDYRYNYRESARGRKKPIDEVVYLEGVFDPLVDPEIWEKVNKIMDINRDKRNMGGSHPVEKNCNVFAGLIQCGSCGSGYLVGKKDKRRKNGFTPSMYYCSAKTRAIHCQNLNVSDVKIGPFVINYISAMVRVSNERRKVKTPEDLEEMLLSDKAVFADIMGLSSDSLNSTFELLTGKSATGGALWRADLVDQEGAAADPAEIESLKDQIRKYERAKERLEDAYYFSDDGMSEKEYLEKKNQFDSGRVAAENKLKELTETHIASGVDESAFMKSASAFLLTHKIRAGSHIVYSDLAGMVEEESIKEFFNLVLDHITVKDRRVTEIVFANGLSHKFIYRG

SEQ ID NO: 670 - protein, 581 aa, Unknown
  Description of Unknown: Integrase B671 sequence
  PTHR30461:SF3,IPR036162,PS51737,IPR011109,PTHR30461, PS00397,PF00239,G3DSA:1.10.10.2600,IPR006119,SSF53041, SM00857,IPR025827,IPR038109,PS51736,cd03768, IPR006118,PF13408,G3DSA:3.40.50.1390,PF07508,Coil
MARKRTNLIGNTPSVRETKVAIYIRVSTIHQVDKDSIPMQKKDLIAYCQLILGTDNYEIFEDAGYSGKNTDRPAFQNMMGRIRKGEFTHVLVWKIDRVSRNLLDFAEMYEELRSLRVTFVSKNEQFDTSTAIGEAMLKIILVFAELERNMTSERVTATMISRANGGQWNGGRIPFGYSYDPKEKVFSIREDEASICRELKDLYLLNRSLAYVSRALNEKGYKTRAGVSWSPHSVWIIASSPFYAGIYRYNRYKGVESRTINPEEEWVMIQNHHPAIFTLQEHQAMRSIMKSNKRNMDNLPGRVHLSTKTHIFQGIMYCDKCGSKMVSTPGRLHVDGYRTSNYGCPLRRNTKKCNNPTVTDIVIGEFVINYILNMLNAKKTFSTINTPDELNAALLSGSVFSEVSSVEENGLNSFFNLLSRYGSDRSYIFSVKSPRKKKAAVDPELSKLRKEKEKQERALQRLQDLYLYSETSMSEKDFIIRKSEISSHLDNINRQLGLMTQDQASFLSDEEFIKQASHLLIQKELKNKKYIYFKKLVSTVDPDILKAYMETILDSIYTADGKITAITFKNGLTHRFIYKDK

SEQ ID NO: 671 - protein, 581 aa, Unknown
  Description of Unknown: Integrase B672 sequence
  PTHR30461:SF3,IPR036162,PS51737,IPR011109,PTHR30461, PS00397,PF00239,G3DSA:1.10.10.2600,IPR006119,SSF53041, SM00857,IPR025827,IPR038109,PS51736,cd03768, IPR006118,PF13408,G3DSA:3.40.50.1390,PF07508,Coil
MAYAMKVPAASADDRIVAIYVRVSTGYQVDKDSLPFQKKELKAYCKHILHVDMSRVEIFEDAGRSGKNTKRPAYERMMQKVRAGLVSHVLVYKIDRISRNLVDFSLMYDDFKYNRVTFVSLNEQFDTSSAIGEAVLKIILVFAELERKLTSERVKDIMIGRANEGKWNGARVPYGWDWDSSAGWPVHSEKEAPFGRAMYEMYLEVKSTGKIRDYNNAHGIPTKRGGEWTSKTVGDFLRNPMNKGDYRYNYRESARGRKKPIDEVVYLEGIFDPLIDPEIWEKVNKIMDINRDKRNMVGSHPVEKNCNVFAGLIQCGSCGSGYLVGKKDKRRKNGFTPSMYYCGAKTRAIHCQNLNVSDVKIGPFVINYISAMVRVSNERRKIKTPEDLEEILLSDKAVFADIMGLSSDSLNNTFELLTGKSTTGGALWRADLVDQEGAVADPAEIESLKDQIRKYERAKERLEDAYYFSDDGMSEKEYLEKKNRFDSGRVAAENKLKELTETHIASGVDESAFMKSASAFLLTHKIRAGSHIVYSDLAGMVEEESIKEFFNLVLDRITVKDRRVVEIMFANGLSHKFIYRD

SEQ ID NO: 672 - protein, 581 aa, Unknown
  Description of Unknown: Integrase B673 sequence
  PTHR30461:SF3,cd00338,SM00857,G3DSA:1.10.10.2600,IPR036162, PF13408,PS51737,G3DSA:3.40.50.1390,IPR025827,IPR006119, IPR038109,PF07508,IPR011109,SSF53041,PTHR30461, PS51736,Coil,PF00239
MARKKNIAAGLDAVIYARYSSHNQREVSIEQQIAECTKHAAALGLRIVGTYEDRAISGKTDNRPRFQQMMRDAEKGKFQAVVAWKSNRIGRNMLQAMVNEAKLDDYGVKVFYAEEDFDDTAAGRFALRNMMNVNQFYSENMAEDITRGLYDNANKCMANGRQPLGYKRGADGKVMLDEPAAAVVREIFTRVAAGDLFVDIARDLNAKGIKTSKGAAWNKGSFQSICQNERYKGIYIYGDVRIVDGIPRIVSDELWYRVQEAMRMKKNPVGTRHRVGAEDYLLTGKLRCGHCGSYMTGVSGTSRNGELHYYYTCQKRRTEHACNKKNVRRDVIEPAIAQAIKMYCLTDDVIEWMADQTVQYWEKHDNDLQIEALEQQLAENKKATSNMLLAIEMGIITEATRSRMVELETENSKLTAQLSAAKRDVVKINREDLIDELHILRSKDIQDREVQAELFKDFLVAAYIYDDNRLKMVFSFMGKDNSVEIPLETGEDPPDGEDSPDAKMFVLTPDCSTKKSTVLRLKYGAFLFAFLEVASRISQMPDFAGAWTATPNSCYFAAFENACSMPDCFAGRRITPPQCKE

SEQ ID NO: 673 - protein, 581 aa, Unknown
  Description of Unknown: Integrase B674 sequence
  PTHR30461:SF3,IPR036162,PS51737,IPR011109,PTHR30461, PS00397,PF00239,G3DSA:1.10.10.2600,IPR006119,SSF53041, SM00857,IPR025827,IPR038109,PS51736,cd03768, IPR006118,PF13408,G3DSA:3.40.50.1390,PF07508,Coil
MSRTTNKRPGKAKSGLSRKQKVAIYIRVSTLYQVDRDSLPMQRKDLIAYASLILGIEEYEIFEDAGYSGKNTDRPAFQEMMQRIRKGEFTHVLVWKIDRISRNLLDFAEMYEELQDLRVTFVSKNEQFDTSTAIGEAMLKIILVFAELERNMTSERVTATMISRANSGLWNGGRIPFGYDYDPDKTAFSIREDEEKVCQMIKNDYMEHKSLVHTSRMLNASGYKTRAGAEWSPTAVWIIISSPFYAGIYRYNRYKGTERRVENPEDEWIMIQNHHPAIFSLEEHEKMLAILDENSRNHRSVGQKHQTERVHIFGGIAYCGKCGSKMVSTPGRLHANGYRPTNYSCPKHRKTKECDNPTVSDTQVGEFVINYILNMLGAKKKFSTIENPEDLERCLLYGNTFSEVEHIDSNGLNEYFNLLSRYSSDDSYTFSVKKSRKKKAEVDPEVEALRKEKEKQERAMKRLQDLYLYSDTSMSEKDFIIRKTEISKRLEEINAMLGMVAKNSEPSLSDEEFVRQASHLLISSELQNRQYIYFKNLAQNVSPEILKAYMETVLDSVLLVDGRVSSIVFRNGLTHKFKYKS

SEQ ID NO: 674 - protein, 581 aa, Unknown
  Description of Unknown: Integrase B675 sequence
  PTHR30461:SF3,IPR036162,PS51737,IPR011109,PTHR30461, PS00397,PF00239,G3DSA:1.10.10.2600,IPR006119,SSF53041, SM00857,IPR025827,IPR038109,PS51736,cd03768, IPR006118,PF13408,G3DSA:3.40.50.1390,PF07508,Coil
MARKRTNLIGNTPSVRETKVAIYIRVSTIHQVDKDSIPMQKKDLIAYCQLILGTDNYEIFEDAGYSGKNTDRPAFQNMMGRIRKGEFTHVLVWKIDRVSRNLLDFAEMYEELRSLRVTFVSKNEQFDTSTAIGEAMLKIILVFAELERNMTSERVTATMISRANSGQWNGGRIPFGYSYDPKEKVFSIREDEASICRELKDLYLLNRSLAYVSRALNEKGYKTRAGVSWSPHSVWIIASSPFYAGIYRYNRYKGVESRTINPEEEWVMIQNHHPAIFTLEEHQTMRSIMKSNQRNMDNFPGRVHLSTKTHIFQGIMYCDKCGSKMVSTPGRLHVDGYRTSNYGCPLRRNTKKCNNPTVNDIVIGEFVINYILNMLNAKKTFSTINTPDELNAALLSGSVFSEVSSVEENGLNSFFNLLSRYGSDRSYIFSVKSPRKKKAAVDPELSKLRKEKEKQERALQRLQDLYLYSETSMSEKDFIIRKSEISSHLDNINRQLGLMTQDQASFLSDEEFIKQASHLLIQKELKNKKYIYFKKLVSTVDPDILKAYMETILDSIYTADGKITAITFKNGLTHRFIYKDK

SEQ ID NO: 675 - protein, 581 aa, Unknown
  Description of Unknown: Integrase B676 sequence
  cd00338,SM00857,G3DSA:1.10.10.2600,IPR036162,PF13408, PS51737,IPR025827,G3DSA:3.40.50.1390,IPR006119,IPR038109, PF07508,IPR011109,SSF53041,PTHR30461,PS51736, Coil,PF00239
MSTGAGLRAVFYARVSTEEEKQLNALEKQIQENKDVIRDHGWKLVGEYIDEGKTGTTTKRRSDYKRLLKDMTENKFDIVVCKDQDRLQRNTLDWYLFVDNLVTNNLKLFMYLDNKFFKPSEDALITGVKAIIAEEYSRNLSKKLNNSNKRRIERALNGEEVSAMGNGKSLAFKIVNGKWVKDEEEAKLGKKIFELYLEYDSIRKVRDWVNEHGYTNSVGKPFTSESISRILKNEKAKGVIVMGKYHHDFDKKKIVRRSEEELVRIPAPELAYVSEEVFDKVQERLRAKTGNGRGVNAYSDPLSGKIYCGSCGRKLWKHASNGYVNWMCASQVAKGDVECNGTRITTVAIRNIYKKITDNLEVNKEVVKQDIVKWLSELKATLSDTSVNEKIQKDLDKLEGKRTKLLEAYLEDLISKGDYKAKYETIEGQIEEKKKLLVPVEENEDIKAIESVLQNIDNEIDDYVKTLDMEESKVDFLIEHTKRITVLENRDIIIELDLVAGAIIAGKDFLLYVHDTMQIADGRVCVKGYSRKAWSHFQLRDRFRCHQQRRNLERHRQPGLSAGTGGVEETWDWKNGIYKLF

SEQ ID NO: 676 - protein, 581 aa, Unknown
  Description of Unknown: Integrase B677 sequence
  PTHR30461:SF3,IPR036162,PS51737,IPR011109,PTHR30461, PS00397,PF00239,G3DSA:1.10.10.2600,IPR006119,SSF53041, SM00857,IPR025827,IPR038109,PS51736,cd03768, IPR006118,PF13408,G3DSA:3.40.50.1390,PF07508,Coil
MAYATKTLAASADDRIVAIYVRVSTGYQVDKDSLPFQKKELKAYCKHILHIDMSRVEIFEDAGRSGKNTKRPAYERMMQKVRAGLVSHVLVYKIDRISRNLVDFSLMYDDFKYNRVTFVSLNEQFDTSSAIGEAVLKIILVFAELERKLTSERVKDIMIGRANEGKWNGARVPYGWDWDSSAGWPVHSKKEAPFARAMYEMYLEVKSTGKIRDYNNAHKIPTKRGGEWTSKTVGDFLRNPMNKGDYRYNYRESARGRKKPADEIVYLEGIFEPLVDPEIWEKVNKIMDINRDQRNIGGSHPIEKNCNVFAGLIQCGSCGSGYLVGKKDKRRKNGFTPSLYYCGAKTRAIHCQNLNVSDVKIGPFVINYISAMVRVSNERRKIKSPEELEEMLLSDKAVFADIMGLSSDSLNTTFELLTGKSATGGALWRADLVDQEGAAADPAEIENLKDQIQKYERAKERLEDAYYFSDDGMSEKEYLEKKNRFDSGRVAAENKLKELTETHIASGVDESSFMKSASAFLLTHKIHAGSHIVYSDLAGMVEEESIKEFFNLVLDHITVKDRRVTEIVFANGLSHKFIYRD

SEQ ID NO: 677 - protein, 581 aa, Unknown
  Description of Unknown: Integrase B678 sequence
  PTHR30461:SF3,IPR036162,PS51737,IPR011109,PTHR30461, PS00397,PF00239,G3DSA:1.10.10.2600,IPR006119,SSF53041, SM00857,IPR025827,IPR038109,PS51736,cd03768, IPR006118,PF13408,G3DSA:3.40.50.1390,PF07508,Coil
MAYAMKVPAASADDRIVAIYVRVSTGYQVDKDSLPFQKKELKAYCKHILHVDMSRVEIFEDAGRSGKNTKRPAYERMMQKVRAGLVSHVLVYKIDRISRNLVDFSLMYDDFKYNRVTFVSLNEQFDTSSAIGEAVLKIILVFAELERKLTSERVKDIMIGRANEGKWNGARVPYGWDWDSSAGWPVHSEKEAPLGRAMYEMYLKVKSTGKIRDYNNAHCIPTKRGGEWTSKTVGDFLRNPMNKGDYRYNYRESARGRKKPVDEVVYLEGVFEPLIDPEIWEKVNKIMDINRDKRNMVGSHPVEKNCNVFAGLIQCGSCGSGYLVGKKDRRRKNGFTPSMYYCGAKTRAIHCQNLNVSDVKIGPFVINYISAMVRVSNERRKIKTPEDLEEMLLSDKAVFADIMGLSSDSLNNTFELLTGKSATGGALWRADLVDQEGVAADPAEIESLKDQIRKYERAKERLEDAYYFSDDGMSEKEYLEKKNRFDSGRVAAENKLKELTETHIASGVDESAFMKSASAFLLTHKIRAGSHIVYSDLAGMVEEESIKEFFNLVLDHITVKDRRVTEIVFANGLSHKFIYRD

SEQ ID NO: 678 - protein, 581 aa, Unknown
  Description of Unknown: Integrase B679 sequence
  PTHR30461:SF3,IPR036162,PS51737,IPR011109,PTHR30461, PS00397,PF00239,G3DSA:1.10.10.2600,IPR006119,SSF53041, SM00857,IPR025827,IPR038109,PS51736,cd03768, IPR006118,PF13408,G3DSA:3.40.50.1390,PF07508,Coil
MAYAMKVPAASADDRAVAIYVRVSTGYQVDKDSLPFQKKELKAYCKHILHVDMSRVEIFEDAGRSGKNTKRPAYERMMQKVRAGLVSHVLVYKIDRISRNLVDFSLMYDDFKYNRVTFVSLNEQFDTSSAIGEAVLKIILVFAELERKLTSERVKDIMIGRANEGKWNGARVPYGWDWDSSAGWPVHSEKEAPFGRAMYEMYLEVKSTGKIRDYNNAHGIPTKRGGEWTSKTVGDFLRNPMNKGDYRYNYRESARGRKKPIDEVVYLEGVFDPLIDPEIWEKVNKIMDINRDKRNMGGLHPVEKNCNVFAGLIQCGSCGSGYLVGKKDKRRKNGFTPSMYYCSAKTRAIHCQNLNVSDVKIGPFVINYISAMVRVSNERRKIKAPEDLEEMLLSDKAVFADIMGLSSDSLNNTFELLTGKSANGVALWRADLVDQEGVAADPAEIESLKDQIRKYERAKERLEDAYYFSDDGMSEKEYLEKKNRFDSGRVAAENKLKELTETHIASGVDESAFMKSASAFLLTHKIRAGSHIVYSDLAGMVEEESIKEFFNLVLDHITVKDRRVTEIVFANGLSHKFIYRD

SEQ ID NO: 679 - protein, 581 aa, Unknown
  Description of Unknown: Integrase B680 sequence
  PTHR30461:SF3,IPR036162,PS51737,IPR011109,PTHR30461, PS00397,PF00239,G3DSA:1.10.10.2600,IPR006119,SSF53041, SM00857,IPR025827,IPR038109,PS51736,cd03768, IPR006118,PF13408,G3DSA:3.40.50.1390,PF07508,Coil
MARKKTNLIGNTPSVRETKVAIYIRVSTIHQVDKDSIPMQKKDLIAYCQLILGTDNYEIFEDAGYSGKNTDRPAFQNMMGRIRKGEFTHVLVWKIDRVSRNLLDFAEMYEELRSLRVTFVSKNEQFDTSTAIGEAMLKIILVFAELERNMTSERVTATMISRANSGQWNGGRIPFGYSYDPKEKVFSIREDEASICRELKDLYLLNRSLAYVSRALNEKGYKTRAGVSWSPHSVWIIASSPFYAGIYRYNRYKGVESRTINPEEEWVMIQNHHPAIFTLEEHQAMRSIMKSNKRNMDNLPGRVHLSTKTHIFQGIMYCDKCGSKMVSTPGRLHVDGYRTSNYGCPLRRNTKKCNNPTVNDIVIGEFVINYILNMLNAKKTFSTINTPDELNAALLSGSVFSEVSSVEENGLNSFFNLLSRYGSDRSYIFSVKSPRKKKAAVDPELSKLRKEKEKQERALQRLQNLYLYSETSMSEKDFIIRKSEISSHLDNINRQLGLMTQDQASFLSDEEFIKQASHLLIQKELKNKKYIYFKKLVSTVDPDILKAYMETILDSIYTADGKITAITFKNGLTHRFIYKDK

SEQ ID NO: 680 - protein, 581 aa, Unknown
  Description of Unknown: Integrase B681 sequence
  SM00857,G3DSA:1.10.10.2600,IPR036162,PF13408,PS51737, G3DSA:3.40.50.1390,IPR025827,IPR006119,IPR038109,PF07508, IPR011109,SSF53041,PTHR30461,PS51736,cd00338, PF00239
MPEKIINCAIYTRKSTEEGLEQDFNSLDNQYEFCTNYLKSINDPALQLLPARYDDGGYSGGSLNRPALQRLLADIQCGLVNRVIIYKIDRLTREIRDFFKLLDIFEKYNVEFVSVKENQYYNTTTAIGRLMVNMFLVFAQFERENAGDRIRDKIATSKAKGMWMGGCPPYGYDIGDRCLVINETEAQNVRFIYQTFCNTHSLADTTDALNSGGIRTKRYTTRQGRTFGGRKFSVKTVQRILQNPLYKGMVAHRGKQYPGQHAAIIDAVQFDMVQAVFAAHKEKRETRRPKMPSSGGERETAALTGLIFCGCCGSAMTPSYCCKGDIRYHYYRCYRRASKLEDKCPINQIRTSEIDRVVMEQVLAILKSRDFFVQYISHHHEFDVSTAFALFNSLDDVWNSLFETEKRRILRELLAKVTIYKDKIVLDVKKAGLAGVFAELSQNNRLAEVEYKENETFQISVAYRATRLANGAKIIVPATAKEESRFNGSLRLARQIAKGFAWRKMIESGLSLQELTASAKTNERDIRFAMRLSMIDPAIVESVLSGKSPEFLTYAFMKKHPIPLLWSDQRKLYGFEERKQQ

SEQ ID NO: 681 - protein, 581 aa, Unknown
  Description of Unknown: Integrase B682 sequence
  PTHR30461:SF3,IPR036162,PS51737,IPR011109,PTHR30461, PS00397,PF00239,G3DSA:1.10.10.2600,IPR006119,SSF53041, SM00857,IPR025827,IPR038109,PS51736,cd03768, IPR006118,PF13408,G3DSA:3.40.50.1390,PF07508,Coil
MARKRTNLIGNTPSVRETKVAIYIRVSTIHQVDKDSIPMQKKDLIAYCQLILGTDNYEIFEDAGYSGKNTDRPAFQNMMGRIRKGEFTHVLVWKIDRVSRNLLDFAEMYEELRSLRVTFVSKNEQFDTSTAIGEAMLKIILVFAELERNMTSERVTATMISRANSGQWNGGRIPFGYSYDPKEKVFSIREDEASICRELKDLYLLNRSLVYVSRALNEKGYKTRAGANWSPHSVWIIASSPFYAGIYRYNRYKGVENRTINPEKEWVMIQNHHPAIFTLEEHHTMQSLLKSNQRNMDNLPGRIHTSEKTHIFQGLMYCDKCGSKMVSTPGRLHVDGYRASNYSCPLRRNTKKCNNPTINDIIVGEFVINYILNMLNAKKTFSTINTPDELNTALLSGSVFSEVSSIEENGLNSFFNLLSRYGYDRSYVFSVKSPRRKKAAVNPELSRLRKEKEKQERALQRLQDLYLYSETSMPEKDFIIRQSEISSHLNNINRQLGLMTQDQASFLSDEEFIKQASHLLIQKELKNKKYIYFKKLVSTVDPDILKAYMETILDSIYTADGKITAITFKNGLTHRFIYKDK

SEQ ID NO: 682 - protein, 580 aa, Unknown
  Description of Unknown: Integrase B683 sequence
  PTHR30461:SF3,SM00857,G3DSA:1.10.10.2600,IPR036162,PF13408, PS51737,G3DSA:3.40.50.1390,IPR025827,IPR006119,IPR038109, PF07508,IPR011109,SSF53041,PTHR30461,Coil, PS51736,cd00338,PF00239
MSVDIKWAIPQTGSQVTTEGDLAAVYTRYSSHNQGEQSIEGQLAAARRYAAEHGYTIVREYTDRAKSGRTDDREAFQQMLRDTAKKQFSVIILWKVDRFGRNREEIAINKMKCRKNGVRVEYVAEQIPDSPEGVILESVLEGFAEYYSLQLSQNIRRGLAKSAEKCKVTGGNRPLGYKTGPDKEFLIDEDNAPTVKLIFDMYAKGSTVKEIVDHLNQKGLRTLTGKAFTKNSLHTVLKNEKYRGVYTYKDIRVEGGVPRIVDDDTWYKVQEMLKINKRAPAKTWTRADYILTDKLFCGKCGGVMFGECGTSRTGVRHNYYTCSNRKKHHACDKKAVRQEDIEDLVIKATCNIFRDKELLDAIIENTWQYYLAQSDNQAELKGLTKQLNQTELAIKNLLRAIEAGILTEDTKARMDELTAQKAELKAAIADLQLARGFHLQKSHIAYYLTKLCDANYKDRDVQKRLIQTFVNAIFVFDDHLKITFNFSGDKNAVTLSTVQDAESGNVFGHRALCSTKIGKHRKMLADFILLFSVQRKFYVNSFSTLDKNPRSNSAVIVRNFCFFSTNYAFGACIQPLREVK

SEQ ID NO: 683 - protein, 580 aa, Unknown
  Description of Unknown: Integrase B684 sequence
  PTHR30461:SF3,IPR036162,PS51737,IPR011109,PTHR30461, PS00397,PF00239,G3DSA:1.10.10.2600,IPR006119,SSF53041, SM00857,IPR025827,IPR038109,PS51736,cd03768, IPR006118,PF13408,G3DSA:3.40.50.1390,PF07508,Coil
MARRKTTSRGVSTSIRETKVAIYIRVSTVHQIDKDSIPMQKRDLIAYCQLILGTDNYDIFEDAGYSGKNTDRPAFQDMMGRTRKGEFTHILVWKIDRISRNLLDFAEMYEELRSLRVTFVSKNEQFDTSTAIGEAMLKIVLVFAELERNMTSERVTATMISRANNGQWNGGRIPFGYSYDSTTTQFSIREDEAVVCRKLKDLYLSNKSLVYTARALNADGYKTRAGVDWTAHAVWFITSSPFYAGIYRYNRYKGTENRTLNPEDEWIMIPDHHPAIFTLEEHEAMKAILKNNSRYVRNPVGRLHTTANIHIFQGIAYCGKCGNKMVSTPGKKHVDGYRPSNYSCPLHRRSKKCDNATVNDMIIGEFTINYILNMLNAKKTFSTIDTPEELQRHLLAGSTFSNISSIEGNGLNDFFNLLARYGSDNSYVFAVKKPRKKKATINPELAALRKEKEKQERALQRLQDLYLYSDKSMSEKDFIIRKSEISDHLKNINAQLGLITQNPDSLLSDEEFIKQASHLLIQKELSNRKYIYYKNLATSVDPEILRTYMETILDSVYVTDGHVSSIVFKNGLTHKFIYKN

SEQ ID NO: 684 - protein, 580 aa, Unknown
  Description of Unknown: Integrase B685 sequence
  PTHR30461:SF3,SM00857,G3DSA:1.10.10.2600,IPR036162,PF13408, PS51737,G3DSA:3.40.50.1390,IPR025827,IPR006119,IPR038109, PF07508,IPR011109,SSF53041,PTHR30461,Coil, PS51736,cd00338,PF00239
MSVDIKWAIPQTGSQVTTEGDLAAVYTRYSSHNQGEQSIEGQLAAARRYAAEHGYTIVREYTDRAKSGRTDDREAFQQMLRDTAKKQFSVIILWKVDRFGRNREEIAINKMKCRKNGVRVEYVAEQIPDSPEGVILESVLEGFAEYYSLQLSQNIRRGLAKSAEKCKVTGGNRPLGYKTGPDKEFLIDEDNAPTVKLIFDMYAKGSTVKEIVDHLNQKGLRTLTGKAFTKNSLHTVLKNEKYRGVYTYKDIRVEGGVPRIVDDDTWYKVQEMLKINKRAPAKTWTRADYILTDKLFCGKCGGVMFGECGTSRTGVRHNYYTCSNRKKHHACDKKAVRQEDIEDLVIKATCNIFRDKELLDAIIENTWQYYLAQSDNQAELKGLTKQLNQTELAIKNLLRAIEAGILTEDTKARMDELTAQKAELKAAIADLQLARGFHLQKSHIAYYLTKLCDANYKDRDVQKRLIQTFVNAIFVFDDHLKITFNFSGDKNTVTLSTVQDAESGNVFGHRALCSTKIGKHRKMLADFILLFSVQRKFYVNSFSTLDKNPRSNSAVIVRNFCFFSTNYAFGACIQPLREVK

SEQ ID NO: 685 - protein, 580 aa, Unknown
  Description of Unknown: Integrase B686 sequence
  PTHR30461:SF3,IPR036162,PS51737,IPR011109,PTHR30461, PS00397,PF00239,G3DSA:1.10.10.2600,IPR006119,SSF53041, SM00857,IPR025827,IPR038109,PS51736,cd03768, IPR006118,PF13408,G3DSA:3.40.50.1390,PF07508,Coil
MVRRKTALRGVSASTRITKVAIYIRVSTIHQVDKDSIPMQKKDLIAYCQLILGTDNYEIFEDAGYSGKNTDRPAFQDMMGRIRKGEFTHVLVWKIDRISRNLLDFAEMYEELQSLRVTFVSKNEQFDTSTAIGEAMLKIVLVFAELERNMTSERVTATMISRANNGQWNGGRIPFGYSYDSGTSTFSIREDEAAVCRRLKDLYLDNKSLVYTARALNADGYKTRAGADWTPTAVWIIASSPFYAGIYRYNRYKGTENRTLNPEEEWVMIPDHHPAIFTLEEHEAMKSSLKTNARYVDNPVGKPHATANIHIFQGIAYCGKCGNKMVSTPGKKHADGYRPSNYSCPLHRRSKKCDNATVNDMIVGEFAINYILNMLNAKKTFSNIDTPEELQRHLLTGSTFSDISSIEEDGLNDFFNLLSRYGSDNSYVFAIKTPRRKKASVNPELAALRKEKEKQERALQRLQDLYLYSDKSMSEKDFILRKSEISDRLKNINAQLGLITQNPDSLLSDEEFIKQASHLLIQKELKGRKYIYYKNLATSVDPEILRTYMETILDSIYIIDGRISSIVFKNGLTHKFIYKN

SEQ ID NO: 686 - protein, 580 aa, Unknown
  Description of Unknown: Integrase B687 sequence
  PTHR30461:SF3,IPR036162,PS51737,IPR011109,PTHR30461, PS00397,PF00239,G3DSA:1.10.10.2600,IPR006119,SSF53041, SM00857,IPR025827,IPR038109,PS51736,cd03768, IPR006118,PF13408,G3DSA:3.40.50.1390,PF07508,Coil
MEFSKLTRVAIYIRVSTTMQAENGESLNVQRTQLTTYAQMMLNALPENIVIFEDAGYSGKNMDRPKFQDMMSQIRAGKFSHLLVWKIDRISRNLLDFSMMYKELKELGVTFVSKNEQFDTSTAMGEAMLKIILVFAELERNMTSERVTHTMIAMAQSGRWNGGRVPFGYTYRTEGEKKEKQIFEIDKGEAALVQEIFDLYEQERSIVREAKILNDRNAISRYGHEWSPVTVHLVLRNIFYVGDYRYNALREGDRSKPKPESEWIIVKDHHPAIISREQFARVQAILKANKRYRKDMAPASSRERIHIFGGLLFCGNCGKPLNNSVSNKKADGWQYSNYPCPTRRRSSNKCTGKSTSDPVVGEFVFNYILNMLNAQKGFKDIQTPAQLQDRLLFGDAFHNVISIDSDGLNSFFNLLSSGNISGAIYGKDVAVSKPKTAKVDPELVRLRKEKKRLERALDRLLNTYIMSDRPISENEYIRKRTDLETLLSDVNDKLGIAQSEEVQMALTDSEFLTKASQFIIGQKLSNRLYINYKNLAQSVDPSVLKTFVVSVIDNIVIYNGKVKSIVFRNGLAATFEYSSI

SEQ ID NO: 687 - protein, 580 aa, Unknown
  Description of Unknown: Integrase B688 sequence
  PTHR30461:SF3,IPR036162,PS51737,IPR011109,PTHR30461, PS00397,PF00239,G3DSA:1.10.10.2600,IPR006119,SSF53041, SM00857,IPR025827,IPR038109,PS51736,cd03768, IPR006118,PF13408,G3DSA:3.40.50.1390,PF07508,Coil
MEFSKLTRVAIYIRVSTTMQAENGESLNVQRTQLTTYAQMMLNALPENIVIFEDAGYSGKNMDRPKFQDMMSQIRAGKFSHLLVWKIDRISRNLLDFSMMYKELKELGVTFVSKNEQFDTSTAMGEAMLKIILVFAELERNMTSERVTHTMIAMAQSGRWNGGRVPFGYTYRTEGEKKEKQIFEIDKGEAALVQEIFDLYEQERSIVREAKILNDRNAISRYGHEWSPVTVHLVLMNIFYVGDYRYNALREGDRSKPKPESEWIIVKDHHPAIISREQFARVQAILKANKRYRKDMAPASSRERIHIFGGLLFCGNCGKPLNNSVSNKKADGWQYSNYPCPTRRRSSNKCTGKSTSDPVVGEFVFNYILNMLNAQKGFKDIQTPAQLQDRLLFGDAFHNVISIDSDGLNSFFNLLSSGNISGAIYGKDVAVSKPKTAKVDPELVRLRKEKKRLERALDRLLNTYIMSDRPISEIEYIRKRTDLETLLSDVNDKLGIAQSEEVQMALTDSEFLTKASQFIIGQKLSNRLYINYKNLAQSVDPSVLKTFVVSVIDNIVIYNGKVKSIVFRNGLAATFEYSSI

SEQ ID NO: 688 - protein, 580 aa, Unknown
  Description of Unknown: Integrase B689 sequence
  PTHR30461:SF3,SM00857,G3DSA:1.10.10.2600,IPR036162,PS51737, G3DSA:3.40.50.1390,IPR006119,IPR038109,PF07508,IPR011109, SSF53041,PTHR30461,PS51736,cd00338,PF00239
MYNMSPYSLSRSFRDKPCRAVIYGRASTEHEAQVKALQNQMQWYDDVARFHPQWNVISRYIDQGITGTQVYKRDAFMQMMEDAKQHKFDLIVTREVCRFARNTVDALVCVRQLAAMGIEVYFVNDNIWTLDGDGELRLTIMATMAQEESRKISERSLSGQRVSREKGVLYGNGNIFGYTRNKLTKQFEIDPDQAETVKMIFDLYDSGMGETLVAKELTRLGRKNGVGKVKWDAGKVSKIIKRKNYLGYTVYCQSYSNNYLEQKRIKRDESEFVYVKGGFPQIISEEQYERCNAIRRSRTKRLTDEKGRTRSFGVQQAQNVWGRKMRCRCGSPMLRHRWRTNSAGKPIYGYECKRHHDTPRIRLQNEQGNPTPICEIKPVGQSKLELMASKIFERVWGDQREIVLQTCKMLDACYKPDADRRADLMKAKDNSIQLLQQQLDDLVVVRARGEIEQDKFLQRTIEIQQQMEALRQSKAQIASEDYNPGRLDMEAIEAALCEAVEMHDGLVSEDFIDLFVSQVTPLSDSRFAWCLDFSPQPTVAFLNLAGQRKYTTCSMDSKLHFGSFADGEGHTIPFPGSLRR

SEQ ID NO: 689 - protein, 580 aa, Unknown
  Description of Unknown: Integrase B690 sequence
  PTHR30461:SF3,IPR036162,PS51737,IPR011109,PTHR30461, PS00397,PF00239,G3DSA:1.10.10.2600,IPR006119,SSF53041, SM00857,IPR025827,IPR038109,PS51736, cd03768,IPR006118,PF13408,G3DSA:3.40.50.1390,PF07508,Coil
MVRRKTALRGVSASTRITKVAIYIRVSTIHQVDKDSIPMQKKDLIAYCQLILGTDNYEIFEDAGYSGKNTDRPAFQDMMGRIRKGEFTHVLVWKIDRISRNLLDFAEMYEELQSLRVTFVSKNEQFDTSTAIGEAMLKIVLVFAELERNMTSERVTATMISRANNGQWNGGRIPFGYSYDSGTSTFSIREDEAAVCRRLKDLYLDNKSLVYTARALNADGYKTRAGADWTPTAVWIIASSPFYAGIYRYNRYKGTENRTLNPEEEWVMIPDHHPAIFTLEEHEAMKSSLKTNARYVDNPVGKPHATANIHIFQGIAYCGKCGNKMVSTPGKKHADGYRPSNYSCPLHRRSKKCDNATVNDMIVGEFAINYILNMLNAKKTFSNIDTPEELQRHLLTGSTFSDISSIEEDGLNDFFNLLSRYGSDNSYVFAIKTPRRKKASVNPELAALRKEKEKQERALQRLQDLYLYSDKSMSEKDFILRKSEISDRLKNINAQLGLITQNPDSLLSDEEFIKQASHLLIQKELKGRKYIYYKNLATSVDPEILRTYMETILDSMYIIDGRISSIVFKNGLTHKFIYKN

SEQ ID NO: 690 - protein, 580 aa, Unknown
  Description of Unknown: Integrase B691 sequence
  PTHR30461:SF3,SM00857,G3DSA:1.10.10.2600,IPR036162,PS51737, G3DSA:3.40.50.1390,IPR006119,IPR038109,PF07508,IPR011109, SSF53041,PTHR30461,PS51736,cd00338,PF00239
MYNMSPYSLSRSFRDKPCRAVIYGRASTEHEAQVKALQNQMQWYDDVARFHPQWNVINRYIDQGITGTQVYKRDAFMRMMEDAKQQKFDLIVTREVCRFARNTVDALVCVRQLAAIGIEVYFVNDNIWTLDGDGELRLTIMATMAQEESRKISERSLAGQRVSREKGVLYGNGNIFGYTRNKLTKQFEIDPDQAETVKMIFDLYDSGMGETLVAKELTRLGRKNGVGKVKWDAGKVSKIIKRKNYLGYTVYCQSYSNNYLEQKRIKRDESEFVYVKGGFPQIISEEQYERCNAIRRSRTKRLTDEKGRTRSFGIQQAQNVWGRKMRCRCGSPMLRHRWRTNNAGKPIYGYECKRHHDTPRIRLQNEQGNPTPICEIKPVGQSKLELMASKIFERVWGDQREIVLQTCKMLDACYKPDADRRADLMKAKDDSIQLLQQQLDDLVVVRARGEIEQDKFLQRTIEIQQQMEALRQSKAQIASEDYNPGRLDMEAIEAALCEAVEMHDGLVSEDFIDLFVSQVTPLSDSRFAWCLDFSPQPTVAFLNLAGQRKYTTCSMDSKLHFGPFADEEGHTIPFPGSLRR

SEQ ID NO: 691 - protein, 580 aa, Unknown
  Description of Unknown: Integrase B692 sequence
  SM00857,G3DSA:1.10.10.2600,IPR036162,PF13408, PS51737,G3DSA:3.40.50.1390,IPR025827,IPR006119, IPR038109,PF07508,IPR011109,SSF53041, PTHR30461,PS51736,cd00338,PF00239
MPEKIINCAIYTRKSTEEGLEQDFNSLDNQYEFCTNYLKSINDPALQLLPARYDDGGYSGGSLNRPALQRLLADIQCGLVNRVIIYKIDRLTREIRDFFKLLDIFEKYNVEFVSVKENQYYNTTTAIGRLMVNMFLVFAQFERENAGDRIRDKIATSKAKGMWMGGCPPYGYDIGDRCLVINETEAQNIRFIYQTFCNTHSLADTTEALNSGGIRTKCYTTRQGRTFGGRKFSVKTVQRILQNPLYKGMVTHRDKQYPGQHAAIIDAAQFDLVQAIFAAHKDKREARRCPPKASGGERETAALTGLIFCGCCGSAMTPSYCCKGDIRYHYYRCYRRASKLEDKCPINQIRTSEIDRVVMEQVLAILKSREFFVQYISHHHEFDVSTAFALFNNLDDVWNSLFETEKRRILRELLAKVTIFKDKIVLDVKKAGLAGVFAELSRNNRLAEVEYKENETFQISIAYRATRLANGAKIIVPATAKEESRFNGSLRLARQIAKGFAWRKMMESGLSLQELTASAKTNERDIRFAMRLSMIDPAIVESVLSGKSPEFLTYAFMKKHPIPLLWSDQRKLYGFEERKQ

SEQ ID NO: 692 - protein, 580 aa, Unknown
  Description of Unknown: Integrase B693 sequence
  PTHR30461:SF3,cd00338,SM00857,G3DSA:1.10.10.2600,IPR036162, PF13408,PS51737,G3DSA:3.40.50.1390,IPR025827,IPR006119, IPR038109,PF07508,IPR011109,SSF53041,PTHR30461, mobidb-lite,Coil,PF00239
MPRKPAKHPAKPKRGKKLEIEEPGVLYGRYSSHNQKDISVEQQFEKGYELAAEYGIRIIDTYADRAVSGRTDKRRDFQRMMTDAAKGKFRYVIAWKSNRMGRNMLEALINEARLQDLGVRVLYVEEDFDDTAAGRFAARSMMNVNQFYSENMAEDIKRGLYDNAANCMVANGHLPYGYKADETLHYAIDEPKAAVIREIFTRVSCGEAFVDIMASLNARGIKTSYGRPWGRSSFQKILSNERYRGIYIYGDVRKEGGIPRIISDELYFKVQEVITTKKNPQGRHRVNGDYLLTGKLFCGHCKSPMTGISGTSRSGSLHYYYVCQKRRTEKTCEKKNLRRDDIELQVAKAIKRRTLDDDTINWIADSVVEYSQHQESASGIGLLEDQLKDTQRSIKNLMAAIEQGIITPTTKARLMELEKEQSDIDRKITMAKADVIPVNRDQLVGWLKKLQAGDVHDKKYQAELFDTFLIAVYVYDNPDGQDYMKVVFNYAGSKNTVEIPLDPSVIDNVENIETGAVRLSSAQVHQTRKIRTCFRLEKGSDFSFSSGTTTKVPVDGAKLRYLVIDRKPITRFGGYDYEVR

SEQ ID NO: 693 - protein, 580 aa, Unknown
  Description of Unknown: Integrase B694 sequence
  SM00857,G3DSA:1.10.10.2600,IPR036162,PF13408,PS51737, IPR025827,G3DSA:3.40.50.1390,IPR006119,IPR038109,PF07508, IPR011109,SSF53041,PTHR30461,PS51736,cd00338, PF00239
MSEKIINCAIYTRKSTEEGLEQDFNSLDNQYEFCTNYLKSLNDPTLHLLPTRYDDGGYSGGSLNRPALQCLLADIRCGLVNRVIIYKIDRLTREIRDFFKLLDVFEKYNVEFVSVKENQYYNTTTAIGRLMVNMFLVFAQFERENAGDRIRDKIATSKAKGMWMGGCPPYGYDIGDRCLVINETEAQNIRFIYQTFCNTHSLADTTEALNSGGIRTKCYTTRQGRTFGGRKFSVKTVQRILQNPLYKGMVTHRDKQYPGQHAAIIDATQFDLVQAIFAAHKDKREARRCPQKASGGERETAALTGLIFCGCCGSAMTPSYCCKGDIRYHYYRCYRRASKLEDKCPINQIRTSEIDRVVMEQVLAILKSREFFVQYISHHHEFDVSTAFALFNNLDDVWNSLFETEKRRILRELLAKVTIFKDKIVLDVKKSGLAGVFAELSQNNLLAEVEYKENETFQISIAYRATRLANGAKIIVPATAKEESRFNGSLRLARQIAKGFAWRKMMESGLSLQELTASAKTNERDIRFAMRLSMIDPAIVESVLSGKSPEFLTYAFMKKHPIPLLWSDQRKLYGFEERKQ

SEQ ID NO: 694 - protein, 580 aa, Unknown
  Description of Unknown: Integrase B695 sequence
  PTHR30461:SF3,IPR036162,PS51737,IPR011109,PTHR30461, PS00397,PF00239,G3DSA:1.10.10.2600,IPR006119,SSF53041, SM00857,IPR025827,IPR038109,PS51736,cd03768, IPR006118,PF13408,G3DSA:3.40.50.1390,PF07508,Coil
MARRKTALRGVSASTRITKVAIYIRVSTIHQVDKDSIPMQKKDLIAYCQLILGTDNYEIFEDAGYSGKNTDRPAFQDMMGRIRKGEFTHVLVWKIERISRNLLDFAEMYEELQSLRVTFVSKNEQFDTSTAIGEAMLKIVLVFAELERNMTSERVTATMISRANNGQWNGGRIPFGYSYDSGTSTFSIREDAAVVCRRLKDLYLDNKSLVYTARALNADGYKTRAGADWTPTAVWIIASSPFYAGIYRYNRYKGTENRTLNPEEEWVMIPDHHPAIFTLEEHEAMKSSLKTNARYVDNPVGKPHATANIHIFQGIAYCGKCGNKMVSTPGKKHADGYRPSNYSCPLHRRSKKCDNATVNDMIVGEFAINYILNMLNAKKTFSNIDTPEELQRHLLTGSTFSDISSIEEDGLNDFFNLLSRYGSDNSYVFAIKTPRRKKASVNPELAALRKEKEKQERALQRLQDLYLYSDKSMSEKDFILRKSEISDRLKNINAQLGLITQNPDSLLSDEEFIKQASHLLIQKELKGRKYIYYKNLATSVDPEILRTYMETILDSMYIIDGRISSIVFKNGLTHKFIYKN

SEQ ID NO: 695 - protein, 580 aa, Unknown
  Description of Unknown: Integrase B696 sequence
  IPR036162,PS51737,IPR011109,PTHR30461,PS00397, PF00239,G3DSA:1.10.10.2600,IPR006119,SSF53041,cd00338, SM00857,IPR025827,IPR038109,PS51736,IPR006118, PF13408,G3DSA:3.40.50.1390,PF07508,Coil
MKKAAIYLRVSTSDQNYDRQEIELRQLASALGYEVKYVFEEKKSAVLKMDTREQLSEMRKLTNKDVDRIFIWDITRLSRRAIDFISLINEFADKGICLHFKDKNIITLEEDGSLNVLTGMYLYLLGVFAQMDAENLKAKMKSGKEAALLKGNSYTNNPPFGYELRNKHLYINEDEAKYVKMAYELYREGKDTQYIADMFNANNVPLKSGKKDIIWVKGTISQILNNTAYYGKGKRSTTIKKATANIPAEVKVSYFDTPAIISKELFEECRKIAMANICKQDKSRNLICLLRGLLKCGRCGKFYVLGNNNKQREYRDGDIRANVNNRVGCKNGSIKAMIADELVWKAIQNIYKYKKFKEKCIAEKEKYRLEIANNDNSITNMEKELKQLSIQSENLVKFAIKGLLSEEEFAKQKLYLESEKVRKNNILEELRATNLILQRKINAEFDYNILNEGVSLSLEEKKQICNDLIEDVFIYGYGAYKKLLQVNLKMDITYNILINTQHSISSYCIFDDEVATFSNPFKSDTLIKDMNLDIKIPDFDVTSDNNSLFSEEVFGVYSFDDMWNIMKKYGYIKKIDGDSN

SEQ ID NO: 696 - protein, 580 aa, Unknown
  Description of Unknown: Integrase B697 sequence
  PTHR30461:SF3,IPR036162,PS51737,IPR011109,PTHR30461, PS00397,PF00239,G3DSA:1.10.10.2600,IPR006119,SSF53041, SM00857,IPR025827,IPR038109,PS51736,cd03768, IPR006118,PF13408,G3DSA:3.40.50.1390,PF07508,Coil
MVRRKTALRGVSASTRITKVAIYIRVSTIHQVDKDSIPMQKKDLIAYCQLILGTDNYEIFEDAGYSGKNTDRPAFQDMMGRIRKGEFTHVLVWKIDRISRNLLDFAEMYEELQSLRVTFVSKNEQFDTSTAIGEAMLKIVLVFAELERNMTSERVTATMISRANNGQWNGGRIPFGYSYDSGTSTFSIREDEAVVCRRLKDLYLDNKSLVYTARALNADGYKTRAGADWTPTAVWIIASSPFYAGIYRYNRYKGTENRTLNPEEEWVMIPDHHPAIFTLEEHEAMKSSLKTNARYVDNPVGKPHATANIHIFQGIAYCGKCGNKMVSTPGKKHADGYRPSNYSCPLHRKSKKCDNATVNDMIVGEFAINYILNMLNAKKTFSNIDTPEELQRHLLIGSTFSDISSIEEDGLNDFFNLLSRYGSDNSYVFAIKTPRRKKASVNPELAALRKEKEKQERALQRLQDLYLYSDKSMSEKDFILRKSEISDRLKNINAQLGLITQNPDSLLSDEEFIKQASHLLIQKELKGRKYIYYKNLATSVDPEILRTYMETILDSVYITDGHVSSIVFKNGLTHKFIYKN

SEQ ID NO: 697 - protein, 580 aa, Unknown
  Description of Unknown: Integrase B698 sequence
  PTHR30461:SF3,IPR036162,PS51737,IPR011109,PTHR30461, PS00397,PF00239,G3DSA:1.10.10.2600,IPR006119,SSF53041, cd00338,SM00857,IPR025827,IPR038109,PS51736, IPR006118,PF13408,G3DSA:3.40.50.1390,PF07508,Coil
MPNYIDKLNKQKVAIYIRVSTKHQIDKDSLDVQRRELIAYTEMILGISDYYIFEDAGFSAKDTKRPAFQQMIDRIHFGEFSHVLVWKIDRISRNLLDFASMYADLKKCGVAFISKNEQFDTSSAIGEAMLKIILVFAELERNMTAERVTTIMLDRANTGKWNGGHVPYGYIYDKKTKEFSIDKEQALVVKRIFDLYEHEQSLIYVSRALNEKEIKTKQGNPWSPTTVHTILSNVFYIGDYKYNTRKTNSGYGLKDESEWIIYENHHEPIIEDRERFERIQFILKRNHRNSTEPIKLDTPGMSIRKKSVHIFAGILRCGMCGENMWAALDTIRANGYRPSHYTCKGHRNTAQRCTSKIPSDITLGPFVFTYIANLMRASKKITTETSLDALQAKLLTGKPFASVDHIEPDGLQKTLQMFTAPTDPEAIPYRPAIVLSESPKAKSRLQQLTEQKIKLETAEKRLRKIYLYENSGMTEEEYLAEKTTITENLGSCIAEIEKLKQDNQFLLASEDGFMEKASYFLIIQKLLDPKYTDFEKLIQKVDATIAKGFIASIIKEIVVTDGTVTKITFKNNIVHTFIYK

SEQ ID NO: 698 - protein, 580 aa, Unknown
  Description of Unknown: Integrase B699 sequence
  PTHR30461:SF3,IPR036162,PS51737,IPR011109,PTHR30461, PS00397,PF00239,G3DSA:1.10.10.2600,IPR006119,SSF53041, SM00857,IPR025827,IPR038109,PS51736,cd03768, IPR006118,PF13408,G3DSA:3.40.50.1390,PF07508,Coil
MARRKTALRGISASVRETKVAIYIRVSTIHQVDKDSIPMQKKDLIAYCQLILGTDNYEIFEDAGYSGKNTDRPAFQDMMKKIRKGEFTHMLVWKIDRISRNLLDFAEMYEELQALRITFVSKNEQFDTSTAIGEAMLKIVLVFAELERNMTSERVTATMISRANNGQWNGGRIPFGYSYDPDTSQFSIREDEAVVCRRLKDLYLDNKSLVYTARTLNADGYKTRAGVDWTPTAVWIIASSPFYAGIYRYNRYKGTENRTLNPEEEWVMIPNHHPAIFTLDEHEAMKSSLKSNARYVDNPVGKPHATANIHIFQGIAYCDKCGSKMVSTPGKKRADGYRPSNYSCPLHRRSKKCDNSTVNDMIIGEFTINYILNMLNAKKIFSGIDTPEELQRHLLTGSTFSDISSIEEDGLHEFFNLLSRYGSDNSYVFAVQKPRKKKASVNPEIAALRKEKEKQERALQRLQDLYLYSDKSMSEKDFIIRKSEISDHLKSINAQLGLITQDPDALLSDEEFIKQASHLLIQKELKDKKYIYYKNLATSVDPEILRTYMKTILDSVYLTDSHVSAIVFKNGLTQKFIYKK

SEQ ID NO: 699 - protein, 580 aa, Unknown
  Description of Unknown: Integrase B700 sequence
  PTHR30461:SF3,IPR036162,PS51737,IPR011109,PTHR30461, PS00397,PF00239,G3DSA:1.10.10.2600,IPR006119,SSF53041, SM00857,IPR025827,IPR038109,PS51736,cd03768, IPR006118,PF13408,G3DSA:3.40.50.1390,PF07508,Coil
MARRKTALRGVSAPARITKVAIYIRVSTIHQVDKDSIPMQKKDLIAYCQLILGTDNYEIFEDAGYSGKNTDRPAFQDMMGRIRKGEFTHVLVWKIDRISRNLLDFAEMYEELQSLRVTFVSKNEQFDTSTAIGEAMLKIVLVFAELERNMTSERVTATMISRANNGQWNGGRVPFGYSYDSSTSQFSIREDEAVICHRLKDLYLDNKSLVYTARALNADGYKTRAGADWTPTAVWIIASSPFYAGIYRYNRYKGTENRTLNPEEEWVMIPDHHPAIFTLEEHETMKSSLKANARYVDNPIGKPHTTTNIHIFQGIAYCGKCGNKMVSTPGRKHTDGYRPSNYSCPLHRKSNKCDNATVNDMVVGEFVINYILNMLNAKKTFSNINTPKELQKQLLTGSTFSDIFSIEEDGLNDFFNLLSRYGSDNSYVFAIKTPRKKKASVNPELAALRKEKEKQERALQRLQDLYLYSDKSMSEKDFILRKSEISDHLKSINAQLGLITQNTDSFLSDEEFIKQASHLLIQKELKNRKYIYYKNLATSVDPEILKTYMETILDSIYIADGHVTSIVFKNGLTHKFIYKN

SEQ ID NO: 700 - protein, 580 aa, Unknown
  Description of Unknown: Integrase B701 sequence
  PTHR30461:SF3,IPR036162,PS51737,IPR011109,PTHR30461, PS00397,PF00239,G3DSA:1.10.10.2600,IPR006119,SSF53041, cd00338,SM00857,IPR025827,IPR038109,PS51736, IPR006118,PF13408,G3DSA:3.40.50.1390,PF07508,Coil
MAKLVSRISEALSEMKVAIYIRVSTQYQVDRASLPVQREELINYAKYVLGITDYAVFEDAGYSAKNTDRPDYQQMMTRVRTGEFTHILVWKIDRISRNLLDFAAMYAELKQLGVTFVSKNEQFDTSSAMGEAMLKIILVFAELERNMTSERVSAIMLSRATDGVWNGGKVPFGYSYDKRNKVFSIYEPEAKIVTYIYDQYEAVRSLTSVAKILNEKGVRSRTGKPWNPTTIRTMLTNPFYAGTYRYNYRDESGKSHVVKAAKEWVMVEDHHPAIVTRERQNRIAALLQSRQRGVYSSGMTYQRKNTHIFAGLLRCGCCGSSMASTIDRERSDGWRPSIYMCTRRRRFNDCQNKYVSDITLGPFILNFIANMIRVSNSFGKSTSIETLEKKLLRGDVFSNVDHIERPGLEELYAHLRSGFDEMSFESTGVQAAESASQIQERDLLLTEKRRLERALNRLRSLYLYSEDEMPEKDYIVERKQLTDRLGEVDARLEEVEKLAVDSLTLSDEEFMAKASYFILTQQLQDKRYVNYERFIRKIDPQIVKDFLNSIVTNFCIKDGLTTSILFKNGLEIQFSYKSTE

SEQ ID NO: 701 - protein, 579 aa, Unknown
  Description of Unknown: Integrase B702 sequence
  PTHR30461:SF3,IPR036162,PS51737,IPR011109,PTHR30461, PS00397,PF00239,G3DSA:1.10.10.2600,IPR006119,SSF53041, SM00857,IPR025827,IPR038109,PS51736,cd03768, IPR006118,PF13408,G3DSA:3.40.50.1390,PF07508,Coil
MAYKAKAPDSGAEKDIRVAIYVRVSTVYQIDKDSLPMMKQDLTAYCKYVLNTEDYEIFEDAGYSGKNTARPAYQKMMAQIRQGNFTHLLVWKIDRISRNLLDFAEMYQELKKLDVTFVSKNEQFDTSTAIGEAMLKIILVFAELERNMTSERVTATMINRASNGVWNGGRVPYGYSYDKDTQTFSLDPSENSIYNLLVETYETSKSVVYTSRKLNDLGYRSRYGNLWSPIAVWTILRSPWYKGIYRYNYYKIPGRAAIKDESEWVVVENHHPASITPERFDKIQETLDRNARFRNAPGRKITKKTTHVFAGLVLCADCGSAFTASPGKRHVSGYHPSKYGCSNARKTSACHAKYTSDVVLGEFLLNYILNILNAQKNVDEISSTEELQSRLLCGSTFSSIDHVKQDDLDSLFTQLKSRPEKDPFIAVRSKAKPKVDPELKRMMNDLKKQRRALDRLNDLYLYSENSISEREYLVRKQQITDCIQEINDTIEAIAKENHEQSIDDNEFIKQASTFILNQKLADRQYVCYTKLAETLSPETLKAFFSSIIDSIIMRAGKIETVIFRNGLSQTFIYKEKPGK

SEQ ID NO: 702 - protein, 579 aa, Unknown
  Description of Unknown: Integrase B703 sequence
  PTHR30461:SF3,IPR036162,PS51737,IPR011109,PTHR30461, PS00397,PF00239,G3DSA:1.10.10.2600,IPR006119,SSF53041, SM00857,IPR025827,IPR038109,PS51736,cd03768, IPR006118,PF13408,G3DSA:3.40.50.1390,PF07508,Coil
MNNTLSALNITPSPPRMCRVAIYIRVSTLQQVDKDSLPMQRKDLIAYSKLILNTDDYVIFEDAGYSGKNTIRPRYQDMMDQIRTGAFTHLLVWKIDRISRNLLDFAQMYQELKELNVTFVSKNEQFNTSTAMGEAMLKIILVFAELERNMTSERVTATMISRANTGKWNGGRVPYGYKYDQEEEDFLIIASESNVVKLIHDKYEELQSLVYLARYMNEHGYRTRSGNEWSPPSLAIILKSWWYCGCYEYNKRKAGNRQKLKDESEWIMIEDHHIAIISYEQKERVLAILKGNKRYATDHNLYVKGIHVHVFGGLCWCRNCGKKMTSTSSNKNRSWQYSKYLCSTRRRSLTKCRGRSTSDPVLGEFIFNYILNMLNAQKGFDSIHSPADLQAALLTGDAFSDIKSIDREELNDLYNTLSSNVSGNIYGRSFNVNKAKKNDEVQSSLTILKSEKKKLERALDRLTNLYLYDDMAISEKDYMTKKTEIETKIAEIDEKIGIVNKNSVDDSITDEEFVDKASTFIITQKLTDRNYISYKRLATSIDPKILYMFTHDVIDYIDIYNGKVQRIVFRNGLSQTFVR

SEQ ID NO: 703 - protein, 579 aa, Unknown
  Description of Unknown: Integrase B704 sequence
  PTHR30461:SF3,IPR036162,PS51737,IPR011109,PTHR30461, PS00397,PF00239,G3DSA:1.10.10.2600,IPR006119,SSF53041, cd00338,SM00857,IPR025827,IPR038109,PS51736, IPR006118,PF13408,G3DSA:3.40.50.1390,PF07508
MPNLPYSNEFAKLIIAIYCRVSSEDQAERGTIEIQKEFAAKYVNLYNLEVFDYYCDDGVSGTLPLEQRPEGKRLLEDAAKKRFNMVIFYKLDRLGRKVRVILNAVNDLDALGVTVKSMTEPFENETPTGKFLLTTLAGIAELDRDTILSRMWSGAQYAAKQGRWLGGVIPYGYMVADKKLVISTDPIPNCRLSEEDVIKIIFRMAAKEKANCAEIADYLNSIKIPTRYMLNGISGKRYKKTAEIWRPSRISEIIRSTTYKGLHQYGKNATHKNSKIITRSVPAIVSDEIWQEANNTMKDNRVSCKRNTKNLYLLQGMIRCGLCGLAYSPTFYKARNTSYYCCTCKGQQKTKFYNRDTCIGKPVRVDWLDNLVWSKCLELLKEPEKIYDAKPSTNKEPPNIVPTPTEFELIKSRIQELSTEREKLLDLYRKGIIIESDLTTQINKLYLEETELNNKIIKIDNQPKQELKRSKASTVMVLKEFIEMIKNTDINQLPFELKREVVKMLIDKVFVYTKVDPDKFYPSINVIISWRFDAAPFNIDYIENYTLITFLLQRKKLKTQLQPTPLITLTPVLNCNTRR

SEQ ID NO: 704 - protein, 579 aa, Unknown
  Description of Unknown: Integrase B705 sequence
  cd03768,PTHR30461:SF3,SM00857,IPR006118,G3DSA:1.10.10.2600, IPR036162,PS51737,G3DSA:3.40.50.1390,IPR006119,IPR038109, PF07508,IPR011109,SSF53041,PTHR30461,PS00397, PS51736,Coil,PF00239
MAYKKNITTPPAAPTRKLKAALYIRVSTLYQIDKDSLPFQRQELINLAKYMLGTDDYDVFEDAGYSGKNTDRPAYQRMMTRIRRKEFTHLCVWKIDRISRNLLDFASMYDELKRYNVTFVSKNEQFDTSSAMGEAMLKIILVFAELERKLTSERVMGVMLDRASKGLWNGARMPLGYKWDSEAEFPAIDEQEAATIHYIFNKYEEIKSSVQLARMLNRNHVTTKRGGDWSSKTVSDIIRNPFYKGTYRYNYRQSARGAVKDPSEWVIVPNAVPVIIDETQWARCNAIMDSHHIYKDTSDFRPRHRTHIFAGLLKCCDCGSGFQSNRDKPRLSGWCPSTYRCTRSVRMQDCTTVNWSDVVLGPFVFNYIANFVRLQRNGAPYTTETIEKTLLSGKAFESIAGIDEQGLHDTLSALKGYSPSAQSDYSSKLLDVPQMDNADSIDIELLRQEETKYKTALQRLLDLYLYDPAAMSQKDYLTRKEELESKLKEVQASIERNTHVEVTESADISFMQKASVFVVSKRILSKKDINYEELAVKCDAEVLKDLVNSVISKIGVRGRHIEYIEFKSGLRHTFIYKDK

SEQ ID NO: 705 - protein, 579 aa, Unknown
  Description of Unknown: Integrase B706 sequence
  PTHR30461:SF3,IPR036162,PS51737,IPR011109,PTHR30461, PS00397,PF00239,G3DSA:1.10.10.2600,IPR006119,SSF53041, cd00338,SM00857,IPR025827,IPR038109,PS51736, IPR006118,PF13408,G3DSA:3.40.50.1390,PF07508
MPNLPYSNEFTKLIIAIYCRVSSEDQAERGTIEIQKEFAAKYVNLYNLEVFDYYCDDGVSGTLPLEQRPEGKRLLEDAAKKRFNMVIFYKLDRLGRKVRVILNAVNDLDALGVTVKSMTEPFENETPTGKFLLTTLAGIAELDRDTILSRMWSGAQYAAKQGRWLGGVIPYGYMVADKKLVISTDPIPNCRLSEEDVIKIIFRMAAKEKANCAEIADYLNSIKIPTRYMLNGISGKRYKKTAEIWRPSRISEIIRSTTYKGLHQYGKNATHKNSKIITRSVPAIVSDEIWQEANNTMKDNRVSCKRNTKNLYLLQGMIRCGLCGLAYSPTFYKARNTSYYCCTCKGQQKTKFYNRDTCIGKPVRVDWLDNLVWSKCLELLKEPEKIYDAKPSTNKEPPNIVPTPTEFELIKSRIQELSTEREKLLDLYRKGIIIESDLTTQINKLYLEETELNNKIIKIDNQPKQELKRSKASTVMVLKEFIEMIKNTDINQLPFELKREVVKMLIDKVFVYTKVDPDKFYPSINVIISWRFDAAPFNIDYIENYTLTTFLLQRKKSKTPLQPTLPITLTPVLNCNTRR

SEQ ID NO: 706 - protein, 579 aa, Unknown
  Description of Unknown: Integrase B707 sequence
  PTHR30461:SF3,IPR036162,PS51737,IPR011109,PTHR30461, PS00397,PF00239,G3DSA:1.10.10.2600,IPR006119,SSF53041, SM00857,IPR025827,IPR038109,PS51736,cd03768, IPR006118,PF13408,G3DSA:3.40.50.1390,PF07508,Coil
MRNKSLAGRANNRAERPRKVAIYIRVSTTHQIDKDSLPMQRKDLIAYCELILGIEDYEIFEDAGYSGKNTDRPAFQEMMQKIRAGSFSHLLVWKIDRISRNLLDFAEMYEELQSLRVTFVSKNEQFDTSNAMGEAMLKIILVFAELERNMTSERVTATMISRANQGLWNGGRIPYGYSYDAETSAFSIIQDEADVCQLMKTDYFEHKSIIHTARLLNDKKIPTRSGALWSPTAVWKILSSPFYAGVYRYNHYKGTENRTLNPEEEWVLVPDHHPAIFTLEEHEKLCDILDANKRTANLPGQKHRAKNVYVFSGILYCGKCGNKLVSTPGRLQADNFRTTTYSCPKKRKTHECDNPSVNDLIVGEFVINYILNMLNAKSSFSSINSPAELEERLLYGGSFKDVQHISEDGLNEFYNLLSRYGSDSSYVFAVKHPRKKKAAVNPEVEALRKDKEKQERALKRLQDLYLYSERAMTEKDFIIQKNEISSRIQDINTRLGMVTHDANSTLSDEDFVRQASHLLITKKLIGRDYIYYKALAQTVSPDVLKIYMETILDSVYVIDGRVSSIVFRNGLTHTFIYQK

SEQ ID NO: 707 - protein, 579 aa, Unknown
  Description of Unknown: Integrase B708 sequence
  PTHR30461:SF3,cd00338,SM00857,G3DSA:1.10.10.2600,IPR036162, PS51737,G3DSA:3.40.50.1390,IPR006119,IPR038109,PF07508, SSF53041,IPR011109,PTHR30461,PS51736,Coil, PF00239
MNENKKVIVGLYPRVSTEDQSRFGHSLDEQECRMKQLCEFKNYEIFKVYREEGVSAKNTNRPKFQEMIEDVKQGKINKIIIFKLDRLTRSIQDLENICKFLDKYNCGLESISEEINTSSANGKFFVRMITILAQLEIERTSERTKVGLVGAIKQGHISGRPPLGYVKKNGSKKIFIDEVQADVVRRIFKLYLDGMSVCSICKLFKEENVLNRRWPTTTVDKILSNQLYIGNSEYGKRTNNEIQIFKNVVPAIIDKTTFDMVQKRKEKNLKNFKRKATYIFMQKIICPKCNKVMGGTSSTSKNKEKHLYYKCNCCKTRINEKKIEKELMEFLNDMLDFFLIIDNSFKPTLNKDVENEIKKYLTMKEDINNKITRIKTAFIDAIIDANIFQEELNELQRELENVEIKLNELEETKRNIEYKQDIETIFNIKEIEKMKMKSEYVKSHNLWKKLDSSQKYYIINKYIDEIKIDIDKKYNVSINDIIFNKNEIENIGYMFRSDCFDMIINIDERDAILSNYKNEFKTQEYIESLREFYNIKETTIQADLFNINEYDKDNIIQIIPQERKTKFEKNKFTILEIEV

SEQ ID NO: 708 - protein, 579 aa, Unknown
  Description of Unknown: Integrase B709 sequence
  PTHR30461:SF3,IPR036162,PS51737,IPR011109,PTHR30461, PS00397,PF00239,G3DSA:1.10.10.2600,IPR006119,SSF53041, SM00857,IPR025827,IPR038109,PS51736,cd03768, IPR006118,PF13408,G3DSA:3.40.50.1390,PF07508,Coil
MRNKSLARRANNRAERPRKVAIYIRVSTTHQIDKDSLPMQRKDLVAYCELILGIEDYEIFEDAGYSGKNTDRPAFQEMMQKIRAGSFSHLLVWKIDRISRNLLDFAEMYEELQSLRVTFVSKNEQFDTSNAMGEAMLKIILVFAELERNMTSERVTATMISRANQGLWNGGRVPYGYSYDAETSVFSIIQDEADVCQLMKTDYFEHKSIIHTAKLLNDRKVPTRSGALWSPTAVWKILSSPFYAGIYRYNHYKGTENRTINPEEEWVLVPDHHPAIFTLEEHEKICDIMDTNKRMSNLPGQKHRAKNVYAFSGILYCGKCGSKLVSTPGRLQADGFRTTTYSCPKKRKTHECDNPSINDLIVGEFVINYILNMLNAKSSFSSISSPAELEEHLLYGGSFKDVQHISEDGLNEFYNLLSRYGSDSSYVFAVKRPRKKKAAVNPEVEALRKDKEKQERALKRLQDLYLYSERAMTEKDFIIQKNEISSRIQDINTRLGMVTHDANSTLSDEDFVRQASHLLITKKLIGREYIYYKSLAQTVSPGVLKIYMETILDSVYVIDGRVSSIIFKNGLTHTFIYKK

SEQ ID NO: 709 - protein, 579 aa, Unknown
  Description of Unknown: Integrase B710 sequence
  PTHR30461:SF3,IPR036162,PS51737,IPR011109,PTHR30461, PF00239,G3DSA:1.10.10.2600,IPR006119,SSF53041,cd00338, SM00857,IPR025827,IPR038109,mobidb-lite,PS51736, PF13408,G3DSA:3.40.50.1390,PF07508,Coil
MRKKSNLNAATRAVIYARYSSANQRDCSIEQQVAKCRELAARLGLTVIDVYEDRAISGKTDRRPSFQRMMKDADRGIFDIVLAWKSNRMGRDMLQAMTNEERLRDNGIRTVYAEEDFDDTAAGRFALRNMMNVNQFYSENMAEDITRGLMDNAAKCLSNGSLPLGYKPGDDRHVVLDEAEAAIVQEIFTRVSCYEPFIDIARDLNRRGIKTKKGSEWGRSSFHTICRNERYRGIYIYRDVRIEGGMPRIVSDELFYKVQEVLKVKKNPQGRRKRSGYEEYLLTGKLFCGHCGSPMTGIAGTSKTGAMHYYYTCQKRRTDHSCDKKAVRRDQIERAVGVAIQQQLLTDENIQMMADKLMEYNARTETKYRLQGLQDQLNANKTATANILKAIEMGIITDATKARLLELEKEQGQLLVKIDEAKAEMVPISRNDFVKLLYIYKEGEPTDKKYLAALFDNFLVRVDLYDDHLKITFDPTGGRQPIDMPIGAEESPESPGDSSESSNFEASSQDAEKFVLALHNCTKKSPCNVVCKVIFCLLYFRFKSASAAYHRLRRCTGLVGFSCFAADLRLFLLDGFPHW

SEQ ID NO: 710 - protein, 579 aa, Unknown
  Description of Unknown: Integrase B711 sequence
  PTHR30461:SF3,IPR036162,PS51737,IPR011109,PTHR30461, PF00239,G3DSA:1.10.10.2600,IPR006119,SSF53041,cd00338, SM00857,IPR025827,IPR038109,mobidb-lite,PS51736, PF13408,G3DSA:3.40.50.1390,PF07508,Coil
MRQKFNTDLSMLTPEEQQQFHDDPTTLTKGEVDVALYLRFSSERQKEQSIEGQLRDCIAYCKRKSFRIVAIYVDRATTARKDVEKRVHFQEMISDSAHHLWNFVVVWKLDRFARNREDSAVFKMRLRKNGVRVKSATETISDNPEGIILESVLEGIAEYYSADLSQKITRGLRESAMKGHSVGGHVPLGYKIEDHRLVINPETAHIVQEAFQLYANGESVAEICRIFNSKGYRTAKNSEFNRSSFKSIFKNVRYIGTYIYKDIEKENAIPAIIDKDLFETVQRRLSLAADAPARGKAKVDYLLSGKLFCGHCGATMNGESGTSKTGAIHNYYTCYSRKRRKGCNKKPLKKDFIERIVAQDAMALLTNDVIEELADMAMSQADRDLKENTRIPELSTRLTEIEQGINNITKAVEKGIASDALLNRLTELEKEKKDLTAQLREEEKYICRIDRDQIIFWLTKFQGGNIEDEDCRRRVIDLLVNSVTVWDEPDGYKITTAYNLTSCKTKTFRVSNNADSPSGEGFGFGELSSTKMVKSSNPLGLLVFSLFIIAVRPSFAAARSAKTAGFTARGLSVLQILVL

SEQ ID NO: 711 - protein, 579 aa, Unknown
  Description of Unknown: Integrase B712 sequence
  PTHR30461:SF3,IPR036162,PS51737,IPR011109,PTHR30461, PF00239,G3DSA:1.10.10.2600,IPR006119,SSF53041,cd00338, SM00857,IPR025827,IPR038109,PS51736,mobidb-lite, PF13408,G3DSA:3.40.50.1390,PF07508,Coil
MRKKSNLNAATRAVIYARYSSANQRDCSIEQQVAKCREQAARLGLTVIDVYEDRAISGKTDRRPNFQRMMKDADLRQFDVVLAWKSNRMGRNMLQAMTNEERLRDNGIRTVYAEEDFDDTAAGRFALRNMMNVNQFYSENMAEDITRGLMDNAAKCLSNGSLPLGYKPGDDRHVVLDEAEAAIVQEIFTRVSCYEPFIDIARDLNRRGIKTKKGSEWGRSSFHTICRNERYRGIYIYRDVRIEGGMPRIVSDELFYKVQEVLKVKKNPQGRRKRSGYEEYLLTGKLFCGHCGSPMTGIAGTSKTGAMHYYYTCQKRRTDHSCDKKAVRRDQIERAVGVAIQQQLLTDENIQMMADKLMEYNARTETKYRLQGLQDQLNANKTATANILKAIEMGIITDATKARLLELEKEQGQLLVKIDEAKAEMVPISRNDFVKLLYIYKEGEPTDKKYLAALFDNFLVRVDLYDDHLKITFDPTGGRQPIDMPIGAEESPESPGDSSESSNFSASSQDAEKFVLALHNCTNKNLELRFEVFIFYHYKSIHKNTVHTANKSWYALRLFSLGSQSSLTQPLIILPVLLR

SEQ ID NO: 712 - protein, 579 aa, Unknown
  Description of Unknown: Integrase B713 sequence
  PTHR30461:SF3,IPR036162,PS51737,IPR011109,PTHR30461, PS00397,PF00239,G3DSA:1.10.10.2600,IPR006119,SSF53041, SM00857,IPR025827,IPR038109,PS51736,cd03768, IPR006118,PF13408,G3DSA:3.40.50.1390,PF07508,Coil
MAYKAKAPDSGAEKDIRVAIYVRVSTVYQIDKDSLPMMKQDLTAYCKYVLNTEDYEIFEDAGYSGKNTARPAYQKMMAQIRQGNFTHLLVWKIDRISRNLLDFAEMYQELKKLDVTFVSKNEQFDTSTAIGEAMLKIILVFAELERNMTSERVTATMINRASNGVWNGGRVPYGYSYDKDTQTFSLDPNENSIYNLLVETYETSKSVVYTSRKLNDLGYRSRYGNLWSPIAVWTILRSPWYKGIYRYNYYKIPGRAAVKDESEWVVVENHHPASITPERFDKIQETLDRNARFRNAPGRKITKKTTHVFAGLVLCADCGSAFTASPGKRHVSGYHPSKYGCSNARKTSACHAKYTSDVVLGEFLLNYILNILNAQKNVDEISSTEELQSRLLCGSTFSSIDHVKQDDLDSLFTQLKSRPEKDPFTAVRSKTKPKVDPELKRMMNDLKKQRRALDRLNDLYLYSENSISEREYLVRKQQITDCIQEINDTIEAIAKENHEQSIDDNEFIKQASTFILNQKLADRQYVCYTKLAESLAPETLKAFFSSIIDSIIMRAGKIETVIFRNGLSQTFIYKEKPGK

SEQ ID NO: 713 - protein, 579 aa, Unknown
  Description of Unknown: Integrase B714 sequence
  PTHR30461:SF3,IPR036162,PS51737,IPR011109,PTHR30461, PS00397,PF00239,G3DSA:1.10.10.2600,IPR006119,SSF53041, SM00857,IPR025827,IPR038109,PS51736,cd03768, IPR006118,PF13408,G3DSA:3.40.50.1390,PF07508,Coil
MNNTLSALNITPSPPRMCRVAIYIRVSTLQQVDKDSLPMQRKDLIAYSKLILNTDDYVIFEDAGYSGKNTIRPRYQDMMDQIRTGAFTHLLVWKIDRISRNLLDFAQMYQELKELNVTFVSKNEQFNTSTAMGEAMLKIILVFAELERNMTSERVTATMISRANTGKWNGGRVPYGYKYDPEEEDFLIVANESNTVKLIHDKYEELQSLVYLARYMNEHGYRTRSGNEWSPPSLAIILKSWWYCGCYEYNKRKAGNRQKLKNESEWIMIEDHHIAIISYDQKERVLAILKGNKRFATEHNLYVKGIHVHVFGGLCWCKNCGKKMTSTSSNKNRSWQYSKYLCSTRRRSLTKCRGRSTSDPVLGEFIFNYILNMLNAQKGFDSIHSPADLQDALLTGDAFSDIKSIDQEELNDLYNILSSSVVGNIYGRSFNVNKAKKNDEVQSSLTILKAEKKKLDRALDRLTNLYLYDDMAISEKDYMTKKTEIETKIAEIDEKIGIVNKNSVDNSITDEEFVDKASTFIITQKLTNRNYISYKRLATSVDPKILYMFTHDVIDYIDIYNGKVQRIVFRNGLSQTFIR

SEQ ID NO: 714 - protein, 579 aa, Unknown
  Description of Unknown: Integrase B715 sequence
  PTHR30461:SF3,IPR036162,PS51737,IPR011109,PTHR30461, PS00397,PF00239,G3DSA:1.10.10.2600,IPR006119,SSF53041, SM00857,IPR025827,IPR038109,PS51736,cd03768, IPR006118,PF13408,G3DSA:3.40.50.1390,PF07508,Coil
MNNTLSALNITPSPPRMCRVAIYIRVSTLQQVDKDSLPMQRKDLIAYSKLILNTDDYVIFEDAGYSGKNTIRPRYQDMMEQIRTGAFTHLLVWKIDRISRNLLDFAQMYQELKELNVTFVSKNEQFNTSTAMGEAMLKIILVFAELERNMTSERVTATMISRANTGKWNGGRVPYGYKYDPEEEDFLIVANESNTVKLIHDKYEELQSLVYLARYMNEHGYRTRSGNEWSPPSLAIILKSWWYCGCYEYNKRKAGNRQKLKNESEWIMIEDHHIAIISYDQKERVLAILKGNKRFATEHNLYVKGIHVHVFGGLCWCKNCGKKMTSTSSNKNRSWQYSKYLCSTRRRSLTKCRGRSTSDPVLGEFIFNYILNMLNAQKGFDSIHSPADLQDALLTGDAFSDIKSIDQEELNDLYNILSSSVVGNIYGRSFNVNKAKKNDEVQSSLTILKAEKKKLDRALDRLTNLYLYDDMAISEKDYMTKKTEIETKIAEIDEKIGIVNKNSVDNSITDEEFVDKASTFIITQKLTNRNYISYKRLATSVDPKILYMFTHDVIDYIDIYNGKVQRIVFRNGLSQTFIR

SEQ ID NO: 715 - protein, 579 aa, Unknown
  Description of Unknown: Integrase B716 sequence
  PTHR30461:SF3,IPR036162,PS51737,IPR011109,PTHR30461, PS00397,PF00239,G3DSA:1.10.10.2600,IPR006119,SSF53041, SM00857,IPR025827,IPR038109,PS51736,cd03768, IPR006118,PF13408,G3DSA:3.40.50.1390,PF07508,Coil
MRNKSLAGRANNRAERPRKVAIYIRVSTTHQIDKDSLPMQRKDLIAYCELILGIEDYEIFEDAGYSGKNTDRPAFQEMMQKIRSGSFSHLLVWKIDRISRNLLDFAEMYEELQSLRVTFVSKNEQFDTSNAMGEAMLKIILVFAELERNMTSERVTATMISRANQGLWNGGRVPYGYAYDAETSVFSIIQDEADICQLMKTDYFEHKSIIHTAKLLNDKKAPTRSGALWSPTAVWKILSSPFYAGIYRYNHYKGTENRTINPEDEWVLVPDHHPAIFTLEEHEKICDIMDTNKRTSNLPGQKHRSKNVYVFSGILYCGKCGNKLVSTPGRLQADGFRTTTYSCPKKRKTHECDNPSINDLIVGEFVINYVLNMLNAKSSFSSISSPAELEKRLLCGGSFKDVQHISEDGLNEFYNLLSRYGSDSSYIFSVKRPRKKKAAVNPEVESLRKDKEKQERALKRLQDLYLYSERAMTEKDFIIQKNEISSRIQDINTRLGMVTHDANSTLSDEDFVRQASHLLITKKLIGREYIYYKSLAQTVSPDVLKIYMETILDSVYVVDGRVSSIIFKNGLSHTFVYQN

SEQ ID NO: 716 - protein, 579 aa, Unknown
  Description of Unknown: Integrase B717 sequence
  PTHR30461:SF3,IPR036162,PS51737,IPR011109,PTHR30461, PS00397,PF00239,G3DSA:1.10.10.2600,IPR006119,SSF53041, SM00857,IPR025827,IPR038109,PS51736,cd03768, IPR006118,PF13408,G3DSA:3.40.50.1390,PF07508,Coil
MNNTLSALNITPSPPRMCRVAIYIRVSTLQQVDKDSLPMQRKDLIAYSKLILNTDDYVIFEDAGYSGKNTIRPRYQDMMEQIRTGAFTHLLVWKIDRISRNLLDFAQMYQELKELNVTFVSKNEQFNTSTAMGEAMLKIILVFAELERNMTSERVTATMISRANTGKWNGGRVPYGYKYDPEEEDFLIVANESNTVKLIHDKYEELQSLVYLARYMNEHGYRTRSGNEWSPPSLAIILKSWWYCGCYEYNKRKAGNRQKLKDKSEWIMIEDHHIAIISYDQKERVLAILKGNKRYATDHNLYVKGIHVHVFGGLCWCRNCGKKMTSTSSNKNRSWQYSKYLCSTRRRSLTKCRGRSTSDPVLGEFIFNYILNMLNAQKGFDSIHSPADLQDALLTGDAFSDIKSIDQEELNDLYNILSSSVVGNIYGRSFNVNKAKKNDEVQSSLTILKAEKKKLDRALDRLTNLYLYDDMAISEKDYMTKKTEIETKIAEIDEKIGIVNKNSVDNSITDEEFVDKASTFIITQKLTNRNYISYKRLATSVDPKILYMFTHDVIDYIDIYNGKVQRIVFRNGLSQTFIR

SEQ ID NO: 717 - protein, 579 aa, Unknown
  Description of Unknown: Integrase B718 sequence
  PTHR30461:SF3,cd00338,SM00857,G3DSA:1.10.10.2600,IPR036162, PF13408,PS51737,G3DSA:3.40.50.1390,IPR025827,IPR006119, IPR038109,PF07508,SSF53041,IPR011109,PTHR30461, PS51736,Coil,PF00239
MKKRINTNSAARAVIYARYSSANQRDCSIEQQVEKCRELAAREGVTVIEIYADRAVSGKTDRRPNFQRMMKDASLRQFDVVLAWKSNRMGRNMLQAMMNEEQLRSNGIRTIYAEEDFDDTAAGRFALRNMMNVNQFYSENMAEDISRGLMDNASKCMSNGSLPLGYKTGKDQKVVLDEAEAAIVQEIFTRVSCYEPFIDIARDLNRRGIKTKKGAEWGRSSFHTICRNERYRGIYIYRDVRVEGGMPRIISDELFYKVQEVLKVKKNPQGRRKRSGYEEYLLTGKLYCGHCGSPMTGIAGTSKTGAMHYYYTCQKRRTDHSCDKKAVRRDQIERAVGVAIQQQLLTDENIQMMADETMAYNARTEIKYRLQGLQQQLYSNETSTANIMKAIEMGIITDTTKARLLALEQEHGQLLAKIDTAKAEMVPINREDFVSLLDIYRTGDVNNKKYLAALFDTFLVRVDLYDDHFKITFDPTGGKMPVDIPIGAEDFPESPGDSPESSDFEASPQDAEKFVLALHNRTKKSPCNVVCKVIFCLLYFRFKSASAAYHRLRRCTGLIGFSCFAADLRLFLLDGFPHW

SEQ ID NO: 718 - protein, 579 aa, Unknown
  Description of Unknown: Integrase B719 sequence
  PTHR30461:SF3,IPR036162,PS51737,IPR011109,PTHR30461, PS00397,PF00239,G3DSA:1.10.10.2600,IPR006119,SSF53041, SM00857,IPR025827,IPR038109,PS51736,cd03768, IPR006118,PF13408,G3DSA:3.40.50.1390,PF07508,Coil
MNNTLSALNITPSPPRMCRVAIYIRVSTLQQVDKDSLPMQRKDLIAYSKLILNTDDYVIFEDAGYSGKNTIRPRYQDMMDQIRTGAFTHLLVWKIDRISRNLLDFAQMYQELKELNVTFVSKNEQFNTSTAMGEAMLKIILVFAELERNMTSERVTATMISRANTGKWNGGRVPYGYKYDPEEEDFLIVANESNTVKLIHDKYEELQSLVYLARYMNEHGYRTRSGNEWSPPSLAIILKSWWYCGCYEYNKRKAGNRQKLKDKSEWIMIEDHHIAIISYDQKERVLAILKGNKRYATDHNLYVKGIHVHVFGGLCWCRNCGKKMTSTSSNKNRSWQYSKYLCSTRRRSLTKCRGRSTSDPVLGEFIFNYILNMLNAQKGFDSIHSPADLQAALLTGDAFSDIKSIDQEELNDLYNILSSSVVGNIYGRSFNVNKAKKNDEVQSSLTILKAEKKKLDRALDRLTNLYLYDDMAISEKDYMTKKTEIETKIAEIDEKIGIVNKNSVDNSITDEEFVDKASTFIITQKLTNRNYISYKRLATSVDPKILYMFTHDVIDYIDIYNGKVQRIVFRNGLSQTFIR

SEQ ID NO: 719 - protein, 579 aa, Unknown
  Description of Unknown: Integrase B720 sequence
  PTHR30461:SF3,IPR036162,PS51737,IPR011109,PTHR30461, PS00397,PF00239,G3DSA:1.10.10.2600,IPR006119,SSF53041, SM00857,IPR025827,IPR038109,PS51736,cd03768, IPR006118,PF13408,G3DSA:3.40.50.1390,PF07508,Coil
MNNTLSALNITPSPPRMCRVAIYIRVSTLQQVDKDSLPMQRKDLIAYSKLILNTDDYVIFEDAGYSGKNTIRPRYQDMMDQIRTGAFTHLLVWKIDRISRNLLDFAQMYQELKELNVTFVSKSEQFDTSTAMGEAMLKIILVFAELERNMTSERVTATMISRANTGKWNGGRVPYGYKYDPVEEDFLVIANESNTVKLIHDKYEELQSLVYLARYMNEHGYRTRSWNEWSPPSLSIILKSWWYCGCYEYNKRKAGNRQKLKNESEWIMIEDHHIAIISYDQKERVLAILKGNKRFATEHNLYVKGIHVHVFGGLCWCKNCGKKMTSTSSNKNRSWQYSKYLCSTRRQSLTKCRGRSTSDPVLGEFIFNYILNMLNAQKGFDSIHSPADLQDALLTGDAFSDIKSIDQEELNDLYNILSSSVVGNIYGRSFNVNKAKKNDEVQSSLTILKAEKKKLDRALDRLTNLYLYDDMAISEKDYMTKKTEIETKIAEIDEKIGIVNKNSVDDSITDEEFVDKASTFIITQKLTDRNYISYKRLATTVDPKILYMFTHDVIDYIDIYNGKVQRIVFRNGLSQTFIR

SEQ ID NO: 720 - protein, 579 aa, Unknown
  Description of Unknown: Integrase B721 sequence
  PTHR30461:SF3,IPR036162,PS51737,IPR011109,PTHR30461, PS00397,PF00239,G3DSA:1.10.10.2600,IPR006119,SSF53041, SM00857,IPR025827,IPR038109,PS51736,cd03768, IPR006118,PF13408,G3DSA:3.40.50.1390,PF07508,Coil
MNNTLSALNITPSPPRMCRVAIYIRVSTLQQVDKDSLPMQRKDLIAYSKLILNTDDYVIFEDAGYSGKNTIRPRYQDMMEQIRTGAFTHLLVWKIDRISRNLLDFAQMYQELKELNVTFVSKNEQFNTSTAMGEAMLKIILVFAELERNMTSERVTATMISRANTGKWNGGRVPYGYKYDPEEEDFLIVANESNTVKLIHDKYEELQSLVYLARYMNEHGYRTRSGNEWSPPSLAIILKSWWYCGCYEYNKRKAGNRQKLKDKSEWIMIEDHHIAIISYDQKERVLAILKGNKRYATDHNLYVKGIHVHVFGGLCWCRNCGKKMTSTSSNKNRSWQYSKYLCSTRRRSLTKCRGRSTSDPVLGEFIFNYILNMLNAQKGFDSIHSPADLQDALLTGDAFSDIKSIDQEELNDLYNILSSSVVGNIYGRSFNVNKAKKNDEVQSSLTILKAEKKKLDRALDRLTNLYLYDDMAISEKDYMTKKTEIETKIAEIDEKIGIVNKNSLDNSITDEEFVDKASTFIITQKLTNRNYISYKRLATSVDPKILYMFTHDVIDYIDIYNGKVQRIVFRNGLSQTFIR

SEQ ID NO: 721 - protein, 579 aa, Unknown
  Description of Unknown: Integrase B722 sequence
  PTHR30461:SF3,IPR036162,PS51737,IPR011109,PTHR30461, PS00397,PF00239,G3DSA:1.10.10.2600,IPR006119,SSF53041, cd00338,SM00857,IPR025827,IPR038109,PS51736, IPR006118,PF13408,G3DSA:3.40.50.1390,PF07508
MPNLPYSNEFAKLIIAIYCRVSSEDQAERGTIEIQKEFAAKYVNLYNLEVFDYYCDDGVSGTLPLEQRPEGKRLLEDAAKKRFNMVIFYKLDRLGRKVRVILNAVNDLDALGVTVKSMTEPFENETPTGKFLLTTLAGIAELDRDTILSRMWSGAQYAAKQGRWLGGVIPYGYMVADKKLVISTDPIPNCRLSEEDVIKIIFRMAAKEKANCAEIADYLNSIKIPTRYMLNGISGKRYKKTAEIWRPSRISEIIRSTTYKGLHQYGKNATHKNSKIITRSVPAIVSDEIWQEANNTMKDNRVSCKRNTKNLYLLQGMIRCGLCGLAYSPTFYKARNTSYYCCTCKGQQKTKFYNRDTCIGKPVRVDWLDNLVWSKCLELLKEPEKIYDAKPSTNKEPPNIVPTPTEFELIKSRIQELSTEREKLLDLYRKGIIIESDLTTQINKLYLEETELNNKIIKIDNQPKQELKRSKASTVMVLKEFIEMIKNTDINQLPFELKREVVKMLIDKVFVYTKVDPDKFYPSINVIISWRFDAAPFNIDYIENYTLTTFLLQRKKLKTQLQPTPLITLTPVLNCNTRR

SEQ ID NO: 722 - protein, 579 aa, Unknown
  Description of Unknown: Integrase B723 sequence
  PTHR30461:SF3,IPR036162,PS51737,IPR011109,PTHR30461, PS00397,PF00239,G3DSA:1.10.10.2600,IPR006119,SSF53041, SM00857,IPR025827,IPR038109,PS51736,cd03768, IPR006118,PF13408,G3DSA:3.40.50.1390,PF07508,Coil
MAYKAKAPDSGAEKDIRVAIYVRVSTVYQIDKDSLPMMKQDLTAYCKYVLNAEDYEIFEDAGYSGKNTARPAYQKMMAQIRQGNFTHLLVWKIDRISRNLLDFAEMYQELKKLDVTFVSKNEQFDTSTAIGEAMLKIILVFAELERNMTSERVTATMINRASNGVWNGGRVPYGYSYDKDTQTFSLDPNENSIYNLLVETYETSKSVVYTSRKLNDLGYRSRYGNLWSPIAVWTILRSPWYKGIYRYNYYKIPGRAAIKDESEWVVVENHHPASITPERFDKIQETLDRNARFRNAPGRKITKKTTHVFAGLVLCADCGSAFTASPGKRHVSGYHPSKYGCSNARKTSACHAKYTSDVVLGEFLLNYILNILNAQKNVDEISSTEELQSRLLCGSTFSSIDHVKQDDLDSLFTQLKSRPEKDPFIAVRSKAKPKVDPELKRMMNDLKKQRRALDRLNDLYLYSENSISEREYLVRKQQITDCIQEINDTIEAIAKENHEQSIDDNEFIKQASTFILNQKLADRQYVCYTKLAETLSPETLKAFFSSIIDSIIMRAGKIETVIFRNGLSQTFIYKEKPGK

SEQ ID NO: 723 - protein, 579 aa, Unknown
  Description of Unknown: Integrase B724 sequence
  PTHR30461:SF3,IPR036162,PS51737,IPR011109,PTHR30461, PS00397,PF00239,G3DSA:1.10.10.2600,IPR006119,SSF53041, cd00338,SM00857,IPR025827,IPR038109,PS51736, IPR006118,PF13408,G3DSA:3.40.50.1390,PF07508
MPNLPYSNEFAKLIIAIYCRVSSEDQAERGTIEIQKEFAAKYVNLYNLEVFDYYCDDGVSGTLPLEQRPEGKRLLEDAAKKRFNMVIFYKLDRLGRKVRVILNAVNDLDALGVTVKSMTEPFENETPTGKFLLTTLAGIAELDRDTILSRMWSGAQYAAKQGRWLGGVIPYGYMVADKKLVISTDPIPNCRLSEEDVIKIIFRMAAKEKANCAEIADYLNSIKIPTRYMLNGISGKRYKKTAEIWRPSRISEIIRSTTYKGLHQYGKNATHKNSKIITRSVPAIVSDEIWQEANNTMKDNRVSCKRNTKNLYLLQGMIRCGLCGLAYSPTFYKARNTSYYCCTCKGQQKTKFYNRDTCIGKPVRVDWLDNLVWSKCLELLKEPEKIYDAKPSTNKEPPNIVPTPTEFELIKSRIQELSTEREKLLDLYRKGIIIESDLTTQINKLYLEETELNNKIIKIDNQPKQELKRSKASTVMVLKEFIEMIKNTDINQLPFELKREVVKMLIDKVFVYTKVDPDKFYPSINVIISWRFDAAPFNIDYIENYTLITFLLQRKKLKTQLQPTLLITLTPVLNCNTRR

SEQ ID NO: 724 - protein, 579 aa, Unknown
  Description of Unknown: Integrase B725 sequence
  PTHR30461:SF3,SM00857,G3DSA:1.10.10.2600,IPR036162,PF13408, IPR025827,G3DSA:3.40.50.1390,PS51737,IPR006119,IPR038109, PF07508,SSF53041,IPR011109,PTHR30461,PS51736, cd00338,PF00239
MEVEIIKAKGAGEDTSTGRKIDRLRVAAYCRVSTDDEDQIKSYNSMVRYYTDLIKSNKQWVFAGVFADKAITGTKTDKREEFQLLIQECLSGNIDLVIAKSIPRFARNTLDTLKYVRMLRERNIAVYFEVEKINTLKDGEFLLTILSSVAQQEVENTSAYVKKGLKMKMKRGELVGFQGCLGYDYDVVTKSLSINEEGAETVRYIFDRYVAGAGSTMIARELNEQGISTIKGNLWTSSSVMGIINNEKYKGDILLGKTFTVDPISKRRLENLGEEDRFYIKNHHEPIISEEKFARAQEIRERRNGGRKKGVAPGKREKFSRQYAFSCMLECGFCGASLSRRRWHSSSKYKKTIWQCVKSTKHGKRFCPDSKGIPEQVIEDAFIESYRMLCTDHKDVLEEFIKRVEKTLSEDSIEDKIEKLNKNAYNIQYKRKKLLESYLEGVVAKDIYEETDMGYEKKLSEVNAQLGMLEQQYDNEGSLQRRLVDFRKALSKNQILEGFDRGIFESIIEKVIVGGYDENGEKDPYKIIFIYKTGFKNEIGNAKERFGKKSKAVEKAKEMCSHIADEVKDVCSYVSDNTR

SEQ ID NO: 725 - protein, 579 aa, Unknown
  Description of Unknown: Integrase B726 sequence
  PTHR30461:SF3,IPR036162,PS51737,IPR011109,PTHR30461, PS00397,PF00239,G3DSA:1.10.10.2600,IPR006119,SSF53041, cd00338,SM00857,IPR025827,IPR038109,PS51736, IPR006118,PF13408,G3DSA:3.40.50.1390,PF07508
MPNLPYSNEFAKLIIAIYCRVSSEDQAERGTIEIQKEFAAKYVNLYNLEVFDYYCDDGVSGTLPLEQRPEGKRLLEDAAKKRFNMVIFYKLDRLGRKVRVILNAVNDLDALGVTVKSMTEPFENETPTGKFLLTTLAGIAELDRDTILSRMWSGAQYAAKQGRWLGGVIPYGYMVADKKLVISTDPVPNCRLSEEDVIKIIFRMAAKEKANCAEIAEYLNSIKIPTRYMLNGISGKRYKKTAEIWRPGRISEIIRSTTYKGLHQYGKNATHKNSKIITRSVPAIISDEIWQEANNTMKDNRVSCKRNTKNLYLLQGMIRCGLCGLAYSPTFYKARNTSYYCCTCKGQQKTKFYNRDACIGKPVRVDWLDTLVWSKCLELLKEPEKIYDAKPSTNKEPPNMVPTPTEFELIKSRIQELSTEREKLLDLYRKGIIIESDLTTQINKLYLEETELNNKIIKIDNQPKQELKRSKASTVMVLKEFIEMIKNTDINQLPFELKREVVKMLIDKVFVYTKVDPDKFYPSINVIISWRFDAAPFNIDYIENYTLITFLLQRKKLKTPLQPTPLITLTPVLNCNTRR

SEQ ID NO: 726 - protein, 579 aa, Unknown
  Description of Unknown: Integrase B727 sequence
  PTHR30461:SF3,IPR036162,PS51737,IPR011109,PTHR30461, PS00397,PF00239,G3DSA:1.10.10.2600,IPR006119,SSF53041, SM00857,IPR025827,IPR038109,PS51736,cd03768, IPR006118,PF13408,G3DSA:3.40.50.1390,PF07508,Coil
MAYKAKAPDSGAEKDIRVAIYVRVSTVYQIDKDSLPMMKQDLTAYCKYVLNTEDYEIFEDAGYSGKNTARPAYQKMMAQIRQGNFTHLLVWKIDRISRNLLDFAEMYQELKKLDVTFVSKNEQFDTSTAIGEAMLKIILVFAELERNMTSERVTATMINRASNGVWNGGRVPYGYSYDKDTQTFSLDPNENSIYNLLVETYETSKSVVYTSRKLNDLGYRSRYGNLWSPIAVWTILRSPWYKGIYRYNYYKIPGRAAVKDESEWVVVENHHPASITPERFDKIQETLDRNARFRNAPGRKITKKTTHVFAGLVLCADCGSAFTASPGKRHVSGYHPSKYGCSNARKTSACHAKYTSDVVLGEFLLNYILNILNAQKNVDEISSTEELQSRLLCGSTFSSIDHVKQDDLDSLFTQLKSRPEKDPFTAVRSKTKPKVDPELKRMMNDLKKQRRALDRLNDLYLYSENSISEREYLVRKQQITDCIQEINDTIEAIAKENHEQSIDDNEFIKQASTFILNQKLADRQYVCYTKLAETLSPETLKAFFSSIIDSIIMRAGKIETVIFRNGLSQTFIYKEKPGK

SEQ ID NO: 727 - protein, 579 aa, Unknown
  Description of Unknown: Integrase B728 sequence
  PTHR30461:SF3,IPR036162,PS51737,IPR011109,PTHR30461, PS00397,PF00239,G3DSA:1.10.10.2600,IPR006119,SSF53041, SM00857,IPR025827,IPR038109,PS51736,cd03768, IPR006118,PF13408,G3DSA:3.40.50.1390,PF07508,Coil
MNNTLSALNITPSPPRMCRVAIYIRVSTLQQVDKDSLPMQRKDLIAYSKLILNTDDYVIFEDAGYSGKNTIRPRYQDMMEQIRTGAFTHLLVWKIDRISRNLLDFAQMYQELKELNVTFVSKNEQFNTSTAMGEAMLKIILVFAELERNMTSERVTATMISRANTGKWNGGRVPYGYKYDPEEEDFLIVANESNTVKLIHDKYEELQSLVYLARYMNEHGYRTRSGNEWSPPSLAIILKSWWYCGCYEYNKRKAGNRQKLKNESEWIMIEDHHIAIISYDQKERVLAILKGNKRFATEHNLYVKGIHVHVFGGLCWCKNCGKKMTSTSSNKNRSWQYSKYLCSTRRRSLTKCRGRSTSDPVLGEFIFNYILNMLNAQKGFDSIHSPADLQDALLTGDAFSDIKSIDQEELNDLYNILSSSVVGNIYGRSFNVNKAKKNDEVQSSLTILKTEKKKLDRALDRLTNLYLYDDMAISEKDYMTKKTEIETKIAEIDEKIGIVNKNSVDNSITDEEFVDKASTFIITQKLTNRNYISYKRLATSVDPKILYMFTHDVIDYIDIYNGKVQRIVFRNGLSQTFIR

SEQ ID NO: 728 - protein, 579 aa, Unknown
  Description of Unknown: Integrase B729 sequence
  PTHR30461:SF3,IPR036162,PS51737,IPR011109,PTHR30461, PS00397,PF00239,G3DSA:1.10.10.2600,IPR006119,SSF53041, cd00338,SM00857,IPR025827,IPR038109,PS51736, IPR006118,PF13408,G3DSA:3.40.50.1390,PF07508,Coil
MINIDEKLSKKKAAGYIRVSTVYQVDKDSLPMQREDLTNYIKYALGIDEYEIFEDAGYSAKNTDRPSFQRMMSRLRSGEFSHLVVWKIDRISRNLIDFTTMYEELKRLGVTFVSKNEQFDTSSAMGEAMLKIILVFAELERKMTSERVSAVMVSRANEGKYNGGRIPIGYDYDKSTKTISVNDAEAKIVNLIYDKYDEMQSIIQVVKYLNSQGVKTKRGYDFSATTVHKVLTNKFYVGDLVYNKHDERNTGNSSTKSVRDESEWIVIEDHHPAIIERWRQERTIVALSSRNFANVSYKTYQRRNTHIFAGLIQCGMCGKGMTASVDRERSDGYRPSIYICDSRRKTKLCSNKYVSDITLGPFIFNLISNIVKAYNNVGKSTSVEMLEKKLLRGDTFDNVYSIESEGVRQLLDSIRNASDDSTENIILSKSTSAFSASTEEKELLRSEKKRHEAALSRLQQLFLYGEDAITQTDYLVQKTNIEKSIDIIDKRLNEIDSSIANNFVMTDSDFFSKASMFIIQSNLAQARSVDFDKLIRTVDKQTLKMFINKVVQKVVVLDGKIAQISFQNGISLKFLYAAK

SEQ ID NO: 729 - protein, 578 aa, Unknown
  Description of Unknown: Integrase B730 sequence
  PTHR30461:SF3,IPR036162,PS51737,IPR011109,PTHR30461, PS00397,PF00239,G3DSA:1.10.10.2600,IPR006119,SSF53041, cd00338,SM00857,IPR025827,IPR038109,PS51736, IPR006118,PF13408,G3DSA:3.40.50.1390,PF07508,Coil
MGYVTKKAAQRFEEKKAAIYVRVSTQYQVDRASLPVQREELINYAKYALGISDYVIFEDAGYSAKNTDRPDYQQMMARMRIGEFSHLLVWKIDRISRNLLDFSVMYAELKELGVVFVSKNEQFDTSSAMGEAMLKIILIFAELERKTTSERVSAVFVSRANDGIWNGGKVPYGYSYDKKSKTFSIIEDEAKIVRLIYSLYESEKSIVRVAQIMNSRGLKSRAGNDWSPTAVHNVLSNPFYSGTYRYNYRDESSGKTYRTKDKDEWVLIENHHTPIVSPEQQAAAGAILESKHYNKNATYQRKNVHVFAGLLTCGCCGSTMAATTDRVRADGWRPSMYICSRRRKSEDCTNKYVSDVTLGPFVLNFFANLIKASNSFGRTTSIETLEKKLLRGEALARVDHIERPGLEELYNHLRSGFDEKRFESPTIAATESSADLSERDLLLSEKRRLERALNRLKAIYLYGDDEMASKDFNIERERITKALSEVDSRINELDIANAFNLSLSDEAFMQKASQFILTQQLLDKRYVNYERFIRKIDPKIVKDFLNETVSNFCIKDGLTTSILLKNGIELRFSYKTSE

SEQ ID NO: 730 - protein, 578 aa, Unknown
  Description of Unknown: Integrase B731 sequence
  PTHR30461:SF3,IPR036162,PS51737,IPR011109,PTHR30461, PS00397,PF00239,G3DSA:1.10.10.2600,IPR006119,SSF53041, cd00338,SM00857,IPR025827,IPR038109,PS51736, IPR006118,PF13408,G3DSA:3.40.50.1390,PF07508,Coil
MGYVVKKAAQRFEEKKAAIYVRVSTQYQVDRASLPVQREELINYAKYALGISDYVIFEDAGYSAKNTDRPDYQQMMARMRTGEFSHLLVWKIDRISRNLLDFSVMYAELKELGVVFVSKNEQFDTSSAMGEAMLKIILIFAELERKTTSERVSAVFVSRANDGIWNGGKVPYGYSYDKESKTFSIAEDEAKIVRLIYSLYESEKSIVRVARIMNERGLKSRAGSDWSPTTVHTILSSPFYSGTYRYNYRDESNAKRFREKGKDEWVLVENHHPAIVSPERQAAVGVILESKRYNKNATYQRKNVHVFAGLLTCGCCGSTMAATTDKVRADGWRPSMYICSRRRKSEDCTNKYVSDVTLGPFVLNFFANLIKASNSFGRTTSIETLEKKLLRGEALSHVDHIERPGLEELYNHLRSGFDEKCFESPTIAATESSADLSERDLLLSEKRRLERALNRLKTIYLYGDDEMASKDFNIERERITKALSEVDSRINELDIANAFDLSLSDEAFMQKASQFILTQQLLDKRYVNYERFIRKIDPKIVKDFLNETVSNFCIKDGLTTSILLKNGIELRFSYKTAE

SEQ ID NO: 731 - protein, 578 aa, Unknown
  Description of Unknown: Integrase B732 sequence
  PTHR30461:SF3,IPR036162,PS51737,IPR011109,PTHR30461, PS00397,PF00239,G3DSA:1.10.10.2600,IPR006119,SSF53041, SM00857,IPR025827,IPR038109,PS51736,cd03768, IPR006118,PF13408,G3DSA:3.40.50.1390,PF07508,Coil
MAYPTKNTAADNRIIAIYVRVSTGYQVDKDSLPFQKKELKAYCKHILHVDLSQVEIFEDAGRSGKNTKRPAYERMMEKVRAGLVSHVLVYKIDRISRNLVDFSLMYDDFKYNRVTFISLNEQFDTSSAIGEAVLKIILVFAELERKLTSERVKDIMIGRATEGKWNGARVPYGWDWDPDAEQPVHSKIEAPYARGMYEMYLKVRSTGKIRDYNNAHGIPTKRGGEWTSKTVSDFLRNPMNKGDYRYNYRESARGRKKPEDEVIYQEGVFEPLVDPEMWERVNRIMDNNASKRNTGGLHPIMKNCNVFAGLIQCAECSSGFQVVKKDRRRKNGFAPSMYGCTSRFRKIHCPAPNVSEVQIGPFVINYISAMVHATKERFKIHSPAALESMLLSDPIFANIAGIESQGLNETFALLTGVSVSGSALWRTDLVKQTEAAANPSEIAELKKQIQKYNRAKERLEDAYYFSDDAMSEKEYLEKKNKFDAARVAAENKLKELTEVQIASHVDDSGFMKSASAFLLAHQLHAGVHIEYRDFAVTVEEESLKEFMNLVLDHISVKDRRVVEIVFSNGLSHRFIYRE

SEQ ID NO: 732 - protein, 578 aa, Unknown
  Description of Unknown: Integrase B733 sequence
  PTHR30461:SF3,IPR036162,PS51737,IPR011109,PTHR30461, PS00397,PF00239,G3DSA:1.10.10.2600,IPR006119,SSF53041, cd00338,SM00857,IPR025827,IPR038109,PS51736, IPR006118,PF13408,G3DSA:3.40.50.1390,PF07508,Coil
MGYVVKKAAQRFEEKKAAIYVRVSTQYQVDRASLPVQREELINYAKYALGISDYVIFEDAGYSAKNTDRPDYQQMMARMRTGEFSHLLVWKIDRISRNLLDFSVMYAELKELGVVFVSKNEQFDTSSAMGEAMLKIILIFAELERKTTSERVSAVFVSRANDGIWNGGKVPYGYSYDKEGKTFSIAEDEAKIVRLIYSLYESEKSIVRVARIMNERGLKSRAGNDWSPTTVHTILSSPFYSGTYRYNYRDESNTKRFREKGKDEWVLVENHHPAIVSPERQAAVGVILESKRYNKNATYQRKNVHVFAGLLTCGCCGSTMAATTDKVRADGWRPSMYICSRRRKSEDCTNKYVSDVTLGPFVLNFFANLIKASNSFGRTTSIETLEKKLLRGEALSRVDHIERPGLEELYNHLRSGFDEKRFESPTIAATDSSADLSERDLLLSEKRRLERALNRLKTIYLYGDDEMASKDFNVERERITKALVEVDSRINELDIANAFDLSLSDEAFMQKASQFILTQQLLDKRYVNYERFIRKIDPKIVKDFLNETVSNFCIKDGLTTSILLKNGIELRFSYKTAE

SEQ ID NO: 733 - protein, 578 aa, Unknown
  Description of Unknown: Integrase B734 sequence
  PTHR30461:SF3,IPR036162,PS51737,IPR011109,PTHR30461, PS00397,PF00239,G3DSA:1.10.10.2600,IPR006119,SSF53041, cd00338,SM00857,IPR025827,IPR038109,PS51736, IPR006118,PF13408,G3DSA:3.40.50.1390,PF07508,Coil
MGYVTKKAAQRFEEKKAAIYVRVSTQYQVDRASLPVQREELINYAKYALGISDYVIFEDAGYSAKNTDRPDYQQMMARMRTGEFSHLLVWKIDRISRNLLDFSVMYAELKELGVVFVSKNEQFDTSSAMGEAMLKIILIFAELERKTTSERVSAVFVSRANDGIWNGGKVPYGYSYDKEGKTFSIAEDEAKIVRLIYSLYESEKSIVRVARIMNERGLKSRAGSDWSPTTVHTILSSPFYSGTYRYNYRNESNRKRFREKGKDEWVLVENHHPAIVSPERQAAVGVILESKRYNKNATYQRKNVHVFAGLLTCGCCGSTMAATTDKVRADGWRPSMYICSRRRKSEDCTNKYVSDVSLGPFVLNFFANLIKASNSFGRTTSIETLEKKLLRGEALSRVDHIERPGLEELYNHLRSGFDEKRFESPTIAATESSADLSERDLLLSEKRRLERALNRLKTIYLYGDDEMASKDFNIERERITKALSEVDSRINELDIANAFDLSLSDEAFMQKASQFILTQQLLDKRYVNYERFIRKIDPKIVKDFLNETVSNFCIKDGLTTSILFKNGLEIQFSYKSTE

SEQ ID NO: 734 - protein, 578 aa, Unknown
  Description of Unknown: Integrase B735 sequence
  PTHR30461:SF3,IPR036162,PS51737,IPR011109,PTHR30461, PS00397,PF00239,G3DSA:1.10.10.2600,IPR006119,SSF53041, SM00857,IPR025827,IPR038109,PS51736,cd03768, IPR006118,PF13408,G3DSA:3.40.50.1390,PF07508,Coil
MAYPMKNTAADNRIIAIYVRVSTGYQVDKDSLPFQKKELKAYCKHILHVDLSQVEIFEDAGRSGKNTKRPAYERMMEKVRAGLVSHVLVYKIDRISRNLVDFSLMYDDFKYNRVTFISLNEQFDTSSAIGEAVLKIILVFAELERKLTSERVKDIMIGRATEGKWNGARVPYGWDWDPDVEQPVHSKIEAPYARGMYEMYLKVRSTGKIRDYNNSHNIPTKRGGEWTSKTVSDFLRNPMNKGDYRYNYRESARGRKKPEDEVIYQEGVFEPLVDPEVWERVNRIMDDNASKRNTGGLHPIMKNCNVFAGLIQCAECSSGFQVVKKDRRRKNGFAPSMYGCTSRFRKIHCPAPNVSEVQIGPFVINYISAMVHATKERFKIHSPAALESMLLSDPIFANIAGIESQGLNETFALLTGVSVSGSALWRTDPVKQSDTAATSSEIENLKKQIQKYNRAKERLEDAYYFSDDAMSEKEYLEKKNKFDAARVAAENKLKELTEVQIASHVDDSGFMKSASAFLLAHQLHAGVHIEYRDFAVTVEEESLKEFMNLVLDHISVKDRRVVEIVFSNGLSHRFIYRE

SEQ ID NO: 735 - protein, 578 aa, Unknown
  Description of Unknown: Integrase B736 sequence
  PTHR30461:SF3,IPR036162,PS51737,IPR011109,PTHR30461, PS00397,PF00239,G3DSA:1.10.10.2600,IPR006119,SSF53041, cd00338,SM00857,IPR025827,IPR038109,PS51736, IPR006118,PF13408,G3DSA:3.40.50.1390,PF07508,Coil
MGYVVKKAAQRFEEKKAAIYVRVSTQYQVDRASLPVQREELINYAKYALGISDYVIFEDAGYSAKNTDRPDYQQMMARMRTGEFSHLLVWKIDRISRNLLDFSVMYAELKELGVVFVSKNEQFDTSSAMGEAMLKIILIFAELERKTTSERVSAVFVSRANDGIWNGGKVPYGYSYDKESKTFSIAEDEAKIVRLIYSLYESEKSIVRVARIMNERGLKSRAGSDWSPTTVHTILSSPFYSGTYRYNYRDESNTKRFREKGKDEWVLVENHHPAIVSPERQAAVGVILESKRYNKNATYQRKNVHVFAGLLTCGCCGSTMAATTDKVRADGWRPSMYICSRRRKSEDCTNKYVSDVSLGPFVLNFFANLIKASNSFGRTTSIETLEKKLLRGEALSRVDHIERPGLEELYNHLRSGFDEKRFESPTIAATESSADLSERDLLLSEKRRLERALNRLKTIYLYGDDEMASKDFNIERERITKALSEVDSRINELDIANAFDLSLSDEAFMQKASQFILTQQLLDKRYVNYERFIRKIDPKIVKDFLNETVSNFCIKDGLTTSILLKNGIELRFSYKTAE

SEQ ID NO: 736 - protein, 578 aa, Unknown
  Description of Unknown: Integrase B737 sequence
  PTHR30461:SF3,IPR036162,PS51737,IPR011109,PTHR30461, PS00397,PF00239,G3DSA:1.10.10.2600,IPR006119,SSF53041, cd00338,SM00857,IPR025827,IPR038109,PS51736, IPR006118,PF13408,G3DSA:3.40.50.1390,PF07508,Coil
MGYVVKKAAQRFEEKKAAIYVRVSTQYQVDRASLPVQREELINYAKYALGISDYVIFEDAGYSAKNTDRPDYQQMMARMRTGEFSHLLVWKIDRISRNLLDFSVMYAELKELGVVFVSKNEQFDTSSAMGEAMLKIILIFAELERKTTSERVSAVFVSRANDGIWNGGKVPYGYSYDKEGKTFSIAEDEAKIVRLIYSLYESEKSIVRVARIMNERGLKSRAGNDWSPTTVHTILSSPFYSGTYRYNYRDESNTKRFREKGKDEWVLVENHHPAIVSPERQAAVGVILESKRYNKNATYQRKNVHVFAGLLTCGCCGSTMAATTDKVRADGWRPSMYICSRRRKSEDCTNKYVSDVSLGPFVLNFFANLIKASNSFGRTTSIETLEKKLLRGEALSRVDHIERPGLEELYNHLRSGFDEKRFESPTIAATESSADLSERDLLLSEKRRLERALNRLKTIYLYGDDEMASKDFNIERERITKALSEVDSRIDELDIANAFDLSLSDEAFMQKASQFILTQQLLDKRSVNYERFIRKIDPKIVKDFLNETVSNFCIKDGLTTSILLKNGIELRFSYKTAE

SEQ ID NO: 737 - protein, 578 aa, Unknown
  Description of Unknown: Integrase B738 sequence
  PTHR30461:SF3,IPR036162,PS51737,IPR011109,PTHR30461, PS00397,PF00239,G3DSA:1.10.10.2600,IPR006119,SSF53041, SM00857,IPR025827,IPR038109,PS51736,cd03768, IPR006118,PF13408,G3DSA:3.40.50.1390,PF07508,Coil
MAYPTKNTAADNRIIAIYVRVSTGYQVDKDSLPFQKKELKAYCKHILHVDLSQVEIFEDAGRSGKNTKRPAYERMMEKVRAGLVSHVLVYKIDRISRNLVDFSLMYDDFKYNRVTFISLNEQFDTSSAIGEAVLKIILVFAELERKLTSERVKDIMIGRATEGKWNGARVPYGWDWDPDAEQPVHSKVEAPYARGMYEMYLEVRSTGKIRDYNNSHNIPTKRGGEWTSKTVSDFLRNPMNKGDYRYNYRESARGRKKPEDEVIYQEGVFEPLVDPEVWEHVNRIMDDNASKRNTGGLHPIMKNCNVFAGLIQCAECGSGFQVVKKDRRRKNGFAPSMYGCTSRFRKIHCPAPNVSEVQIGPFVINYISAMVHATKERFKIHSPSALESMLLSDPIFANIAGIESQGLNETFALLTGVSVSGSALWRTDPVKQSDTAATSSEIENLKKQIQKYNRAKERLEDAYYFSDDAMSEKEYLEKKNKFDAARVTAENKLKELTEVQIASHVDDSGFMKSASAFLLAHQLHAGVHIEYRDFAVTVEEESLKEFMNLVLDHISVKDRRVVEIVFFNGLSHRFIYRE

SEQ ID NO: 738 - protein, 578 aa, Unknown
  Description of Unknown: Integrase B739 sequence
  PTHR30461:SF3,IPR036162,PS51737,IPR011109,PTHR30461, PS00397,PF00239,G3DSA:1.10.10.2600,IPR006119,SSF53041, SM00857,IPR025827,IPR038109,PS51736,cd03768, IPR006118,PF13408,G3DSA:3.40.50.1390,PF07508,Coil
MNTLSALNITPSPPRMCRVAIYIRVSTLQQVDKDSLPMQRKDLIAYSKLILNTDDYVIFEDAGYSGKNTIRPRYQDMMEQIRTGAFTHLLVWKIDRISRNLLDFAQMYQELKELNVTFVSKNEQFNTSTAMGEAMLKIILVFAELERNMTSERVTATMISRANTGKWNGGRVPYGYKYDPEEEDFLIVANESNTVKLIHDKYEELQSLVYLARYMNEHGYRTRSGNEWSPPSLAIILKSWWYCGCYEYNKRKAGNRQKLKDKSEWIMIEDHHIAIISYDQKERVLAILKGNKRYATDHNLYVKGIHVHVFGGLCWCRNCGKKMTSTSSNKNRSWQYSKYLCSTRRRSLTKCRGRSTSDPVLGEFIFNYILNMLNAQKGFDSIHSPADLQAALLTGDAFSDIKSIDQEELNDLYNILSSSVVGNIYGRSFNVNKAKKNDEVQSSLTILKAEKKKLDRALDRLTNLYLYDDMAISEKDYMTKKTEIETKIAEIDEKIGIVNKNSVDNSITDEEFVDKASTFIITQKLTNRNYISYKRLATSVDPKILYMFTHDVIDYIDIYNGKVQRIVFRNGLSQTFIR

SEQ ID NO: 739 - protein, 578 aa, Unknown
  Description of Unknown: Integrase B740 sequence
  PTHR30461:SF3,IPR036162,PS51737,IPR011109,PTHR30461, PS00397,PF00239,G3DSA:1.10.10.2600,IPR006119,SSF53041, SM00857,IPR025827,IPR038109,PS51736,cd03768, IPR006118,PF13408,G3DSA:3.40.50.1390,PF07508,Coil
MNTLSSLNITPSPPRMCRVAIYIRVSTLQQVDKDSLPMQRKDLIAYSKLILNTDDYVIFEDAGYSGKNTIRPRYQDMMDQIRTGAFTHLLVWKIDRISRNLLDFAQMYQELKELNVTFVSKNEQFNTSTAMGEAMLKIILVFAELERNMTSERVTATMISRANTGKWNGGRVPYGYKYDPEEEDFLIVANESNTVKLIHDKYEELQSLVYLARYMNEHGYRTRSGNEWSPPSLAIILKSWWYCGCYEYNKRKAGNRQKLKNESEWIMIEDHHIAIISYDQKERVLAILKGNKRFATEHNLYVKGIHVHVFGGLCWCKNCGKKMTSTSSNKNRSWQYSKYLCSTRRRSLTKCRGRSTSDPVLGEFIFNYILNMLNAQKGFDSIHSPADLQDALLTGDAFSDIKSIDQEELNDLYNILSSSVVGNIYGRSFNVNKAKKNDEVQSSLTILKAEKKKLDRALDRLTNLYLYDDMAISEKDYMTKKTEIETKIAEIDEKIGIVNKNSVDNSITDEEFVDKASTFIITQKLTNRNYISYKRLATSVDPKILYMFTHDVIDYIDIYNGKVQRIVFRNGLSQTFIR

SEQ ID NO: 740 - protein, 578 aa, Unknown
  Description of Unknown: Integrase B741 sequence
  PTHR30461:SF3,IPR036162,PS51737,IPR011109,PTHR30461, PS00397,PF00239,G3DSA:1.10.10.2600,IPR006119,SSF53041, cd00338,SM00857,IPR025827,IPR038109,PS51736, IPR006118,PF13408,G3DSA:3.40.50.1390,PF07508,Coil
MGYVTKKAAQRFEEKKAAIYVRVSTQYQVDRASLPVQREELINYAKYALGISDYVIFEDAGYSAKNTDRPDYQQMMARMRTGEFSHLLVWKIDRISRNLLDFSVMYAELKELGVVFVSKNEQFDTSSAMGEAMLKIILIFAELERKTTSERVSAVFVSRANDGIWNGGKVPYGYSYDKESKTFSIAEDEAKIVRLIYSLYESEKSIVRVARIMNERGLKSRAGNDWSPTTVHTVLSSPFYSGTYRYNYRDESNTKRFREKGKDEWVLVENHHPAIVSPERQAAVGLILESKRYNKNATYQRKNVHVFAGLLTCGCCGATMAATTDKVRADGWRPSMYICSRRRKSEDCTNKYVSDVTLGPFVLNFFANLIKASNSFGRTTSIETLEKKLLRGEALSRVDHIERPGLEELYNHLRSGFDEKCFESPTIAATESSADLSERDLLLSEKRRLERALNRLKTIYLYGDDEMASKDFNIERERITKALSEVDSRINELDIANAFDLSLSDEAFMQKASQFILTQQLLDKRYVNYERFIRKIDPKIVKDFLNETVSNFCIKDGLTTSILLKNGIELRFSYKTAE

SEQ ID NO: 741 - protein, 578 aa, Unknown
  Description of Unknown: Integrase B742 sequence
  PTHR30461:SF3,IPR036162,PS51737,IPR011109,PTHR30461, PS00397,PF00239,G3DSA:1.10.10.2600,IPR006119,SSF53041, cd00338,SM00857,IPR025827,IPR038109,PS51736, IPR006118,PF13408,G3DSA:3.40.50.1390,PF07508,Coil
MGYVTKKAAQRFEEKKAAIYVRVSTQYQVDRASLPVQREELINYAKYALGISDYVIFEDAGYSAKNTDRPDYQQMMARMRTGEFSHLLVWKIDRISRNLLDFSVMYAELKELGVVFVSKNEQFDTSSAMGEAMLKIILIFAELERKTTSERVSAVFVSRANDGIWNGGKVPYGYSYDKESKTFSIAEDEAKIVRLIYSLYESEKSIVRVARIMNERGLKSRAGSDWSPTTVHTILSSPFYSGTYRYNYRDESNAKRFREKGKDEWVLVENHHPAIVSPERQAAVGVILESKHYNKNATYQRKNVHVFAGLLTCGCCGSTMAATTDKVRADGWRPSMYICSRRRKSEDCTNKYVSDVTLGPFVLNFFANLIKASNSFGRTTSIETLEKKLLRGEALSHVDHIERPGLEELYNHLRSGFDEKCFESPTIAATESSADLSERDLLLSEKRRLERALNRLKTIYLYGDDEMASKDFNIERERITKALSEVDSRINELDIANAFDLSLSDEAFMQKASQFILTQQLLDKRYVNYERFIRKIDPKIVKDFLNETVSNFCIKDGLTTSILLKNGIELRFSYKTAE

SEQ ID NO: 742 - protein, 578 aa, Unknown
  Description of Unknown: Integrase B743 sequence
  PTHR30461:SF3,IPR036162,PS51737,IPR011109,PTHR30461, PS00397,PF00239,G3DSA:1.10.10.2600,IPR006119,SSF53041, cd00338,SM00857,IPR025827,IPR038109,PS51736, IPR006118,PF13408,G3DSA:3.40.50.1390,PF07508,Coil
MGYVTKKAAQRFEEKKAAIYVRVSTQYQVDRASLPVQREELINYAKYALGISDYVIFEDAGYSAKNTDRPDYQQMMARMRTGEFSHLLVWKIDRISRNLLDFSIMYAELKELGVVFVSKNEQFDTSSAMGEAMLKIILIFAELERKTTSERVSAVFVSRANDGIWNGGKVPYGYSYDKEGKTFSIAEDEAKIVRLIYSLYESEKSIVRVARIMNERGLKSRAGNDWSPTTVHAILSSPFYSGTYRYNYRDESNTKRFHEKGKDEWVLVENHHPAIVSPERQAAVGVILESKRYNKNATYQRKNVHVFAGLLTCGCCGSTMAATTDKVRADGWRPSMYICSRRRKSEDCTNKYVSDVTLGPFVLNFFANLIKASNSFGRTTSIETLEKKLLRGEALARVDHIERPGLEELYNHLRSGFDEKRFESPTIAATESSADLSERDLLLSEKRRLERALNRLKTIYLYGDDEMASKDFNIERERITKALSEVDSRINELDIANAFDLSLSDEAFMQKASQFILTQQLLDKRYVNYERFIRKIDPKIVKDFLNETVSNFCIKDGLTTSILLKNGIELRFSYKTAE

SEQ ID NO: 743 - protein, 578 aa, Unknown
  Description of Unknown: Integrase B744 sequence
  PTHR30461:SF3,IPR036162,PS51737,IPR011109,PTHR30461, PS00397,PF00239,G3DSA:1.10.10.2600,IPR006119,SSF53041, cd00338,SM00857,IPR025827,IPR038109,PS51736, IPR006118,PF13408,G3DSA:3.40.50.1390,PF07508,Coil
MGYVTKKAAQRFEEKKAAIYVRVSTQYQVDRASLPVQREELINYAKYALGISDYVIFEDAGYSAKNTDRPDYQQMMARMRTGEFSHLLVWKIDRISRNLLDFSVMYAELKELGVVFVSKNEQFDTSSAMGEAMLKIILIFAELERKTTSERVSAVFVSRANDGIWNGGKVPYGYSYDKESKTFSIAEDEAKIVRLIYSLYESEKSIVRVARIMNERGLKSRAGNDWSPTTVHMILSSPFYSGTYRYNYRDESNTKRFREKGKDEWVLVENHHPVIVSPERQAAVGVILESKRYNKNATYQRKNVHVFAGLLTCGCCGSTMAATTDKVRADGWRPSMYICSRRRKSEDCTNKYVSDVSLGPFVLNFFANLIKASNSFGRTTSIETLEKKLLRGEALSRVDHIERPGLEELYNHLRSGFDEKRFEPPTIAATETSADLSERDLLLSEKRRLERALNRLKTIYLYGDDEIASKDFNIERERITKALSEVDSRINELDIANAFDLSLSDEAFMQKASQFILTQQLLDKRYVNYERFIRKIDPKIVKDFLNETVSNFCIKDGLTTSILLKNGIELRFSYKTAE

SEQ ID NO: 744 - protein, 578 aa, Unknown
  Description of Unknown: Integrase B745 sequence
  PTHR30461:SF3,SM00857,G3DSA:1.10.10.2600,IPR036162,PF13408, PS51737,G3DSA:3.40.50.1390,IPR025827,IPR006119,IPR038109, PF07508,IPR011109,SSF53041,PF00239,PTHR30461, PS51736,Coil,cd00338
MKKQPTGGKRLVAYYRYSGGSHQTEQSIEGQRRDCETYARIHGMVILHEYIDRHISGKTDNRPEFQQMIADSGKGMFDYVICWKTDRIARSRYDSIVYKKKLRDNGVELLYAAEANVEGSGGIIVEGLMEALAEYYSAELAEKVRRGMRESALKGKAIGSSRPLGLTVDKDKKYIIDPAGAAAVRYIFEQYAAGAASSAIVAHLNEQGLCTSRGNPFNKSSVVRIIQNEVYRGVYVSPKFDVRIEGAVPAIIDDDLWERAQKMFIRNRQSRSPRNDRADYILSGKLFCGECGTAMKGVSGHSSNGEVYFYYNCPCKDCHRRNIPKDELEGLVIRTVCNDVLQPDVMDRIADSVIEAQIAELNQPNPEKEALQHELADVQRKAKNLLSALENGTAGAMLTNRLAELEQQADTLSYQLSSLESEPKFPVFSKEEVLYLLEQFLIAPSEKTKAYRRRLIDTFVSKIEVSNAELTIYFNIAEEDCGKIKKAPQSNQPEGCSTEKQMVHWIHLLTAIKAYPSITKQRIPVLLRGRLNSLIILSWLYLGINRNPRKCIHPCFRKKCDSARTFFAHCPVSHENSR

SEQ ID NO: 745 - protein, 578 aa, Unknown
  Description of Unknown: Integrase B746 sequence
  PTHR30461:SF3,IPR036162,PS51737,IPR011109,PTHR30461, PS00397,PF00239,G3DSA:1.10.10.2600,IPR006119,SSF53041, cd00338,SM00857,IPR025827,IPR038109,PS51736, IPR006118,PF13408,G3DSA:3.40.50.1390,PF07508,Coil
MGYVTKKAAQRFEEKKAAIYVRVSTQYQVDRASLPVQREELINYAKYALGISDYVIFEDAGYSAKNTDRPDYQQMMARMRTGEFSHLLVWKIDRISRNLLDFSVMYAELKELGVVFVSKNEQFDTSSAMGEAMLKIILIFAELERKTTSERVSAVFVSRANDGIWNGGKVPYGYSYDKESKTFSIAEDEAKIVRLIYSLYESEKSIVRVARIMNERGLKSRAGNDWSPTTVHMILSSPFYSGTYRYNYRDESNTKRFREKGKDEWVLVENHHPVIVSPERQAAVGVILESKRYNKNATYQRKNVHVFAGLLTCGCCGSTMAATTDKVRADGWRPSMYICSRRRKSEDCTNKYVSDVSLGPFVLNFFANLIKASNSFGRTTSIETLEKKLLRGEALSHVDHIERPGLEELYNHLRSGFDEKRFEPPTIAATEASADLSERDLLLSEKRRLERALNRLKTIYLYGDDEMASKDFNIERERIIKALSEVDSRINELDIANAFDLSLSDEAFMQKASQFILTQQLLDKRYVNYERFIRKIDPKIVKDFLNETVSNFCIKDGLTTSILLKNGIELRFSYKTAE

SEQ ID NO: 746 - protein, 578 aa, Unknown
  Description of Unknown: Integrase B747 sequence
  PTHR30461:SF3,IPR036162,PS51737,IPR011109,PTHR30461, PS00397,PF00239,G3DSA:1.10.10.2600,IPR006119,SSF53041, cd00338,SM00857,IPR025827,IPR038109,PS51736, IPR006118,PF13408,G3DSA:3.40.50.1390,PF07508,Coil
MGYVTRKAAQRFEEKKAAIYVRVSTQYQVDRASLPVQREELINYAKYALGISDYVIFEDAGYSAKNTDRPDYQQMMARMRTGEFSHLLVWKIDRISRNLLDFSIMYAELKELGVVFVSKNEQFDTSSAMGEAMLKIILIFAELERKTTSERVSAVFVSRANDGIWNGGKVPYGYSYDKEGKTFSIAEDEAKIVRLIYSLYESEKSIVRVARIMNERGLKSRAGNDWSPTTVHTILSSPFYSGTYRYNYRDESNTKRFHEKGKDEWVLVENHHPAIVSPERQAAVGVILESKRYNKNATYQRKNVHVFAGLLTCGCCGSTMAATTDKVRADGWRPSMYICSRRRKSEDCTNKYVSDVTLGPFVLNFFANLIKASNSFGRTTSIETLEKKLLRGEALARVDHIERPGLEELYNHLRSGFDEKRFESPTIAATESSADLSERDLLLSEKRRLERALNRLKTIYLYGDDEMASKDFNIERERITKALSEVDSRINELDIANAFDLSLSDEAFMQKASQFILTQQLLDKRYVNYERFIRKIDPKIVKDFLNETVSNFCIKDGLTTSILLKNGIELRFSYKTAE

SEQ ID NO: 747 - protein, 578 aa, Unknown
  Description of Unknown: Integrase B748 sequence
  PTHR30461:SF3,IPR036162,PS51737,IPR011109,PTHR30461, PS00397,PF00239,G3DSA:1.10.10.2600,IPR006119,SSF53041, cd00338,SM00857,IPR025827,IPR038109,PS51736, IPR006118,PF13408,G3DSA:3.40.50.1390,PF07508,Coil
MGYVTKKAAQRFEEKKAAIYVRVSTQYQVDRASLPVQREELINYAKYALGISDYVIFEDAGYSAKNTDRPDYQQMMSRMRTGEFSHLLVWKIDRISRNLLDFSVMYAELKELGVVFVSKNEQFDTSSAMGEAMLKIILIFAELERKTTSERVSAVFVSRANDGIWNGGKVPYGYSYDKESKTFSIAEDEAKIVRLIYSLYESEKSIVRVARIMNERGLKSRAGNDWSPTTVHTILSSPFYSGTYRYNYRDESNTKRFREKGKDEWVLVENHHPAIVSPERQAAVGGILESKRYNKNATYQRKNVHVFAGLLTCGCCGATMAATTDKVRADGWRPSMYICSRRRKSEDCTNKYVSDVTLGPFVLNFFANLIKASNSFGRTTSIETLEKKLLRGEALSCVDHIERPGLEELYNHLRSGFDEKCFESPTIAATESSADLSERDLLLSEKRRLERALNRLKTIYLYGDDEMASKDFNIERERITKALSEVDSRINELDIANAFDLSLSDEAFMQKASQFILTQQLLDKRYVNYERFIRKIDPKIVKDFLNETVSNFCIKDGLTTSILLKNGIELRFSYKTAE

SEQ ID NO: 748 - protein, 578 aa, Unknown
  Description of Unknown: Integrase B749 sequence
  PTHR30461:SF3,IPR036162,PS51737,IPR011109,PTHR30461, PS00397,PF00239,G3DSA:1.10.10.2600,IPR006119,SSF53041, cd00338,SM00857,IPR025827,IPR038109,PS51736, IPR006118,PF13408,G3DSA:3.40.50.1390,PF07508,Coil
MGYVTKKAAQRFEEKKAAIYVRVSTQYQVDRASLPVQREELINYAKYALGISDYVIFEDAGYSAKNTDRPDYQQMMARMRTGEFSHLLVWKIDRISRNLLDFSVMYAELKELGVVFVSKNEQFDTSSAMGEAMLKIILIFAELERKTTSERVSAVFVSRANDGIWNGGKVPYGYSYDKESKTFSIAEDEAKIVRLIYSLYESEKSIVRVARIMNERGLKSRAGSDWSPTTVHTILSSPFYSGTYRYNYRDESNAKRFREKGKDEWVLVENHHPAIVSPERQAAVGVILESKHYNKNATYQRKNVHVFAGLLTCGCCGSTMAATTDKVRADGWRPSMYICSRRRKSEDCTNKYVSDVTLGPFVLNFFANLIKASNSFGRTTSIETLEKKLLRGEALSHVDHIERPGLKELYNHLRSGFDEKCFESPTIAATESSADLSERDLLLSEKRRLERALNRLKTIYLYGDDEMASKDFNIERERITKALSEVDSRINELDIANAFDLSLSDEAFMQKASQFILTQQLLDKRYVNYERFIRKIDPKIVKDFLNETVSNFCIKDGLTTSILLKNGIELRFSYKTAE

SEQ ID NO: 749 - protein, 578 aa, Unknown
  Description of Unknown: Integrase B750 sequence
  PTHR30461:SF3,IPR036162,PS51737,IPR011109,PTHR30461, PS00397,PF00239,G3DSA:1.10.10.2600,IPR006119,SSF53041, cd00338,SM00857,IPR025827,IPR038109,PS51736, IPR006118,PF13408,G3DSA:3.40.50.1390,PF07508,Coil
MGYVVKKAAQRFEEKKAAIYVRVSTQYQVDRASLPVQREELINYAKYALGISDYVIFEDAGYSAKNTDRPDYQQMMARMRTGEFSHLLVWKIDRISRNLLDFSVMYAELKELGVVFVSKNEQFDTSSAMGEAMLKIILIFAELERKTTSERVSAVFVSRANDGIWNGGKVPYGYSYDKESKTFSIAEDEAKIVCLIYSLYESEKSIVRVARIMNERGLKSRAGSDWSPTTIHTILSSPFYSGTYRYNYRDESNTKRFREKGKDEWVLVENHHPAIVSPERQAAVGVILESKRYNKNATYQRKNVHVFAGLLTCGCCGSTMAATTDKVRADGWRPSMYICSRRRKSEDCTNKYVSDVTLGPFVLNFFANLIKASNSFGRTTSIETLEKKLLRGEALSRVDHIERPGLEELYNHLHSGFDEKRFESPTIAATESSADLSERDLLLSEKRRLERALNRLKTIYLYGDDGMASKDFNIERERITKALSEVDSRINELDIANAFDLSLSDEAFMQKASQFILTQQLLDKRYVNYERFIRKIDPKIVKDFLNETVSNFCIKDGLTTSILLKNGIELRFSYKTAE

SEQ ID NO: 750 - protein, 578 aa, Unknown
  Description of Unknown: Integrase B751 sequence
  PTHR30461:SF3,IPR036162,PS51737,IPR011109,PTHR30461, PS00397,PF00239,G3DSA:1.10.10.2600,IPR006119,SSF53041, cd00338,SM00857,IPR025827,IPR038109,PS51736, IPR006118,PF13408,G3DSA:3.40.50.1390,PF07508,Coil
MGYVVKKAAQRFEEKKAAIYVRVSTQYQVDRASLPVQREELINYAKYALGISDYVIFEDAGYSAKNTDRPDYQQMMARMRTGEFSHLLVWKIDRISRNLLDFSVMYAELKELGVVFVSKNEQFDTSSAMGEAMLKIILIFAELERKTTSERVSAVFVSRANDGIWNGGKVPYGYSYDKEGKTFSIAEDEAKIVRLIYSLYESEKSIVRVARIMNERGLKSRAGNDWSPTTVHTILSSPFYSGTYRYNYRDESNTKRFREKGKDEWVLVENHHPAIVSPERQAAVGVILESKRYNKNATYQRKNVHVFAGLLTCGCCGSTMAATTDKVRADGWRPSMYICSRRRKSEDCTNKYVSDVTLGPFVLNFFANLIKASNSFGRTTSIETLEKKLLRGEALSRVDHIERPGLEELYNHLRSGFDEKRFESPTIAATESSADLSERDLLLSEKRRLERALNRLKTIYLYGDDEMASKDFNIERERITKALSEVDSRIDELDIANAFDLSLSDEAFMQKASQFILTQQLLDKRSVNYERFIRKIDPKIVKDFLNETVSNFCIKDGLTTSILLKNGIELRFSYKTAE

SEQ ID NO: 751 - protein, 578 aa, Unknown
  Description of Unknown: Integrase B752 sequence
  PTHR30461:SF3,IPR036162,PS51737,IPR011109,PTHR30461, PS00397,PF00239,G3DSA:1.10.10.2600,IPR006119,SSF53041, cd00338,SM00857,IPR025827,IPR038109,PS51736, IPR006118,PF13408,G3DSA:3.40.50.1390,PF07508,Coil
MGYVTKKAAQRFEEKKAAIYVRVSTQYQVDRASLPVQREELINYAKYALGISDYVIFEDAGYSAKNTDRPDYQQMMARMRTGEFSHLLVWKIDRISRNLLDFSIMYAELKELGVVFVSKNEQFDTSSAMGEAMLKIILIFAELERKTTSERVSAVFVSRANDGIWNGGKVPYGYSYDKEGKTFSIAEDEAKIVRLIYSLYESEKSIVRVARIMNERGLKSRAGNDWSPTTVHTILSSPFYSGTYRYNYRDESNTKRFHEKGKDEWVLVENHHPAIVSPERQAAVGVILESKRYNKNATYQRKNVHVFAGLLTCGCCGSTMAATTDKVRADGWRPSMYICSRRRKSEDCTNKYVSDVTLGPFVLNFFANLIKASNSFGRTTSIETLEKKLLRGEALARVDHIERPGLEELYNHLRSGFDEKRFESPTIAATESSADLSERDLLLSEKRRLERALNRLKTIYLYGDDEMASKDFNIERERITKALSEVDSRINELDIANAFDLSLSDEAFMQKASQFILTQQLLDKRYVNYERFIRKIDPKIVKDFLNETVSNFCIKDGLTTSILLKNGIELRFSYKTAE

SEQ ID NO: 752 - protein, 578 aa, Unknown
  Description of Unknown: Integrase B753 sequence
  PTHR30461:SF3,IPR036162,PS51737,IPR011109,PTHR30461, PS00397,PF00239,G3DSA:1.10.10.2600,IPR006119,SSF53041, cd00338,SM00857,IPR025827,IPR038109,PS51736, IPR006118,PF13408,G3DSA:3.40.50.1390,PF07508,Coil
MGYVTKKAAQRFEEKKAAIYVRVSTQYQVDRASLPVQREELINYAKYALGISDYVIFEDAGYSAKNTDRPDYQQMMARMRTGEFSHLLVWKIDRISRNLLDFSVMYAELKELGVVFVSKNEQFDTSSAMGEAMLKIILIFAELERKTTSERVSAVFVSRANDGIWNGGKVPYGYSYDKEGKTFSIAEDEAKIVRLIYSLYESEKSIVRVARIMNERGLKSRAGNDWSPTTVHTILSSPFYSGTYRYNYRDESNTKRFHEKGKDEWVLVENHHPAIVSPERQAAVGVILESKRYNKNATYQRKNVHVFAGLLTCGCCGSTMAATTDKVRADGWRPSMYICSRRRKSEDCTNKYVSDVTLGPFVLNFFANLIKASNSFGRTTSIETLEKKLLRGEALSRVDHIERPGLEELYNHLRSGFDEKRFESPTIAATESSADLSERDLLLSEKRRLERALNRLKTIYLYGDDEMASKDFNIERERITKALSEVDSRINELDIANAFDLSLSDEAFMQKASQFILTQQLLDKRYVNYERFIRKIDPKIVKDFLNETVSNFCIKDGLTTSILLKNGIELRFSYKTAE

SEQ ID NO: 753 - protein, 578 aa, Unknown
  Description of Unknown: Integrase B754 sequence
  PTHR30461:SF3,IPR036162,PS51737,IPR011109,PTHR30461, PS00397,PF00239,G3DSA:1.10.10.2600,IPR006119,SSF53041, SM00857,IPR025827,IPR038109,PS51736,cd03768, IPR006118,PF13408,G3DSA:3.40.50.1390,PF07508,Coil
MNTLSALNITPSPPRMCRVAIYIRVSTLQQVDKDSLPMQRKDLIAYSKLILNTDDYAIFEDAGYSGKNTIRPRYQDMMEQIRTGAFTHLLVWKIDRISRNLLDFAQMYQELKELNVTFVSKNEQFNTSTAMGEAMLKIILVFAELERNMTSERVTATMISRANTGKWNGGRVPYGYKYDPEEEDFFIIASESNVVKLIHDKYEELQSLVYLARYMNEHGYRTRSGNEWSPPSLAIILKSWWYCGCYEYNKRKAGNRQKLKDESEWIMIEDHHIAIISYDQKERVLSILKGNKRFATDHNLYVKGIHVHVFGGLCWCKNCGKKMTSTSSNKNRSWQYSKYLCSTRRRSLTKCRGRSTSDPVLGEFIFNYILNMLNAQKGFDSIHSPADLQAALLTGDAFSDIKSIDREELNDLYNTLSSNVSGNIYGRSFNVNKAKKNDEVQSSLTILKSEKKKLERALDRLTNLYLYDDMAISEKDYMTKKTEIETKIAEIDEKIGIVNKNSIDDSITDEEFVDKASTFIITQKLTDRNYISYKRLATTVDPKILYMFTHDVIDYIDIYNGKVQRIVFRNGLSQTFVR

SEQ ID NO: 754 - protein, 578 aa, Unknown
  Description of Unknown: Integrase B755 sequence
  PTHR30461:SF3,IPR036162,PS51737,IPR011109,PTHR30461, PS00397,PF00239,G3DSA:1.10.10.2600,IPR006119,SSF53041, cd00338,SM00857,IPR025827,IPR038109,PS51736, IPR006118,PF13408,G3DSA:3.40.50.1390,PF07508,Coil
MGYVTKKAAQRFEEKKAAIYVRVSTQYQVDRASLPVQREELINYAKYALGISDYVIFEDAGYSAKNTDRPDYQQMMARMRTGEFSHLLVWKIDRISRNLLDFSVMYAELKELGVVFVSKNEQFDTSSAMGEAMLKIILIFAELERKTTSERVSAVFVSRANDGIWNGGKVPYGYSYDKESKTFSIAEDEAKIVRLIYSLYESEKSIVRVARIMNERGLKSRAGNDWSPTTVHTILSSPFYSGTYRYNYRDESNTKRFREKGKDEWVLVENHHPAIVSPERQAAVGVILESKRYNKNATYQRKNVHVFAGLLTCGYCGSTMAATTDKVRADGWRPSMYICSRRRKSDDCANKYVSDVTLGPFVLNFFSNLIKASNSFGRTTSIETLEKKLLRGEALSHVDHIERPGLEELYNHLRSGFDEKRFESPTIAATDSSADLSERDLLLSEKRRLERALNRLKTIYLYGDDEMASKDFNVERERITKALVEVDSRINELDIANAFDLSLSDEAFMQKASQFILTQQLLDKRYVNYERFIRKIDPKIVKDFLNETVSNFCIKDGLTTSILLKNGIELRFSYKTAE

SEQ ID NO: 755 - protein, 578 aa, Unknown
  Description of Unknown: Integrase B756 sequence
  PTHR30461:SF3,IPR036162,PS51737,IPR011109,PTHR30461, PS00397,PF00239,G3DSA:1.10.10.2600,IPR006119,SSF53041, cd00338,SM00857,IPR025827,IPR038109,PS51736, IPR006118,PF13408,G3DSA:3.40.50.1390,PF07508,Coil
MGYVVKKAAQRFEEKKAAIYVRVSTQYQVDRASLPVQREELINYAKYALGISDYVIFEDAGYSAKNTDRPDYQQMMARMRTGEFSHLLVWKIDRISRNLLDFSVMYAELKELGVVFVSKNEQFDTSSAMGEAMLKIILIFAELERKTTSERVSAVFVSRANDGIWNGGKVPYGYSYDKESKTFSIAEDEAKIVRLIYSLYESEKSIVRVARIMNERGLKSRAGSDWSPTTVHTILSSPFYSGTYRYNYRDESNTKRFREKGKDEWVLVENHHPAIVSPERQAAVGVILESKRYNKNATYQRKNVHVFAGLLTCGCCGSTMAATTDKVRADGWRPSMYICSRRRKSEDCTNKYVSDVALGPFVLNFFANLIKASNSFGRTTSIETLEKKLLRGEALSRVDHIERPGLEELYNHLRSGFDEKRFESPTIAATESSADLSERDLLLSEKRRLERALNRLKTIYLYGDDEMASKDFNIERERITKALSEVDSRINELDIANAFDLSLSDEAFMQKASQFILTQQLLDKRYVNYERFIRKIDPKIVKDFLNETVSNFCIKDGLTTSILLKNGIELRFSYKTAE

SEQ ID NO: 756 - protein, 578 aa, Unknown
  Description of Unknown: Integrase B757 sequence
  PTHR30461:SF3,cd00338,SM00857,G3DSA:1.10.10.2600,IPR036162, PF13408,PS51737,G3DSA:3.40.50.1390,IPR025827,IPR006119, IPR038109,PF07508,IPR011109,SSF53041,PTHR30461, PS51736,Coil,PF00239
MKKFPIDLSCLTEEEISQFQEDPYTLYNGDQDVALYLRYSSTGQSDQSIEGQLRDCRDFCKANHYRIVAIYVDRATTAHKDVEKRVHLMEMVADSAKQNWEYVIVWKLDRFARNRNDSAIMKMRLRKNGVKVLSATEHLTDSPESIILESVLEGMAEFFSAELSQKVTRGMRESALKCHSVGGHIPLGYKVENHKLVVDPDTAHIVQEAFSLYANGESVADICRKFNSAGYKTAKNTEFNRSSFKAMFRNTRYIGTYTYKDIVIENGIPAIIDKELFETVQQRLSKTTTAPARGKAKVDYLLSGKLFCGHCGASMNGESGAGRHGKVYHYYSCYTKKRKLGCDKRPLKKDYIEGIVARDALNLLTDQLIDEIADMAIRQSEQDLINDTHIPQLTAQLSEVEKSIMNITAAIEKGIASETLMNRLVQLEHEKKTLNKEIKAEEKFVYRIDRDQIVFWLSQFKYGNIEDENFRRRLIDLLVNSVTVWDEPDGYKITTAYNLTSCKTKTFRVDKNPAAEEATGFDFGESECTTANLLISMGSRFLFYLRISFIHLFSNVFLTSFIQAFCQLICKALLSGSV

SEQ ID NO: 757 - protein, 578 aa, Unknown
  Description of Unknown: Integrase B758 sequence
  PTHR30461:SF3,IPR036162,PS51737,IPR011109,PTHR30461, PS00397,PF00239,G3DSA:1.10.10.2600,IPR006119,SSF53041, cd00338,SM00857,IPR025827,IPR038109,PS51736, IPR006118,PF13408,G3DSA:3.40.50.1390,PF07508,Coil
MGYVVKKAAQRFEEKKAAIYVRVSTQYQVDRASLPVQREELINYAKYALGISDYVIFEDAGYSAKNTDRPDYQQMMARMRTGEFSHLLVWKIDRISRNLLDFSVMYAELKELGVVFVSKNEQFDTSSAMGEAMLKIILIFAELERKTTSERVSAVFVSRANDGIWNGGKVPYGYSYDKESKAFSIAEDEAKIVRLIYSLYESEKSIVRVARIMNERGLKSRAGSDWSPTTVHTILSSPFYSGTYRYNYRDESNTKRFREKGKDEWVLVENHHPAIVSPERQAAVGVILESKRYNKNATYQRKNVHVFAGLLTCGCCGSTMAATTDKVRADGWRPSMYICSRRRKSEDCTNKYVSDVTLGPFVLNFFANLIKASNSFGRTTSIETLEKKLLRGEALSRVDHIERPGLEELYNHLRSGFDEKRFESPTIAATESSADLSERDLLLSEKRRLERALNRLKTIYLYGDDEMASKDFNIERERITKALSEVDSRINELDIANAFDLSLSDEAFMQKASQFILTQQLLDKRYVNYERFIRKIDPKIVKDFLNETVSNFCIKDGLTTSILLKNGIELRFSYKTAE

SEQ ID NO: 758 - protein, 578 aa, Unknown
  Description of Unknown: Integrase B759 sequence
  PTHR30461:SF3,IPR036162,PS51737,IPR011109,PTHR30461, PS00397,PF00239,G3DSA:1.10.10.2600,IPR006119,SSF53041, cd00338,SM00857,IPR025827,IPR038109,PS51736, IPR006118,PF13408,G3DSA:3.40.50.1390,PF07508,Coil
MGYVTKKAAQRFEEKKAAIYVRVSTQYQVDRASLPVQREELINYAKYALGISDYVIFEDAGYSAKNTDRPDYQQMMARMRTGEFSHLLVWKIDRISRNLLDFSVMYAELKELGVVFVSKNEQFDTSSAMGEAMLKIILIFAELERKTTSERVSAVFVSRANDGIWNGGKVPYGYSYDKESKTFSIAEDEAKIVRLIYSLYESEKSIVRVARIMNERGLKSRAGSDWSPTTVHTILSSPFYSGTYRYNYRDESNTKRFREKGKDEWVLVENHHPAIVSPERQAAVGVILESKRYNKNATYQRKNVHVFAGLLTCGCCGSTMAATTDKVRADGWRPSMYICSRRRKSEDCTNKYVSDVTLGPFVLNFFANLIKASNSFGRTTSIETLEKKLLRGEALARVDHIERPGLEELYNHLRSGFDEKRFESPTIAATESSADLSERDLLLSEKRRLERALNRLKTIYLYGDDEMASKDFNIERERITKVLSEVDSRINELDIANAFDLSLSDEAFMQKASQFILTQQLLDKRYVNYERFIRKIDPKIVKDFLNETVSNFCIKDGLTTSILLKNGIELRFSYKTAE

SEQ ID NO: 759 - protein, 578 aa, Unknown
  Description of Unknown: Integrase B760 sequence
  PTHR30461:SF3,IPR036162,PS51737,IPR011109,PTHR30461, PS00397,PF00239,G3DSA:1.10.10.2600,IPR006119,SSF53041, cd00338,SM00857,IPR025827,IPR038109,PS51736, IPR006118,PF13408,G3DSA:3.40.50.1390,PF07508,Coil
MGYVTKKAAQRFEEKKAAIYVRVSTQYQVDRASLPVQREELINYAKYALGISDYVIFEDAGYSAKNTDRPDYQQMMARMRTGEFSHLLVWKIDRISRNLLDFSVMYAELKELGVVFVSKNEQFDTSSAMGEAMLKIILIFAELERKTTSERVSAVFVSRANDGIWNGGKVPYGYSYDKESKTFSIAEDEAKIVRLIYSLYESEKSIVRVARIMNERGLKSRAGNDWSPTTVHMILSSPFYSGTYRYNYRDESNTKRFREKGKDEWVLVENHHPAIVSPERQAAVGVILESKHYNKNATYQRKNVHVFAGLLTCGCCGSTMAATTDKVRADGWRPSMYICSRRRKSDDCTNKYISDVSLGPFVLNFFANLIKASNSFGRTTSIETLEKKLLRGEALSRVDHIERPGLEELYNHLRSGFDEKRFEPPTIAATETSADLSERDLLLSEKRRLERALNRLKTIYLYGDDEMASKDFNIERERITKALSEVDSRINELDIANAFDLSLSDEAFMQKASQFILTQQLLDKRYVNYERFIRKIDPKIVKDFLNETVSNFCIKDGLTTSILLKNGIELRFSYKTAE

SEQ ID NO: 760 - protein, 578 aa, Unknown
  Description of Unknown: Integrase B761 sequence
  PTHR30461:SF3,IPR036162,PS51737,IPR011109,PTHR30461, PS00397,PF00239,G3DSA:1.10.10.2600,IPR006119,SSF53041, cd00338,SM00857,IPR025827,IPR038109,PS51736, IPR006118,PF13408,G3DSA:3.40.50.1390,PF07508,Coil
MGYVVKKAAQRFEEKKAAIYVRVSTQYQVDRASLPVQREELINYAKYALGISDYVIFEDAGYSAKNTDRPDYQQMMARMRTGEFSHLLVWKIDRISRNLLDFSVMYAELKELGVVFVSKNEQFDTSSAMGEAMLKIILIFAELERKTTSERVSAVFVSRANDGIWNGGKVPYGYSYDKESKTFSIAEDEAKIVRLIYSLYESEKSIVRVARIMNERGLKSRAGSDWSPTTVHTILSSPFYSGTYRYNYRDESNTKRFREKGKDEWVLVENHHPAIVSPERQAAVGVILESKRYNKNATYQRKNVHVFAGLLTCGCCGSTMAATTDKVRADGWRPSMYICSRRRKSEDCTNKYVSDVTLGPFVLNFFANLIKASNSFGRTTSIETLEKKLLRGEALSHVDHIERPGLEELYNHLRSGFDEKCFESPTIAATESSADLSERDLLLSEKRRLERALNRLKTIYLYGDDEMASKDFNIERERITKALSEVDSRINELDIANTFDLSLSDEAFMQKASQFILTQQLLDKRYVNYERFIRKIDPKIVKDFLNETVSNFCIKDGLTTSILLKNGIELRFSYKTAE

SEQ ID NO: 761 - protein, 578 aa, Unknown
  Description of Unknown: Integrase B762 sequence
  PTHR30461:SF3,IPR036162,PS51737,IPR011109,PTHR30461, PS00397,PF00239,G3DSA:1.10.10.2600,IPR006119,SSF53041, cd00338,SM00857,IPR025827,IPR038109,PS51736, IPR006118,PF13408,G3DSA:3.40.50.1390,PF07508,Coil
MGYVVKKAAQRFEEKKAAIYVRVSTQYQVDRASLPVQREELINYAKYALGISDYVIFEDAGYSAKNTDRPDYQQMMARMRTGEFSHLLVWKIDRISRNLLDFSVMYAELKELGVVFVSKNEQFDTSSAMGEAMLKIILIFAELERKTTSERVSAVFVSRANDGIWNGGKVPYGYSYDKESKTFSIAEDEAKIVRLIYSLYESEKSIVRVARIMNERGLKSRAGNDWSPTTVHTILSSPFYSGTYRYNYRDESNTKRFREKGKDEWVLVENHHPAIVSPERQAAVGVILESKRYNKNATYQRKNVHVFAGLLTCGCCGSTMAATTDKVRADGWRPSMYICSRRRKSEDCTNKYVSDVSLGPFVLNFFANLIKASNSFGRTTSIETLEKKLLRGEALSRVDHIERPGLEELYNHLRSGFDEKRFESPTIAATESSADLSERDLLLSEKRRLERALNRLKTIYLYGDDEMASKDFNIERERITKALSEVDSRINELDIANAFDLSLSDEAFMQKASQFILTQQLLDKRYVNYERFIRKIDPKIVKDFLNETVSNFCIKDGLTTSILLKNGIELRFSYKTAE

SEQ ID NO: 762 - protein, 578 aa, Unknown
  Description of Unknown: Integrase B763 sequence
  PTHR30461:SF3,IPR036162,PS51737,IPR011109,PTHR30461, PS00397,PF00239,G3DSA:1.10.10.2600,IPR006119,SSF53041, cd00338,SM00857,IPR025827,IPR038109,PS51736, IPR006118,PF13408,G3DSA:3.40.50.1390,PF07508,Coil
MGYVVKKAAQRFEEKKAAIYVRVSTQYQVDRASLPVQREELINYAKYALGISDYVIFEDAGYSAKNTDRPDYQQMMARMRTGEFSHLLVWKIDRISRNLLDFSVMYAELKELGVVFVSKNEQFDTSSAMGEAMLKIILIFAELERKTTSERVSAVFVSRANDGIWNGGKVPYGYSYDKESKTFSIAEDEAKIVRLIYSLYESEKSIVRVARIMNERGLKSRAGSDWSPTTVHTILSSPFYSGTYRYNYRDESNAKRFREKGKDEWVLVENHHPAIVSPERQAAVGVILESKRYNKNATYQRKNVHVFAGLLTCGCCGSTMAATTDKVRADGWRPSMYICSRRRKSEDCTNKYVSDVTLGPFVLNFFANLIKASNSFGRTTSIETLEKKLLRGEALSRVDHIERPGLEELYNHLRSGFDEKRFESPTIAATESSADLSERDLLLSEKRRLERALNRLKTIYLYGDDEMASKDFNIERERITKALSEVDSRINELDIANAFELSLSDEAFMQKASQFILTQQLLDKRYVNYERFIRKIDPKIVKDFLNETVSNFCIKDGLTTSILLKNGIELRFSYKTAE

SEQ ID NO: 763 - protein, 578 aa, Unknown
  Description of Unknown: Integrase B764 sequence
  PTHR30461:SF3,IPR036162,PS51737,IPR011109,PTHR30461, PS00397,PF00239,G3DSA:1.10.10.2600,IPR006119,SSF53041, cd00338,SM00857,IPR025827,IPR038109,PS51736, IPR006118,PF13408,G3DSA:3.40.50.1390,PF07508,Coil
MGYVVKKAAQRFEEKKAAIYVRVSTQYQVDRASLPVQREELINYAKYALGISDYVIFEDAGYSAKNTDRPDYQQMMARMRTGEFSHLLVWKIDRISRNLLDFSVMYAELKELGVVFVSKNEQFDTSSAMGEAMLKIILIFAELERKTTSERVSAVFVSRANDGIWNGGKVPYGYSYDKEGKTFSIAEDEAKIVRLIYSLYESEKSIVRVARIMNERGLKSRAGNDWSPTTVHTILSSPFYSGTYRYNYRDESNTKRFREKGKDEWVLVENHHPAIVSPERQAAVGVILESKHYNKNATYQRKNVHVFAGLLTCGCCGSTMAATTDKVRADGWRPSMYICSRRRKSEDCTNKYVSDVTLGPFVLNFFANLIKASNSFGRTTSIETLEKKLLRGEALSHVDHIERPGLEELYNHLRSGFDEKCFESPTIAATESSADLSERDLLLSEKRRLERALNRLKTIYLYGDDEMASKDFNIERERITKALSEVDSRINELDIANAFDLSLSDEAFMQKASQFILTQQLLDKRYVNYERFIRKIDPKIVKDFLNETVSNFCIKDGLTTSILLKNGIELRFSYKTAE

SEQ ID NO: 764 - protein, 578 aa, Unknown
  Description of Unknown: Integrase B765 sequence
  PTHR30461:SF3,IPR036162,PS51737,IPR011109,PTHR30461, PS00397,PF00239,G3DSA:1.10.10.2600,IPR006119,SSF53041, cd00338,SM00857,IPR025827,IPR038109,PS51736, IPR006118,PF13408,G3DSA:3.40.50.1390,PF07508,Coil
MGYVVKKAAQRFEEKKAAIYVRVSTQYQVDRASLPVQREELINYAKYALGISDYVIFEDAGYSAKNTDRPDYQQMMARMRTGEFSHLLVWKIDRISRNLLDFSVMYAELKELGVVFVSKNEQFDTSSAMGEAMLKIILIFAELERKTTSERVSAVFVSRANDGIWNGGKVPYGYSYDKESKTFSIAEDEAKIVRLIYSLYESEKSIVRVARIMNERGLKSRAGSDWSPTTVHTILSSPFYSGTYRYNYRDESNAKRFREKGKDEWVLVENHHPAIVSPERQAAVGVILESKRYNKNATYQRKNVHVFAGLLTCGCCGSTMAATTDKVRADGWRPSMYICSRRRKSEDCTNKYVSDVSLGPFVLNFFANLIKASNSFGRTTSIETLEKKLLRGEALSRVDHIERPGLEELYNHLRSGFDEKRFESPTIAATESSADLSERDLLLSEKRRLERALNRLKTIYLYGDDEMASKDFNIERERITKALSEVDSRIDELNIANAFDLSLSDEAFMQKASQFILTQQLLDKRSVNYERFIRKIDPKIVKDFLNETVSNFCIKDGLTTSILLKNGIELRFSYKTAE

SEQ ID NO: 765 - protein, 578 aa, Unknown
  Description of Unknown: Integrase B766 sequence
  PTHR30461:SF3,IPR036162,PS51737,IPR011109,PTHR30461, PS00397,PF00239,G3DSA:1.10.10.2600,IPR006119,SSF53041, cd00338,SM00857,IPR025827,IPR038109,PS51736, IPR006118,PF13408,G3DSA:3.40.50.1390,PF07508,Coil
MGYVTKKAAQRFEEKKAAIYVRVSTQYQVDRASLPVQREELINYAKYALGISDYVIFEDAGYSAKNTDRPDYQQMMARMRTGEFSHLLVWKIDRISRNLLDFSVMYAELKELGVVFVSKNEQFDTSSAMGEAMLKIILIFAELERKTTSERVSAVFVSRANDGIWNGGKVPYGYSYDKESKTFSIAEDEAKIVRLIYSLYESEKSIVRVARIMNERGLKSRAGSDWSPTTVHTILSSPFYSGTYRYNYRDESNTKRFREKGKDEWVLVENHHPAIVSPERQAAVGVILESKRYNKNATYQRKNVHVFAGLLTCGCCGSTMAATTDKVRADGWRPSMYICSRRRKSEDCTNKYVSDVTLGPFVLNFFANLIKASNSFGRTTSIETLEKKLLRGEALARVDHIERPGLEELYNHLRSGFDEKRFESPTIAATESSADLSERDLLLSEKRRLERALNRLKTIYLYGDDEMASKDFNIERERITKALSEVDSRINELDIANAFDLSLSDEAFMQKASQFILTQQLLDKRYVNYERFIRKIDPKIVKDFLNETVSNFCIKDGLTTSILLKNGIELRFSYKTAE

SEQ ID NO: 766 - protein, 578 aa, Unknown
  Description of Unknown: Integrase B767 sequence
  PTHR30461:SF3,IPR036162,PS51737,IPR011109,PTHR30461, PS00397,PF00239,G3DSA:1.10.10.2600,IPR006119,SSF53041, cd00338,SM00857,IPR025827,IPR038109,PS51736, IPR006118,PF13408,G3DSA:3.40.50.1390,PF07508,Coil
MGYVTKKAAQRFEEKKAAIYVRVSTQYQVDRASLPVQREELINYAKYALGISDYVIFEDAGYSAKNTDRPDYQQMMSRMRTGEFSHLLVWKIDRISRNLLDFSVMYAELKELGVVFVSKNEQFDTSSAMGEAMLKIILIFAELERKTTSERVSAVFVSRANDGIWNGGKVPYGYSYDKESKTFSIAEDEAKIVRLIYSLYESEKSIVRVARIMNERGLKSRAGNDWSPTTVHTILSSPFYSGTYRYNYRDESNTKRFREKGKDEWVLVENHHPAIVSPERQAAVGVILESKRYNKNATYQRKNVHVFAGLLTCGCCGATMAATTDKVRADGWRPSMYICSRRRKSEDCTNKYVSDVTLGPFVLNFFANLIKASNSFGRTTSIETLEKKLLRGEALSRVDHIERPGLEELYNHLRSGFDEKCFESPTIAATESSADLSERDLLLSEKRRLERALNRLKTIYLYGDDEMASKDFNIERERITKALSEVDSRINELDIANAFDLSLSDEAFMQKASQFILTQQLLDKRYVNYERFIRKIDPKIVKDFLNETVSNFCIKDGLTTSILLKNGIELRFSYKTAE

SEQ ID NO: 767 - protein, 578 aa, Unknown
  Description of Unknown: Integrase B768 sequence
  PTHR30461:SF3,IPR036162,PS51737,IPR011109,PTHR30461, PS00397,PF00239,G3DSA:1.10.10.2600,IPR006119,SSF53041, cd00338,SM00857,IPR025827,IPR038109,PS51736, IPR006118,PF13408,G3DSA:3.40.50.1390,PF07508,Coil
MGYVTKKAAQRFEEKKAAIYVRVSTQYQVDRASLPVQREELINYAKYALGISDYVIFEDAGYSAKNTDRPDYQQMMARMRTGEFSHLLVWKIDRISRNLLDFSVMYAELKELGVVFVSKNEQFDTSSAMGEAMLKIILIFAELERKTTSERVSAVFVSRANDGIWNGGKVPYGYSYDKEGKTFSIAEDEAKVVRLIYSLYESEKSIVRVARIMNERGLKSRAGSDWSPTTVHTILSSPFYSGTYRYNYRNESNRKRFREKGKDEWVLVENHHPAIVSPERQAAVGVILESKRYNKNATYQRKNVHVFAGLLTCGCCGSTMAATTDKVRADGWRPSMYICSRRRKSEDCTNKYVSDVSLGPFVLNFFANLIKASNSFGRTTSIETLEKKLLRGEALSRVDHIERPGLEELYNHLRSGFDEKRFESPTIAATESSADLSERDLLLSEKRRLERALNRLKTIYLYGDDEMASKDFNIERERITKALSEVDSRINELDIANAFDLSLSDEAFMQKASQFILTQQLLDKRYVNYERFIRKIDPKIVKDFLNETVSNFCIKDGLTTSILLKNGIELRFSYKTAE

SEQ ID NO: 768 - protein, 578 aa, Unknown
  Description of Unknown: Integrase B769 sequence
  PTHR30461:SF3,IPR036162,PS51737,IPR011109,PTHR30461, PS00397,PF00239,G3DSA:1.10.10.2600,IPR006119,SSF53041, cd00338,SM00857,IPR025827,IPR038109,PS51736, IPR006118,PF13408,G3DSA:3.40.50.1390,PF07508,Coil
MGYVTKKAAQRFEEKKAAIYVRVSTQYQVDRASLPVQREELINYAKYALGISDYVIFEDAGYSAKNTDRPDYQQMMARMRTGEFSHLLVWKIDRISRNLLDFSVMYAELKELGVVFVSKNEQFDTSSAMGEAMLKIILIFAELERKTTSERVSAVFVSRANDGIWNGGKVPYGYSYDKEGKTFSIAEDEAKIVRLIYSLYESEKSIVRVARIMNERGLKSRAGNDWSPTTVHTILSSPFYSGTYRYNYRDESNAKRFREKGKDEWVLVENHHPAIVSPERQASVGVILESKRYNKNATYQRKNVHVFAGLLTCGCCGSTMAATTDKVRADGWRPSMYICSRRRKSEDCTNKYVSDVSLGPFVLNFFANLIKASNSFGRTTSIETLEKKLLRGEALSRVDHIERPGLEELYNHLRSGFDEKRFESPTIAATESSADLSERDLLLSEKRRLERALNRLKAIYLYGDDEMASKDFNIERERITKALSEVDSRINELDIANAFDLSLSDEAFMQKASQFILTQQLLDKRYVNYERFIRKIDPKIVKDFLNETVSNFCMKDGLTTSILLKNGIELRFSYKTAE

SEQ ID NO: 769 - protein, 578 aa, Unknown
  Description of Unknown: Integrase B770 sequence
  PTHR30461:SF3,IPR036162,PS51737,IPR011109,PTHR30461, PS00397,PF00239,G3DSA:1.10.10.2600,IPR006119,SSF53041, cd00338,SM00857,IPR025827,IPR038109,PS51736, IPR006118,PF13408,G3DSA:3.40.50.1390,PF07508,Coil
MGYVVKKAAQRFEEKKAAIYVRVSTQYQVDRASLPVQREELINYAKYALGISDYVIFEDAGYSAKNTDRPDYQQMMARMRTGEFSHLLVWKIDRISRNLLDFSVMYAELKELGVVFVSKNEQFDTSSAMGEAMLKIILIFAELERKTTSERVSAVFVSRANDGIWNGGKVPYGYSYDKESKTFSIAEDEAKIVRLIYSLYESEKSIVRVARIVNERGLKSRAGSDWSPTTVHTILSSPFYSGTYRYNYRDESNTKRFREKGKDEWVLVENHHPAIVSPERQAAVGVILESKRYNKNATYQRKNVHVFAGLLTCGCCGSTMAATTDKVRADGWRPSMYICSRRRKSEDCTNKYVSDVTLGPFVLNFFANLIKASNSFGRTTSIETLEKKLLRGEALARVDHIERPGLEELYNHLRSGFDEKRFESPTIAATESSADLSERDLLLSEKRRLERALNRLKTIYLYGDDEMASKDFNIERERITKALSEVDSRINELDIANAFDLSLSDEAFMQKASQFILTQQLLDKRYVNYERFIRKIDPKIVKDFLNETVSNFCIKDGLTTSILLKNGIELRFSYKTAE

SEQ ID NO: 770 - protein, 578 aa, Unknown
  Description of Unknown: Integrase B771 sequence
  PTHR30461:SF3,IPR036162,PS51737,IPR011109,PTHR30461, PS00397,PF00239,G3DSA:1.10.10.2600,IPR006119,SSF53041, cd00338,SM00857,IPR025827,IPR038109,PS51736, IPR006118,PF13408,G3DSA:3.40.50.1390,PF07508,Coil
MGYVTKKAAQRFEEKKAAIYVRVSTQYQVDRASLPVQREELINYAKYALGISDYVIFEDAGYSAKNTDRPDYQQMMARIRTGEFSHLLVWKIDRISRNLLDFSVMYAELKELGVVFVSKNEQFDTSSAMGEAMLKIILIFAELERKTTSERVSAVFVSRANDGIWNGGKVPYGYSYDKESKTFSIAEDEAKIVRLIYSLYESEKSIVRVARIMNERGLKSRAGSDWSPTTVHTILSSPFYSGTYRYNYRDESNTKRFREKGKDEWVLVENHHPAIVSPERQAAVGVILESKRYNKNATYQRKNVHVFAGLLTCGCCGSTMAATTDKVRADGWRPSMYICSRRRKSEDCTNKYVSDVTLGPFVLNFFANLIKASNSFGRTTSIETLEKKLLRGEALARVDHIERPGLEELYNHLRSGFDEKRFESPTIAATESSADLSERDLLLSEKRRLERALNRLKTIYLYGDDEMASKDFNIERERITKALSEVDSRINELDIANAFDLSLSDEAFMQKASQFILTQQLLDKRYVNYERFIRKIDPKIVKDFLNETVSNFCIKDGLTTSILLKNGIELRFSYKTAE

SEQ ID NO: 771 - protein, 578 aa, Unknown
  Description of Unknown: Integrase B772 sequence
  PTHR30461:SF3,IPR036162,PS51737,IPR011109,PTHR30461, PS00397,PF00239,G3DSA:1.10.10.2600,IPR006119,SSF53041, cd00338,SM00857,IPR025827,IPR038109,PS51736, IPR006118,PF13408,G3DSA:3.40.50.1390,PF07508,Coil
MGYVTKKAAQRFEEKKAAIYVRVSTQYQIDRASLPVQREELINYAKYALGISDYVIFEDAGYSAKNTDRPDYQQMMARMRTGEFSHLLVWKIDRISRNLLDFSVMYAELKELGVVFVSKNEQFDTSSAMGEAMLKIILIFAELERKTTSERVSAVFVSRANDGIWNGGKVPYGYSYDKESKTFSIAEDEAKIVRLIYSLYESEKSIVRVARIMNERGLKSRAGNDWSPTTVHTILSSPFYSGTYRYNYRDESNTKRFREKGKDEWVLVENHHPAIVSPERQAAVGVILESKRYNKNATYQRKNVHVFAGLLTCGCCGATMAATTDKVRADGWRPSMYICSRRRKSEDCTNKYVSDVTLGPFVLNFFANLIKASNSFGRTTSIETLEKKLLRGEALSCVDHIERPGLEELYNHLRSGFDEKCFESPTIAATESSADLSERDLLLSEKRRLERALNRLKTIYLYGDDEMASKDFNIERQRITKALSEVDSRINELDIANAFDLSLSDEAFMQKASQFILTQQLLDKRYVNYERFIRKIDPKIVKDFLNETVSNFCIKDGLTTSILLKNGIELRFSYKTAE

SEQ ID NO: 772 - protein, 578 aa, Unknown
  Description of Unknown: Integrase B773 sequence
  PTHR30461:SF3,IPR036162,PS51737,IPR011109,PTHR30461, PS00397,PF00239,G3DSA:1.10.10.2600,IPR006119,SSF53041, SM00857,IPR025827,IPR038109,PS51736,cd03768, IPR006118,PF13408,G3DSA:3.40.50.1390,PF07508,Coil
MPRRRTSAKDCVPQQKEIKVAIYIRVSTTHQIDRDSIPMQKKDLMTYCEFILNTDNYVIFEDAGYSGKNTVRPAYQKMMDRVRNDEFTHILVWKIDRISRNLLDFASMYQELKKLGVVFISKNEQFDTGTAIGEAMLKIILVFAELERNMTSERVTATMISRASNGQWNGGRIPFGYSYDSNTSTFSVREDEAAICRKLRDLYLENKSLVYTARALNAEGFKTRAGVDWTPPAVWIIASSPFYAGIYRYNRYKGTVGRTINSENEWVVIPDHHPAIFSLAEHEAMKSLLKTNSRNIENPVGRLHTTSNVHIFQGIAYCGKCKSRLTSSPGRKSSTGFRASNYSCPLRRKSKKCNNKTINDIVLGEFVINYILNMLNAKKMFSKIKTPDELQKQLLCGSTFSDIDHIDTDGLNEYYNLLSRYSSDNSFIFAKRPQKKKAAVSKELASLRKEKERQERAMTRLQDLYLYSENAMSEKDFIIRKEDISYRLKEINHKLGVLSDDSDSFLSDEEFIKQASHFLIQSELKNKKYIYFKNLVNTVSPEILKSYIDTILDSVYITDSKVTSIVFKNGLTHNFIYK

SEQ ID NO: 773 - protein, 578 aa, Unknown
  Description of Unknown: Integrase B774 sequence
  PTHR30461:SF3,IPR036162,PS51737,IPR011109,PTHR30461, PS00397,PF00239,G3DSA:1.10.10.2600,IPR006119,SSF53041, cd00338,SM00857,IPR025827,IPR038109,PS51736, IPR006118,PF13408,G3DSA:3.40.50.1390,PF07508,Coil
MGYVTKKVAQRFEEKKAAIYVRVSTQYQVDRASLPVQREELINYAKYALGISDYVIFEDAGYSAKNTDRPDYQQMMARMRTGEFSHLLVWKIDRISRNLLDFSVMYAELKELGVVFVSKNEQFDTSSAMGEAMLKIILIFAELERKTTSERVSAVFVSRANDGIWNGGKVPYGYSYDKEGKTFSIAEDEAKIVRLIYSLYESEKSIVRVARIMNERGLKSRAGSDWSPTTVHTILSSPFYSGTYRYNYRDESNTKRFHEKGKDEWVLVENHHPAIVSPERQAAVGVILESKRYNKNATYQRKNVHVFAGLLTCGCCGSTMAATTDKVRADGWRPSMYICSRRRKSEDCTNKYVSDVSLGPFVLNFFANLIKASNSFGRTTSIETLEKKLLRGEALARVDHIERPGLEELYNHLRSGFDEKCFESPTIAATESSADLSERNLLLSEKRRLERALNRLKTIYLYGDDEMASKDFNIERERITKALSEVDSRINELDIANAFDLSLSDEAFMQKASQFILTQQLLDKRYVNYERFIRKIDPKIVKDFLNETVSNFCIKDGLTTSILLKNGIELRFSYKTAE

SEQ ID NO: 774 - protein, 578 aa, Unknown
  Description of Unknown: Integrase B775 sequence
  cd00338,SM00857,G3DSA:1.10.10.2600,IPR036162,PS51737, G3DSA:3.40.50.1390,IPR006119,IPR038109,PF07508,IPR011109, SSF53041,PTHR30461,PS51736,Coil,PF00239
MAKCILLVRVSTESKKQEISLREQETELFELALSKGYCEEDIIAICKQESALKRRYATSDEKDAIEIKQQGLQEMEDAIKNDSSINCVFAWEISRISRREKVLFDELEFLTDRKIQLVILKPYIELLNSDGSLNPSSKMQFSMFAALADAEMRNKSDRFRRTKESRRKEGKYVGGWLPFGYMVEPTTKKIIINEEEAAIVKYMFNEYLKGGTSIYKLANELQERGIISYDNKHSAFTFAYTILRNYSYAGLQGTVRQKDRKPSTNVYPAIVTKEMIDKAIEMSEQAKTKPKTNVKNIYYCKSLLKCADCERVYVARLNKAVYQCTNDNGKCNNAEISINLADTILWNVAMTLKISQMLHQTEEDKTAYQLQIEVLKQKIEKINIDIENNNKAYSILNKRIIMQKISEEDGELIEKELDSTKKELEKKLNEYNNKVAEIEQILFNMNTSIAFKHINIDDIADIEDDNLRYEIIHEIIDYCMVEKVANSIIKLELYAKHINTAYTYYVTTRNRKIYNKDFRIEEAYTSDNTHLVDFKILQRYKRQGKANKEYQKQYYQKNREKLIKQNVEAKRRRKSKPE

SEQ ID NO: 775 - protein, 578 aa, Unknown
  Description of Unknown: Integrase B776 sequence
  PTHR30461:SF3,IPR036162,PS51737,IPR011109,PTHR30461, PS00397,PF00239,G3DSA:1.10.10.2600,IPR006119,SSF53041, cd00338,SM00857,IPR025827,IPR038109, PS51736,IPR006118,PF13408,G3DSA:3.40.50.1390,PF07508,Coil
MGYVVKKAAQRFEEKKAAIYVRVSTQYQVDRASLPVQREELINYAKYALGISDYVIFEDAGYSAKNTDRPDYQQMMARMRTGEFSHLLVWKIDRISRNLLDFSVMYAELKELGVVFVSKNEQFDTSSAMGEAMLKIILIFAELERKTTSERVSAVFVSRANDGIWNGGKVPYGYSYDKESKTFSIAEDEAKIVRLIYSLYESEKSIVRVARIMNERGLKSRAGSDWSPTTVHTILSSPFYSGTYRYNYRDESNTKRFREKGKDEWVLVENHHPAIVSPERQAAVGVILESKRYNKNATYQRKNVHVFAGLLTCGCCGSTMAATTDKVRADGWRPSMYICSRRRKSEDCTNKYVSDVSLGPFVLNFFANLIKASNSFGRTTSIETLEKKLLRGEALSRVDHIERPGLEELYNHLRSGFDEKRFESPAIAATESSADLSERDLLLSEKRRLERALNRLKTIYLYGDDEMASKDFNIERERITKALSEVDSRIDELNIANAFDLSLSDEAFMQKASQFILTQQLLDKRSVNYERFIRKIDPKIVKDFLNETVSNFCIKDGLTTSILLKNGIELRFSYKTAE

SEQ ID NO: 776 - protein, 578 aa, Unknown
  Description of Unknown: Integrase B777 sequence
  PTHR30461:SF3,IPR036162,PS51737,IPR011109,PTHR30461, PS00397,PF00239,G3DSA:1.10.10.2600,IPR006119,SSF53041, cd00338,SM00857,IPR025827,IPR038109,PS51736, IPR006118,PF13408,G3DSA:3.40.50.1390,PF07508,Coil
MGYVVKKAAQRFEEKKAAIYVRVSTQYQVDRASLPVQREELINYAKYALGISDYVIFEDAGYSAKNTDRPDYQQMMARMRTGEFSHLLVWKIDRISRNLLDFSVMYAELKELGVVFVSKNEQFDTSSAMGEAMLKIILIFAELERKTTSERVSAVFVSRANDGIWNGGKVPYGYSYDKESKTFSIAEDEAKIVRLIYSLYESEKSIVRVARIMNERGLKSRAGNDWSPTTVHTILSSPFYSGTYRYNYRDESNTKRFREKGKDEWVLVENHHPAIVSPERQAAVGVILESKRYNKNATYQRKNVHVFAGLLTCGCCGSTMVATTDKVRADGWRPSMYICSRRRKSEDCTNKYVSDVALGPFVLNFFANLIKASNSFGRTTSIETLEKKLLRGEALSRVDHIERPGLEELYNHLRSGFDEKRFESPTIAATESSADLSERDLLLSEKRRLERALNRLKTIYLYGDDEMASKDFNIERERITKALSEVDSRIDELDIANAFDLSLSDEAFMQKASQFILTQQLLDKRSVNYERFIRKIDPKIVKDFLNETVSNFCIKDGLTTSILLKNGIELRFSYKTAE

SEQ ID NO: 777 - protein, 578 aa, Unknown
  Description of Unknown: Integrase B778 sequence
  PTHR30461:SF3,IPR036162,PS51737,IPR011109,PTHR30461, PS00397,PF00239,G3DSA:1.10.10.2600,IPR006119,SSF53041, cd00338,SM00857,IPR025827,IPR038109,PS51736, IPR006118,PF13408,G3DSA:3.40.50.1390,PF07508,Coil
MGYVTKKAAQRFEEKKAAIYVRVSTQYQVDRASLPVQREELINYAKYALGISDYVIFEDAGYSAKNTDRPDYQQMMARMRTGEFSHLLVWKIDRISRNLLDFSVMYAELKDLGVVFVSKNEQFDTSSAMGEAMLKIILIFAELERKTTSERVSAVFVSRANDGIWNGGKVPYGYSYDKKSKTFSIIEDEAKIVRLIYSLYESEKSIVRVAQIMNSRGLKSRAGNDWSPTAVHNVLSNPFYSGTYRYNYRDESSGKTYRTKDKDEWVLIENHHTPIVSPEQQAAAGAILESKHYNKNATYQRKNVHVFAGLLTCGCCGSTMAATTDRVRADGWRPSMYICSRRRKSEDCTNKYVSDVTLGPFVLNFFANLIKASNSFGRTTSIETLEKKLLRGEALARVDHIERPGLEELYNHLRSGFDEKRFESPTIAATESSADLSERDLLLSEKRRLERALNRLKAIYLYGDDEMASKDFNIERERITKALSEVDSRINELDIANAFNLSLSDEAFMQKASQFILTQQLLDKRYVNYERFIRKIDPKIVKDFLNETVSNFCIKDGLTTSILLKNGIELRFSYKTSE

SEQ ID NO: 778 - protein, 578 aa, Unknown
  Description of Unknown: Integrase B779 sequence
  PTHR30461:SF3,IPR036162,PS51737,IPR011109,PTHR30461, PS00397,PF00239,G3DSA:1.10.10.2600,IPR006119,SSF53041, cd00338,SM00857,IPR025827,IPR038109,PS51736, IPR006118,PF13408,G3DSA:3.40.50.1390,PF07508,Coil
MGYVVKKAAQRFEKKKAAIYVRVSTQYQVDRASLPVQREELINYAKYALGISDYVIFEDAGYSAKNTDRPDYQQMMARMRTGEFSHLLVWKIDRISRNLLDFSVMYAELKELGVVFVSKNEQFDTSSAMGEAMLKIILIFAELERKTTSERVSAVFVSRANDGIWNGGKVPYGYSYDKESKTFSIAEDEAKIVRLIYSLYESEKSIVRVARIMNERGLKSRAGSDWSPTTVHTILSSPFYSGTYRYNYRDESNTKRFREKGKDEWVLVENHHPAIVSPERQAAVGVILESKRYNKNATYQRKNVHVFAGLLTCGCCGSTMAATTDKVRADGWRPSMYICSRRRKSEDCTNKYVSDVTLGPFVLNFFANLIKASNSFGRTTSIETLEKKLLRGEALSRVDHIERPGLEELYNHLRSGFDEKRFESPTIAATESSADLSERDLLLSEKRRLERALNRLKTIYLYGDDEMASKDFNIERERITKALSEVDSRINELDIANAFDLSLSDEAFMQKASQFILTQQLLDKRYVNYERFIRKIDPKIVKDFLNETVSNFCIKDGLTTSILLKNGIELRFSYKTAE

SEQ ID NO: 779 - protein, 578 aa, Unknown
  Description of Unknown: Integrase B780 sequence
  cd03768,SM00857,G3DSA:1.10.10.2600,IPR036162,PS51737, G3DSA:3.40.50.1390,IPR006119,IPR038109,PF07508,SSF53041, IPR011109,PTHR30461,PS51736,Coil,PF00239
MKGAIYSRVSTEQQDYSKQTNELKDYAKRNGIEVVYVFEEKESGFNNNRPEFEKLRKLTKQDIDIILVWEISRISRRAIYLQQQVQEFTDKGICIYAKKDGFSTLNDDGSVNASTKMLIGFASIIAEQEAATLKERTISSKRNKILREGKSYTYYAPYGYDYNKETKMLSINEKQAQVVKRIFQLSIDGYSTERIAILLNAEKIPTKGKKENWTAGTVCNMLTNPVYKGEANYTLKKEKKAGSTYCKPMEVVTISTPAIIEKEQFELSLQKLAERTKRSNSFGTKYNPLLRGLIHCPHCDVKYVYNFGTNQYLCVNKYKKASNKNVHCTAKCISNKLDSIVWNVVKTFFYKELAAGKAQEQIEPLQAEIESYKRQILLLDGKQSELTARANIIVDAAIEIKIQFPNMPDLYANKMKEVEEINKEASKYQKEKERLEKLIHSNDARIKNINRASKESALVESITDETEKYDLVHKAIDKIMIFGEGKTSIIIVTFSTGQTIYLGYSSKSNSKYYTIFYPSSDIYFDIQTSKGYINHLKEKATINSDGSIYLGDLTGEVKEYSIIDFVNYLDIEENRRYY

SEQ ID NO: 780 - protein, 578 aa, Unknown
  Description of Unknown: Integrase B781 sequence
  PTHR30461:SF3,IPR036162,PS51737,IPR011109,PTHR30461, PS00397,PF00239,G3DSA:1.10.10.2600,IPR006119,SSF53041, cd00338,SM00857,IPR025827,IPR038109, PS51736,IPR006118,PF13408,G3DSA:3.40.50.1390,PF07508,Coil
MGYVTKKAAQRFEEKKAAIYVRVSTQYQVDRASLPVQREELINYAKYALGISDYVIFEDAGYSAKNTDRPDYQQMMARMRTGEFSHLLVWKIDRISRNLLDFSVMYAELKELGVVFVSKNEQFDTSSAMGEAMLKIILIFAELERKTTSERVSAVFVSRANDGIWNGGKVPYGYSYDKESKTFSIAEDEAKIVRLIYSLYESEKSIVRVARIMNERGLKSRAGSDWSPTTIHTILSSPFYSGTYRYNYRDESNTKRFREKGKDEWVLVENHHPAIVSPERQAAVGVILESKRYNKNATYQRKNVHVFAGLLTCGCCGSTMAATTDKVRADGWRPSMYICSRRRKSEDCTNKYVSDVTLGPFVLNFFANLIKASNSFGRTTSIETLEKKLLRGEALSRVDHIERPGLEELYNHLRSGFDEKRFESPTIAATESSADLSERDLLLSEKRRLERALNRLKTIYLYGDDEMASKDFNIERERITKALSEVDSRINELDIANAFDLSLSDEAFMQKASQFILTQQLLDKRYVNYERFIRKIDPKIVKDFLNETVSNFCIKDGLTTSILLKNGIELRFSYKTTE

SEQ ID NO: 781 - protein, 578 aa, Unknown
  Description of Unknown: Integrase B782 sequence
  PTHR30461:SF3,IPR036162,PS51737,IPR011109,PTHR30461, PS00397,PF00239,G3DSA:1.10.10.2600,IPR006119,SSF53041, SM00857,IPR025827,IPR038109,PS51736,cd03768, IPR006118,PF13408,G3DSA:3.40.50.1390,PF07508,Coil
MAYPMKNQTADNRIIAIYVRVSTGYQVDKDSLPFQKKELKAYCKHILHVDLSQVEIFEDAGRSGKNTKRPAYERMMEKVRAGLVSHVLVYKIDRISRNLVDFSLMYDDFKYNRVTFISLNEQFDTSSAIGEAVLKIILVFAELERKLTSERVKDIMIGRATEGKWNGARVPYGWDWDPDVEQPVHSKIEAPYARGMYEMYLKVRSTGKIRDYNNAHGIPTKRGGEWTSKTVSDFLRNPMNKGDYRYNYRESARGRKKPEDEVIYQEGIFEPLVDPEVWERVNRIMDDNASKRNTGGLHPIMKNCNVFAGLIQCAECGSGFQVVKKDRRRKNGFAPSMYGCTSRFRKIHCPAPNVSEVQIGPFVINYISAMVHATKERFKIHSPAALESMLLSDPIFADIAGIESQGLNETFALLTGVSVSGSALWRTDPVRQSDTAATSSEIENLKKQIQKYNRAKERLEDAYYFSDDAMSEKEYLEKKNKFDAARVAAENKLKELTEVQIASHVDDSGFMKSASAFLLAHQLHAGVHIEYRDFAVTVEEESLKEFMNLVLDHISVKDRRVVEIVFSNGLSHRFIYRE

SEQ ID NO: 782 - protein, 578 aa, Unknown
  Description of Unknown: Integrase B783 sequence
  PTHR30461:SF3,IPR036162,PS51737,IPR011109,PTHR30461, PS00397,PF00239,G3DSA:1.10.10.2600,IPR006119,SSF53041, cd00338,SM00857,IPR025827,IPR038109,PS51736, IPR006118,PF13408,G3DSA:3.40.50.1390,PF07508,Coil
MGYVVKKAAQRFEEKKAAIYVRVSTQYQVDRASLPVQREELINYAKYALGISDYVIFEDAGYSAKNTDRPDYQQMMARMRTGEFSHLLVWKIDRISRNLLDFSVMYAELKELGVVFVSKNEQFDTSSAMGEAMLKIILIFAELERKTTSERVSAVFVSRANDGIWNGGKVPYGYSYDKESKTFSIAEDEAKIVRLIYSLYESEKSIVRVARIMNERGLKSRAGSDWSPTTVHTILSSPFYSGTYRYNYRDESNTKRFREKGKDEWVLVENHHPAIVSPERQAAVGVILESKRYNKNATYQRKNVHVFAGLLTCGCCGSTMAATTDKVRADGWRPSMYICSRRRKSEDCTNKYVSDVTLGPFVLNFFANLIKASNSFGRTTSIETLEKKLLRGEALSRVDHIERPGLEELYNHLRSGFDEKRFESPTIAATESSADLSERDLLLSEKRRLERALNRLKTIYLYGDDEMASKDFNIERERITKALSEVDSRINELDIANAFDLSLSDEAFMQKASQFILTQQLLDKRYVNYERFIRKIDPKIVKDFLNETVSNFCIKDGLTTSILLKNGIELRFSYKTAE

SEQ ID NO: 783 - protein, 578 aa, Unknown
  Description of Unknown: Integrase B784 sequence
  PTHR30461:SF3,IPR036162,PS51737,IPR011109,PTHR30461, PS00397,PF00239,G3DSA:1.10.10.2600,IPR006119,SSF53041, SM00857,IPR025827,IPR038109,PS51736,cd03768, IPR006118,PF13408,G3DSA:3.40.50.1390,PF07508,Coil
MNTLSALNITPSPPRMCRVAIYIRVSTLQQVDKDSLPMQRKDLIAYSKLILNTDDYVIFEDAGYSGKNTIRPRYQDMMGQIRTGAFTHLLVWKIDRISRNLLDFAQMYQELKELNVTFVSKNEQFNTSTAMGEAMLKIILVFAELERNMTSERVTATMISRANTGKWNGGRVPYGYKYDQEEEDFLIIASESNVVKLIHDKYEELQSLVYLARYMNEHGYRTRSGNEWSPPSLAIILKSWWYCGCYEYNKRKAGNRQKLKDESEWIMIEDHHIAIISYDQKERVLAILKGNKRFATEHNLYVKGIHVHVFGGLCWCRNCGKKMTSTSSNKNRSWQYSKYLCSTRRRSLTKCRGRSTSDPVLGEFIFNYILNMLNAQKGFDSIHSPADLQAALLTGDAFSDIKSIDREELNDLYNTLSSNVSGNIYGRSFNVNKEKKNDEVQSSLTILKAEKKKLDRALDRLTNLYLYDDMAISEKDYMIKKTEIETRIAEIDEKIGIVNKNSVDDSITDEEFVDKASTFIITQKLTDRNYISYKRLATSIDPKILYMFTHDVIDYIDIYNGKVQRIVFRNGLSQTFIR

SEQ ID NO: 784 - protein, 578 aa, Unknown
  Description of Unknown: Integrase B785 sequence
  PTHR30461:SF3,IPR036162,PS51737,IPR011109,PTHR30461, PS00397,PF00239,G3DSA:1.10.10.2600,IPR006119,SSF53041, cd00338,SM00857,IPR025827,IPR038109,PS51736, IPR006118,PF13408,G3DSA:3.40.50.1390,PF07508,Coil
MGYVTKKAAQRFEEKKAAIYVRVSTQYQVDRASLPVQREELINYAKYALGISDYVIFEDAGYSAKNTDRPDYQQMMARMRTGEFSHLLVWKIDRISRNLLDFSVMYAELKELGVVFVSKNEQFDTSSAMGEAMLKIILIFAELERKTTSERVSAVFVSRANDGIWNGGKVPYGYSYDKEGKTFSIAEDEAKVVRLIYSLYESEKSIVRVARIMNERGLKSRAGSDWSPTTVHTILSSPFYSGTYRYNYRDESNTKRFREKGKDEWVLVENHHPAIVSPERQAAVGVILESKHYNKNATYQRKNVHVFAGLLTCGCCGSAMAATTDKVRADGWRPSMYICSRRRKSEDCTNKYVSDVSLGPFVLNFFANLIKASNSFGRTTSIETLEKKLLRGEALSRVDHIERPGLEELYNHLRSGFDEKRFESPTIAATESSADLSERDLLLSEKRRLERALNRLKTIYLYGDDEMASKDFNIERERITKALSEVDSRINELDIANAFDLSLSDEAFMQKASQFILTQQLLDKRYVNYERFIRKIDPKIVKDFLNETVSNFCIKDGLTTSILLKNGIELRFSYKTAE

SEQ ID NO: 785 - protein, 578 aa, Unknown
  Description of Unknown: Integrase B786 sequence
  PTHR30461:SF3,IPR036162,PS51737,IPR011109,PTHR30461, PS00397,PF00239,G3DSA:1.10.10.2600,IPR006119,SSF53041, cd00338,SM00857,IPR025827,IPR038109,PS51736, IPR006118,PF13408,G3DSA:3.40.50.1390,PF07508,Coil
MGYVTKKAAQRFEEKKAAIYVRVSTQYQVDRASLPVQREELINYAKYALGISDYVIFEDAGYSAKNTDRPDYQQMMARMRTGEFSHLLVWKIDRISRNLLDFSVMYAELKELGVVFVSKNEQFDTSSAMGEAMLKIILIFAELERKTTSERVSAVFVSRANDGIWNGGKVPYGYSYDKEGKTFSIAEDEAKIVRLIYSLYESEKSIVRVARIMNERGLKSRAGSDWSPTTVHTILSSPFYSGTYRYNYRNESNRKRFREKGKDEWVLVENHHPAIVSPERQAAVGVILESKRYNKNATYQRKNVHVFAGLLTCGCCGSTMAATTDKVRADGWRPSMYICSRRRKSEDCTNKYVSDVSLGPFVLNFFANLIKASNSFGRTTSIETLEKKLLRGEALSRVDHIERPGLEELYNHLRSGFDEKRFESPTIAATESSADLSERDLLLSEKRRLERALNRLKTIYLYGDDEMASKDFNIERERITKALSEVDSRINELDIANAFDLSLSDEAFMQKASQFILTQQLLDKRYVNYERFIRKIDPKIVKDFLNETVSNFCIKDGLTTSILLKNGIELRFSYKTAE

SEQ ID NO: 786 - protein, 578 aa, Unknown
  Description of Unknown: Integrase B787 sequence
  PTHR30461:SF3,IPR036162,PS51737,IPR011109,PTHR30461, PS00397,PF00239,G3DSA:1.10.10.2600,IPR006119,SSF53041, cd00338,SM00857,IPR025827,IPR038109,PS51736, IPR006118,PF13408,G3DSA:3.40.50.1390,PF07508,Coil
MGYVTKKAAQRFEEKKAAIYVRVSTQYQVDRASLPVQREELINYAKYALGISDYVIFEDAGYSAKNTDRPDYQQMMARMRTGEFSHLLVWKIDRISRNLLDFSVMYAELKELGVVFVSKNEQFDTSSAMGEAMLKIILIFAELERKTTSERVSAVFVSRANDGIWNGGKVPYGYSYDKESKTFSIAEDEAKIVRLIYSLYESEKSIVRVARIMNERGLKSRAGSDWSPTTVHTILSSPFYSGTYRYNYRDESNTKRFREKGKDEWVLVENHHPAIVSPERQAAVGVILESKRYNKNATYQRKNVHVFAGLLTCGCCGSTMAATTDKVRADGWRPSMYICSRRRKSEDCTNKYVSDVTLGPFVLNFFANLIKASNSFGRTTSIETLEKKLLRGEALARVDHIERPGLEELYNHLRSGFDEKRFESPTIAATESSADLSERDLLLSEKRRLERALNRLKTIYLYGDDEMASKDFNIERERITKALSEVDSRIDELNIANAFDLSLSDEAFMQKASQFILTQQLLDKRSVNYERFIRKIDPKIVKDFLNETVSNFCIKDGLTTSILLKNGIELRFSYKTAE

SEQ ID NO: 787 - protein, 578 aa, Unknown
  Description of Unknown: Integrase B788 sequence
  PTHR30461:SF3,IPR036162,PS51737,IPR011109,PTHR30461, PS00397,PF00239,G3DSA:1.10.10.2600,IPR006119,SSF53041, cd00338,SM00857,IPR025827,IPR038109,PS51736, IPR006118,PF13408,G3DSA:3.40.50.1390,PF07508,Coil
MGYVVKKAAQRFEEKKAAIYVRVSTQYQVDRASLPVQREELINYAKYALGISDYVIFEDAGYSAKNTDRPDYQQMMARMRTGEFSHLLVWKIDRISRNLLDFSVMYAELKELGVVFVSKNEQFDTSSAMGEAMLKIILIFAELERKTTSERVSAVFVSRANDGIWNGGKVPYGYSYDKESKTFSIAEDEAKIVRLIYSLYESEKSIVRVARIMNERGLKSRAGSDWSPTTVHAILSSPFYSGTYRYNYRDESNTKRFREKGKDEWVLVENHHPAIVSPERQAAVGVILESKRYNKNATYQRKNVHVFAGLLTCGCCGSTMAATTDKVRADGWRPSMYICSRRRKSEDCTNKYVSDVSLGPFVLNFFANLIKASNSFGRTTSIETLEKKLLRGEALSRVDHIERPGLEELYNHLRSGFDEKRFESPTIAATESSADLSERDLLLSEKRRLERALNRLKTIYLYGDDEMASKDFNIERERITKALSEVDSRINELDIANAFDLSLSDEAFMQKASQFILTQQLLDKRYVNYERFIRKIDPKIVKDFLNETVSNFCIKDGLTTSILLKNGIELRFSYKTAE

SEQ ID NO: 788 - protein, 578 aa, Unknown
  Description of Unknown: Integrase B789 sequence
  PTHR30461:SF3,IPR036162,PS51737,IPR011109,PTHR30461, PS00397,PF00239,G3DSA:1.10.10.2600,IPR006119,SSF53041, cd00338,SM00857,IPR025827,IPR038109,PS51736, IPR006118,PF13408,G3DSA:3.40.50.1390,PF07508,Coil
MGYVTKKAAQRFEEKKAAIYVRVSTQYQVDRASLPVQREELINYAKYALGISDYVIFEDAGYSAKNTDRPDYQQMMSRMRTGEFSHLLVWKIDRISRNLLDFSVMYAELKELGVVFVSKNEQFDTSSAMGEAMLKIILIFAELERKTTSERVSAVFVSRANDGIWNGGKVPYGYSYDKESKTFSIAEDEAKIVRLIYSLYESEKSIVRVARIMNERGLKSRAGNDWSPTTVHTILSSPFYSGTYRYNYRDESNTKRFREKGKDEWVLVENHHPAIVSPERQAAVGVILESKRYNKNATYQRKNVHVFAGLLTCGCCGSTMAATTDKVRTDGWRPSMYICSRRRKSDDCTNKYVSDVSLGPFVLNFFANLIKASNSFGRTTSIETLEKKLLRGEALSRVDHIERPGLEELYNHLRSGFEEKRFEPPTIAATEASADLSERDLLLSEKRRLERALNRLKTIYLYGDDEMASKDFNIERERITKALSEVDSRINELDIANAFDLSLSDEAFMQKASQFILTQQLLDKRYVNYERFIRKIDPKIVKDFLNETVSNFCIKDGLTTSILLKNGIELRFSCKTTE

SEQ ID NO: 789 - protein, 578 aa, Unknown
  Description of Unknown: Integrase B790 sequence
  PTHR30461:SF3,IPR036162,PS51737,IPR011109,PTHR30461, PS00397,PF00239,G3DSA:1.10.10.2600,IPR006119,SSF53041, SM00857,IPR025827,IPR038109,PS51736,cd03768, IPR006118,PF13408,G3DSA:3.40.50.1390,PF07508,Coil
MAYPMKNTAADNRIIAIYVRVSTGYQVDKDSLPFQKKELKAYCKHILHVDLSQVEIFEDAGRSGKNTKRPAYERMMEKVRAGLVSHVLVYKIDRISRNLVDFSLMYDDFKYNRVTFISLNEQFDTSSAIGEAVLKIILVFAELERKLTSERVKDIMIGRATEGKWNGARVPYGWDWDPDAEKPVHSKVEAPYARGMYKMYLEVRSTGKIRDYNNSHNIPTKRGGEWTSKTVSDFLRNPMNKGDYRYNYRESARGRKKPEDEVIYQEGVFEPLVDPEVWERVNRIIDDNASKRNTGGLHPIMKNCNVFAGLIQCADCGSGFQVVKKDRRRKNGFAPSMYGCTSRFRKIHCPAPNVSEVQIGPFVINYISAMVYATKERFKIHSPAALESMLLSDPIFANIAGIESQGLNETFALLTGVSVSGSALWRTDPVKQSDTAATSSEIENLKKQIQKYNRAKERLEDAYYFSDDAMSEKEYLEKKNKFDAARVEAENKLKELTEVQIASHVNDSGFMKSASAFLLAHQLHAGVHIEYRDFAVTVEEESLKEFMNLVLDHISVKDRRVVEIVFSNGLSHRFIYRE

SEQ ID NO: 790 - protein, 578 aa, Unknown
  Description of Unknown: Integrase B791 sequence
  PTHR30461:SF3,IPR036162,PS51737,IPR011109,PTHR30461, PS00397,PF00239,G3DSA:1.10.10.2600,IPR006119,SSF53041, cd00338,SM00857,IPR025827,IPR038109,PS51736, IPR006118,PF13408,G3DSA:3.40.50.1390,PF07508,Coil
MGYVTKKAAQRFEEKKAAIYVRVSTQYQVDRASLPVQREELINYAKYALGISDYVIFEDAGYSAKNTDRPDYQQMMARMRTGEFSHLLVWKIDRISRNLLDFSVMYAELKELGVVFVSKNEQFDTSSAMGEAMLKIILIFAELERKTTSERVSAVFVSRANDGIWNGGKVPYGYSYDKESKTFSIAEDEAKIVRLIYSLYESEKSIVRVARIMNERGLKSRAGSDWSPTTVHTILSSPFYSGTYRYNYRDESNTKRFREKGKDEWVLVENHHPAIVSPERQAAVGVILESKRYNKNATYQRKNVHVFAGLLTCGCCGSTMAATTDKVRADGWRPSMYICSRRRKSEDCTNKYVSDVTLGPFVLNFFANLIKASNSFGRTTSIETLEKKLLRGEALSRVDHIERPGLEELYNHLRSGFDEKRFESPTIAATESSADLSERDLLLSEKRRLERALNRLKTIYLYGDDEMASKDFNIERERITKALSEVDSRINELDIANAFDLSLSDEAFMQKASQFILTQQLLDKRYVNYERFIRKIDPKIVKDFLNETVSNFCIKDGLTTSILLKNGIELRFSYKTAE

SEQ ID NO: 791 - protein, 578 aa, Unknown
  Description of Unknown: Integrase B792 sequence
  PTHR30461:SF3,IPR036162,PS51737,IPR011109,PTHR30461, PS00397,PF00239,G3DSA:1.10.10.2600,IPR006119,SSF53041, SM00857,IPR025827,IPR038109,PS51736,cd03768, IPR006118,PF13408,G3DSA:3.40.50.1390,PF07508,Coil
MPRRRTSAKDCVPQQKEIKVAIYIRVSTTHQIDRDSIPMQKKDLMTYCEFILNTDNYVIFEDAGYSGKNTVRPAYQKMMDRVRNDEFTHILVWKIDRISRNLLDFASMYQELKKLGVVFISKNEQFDTGTAIGEAMLKIILVFAELERNMTSERVTATMISRASNGQWNGGRIPFGYSYDSNTSTFSVREDEAAICRKLRDLYLENKSLVYTARALNAEGFKTRAGVDWTPPAVWIIASSPFYAGIYRYNRYKGTVGRTINSENEWVVIPDHHPAIFSLAEHEAMKSLLKTNSRNIENPVGRLHTTSNVHIFQGIAYCGKCKSRLTSSPGRKSSTGFQASNYSCPLRRKSKKCNNKTINDIVLGEFVINYILNMLNAKKMFSKIKTPDELQKQLLCGSTFSDIDHIDTDGLNEYYNLLSRYSSDNSFIFAKRPQKKKAAVSKELASLRKEKERQERAMTRLQDLYLYSENAMSEKDFIVRKEDISYRLKEINHKLGVLSDDSDSFLSDEEFIKQASHFLIQSELKNKKYIYFKNLVNAVSPEILKSYIDTILDSVYITDSKVTSIVFKNGLTHNFIYK

SEQ ID NO: 792 - protein, 578 aa, Unknown
  Description of Unknown: Integrase B793 sequence
  PTHR30461:SF3,IPR036162,PS51737,IPR011109,PTHR30461, PF00239,G3DSA:1.10.10.2600,IPR006119,SSF53041,cd00338, SM00857,IPR025827,IPR038109,PS51736,mobidb-lite, PF13408,G3DSA:3.40.50.1390,PF07508,Coil
MSLASKTVTVPRENQLNAVIYARFSSERQTENSIEFQLRADKAYCEQKGFRVIGEYIDRAMTGTNDNRPEFQRMIADAKKRQFAFIVVYRFDRFARNRYDSAIYKKQLERSGVRVLSTEESVGTGDEGIILESIYEAMAESYSRKLSRIVTEGMKQKAIAGLSTGGKVPFGYKIVDHRLAIDEEKAPAVRLAFEMYADGKTKSEIMREMNSRGCRTQQGNKITVAFVTRMLENPTFMGTSSFCGVKRDNPAIVSPELFDKVQDLLKKNKQHHGKRTDGMYFALTGKVFCGHCGAAMIGDSGTGKSGRNYYYYSCINKKKRRACKKKSERQDWLEKYVCEQTVNFVLAPKNISYIAKRVAEASAADLGCGRIAELERELARIDRQFDALTESLIKTTNPTFLKKINEKAEALTAQKEAAEKEHAALCLRRELCVTPSDVEMYLRSFAHGDPSDPDYRRRLINTLVNAVYVWDDKILIYYNYNVENNTEMEFADACKDADKPLPPSRQDASDHLPLSPSPSPATAPTPPKCSDSLTIGSPTKKDGFCRPFLLLTHLDKSDPLKPAHGGLDGVCAQVSEEV

SEQ ID NO: 793 - protein, 578 aa, Unknown
  Description of Unknown: Integrase B794 sequence
  PTHR30461:SF3,IPR036162,PS51737,IPR011109,PTHR30461, PS00397,PF00239,G3DSA:1.10.10.2600,IPR006119,SSF53041, cd00338,SM00857,IPR025827,IPR038109,PS51736, IPR006118,PF13408,G3DSA:3.40.50.1390,PF07508,Coil
MGYVTKKAAQRFEEKKAAIYVRVSTQYQVDRASLPVQREELINYAKYALGISDYVIFEDAGYSAKNTDRPDYQQMMARMRTGEFSHLLVWKIDRISRNLLDFSVMYAELKELGVVFVSKNEQFDTSSAMGEAMLKIILIFAELERKTTSERVSAVFVSRANDGIWNGGKVPYGYSYDKESKTFSIAEDEAKIVRLIYSLYESEKSIVRVARIMNERGLKSRAGNDWSPTTVHTILSSPFYSGTYRYNYRDESNTKRFREKGKDEWVLVENHHPAIVSPERQAAVGVILESKSYNKNATYQRKNVHVFAGLLTCGCCGATMAATTDKVRADGWRPSMYICSRRRKSEDCTNKYVSDVTLGPFVLNFFANLIKASNSFGRTTSIETLEKKLLRGEALSRVDHIERPGLEELYNHLRSGFDEKRFESPTIAATESSADLSERDLLLSEKRRLERALNRLKTIYLYGDDEMASKDFNIERERITKALNEVDSRINELDIANAFDLSLSDEAFMQKASQFILTQQLLDKRYVNYERFIRKIDPKIVKDFLNETVSNFCIKDGLTTSILLKNGIELRFSYKAAE

SEQ ID NO: 794 - protein, 578 aa, Unknown
  Description of Unknown: Integrase B795 sequence
  PTHR30461:SF3,IPR036162,PS51737,IPR011109,PTHR30461, PS00397,PF00239,G3DSA:1.10.10.2600,IPR006119,SSF53041, cd00338,SM00857,IPR025827,IPR038109,PS51736, IPR006118,PF13408,G3DSA:3.40.50.1390,PF07508,Coil
MGYVVKKAAQRFEEKKAAIYVRVSTQYQVDRASLPVQREELINYAKYALGISDYVIFEDAGYSAKNTDRPDYQQMMARMRTGEFSHLLVWKIDRISRNLLDFSVMYAELKELGVVFVSKNEQFDTSSAMGEAMLKIILIFAELERKTTSERVSAVFVSRANDGIWNGGKVPYGYSYDKESKTFSIAEDEAKIVRLIYSLYESEKSIVRVARIMNERGLKSRAGSDWSPTTVHTILSSPFYSGTYRYNYRDESNTKRFREKGKDEWVLVENHHPAIVSPERQAAVGVILESKRYNKNATYQRKNVHVFAGLLTCGCCGSTMAATTDKVRADGWRPSMYICSRRRKSEDCTNKYVSDVSLGPFVLNFFANLIKASNSFGRTTSIETLEKKLLRGEALSRVDHIERPGLEELYNHLRSGFDEKHFESPTIAATESSADLSERDLLLSEKRRLERALNRLKTIYLYGDDEMASKDFNIERERITKALSEVDSRINELDIANAFDLSLSDEAFMQKASQFILTQQLLDKRYVNYERFIRKIDPKIVKDFLNETVSNFCIKDGLTTSILLKNGIELRFSYKTAE

SEQ ID NO: 795 - protein, 578 aa, Unknown
  Description of Unknown: Integrase B796 sequence
  PTHR30461:SF3,IPR036162,PS51737,IPR011109,PTHR30461, PS00397,PF00239,G3DSA:1.10.10.2600,IPR006119,SSF53041, SM00857,IPR025827,IPR038109,PS51736,cd03768, IPR006118,PF13408,G3DSA:3.40.50.1390,PF07508,Coil
MAYPTKNTAADNRIIAIYVRVSTGYQVDKDSLPFQKKELKAYCKHILHVDLSQVEIFEDAGRSGKNTKRPAYERMMEKVRAGLVSHVLVYKIDRISRNLVDFSLMYDDFKYNRVTFISLNEQFDTSSAIGEAVLKIILVFAELERKLTSERVKDIMIGRATEGKWNGARVPYGWDWDPDAEQPVHSKIEAPYARGMYEMYLKVRSTGKIRDYNNSHNIPTKRGGEWTSKTVSDFLRNPMNKGDYRYNYRESARGRKKPEDEVIYQEGVFEPLVDPEVWERVNRIIDDNASKRNTGGLHPIMKNCNVFAGLIQCADCGSGFQVVKKDRRRKNGFAPSMYGCTSRFRKIHCPAPNVSEVQIGPFVINYISAMVYATKERFKIHSPAALESMLLSDPIFANIAGIESQGLNETFALLTGVSVSGSALWRTDPVKQSDTAATSSEIENLKKQIQKYNRAKERLEDAYYFSDDAMSEKEYLEKKNKFDAARVAAENKLKELTEVQIASHVDDSGFMKSASAFLLAHQLHAGVHIEYRDFAVTVEEESLKEFMNLVLDHISVKDRRVVEIVFSNGLSHRFIYRE

SEQ ID NO: 796 - protein, 578 aa, Unknown
  Description of Unknown: Integrase B797 sequence
  PTHR30461:SF3,IPR036162,PS51737,IPR011109,PTHR30461, PS00397,PF00239,G3DSA:1.10.10.2600,IPR006119,SSF53041, cd00338,SM00857,IPR025827,IPR038109,PS51736, IPR006118,PF13408,G3DSA:3.40.50.1390,PF07508,Coil
MGYVTKKAAQRFEEKKAAIYVRVSTQYQVDRASLPVQREELINYAKYALGISDYVIFEDAGYSAKNTDRPDYQQMMARMRTGEFSHLLVWKIDRISRNLLDFSVMYAELKELGVVFVSKNEQFDTSSAMGEAMLKIILIFAELERKTTSERVSAVFVSRANDGIWNGGKVPYGYSYDKESKTFSIAEDEAKIVRLIYSLYESEKSIVRVARIMNERGLKSRAGNDWSPTTVHTILSSPFYSGTYRYNYRDESNTKRFREKGKDEWVLVENHHPAIVSPERQAAVGVILESKRYNKNATYQRKNVHVFAGLLTCGCCGATMAATTDKVRADGWRPSMYICSRRRKSEDCTNKYVSDVTLGPFVLNFFANLIKASNSFGRTTSIETLEKKLLRGEALSRVDHIERPGLEELYNHLRSGFDEKCFESPTIAATESSADLSERDLLLSEKRRLERALNRLKTIYLYGDDEMASKDFNIERERITKALSDVDSRINELDIANAFDLSLSDEAFIQKASQFILTQQLLDKRYVNYERFIRKIDPKIVKDFLNETVSNFCIKDGLTTSILLKNGIELRFSYKTAE

SEQ ID NO: 797 - protein, 578 aa, Unknown
  Description of Unknown: Integrase B798 sequence
  PTHR30461:SF3,IPR036162,PS51737,IPR011109,PTHR30461, PS00397,PF00239,G3DSA:1.10.10.2600,IPR006119,SSF53041, cd00338,SM00857,IPR025827,IPR038109,PS51736, IPR006118,PF13408,G3DSA:3.40.50.1390,PF07508,Coil
MGYVVKKAAQRFEEKKAAIYVRVSTQYQVDRASLPVQREELINYAKYALGISDYVIFEDAGYSAKNTDRPDYQQMMARMRTGEFSHLLVWKIDRISRNLLDFSVMYAELKELGVVFVSKNEQFDTSSAMGEAMLKIILIFAELERQTTSERVSAVFVSRANDGIWNGGKVPYGYFYDKESKTFSIVEDEAKIVRLIYSLYEAEKSIVRVARTMNERGIKTRAGNDWSPTTVHTVLSSPFYSGTYRYNYRDESNTKRFREKGKDEWVLVENHHPAIVSPERQAAVGVILESKRYNKNATYQRKNVHVFAGLLTCGCCGSTMAATTDKVRADGWRPSMYICSRRRKSEDCTNKYVSDVTLGPFVLNFFANLIKASNSFGRTTSIGTLEKKLLRGEVLSRVDHIERPGLEELYNHLRSGFDEKRFESPTIAATESSADLSERDLLLSEKRRLERALNRLKTIYLYGDDEMASKDFNIERERITKALSEVDSRINELDIANAFDLSLSDEAFMQKASQFILTQQLLDKRYVNYERFIRKIDPKIVKDFLNETVSNFCIKDGLTTSILLKNGIELRFSYKTAE

SEQ ID NO: 798 - protein, 578 aa, Unknown
  Description of Unknown: Integrase B799 sequence
  PTHR30461:SF3,IPR036162,PS51737,IPR011109,PTHR30461, PS00397,PF00239,G3DSA:1.10.10.2600,IPR006119,SSF53041, cd00338,SM00857,IPR025827,IPR038109,PS51736, IPR006118,PF13408,G3DSA:3.40.50.1390,PF07508,Coil
MGYVTKKAAQRFEEKKAAIYVRVSTQYQVDRASLPVQREELINYAKYALGISDYVIFEDAGYSAKNTDRPDYQQMMARMRTGEFSHLLVWKIDRISRNLLDFSVMYAELKELGVVFVSKNEQFDTSSAMGEAMLKIILIFAELERKTTSERVSAVFVSRANDGIWNGGKVPYGYSYDKEGKTFSIAEDEAKIVRLIYSLYESEKSIVRVARIMNERGLKSRAGNDWSPTTVHTILSSPFYSGTYRYNYRDESNTKRFREKGKDEWVLVENHHPAIVSPERQAAVGVILESKRYNKNATYQRKNVHVFAGLLTCGCCGSTMAATTDKVRADGWRPSMYICSRRRKSEDCTNKYVSDVTLGPFVLNFFANLIKASNSFGRTTSIETLEKKLLRGEALSRVDHIERPGLEELYNHLRSGFDEKRFESPTIAATESSADLSERDLLLSEKRRLERALNRLKTIYLYGDDEMASKDFNIERERITKALSEVDSRIDELDIANAFDLSLSDEAFMQKASQFILTQQLLDKRSVNYERFIRKIDPKIVKDFLNETVSNFCIKDGLTTSILLKNGIELRFSYKTAE

SEQ ID NO: 799 - protein, 578 aa, Unknown
  Description of Unknown: Integrase B800 sequence
  PTHR30461:SF3,IPR036162,PS51737,IPR011109,PTHR30461, PS00397,PF00239,G3DSA:1.10.10.2600,IPR006119,SSF53041, cd00338,SM00857,IPR025827,IPR038109,PS51736, IPR006118,PF13408,G3DSA:3.40.50.1390,PF07508,Coil
MGYVTKKAAQRFEEKKAAIYVRVSTQYQVDRASLPVQREELINYAKYALGISDYVIFEDAGYSAKNTDRPDYQQMMARMRTGEFSHLLVWKIDRISRNLLDFSVMYAELKELGVVFVSKNEQFDTSSAMGEAMLKIILIFAELERKTTSERVSAVFVSRANDGIWNGGKVPYGYSYDKESKTFSIAEDEAKIVRLIYSLYEFEKSIVRVARIMNERGLKSRAGNDWSPTTVHMILSSPFYSGTYRYNYRDESNTKCFREKGKDEWVLVENHHPAIVSPERQAAVGVILESKRYNKNATYQRKNVHVFAGLLTCGCCGSTMAATTDKVRADGWRPSMYICSRRRKSDDCTNKYVSDVSLGPFVLNFFANLIKASNSFGRTTSIETLEKKLLRGEALSRVDHIERPGLEELYNHLRSGFDEKRFESPTIAATESSADLSERDLLLSEKRRLERALNRLKTIYLYGDDEMASKDFNIERERITKALSEVDSRINELDIANAFDLSLSDEAFMQKASQFILTQQLLDKRYVNYERFIRKIDPKIVKDFLNETVSNFCIKDGLTTSILLKNGIELRFSYKTAE

SEQ ID NO: 800 - protein, 578 aa, Unknown
  Description of Unknown: Integrase B801 sequence
  PTHR30461:SF3,IPR036162,PS51737,IPR011109,PTHR30461, PS00397,PF00239,G3DSA:1.10.10.2600,IPR006119,SSF53041, SM00857,IPR025827,IPR038109,PS51736,cd03768, IPR006118,PF13408,G3DSA:3.40.50.1390,PF07508,Coil
MAYPMKNTAADNRIIAIYVRVSTGYQVDKDSLPFQKKELKAYCKHILHVDLSQVEIFEDAGRSGKNTKRPAYERMMEKVRAGLVSHVLVYKIDRISRNLVDFSLMYDDFKYNRVTFISLNEQFDTSSAIGEAVLKIILVFAELERKLTSERVKDIMIGRATEGKWNGARVPYGWDWDPDAEQPVHSKIEAPYARGMYEMYLKVRSTGKIRDYNNAHGIPTKRGGEWTSKTVSDFLRNPMNKGDYRYNYRESARGRKKPEDEVIYQEGVFEPLVDPEMWERANRIMDDNASKRNTGGLHPIMKNCNVFAGLIQCAECSSGFQVVKKDRRRKNGFAPSMYGCTSRFRKIHCPAPNVSEVQIGPFVINYISAMVHATKERFKIHSPAALESMLLSDPIFANIAGIESQGLNETFALLTGVSVSGSALWRTDPVKQSDTAATSSEIENLKKQIQKYNRAKERLEDAYYFSDDAMSEKEYLEKKNKFDAARVAAENKLKELTEVQIASHVDDSGFMKSASAFLLAHQLHAGVHIEYRDFAVTVEEESLKEFMNLVLDHISVKDRRVVEIVFSNGLSHRFIYRE

SEQ ID NO: 801 - protein, 578 aa, Unknown
  Description of Unknown: Integrase B802 sequence
  PTHR30461:SF3,IPR036162,PS51737,IPR011109,PTHR30461, PS00397,PF00239,G3DSA:1.10.10.2600,IPR006119,SSF53041, cd00338,SM00857,IPR025827,IPR038109,PS51736, IPR006118,PF13408,G3DSA:3.40.50.1390,PF07508,Coil
MGYVTKKAAQRFEEKKAAIYVRVSTQYQVDRASLPVQREELINYAKYALGISDYVIFEDAGYSAKNTDRPDYQQMMARMRTGEFSHLLVWKIDRISRNLLDFSVMYAELKELGVVFVSKNEQFDTSSAMGEAMLKIILIFAELERKTTSERVSAVFVSRANDGIWNGGKVPYGYSYDKESKTFSIAEDEAKIVRLIYSLYESEKSIVRVARIMNERGLKSRAGNDWSPTTVHTVLSSPFYSGTYRYNYRDESNTKRFREKGKDEWVLVENHHPAIVSPERQAAVGLILESKRYNKNATYQRKNVHVFAGLLTCGCCGATMAATTDKVRADGWRPSMYICSRRRKSEDCTNKYVSDVTLGPFVLNFFANLIKASNSFGRTTSIETLEKKLLRGEALSCVDHIERPGLEELYNHLRSGFDEKCFESPTIAATESSADLSERDLLLSEKRRLERALNRLKTIYLYGDDEMASKDFNIERERITKALSEVDSRINELDIANAFDLSLSDEAFMQKASQFILTQQLLDKRYVNYERFIRKIDPKIVKDFLNETVSNFCIKDGLTTSILLKNGIELRFSYKTAE

SEQ ID NO: 802 - protein, 578 aa, Unknown
  Description of Unknown: Integrase B803 sequence
  PTHR30461:SF3,IPR036162,PS51737,IPR011109,PTHR30461, PS00397,PF00239,G3DSA:1.10.10.2600,IPR006119,SSF53041, cd00338,SM00857,IPR025827,IPR038109,PS51736, IPR006118,PF13408,G3DSA:3.40.50.1390,PF07508,Coil
MGYVVKKAAQRFEEKKAAIYVRVSTQYQVDRASLPVQREELINYAKYALGISDYVIFEDAGYSAKNTDRPDYQQMMARMRTGEFSHLLVWKIDRISRNLLDFSVMYAELKELGVVFVSKNEQFDTSSAMGEAMLKIILIFAELERKTTSERVSAVFVSRANDGIWNGGKVPYGYSYDKESKTFSIAEDEAKIVRLIYSLYESEKSIVRVARIMNERGLKSRAGSDWSPTTVHTILSSPFYSGTYRYNYRDESNTKRFREKGKDEWVLVENHHPAIVSPERQAAVGVILESKRYNKNATYQRKNVHVFAGLLTCGCCGSTMAATTDKVRADGWRPSMYICSRRRKSEDCTNKYVSDVTLGPFVLNFFANLIKASNSFGRTTSIETLEKKLLRGEALSHVDHIERPGLEELYNHLRSGFDEKCFESPTIAATESSADLSERDLLLSEKRRLERALNRLKTIYLYGDDEMASKDFNIERERITKALSEVDSRINELDIANAFDLSLSDEAFMQKASQFILTQQLLDKRYVNYERFIRKIDPKIVKDFLNETVSNFCIKDGLTTSILLKNGIELRFSYKTAE

SEQ ID NO: 803 - protein, 578 aa, Unknown
  Description of Unknown: Integrase B804 sequence
  PTHR30461:SF3,IPR036162,PS51737,IPR011109,PTHR30461, PS00397,PF00239,G3DSA:1.10.10.2600,IPR006119,SSF53041, cd00338,SM00857,IPR025827,IPR038109,PS51736, IPR006118,PF13408,G3DSA:3.40.50.1390,PF07508,Coil
MGYVTKKAAQRFEEKKAAIYVRVSTQYQVDRASLPVQREELINYAKYALGISDYVIFEDAGYSAKNTDRPDYQQMMARMRTGEFSHLLVWKIDRISRNLLDFSVMYAELKELGVVFVSKNEQFDTSSAMGEAMLKIILIFAELERKTTSERVSAVFVSRANDGIWNGGKVPYGYSYDKESKTFSIAEDEAKIVRLIYSLYESEKSIVRVARIMNERGLKSRAGSDWSPTTVHTILSSPFYSGTYRYNYRDESNAKRFREKGKDEWVLVENHHPAIVSPERQAAVGVILESKRYNKNATYQRKNVHVFAGLLTCGCCGSTMAATTDKVRADGWRPSMYICSRRRKSEDCTNKYVSDVTLGPFVLNFFANLIKASNAFGRTTSIETLEKKLLRGEALARVDHIERPGLEELYNHLHSGFDEKRFESPTIAVTESSADLSERDLLLSEKRRLERALNRLKTIYLYGDDEMASKDFNIERERITKALSEVDSRINELDIANAFDLSLSDEAFMQKASQFILTQQLLDKRYVNYERFIRKIDPKIVKDFLNETVSNFCIKDGLTTSILLKNGIELRFSYKTAE

SEQ ID NO: 804 - protein, 578 aa, Unknown
  Description of Unknown: Integrase B805 sequence
  PTHR30461:SF3,IPR036162,PS51737,IPR011109,PTHR30461, PS00397,PF00239,G3DSA:1.10.10.2600,IPR006119,SSF53041, cd00338,SM00857,IPR025827,IPR038109,PS51736, IPR006118,PF13408,G3DSA:3.40.50.1390,PF07508,Coil
MGYVVKKAAQRFEEKKAAIYVRVSTQYQVDRASLPVQREELINYAKYALGISDYVIFEDAGYSAKNTDRPDYQQMMARMRTGEFSHLLVWKIDRISRNLLDFSVMYAELKELGVVFVSKNEQFDTSSAMGEAMLKIILIFAELERKTTSERVSAVFVSRANDGIWNGGKVPYGYSYDKESKTFSIAEDEAKIVRLIYSLYESEKSIVRVARIMNERGLKSRAGSDWSPTTVHTILSSPFYSGTYRYNYRDESNTKRFREKGKDEWVLVENHHPAIVSPERQAAVGVILESKRYNKNATYQRKNVHVFAGLLTCGCCGSTMAATTDKVRADGWRPSMYICSRRRKSDDCTNKYVSDVSLGPFVLNFFANLIKASNSFGRTTSIETLEKKLLRGEALSRVDHIERPGLEELYNHLRSGFDEKRFESPTIAATESSADLSERDLLLSEKRRLERALNRLKTIYLYGDDEMASKDFNIERERITKTLSEVDSRINELDIANAFDLSLSDEAFMQKASQFILTQQLLDKRYVNYERFIRKIDPKIVKDFLNETVSNFCIKDGLTTSILLKNGIELRFSYKTAE

SEQ ID NO: 805 - protein, 578 aa, Unknown
  Description of Unknown: Integrase B806 sequence
  PTHR30461:SF3,IPR036162,PS51737,IPR011109,PTHR30461, PS00397,PF00239,G3DSA:1.10.10.2600,IPR006119,SSF53041, SM00857,IPR025827,IPR038109,PS51736,cd03768, IPR006118,PF13408,G3DSA:3.40.50.1390,PF07508,Coil
MAYPTKNTAADNRIIAIYVRVSTGYQVDKDSLPFQKKELKAYCKHILHVDLSQVEIFEDAGRSGKNTKRPAYERMMEKVRAGLVSHVLVYKIDRISRNLVDFSLMYDDFKYNRVTFISLNEQFDTSSAIGEAVLKIILVFAELERKLTSERVKDIMIGRATEGKWNGARVPYGWDWDPDAEQPVHSKVEAPYARGMYEMYLEVQSTGKIRDYNNSHNIPTKRGGEWTSKTVSDFLRNPMNKGDYRYNYRESARGRKKPEDEVIYQEGVFEPLVDPEVWERVNRIMDDNARKRNTGGLHPIMKNCNVFAGLIQCEDCGSGFQVVKKDRRRKNGFAPSMYGCTSRYRKIHCPAPNVSEVQIGPFVINYISAMVHATNERFKIHSPAALEAMLLSDPIFANIAGIGSQGLNETFALLTGISVSGSALWRTDLVKQSCTAVSPEDIAALKKQIQKYNRAKERLEDVYYFSDDSMSEKEYLEKKNKFDAARVAAENKLKELTEVRIASHVDDSGFMKSASAFLLAHQLHAGVHIEYRDFAVTVEEESLKEFMNLVLDHISVKDRRVVEIVFSNGLSHRFIYRE

SEQ ID NO: 806 - protein, 578 aa, Unknown
  Description of Unknown: Integrase B807 sequence
  PTHR30461:SF3,IPR036162,PS51737,IPR011109,PTHR30461, PS00397,PF00239,G3DSA:1.10.10.2600,IPR006119,SSF53041, cd00338,SM00857,IPR025827,IPR038109,PS51736, IPR006118,PF13408,G3DSA:3.40.50.1390,PF07508,Coil
MGYVTKKAAQRFEEKKAAIYVRVSTQYQVDRASLPVQREELINYAKYALGISDYVIFEDAGYSAKNTDRPDYQQMMARMRTGEFSHLLVWKIDRISRNLLDFSVMYAELKELGVVFVSKNEQFDTSSAMGEAMLKIILIFAELERKTTSERVSAVFVSRANDGIWNGGKVPYGYSYDKESKTFSIAEDEAKIVRLIYSLYESEKSIVRVARIMNERGLKSRAGNDWSPTTVHTILSSPFYSGTYRYNYRDESNTKRFREKGKDEWVLVENHHPAIVSPERQAAVGLILESKRYNKNATYQRKNVHVFAGLLTCGCCGATMAATTDKVRADGWRPSMYICSRRRKSEDCTNKYVSDVTLGPFVLNFFANLIKASNSFGRTTSIETLEKKLLRGEALSRVDHIERPGLEELYNHLRSGFDEKCFESPTIAATESSADLSERDLLLSEKRRLERALNRLKTIYLYGDDEMASKDFNIERERITKALSEVDSRINELDIANAFDLSLSDEAFMQKASQFILTQQLLDKRYVNYERFIRKIDPKIVKDFLNETVSNFCIKDGLTTSILLKNGIELRFSYKTAE

SEQ ID NO: 807 - protein, 578 aa, Unknown
  Description of Unknown: Integrase B808 sequence
  PTHR30461:SF3,IPR036162,PS51737,IPR011109,PTHR30461, PS00397,PF00239,G3DSA:1.10.10.2600,IPR006119,SSF53041, cd00338,SM00857,IPR025827,IPR038109,PS51736, IPR006118,PF13408,G3DSA:3.40.50.1390,PF07508,Coil
MGYVVKKAAQRFEEKKAAIYVRVSTQYQVDRASLPVQREELINYAKYALGISDYVIFEDAGYSAKNTDRPDYQQMMARMRTGEFSHLLVWKIDRISRNLLDFSVMYAELKELGVVFVSKNEQFDTSSAMGEAMLKIILIFAELERKTTSERVSAVFVSRANDGIWNGGKVPYGYSYDKESKTFSIAEDEAKIVRLIYSLYESEKSIVRVARIMNERGLKSRAGSDWSPTTVHTILSSPFYSGTYRYNYRDESNAKRFREKGKDEWVLVENHHPAIVSPERQAAVGVILESKRYNKNATYQRKNVHVFAGLLTCGCCGSTMAATTDKVRADGWRPSMYICSRRRKSEDCTNKYVSDVTLGPFVLNFFANLIKASNSFGRTTSIETLEKKLLRGEALSRVDHIERPGLEELYNHLRSGFDEKRFEPPTIAATETSADLSERDLLLSEKRRLERALNRLKTIYLYGDDEMASKDFNIERERITKALSEVDSRINELDIANAFDLSLSDEAFMQKASQFILTQQLLDKRYVNYERFIRKIDPKIVKDFLNETVSNFCIKDGLTTSILLKNGIELRFSYKTAE

SEQ ID NO: 808 - protein, 578 aa, Unknown
  Description of Unknown: Integrase B809 sequence
  PTHR30461:SF3,IPR036162,PS51737,IPR011109,PTHR30461, PS00397,PF00239,G3DSA:1.10.10.2600,IPR006119,SSF53041, SM00857,IPR025827,IPR038109,PS51736,cd03768, IPR006118,PF13408,G3DSA:3.40.50.1390,PF07508,Coil
MAYPTKNTAADNRIIAIYVRVSTGYQVDKDSLPFQKKELKAYCKHILHVDLSQVEIFEDAGHSGKNTKRPAYERMMEKVRAGLVSHVLVYKIDRISRNLVDFSLMYDDFKYNRVTFISLNEQFDTSSAIGEAVLKIILVFAELERKLTSERVKDIMIGRATEGKWNGARVPYGWDWDPDAEQPVHSKVEAPYARGMYEMYLEVRSTGKIRDYNNAHGIPTKRGGEWTSKTVSDFLRNPMNKGDYRYNYRESARGRKKPEDEVIYQEGVFEPLVDPEVWERVNRIMDDNASKRNAGGLYPIMKNCNVFAGLIQCADCGSGFQVVKKDRRRKNGFAPSMYGCTSKHRKIRCPAPNVSEVQIGPFVINYISSMVHAANERFKIHSPAALEAMLLSDPIFANIAGIESQGLNETFALLTGVSVSGSALWRTDLVKQTEAAANPSEIAELKKQIQKYNRAKERLEDAYYFSDDAMSEKEYLEKKNKFDAARVAAENKLKELTEVQIASHVDDSGFMKSASAFLLAHQLHAGVHIEYRDFAVTVEEESLKEFMNLVLDHISVKDRRVVEIVFSNGLSHRFIYRE

SEQ ID NO: 809 - protein, 578 aa, Unknown
  Description of Unknown: Integrase B810 sequence
  PTHR30461:SF3,IPR036162,PS51737,IPR011109,PTHR30461, PS00397,PF00239,G3DSA:1.10.10.2600,IPR006119,SSF53041, cd00338,SM00857,IPR025827,IPR038109,PS51736, IPR006118,PF13408,G3DSA:3.40.50.1390,PF07508,Coil
MGYVTKKAAQRFEEKKAAIYVRVSTQYQVDRASLPVQREELINYAKYALGISDYVIFEDAGYSAKNTDRPDYQQMMARMRTGEFSHLLVWKIDRISRNLLDFSVMYAELKELGVVFVSKNEQFDTSSAMGEAMLKIILIFAELERKTTSERVSAVFVSRANDGIWNGGKVPYGYSYDKESKTFSIAEDEAKIVRLIYSLYESEKSIVRVARIMNERGLKSRAGNDWSPTTVHTILSSPFYSGTYRYNYRDESNTKRFREKGKDEWVLVENHHPAIVSPERQATVGVILESKRYNKNATYQRKNVHVFAGLLTCGCCGATMAATTDKVRADGWRPSMYICSRRRKSEDCTNKYVSDVTLGPFVLNFFANLIKASNSFGRTTSIETLEKKLLRGEALSRVDHIERPGLEELYNHLRSGFDEKCFESPTIAATESSADLSERDLLLSEKRRLERALNRLKTIYLYGDDEMASKDFNIERERITIALSEVDSRINELDIANAFDLSLSDEAFMQKASQFILTQQLLDKRYVNYERFIRKIDPKIVKDFLNETVSNFCIKDGLTTSILLRNGIELRFSYKTAE

SEQ ID NO: 810 - protein, 578 aa, Unknown
  Description of Unknown: Integrase B811 sequence
  PTHR30461:SF3,IPR036162,PS51737,IPR011109,PTHR30461, PS00397,PF00239,G3DSA:1.10.10.2600,IPR006119,SSF53041, cd00338,SM00857,IPR025827,IPR038109,PS51736, IPR006118,PF13408,G3DSA:3.40.50.1390,PF07508,Coil
MGYVTKKAAQRFEEKKAAIYVRVSTQYQVDRASLPVQREELINYAKYALGISDYVIFEDAGYSAKNTDRPDYQQMMARMRTGEFSHLLVWKIDRISRNLLDFSVMYAELKELGVVFVSKNEQFDTSSAMGEAMLKIILIFAELERKTTSERVSAVFVSRANDGIWNGGKVPYGYSYDKESKTFSIAEDEAKIVRLIYSLYESEKSIVRVARIMNERGLKSRAGSDWSPTTVHTILSSPFYSGTYRYNYRDESNAKRFREKGKDEWVLVENHHPAIVSPERQAAVGVILESKRYNKNATYQRKNVHVFAGLLTCGCCGSTMAATTDKVRADGWRPSMYICSRRRKSEDCTNKYVSDVSLGPFVLNFFANLIKASNSFGRTTSIETLEKKLLRGEALSRVDHIERPGLEELYDHLRSGFDEKRFESPTIAATESSADLSERDLLLSEKRRLERALNRLKTIYLYGDDEMASKDFNIERERITKALSEVDSRINELDIANAFDLSLSDEAFMQKASQFILTQQLLDKRYVNYERFIRKIDPKIVKDFLNETVSNFCIKDGLTTSILLKNGIELRFSYKTAE

SEQ ID NO: 811 - protein, 578 aa, Unknown
  Description of Unknown: Integrase B812 sequence
  PTHR30461:SF3,IPR036162,PS51737,IPR011109,PTHR30461, PS00397,PF00239,G3DSA:1.10.10.2600,IPR006119,SSF53041, cd00338,SM00857,IPR025827,IPR038109,PS51736, IPR006118,PF13408,G3DSA:3.40.50.1390,PF07508,Coil
MGYVTKKAAQRFEEKKAAIYVRVSTQYQVDRASLPVQREELINYAKYALGISDYVIFEDAGYSAKNTDRPDYQQMMARMRTGEFSHLLVWKIDRISRNLLDFSVMYAELKELGVVFVSKNEQFDTSSAMGEAMLKIILIFAELERKTTSERVSAVFVSRANDGIWNGGKVPYGYSYDKESKTFSIAEDEAKIVRLIYSLYESEKSIVRVARIMNERGLKSRAGNDWSPTTVHTILSSPFYSGTYRYNYRDESNTKRFREKGKDEWVLVENHHPAIVSPERQAAVGVILESKRYNKNATYQRKNVHVFAGLLTCGCCGATMAATTDKVRADGWRPSMYICSRRRKSEDCTNKYVSDVTLGPFVLNFFANLIKASNSFGRTTSIETLEKKLLRGEALSRVDHIERPGLEELYNHLRSGFDEKCFESPTIAATESSADLSERDLLLSEKRRLERALNRLKTIYLYGDDEMASKDFNIERERITKALSEVDSRINELDIANAFDLSLSDEAFMQKASQFILTQQLLDKRYVNYERFIRKIDPKIVKDFLNETVSNFCIKDGLTTSILLKNGIELRFSYKTAE

SEQ ID NO: 812 - protein, 578 aa, Unknown
  Description of Unknown: Integrase B813 sequence
  PTHR30461:SF3,IPR036162,PS51737,IPR011109,PTHR30461, PS00397,PF00239,G3DSA:1.10.10.2600,IPR006119,SSF53041, cd00338,SM00857,IPR025827,IPR038109,PS51736, IPR006118,PF13408,G3DSA:3.40.50.1390,PF07508,Coil
MGYVVKKAAQRFEEKKAAIYVRVSTQYQVDRASLPVQREELINYAKYALGISDYVIFEDAGYSAKNTDRPDYQQMMARMRTGEFSHLLVWKIDRISRNLLDFSVMYAELKELGVVFVSKNEQFDTSSAMGEAMLKIILIFAELERKTTSERVSAVFVSRANDGIWNGGKVPYGYFYDKESKNFSIVEDEAKIVRLIYSLYEAEKSIVRVARTMNERGIKTRAGNDWSPTTVHTVLSSPFYSGTYRYNYRDESNTKRFREKGKDEWVLVENHHPAIVSPERQAAVGVILESKRYNKNATYQRKNVHVFAGLLTCGCCGSTMAATTDKVRADGWRPSMYICSRRRKSEDCTNKYVSDVTLGPFVLNFFANLIKASNSFGRTTSIETLEKKLLRGEALSRVDHIERPGLEELYNHLRSGFDEKRFESPTIAATESSADLSERDLLLSEKRRLERALNRLKTIYLYGDDEMASKDFNIERERITKALSEVDSRINELDIANAFDLSLSDEAFMQKASQFILTQQLLDKRYVNYERFIRKIDPKIVKDFLNETVSNFCIKDGLTTSILLKNGIELRFSYKTAE

SEQ ID NO: 813 - protein, 578 aa, Unknown
  Description of Unknown: Integrase B814 sequence
  PTHR30461:SF3,IPR036162,PS51737,IPR011109,PTHR30461, PS00397,PF00239,G3DSA:1.10.10.2600,IPR006119,SSF53041, cd00338,SM00857,IPR025827,IPR038109,PS51736, IPR006118,PF13408,G3DSA:3.40.50.1390,PF07508,Coil
MGYVVKKAAQRFEEKKAAIYVRVSTQYQVDRASLPVQREELINYAKYALGISDYVIFEDAGYSAKNTDRPDYQQMMARMRTGEFSHLLVWKIDRISRNLLDFSVMYAELKELGVVFVSKNEQFDTSSAMGEAMLKIILIFAELERKTTSERVSAVFVSRANDGIWNGGKVPYGYSYDKESKTFSIAEDEAKIVRLIYSLYESEKSIVRVARIMNERGLKSRAGNDWSPTTVHMILSSPFYSGTYRYNYRDESNIKRIREKSKDEWVLVENHHPAIVSPERQAAVGVILESKRYNKNATYQRKNVHVFAGLLTCGCCGSTMAATTDKVRTDGWRPSMYICSRRRKSDDCTNKYVSDVSLGPFVLNFFANLIKASNSFGRTTSIETLEKKLLRGEALSRVDHIERPGLEELYNHLRSGFDEKRFEPPTIAATEASADLSERDLLLSEKRRLERALNRLKTIYLYGDDEMASKDFNIERERITKALSEVDSRINELDIANAFDLSLSDEAFMQKASQFILTQQLLDKRYVNYERFIRKIDPKIVKDFLNETVSNFCIKDGLTTSILLKNGIELRFSYKTAE

SEQ ID NO: 814 - protein, 578 aa, Unknown
  Description of Unknown: Integrase B815 sequence
  PTHR30461:SF3,IPR036162,PS51737,IPR011109,PTHR30461, PS00397,PF00239,G3DSA:1.10.10.2600,IPR006119,SSF53041, cd00338,SM00857,IPR025827,IPR038109,PS51736, IPR006118,PF13408,G3DSA:3.40.50.1390,PF07508,Coil
MGYVVKKAAQRFEEKKAAIYVRVSTQYQVDRASLPVQREELINYAKYALGISDYVIFEDAGYSAKNTDRPDYQQMMARMRTGEFSHLLVWKIDRISRNLLDFSVMYAELKELGVVFVSKNEQFDTSSAMGEAMLKIILIFAELERKTTSERVSAVFVSRANDGIWNGGKVPYGYSYDKESKTFSIAEDEAKIVRLIYSLYESEKSIVRVARIMNERGLKSRAGNDWSPTTVHMILSSPFYSGTYRYNYRDESNTKRFREKGKDEWVLVENHHPAIVSPERQAAVGVILESKRYNKNATYQRKNVHVFAGLLTCGCCGSTMAATTDKVRADGWRPSMYICSRRRKSEDCTNKYVSDVTLGPFVLNFFANLIKASNSFGRTTSIETLEKKLLRGEALSRVDHIERPGLEELYNHLRSGFDEKRFESPTIAATESSADLSERDLLLSEKRRLERALNRLKTIYLYGDDEMASKDFNIERERITKALSEVDSRINELDIANAFDLSLSDEAFMQKASQFILTQQLLDKRYVNYERFIRKIDPKIVKDFLNETVSNFCIKDGLTTSILLKNGIELRFSYKTAE

SEQ ID NO: 815 - protein, 578 aa, Unknown
  Description of Unknown: Integrase B816 sequence
  PTHR30461:SF3,IPR036162,PS51737,IPR011109,PTHR30461, PS00397,PF00239,G3DSA:1.10.10.2600,IPR006119,SSF53041, cd00338,SM00857,IPR025827,IPR038109,PS51736, IPR006118,PF13408,G3DSA:3.40.50.1390,PF07508,Coil
MGYVTKKAAQRFEEKKAAIYVRVSTQYQVDRASLPVQREELINYAKYALGISDYVIFEDAGYSAKNTDRPDYQQMMARMRTGEFSHLLVWKIDRISRNLLDFSVMYAELKELGVVFVSKNEQFDTSSAMGEAMLKIILIFAELERKTTSERVSAVFVSRANDGIWNGGKVPYGYSYDKEGKTFSIAEDEAKVVRLIYSLYESEKSIVRVARIMNERGLKSRAGNDWSPTTVHTILSSPFYSGTYRYNYRDESNTKRFREKGKDEWVLVENHHPAIVSPERQAAVGVILESKRYNKNATYQRKNVHVFAGLLTCGCCGSTMAATTDKVRADGWRPSMYICSRRRKSEDCTNKYVSDVSLGPFVLNFFANLIKASNSFGRTTSIETLEKKLLRGEALSRVDHIERPGLEELYNHLRSGFDEKRFESPTIAATESSADLSERDLLLSEKRRLERALNRLKTIYLYGDDEMASKDFNIERERITKALSEVDSRINELDIANAFDLSLSDEAFMQKASQFILTQQLLDKRYVNYERFIRKIDPKIVKDFLNETVSNFCIKDGLTTSILLKNGIELRFSYKTAE

SEQ ID NO: 816 - protein, 578 aa, Unknown
  Description of Unknown: Integrase B817 sequence
  PTHR30461:SF3,IPR036162,PS51737,IPR011109,PTHR30461, PS00397,PF00239,G3DSA:1.10.10.2600,IPR006119,SSF53041, cd00338,SM00857,IPR025827,IPR038109,PS51736, IPR006118,PF13408,G3DSA:3.40.50.1390,PF07508,Coil
MGYVTKKAAQRFEEKKAAIYVRVSTQYQVDRASLPVQREELINYAKYALGISDYVIFEDAGYSAKNTDRPDYQQMMARMRTGEFSHLLVWKIDRISRNLLDFSVMYAELKELSVVFVSKNEQFDTSSAMGEAMLKIILIFAELERKTTSERVSAVFVSRANDGIWNGGKVPYGYSYDKESKTFSIAEDEAKIVRLIYSLYESEKSIVRVARIMNERGLKSRAGSDWSPTTVHTILSSPFYSGTYRYNYRDESNTKRFREKGKDEWVLVENHHPAIVSPERQAAVGVILESKRYNKNATYQRKNVHVFAGLLTCGCCGSTMAATTDKVRADGWRPSMYICSRRRKSEDCTNKYVSDVTLGPFVLNFFANLIKASNSFGRTTSIETLEKKLLRGEALSRVDHIERPGLEELYNHLRSGFDEKRFESPTIAATESSADLSERDLLLSEKRRLERALNRLKTIYLYGDDEMASKDFNIERERITKALSEVDSRINELDIANAFDLSLSDEAFMQKASQFILTQQLLDKRYVNYERFIRKIDPKIVKDFLNETVSNFCIKDGLTTSILLKNGIELRFSYKTAE

SEQ ID NO: 817 - protein, 578 aa, Unknown
  Description of Unknown: Integrase B818 sequence
  PTHR30461:SF3,IPR036162,PS51737,IPR011109,PTHR30461, PS00397,PF00239,G3DSA:1.10.10.2600,IPR006119,SSF53041, cd00338,SM00857,IPR025827,IPR038109,PS51736, IPR006118,PF13408,G3DSA:3.40.50.1390,PF07508,Coil
MGYVTKKAAQRFEEKKAAIYVRVSTQYQVDRASLPVQREELINYAKYALGISDYVIFEDAGYSAKNTDRPDYQQMMARMRTGEFSHLLVWKIDRISRNLLDFSVMYAELKELGVVFVSKNEQFDTSSAMGEAMLKIILIFAELERKTTSERVSAVFVSRANDGIWNGGKVPYGYSYDKESKAFSIAEDEAKIVRLIYSLYESEKSIVRVARIMNERGLKSRAGSDWSPTTVHTILSSPFYSGTYRYNYRDESNAKRFREKGKDEWVLVENHHPAIVSPERQAAVGVILESKHYNKNATYQRKNVHVFAGLLTCGCCGSTMAATTDKVRADGWRPSMYICSRRRKSEDCTNKYVSDVTLGPFVLNFFANLIKASNSFGRTTSIETLEKKLLRGEALSHVDHIERPGLEELYNHLRSGFDEKCFESPTIAATESSADLSERDLLLSEKRRLERALNRLKTIYLYGDDEMASKDFNIERERITKALSEVDSRINELDIANAFDLSLSDEAFMQKASQFILTQQLLDKRYVNYERFIRKIDPKIVKDFLNETVSNFCIKDGLTTSILLKNGIELRFSYKTAE

SEQ ID NO: 818 - protein, 578 aa, Unknown
  Description of Unknown: Integrase B819 sequence
  PTHR30461:SF3,IPR036162,PS51737,IPR011109,PTHR30461, PS00397,PF00239,G3DSA:1.10.10.2600,IPR006119,SSF53041, cd00338,SM00857,IPR025827,IPR038109,PS51736, IPR006118,PF13408,G3DSA:3.40.50.1390,PF07508,Coil
MGYVTKKAAQRFEEKKAAIYVRVSTQYQVDRASLPVQREELINYAKYALGISDYVIFEDAGYSAKNTDRPDYQQMMARMRTGEFSHLLVWKIDRISRNLLDFSVMYAELKEHGVVFVSKNEQFDTSSAMGEAMLKIILIFAELERKTTSERVSAVFVSRANDGIWNGGKVPYWYSYDKESKTFSIAEDEAKIVRLIYSLYESEKSIVRVARIMNERGLKSRAGNDWSPTTVHTILSSPFYSGTYRYNYRDESNTKRFREKGKDEWVLVENHHPAIVSPERQATVGVILESKRYNKNATYQRKNVHVFAGLLTCGCCGATMAATTDKVRADGWRPSMYICSRRRKSEDCTNKYVSDVTLGPFVLNFFANLIKASNSFGRTTSIETLEKKLLRGEALSRVDHIERPGLEELYNHLRSGFDEKCFESPTIAATESSADLSERDLLLSEKRRLERALNRLKTIYLYGDDEMASKDFNIERERITKALSEVDSRINELDIANAFDLSLSDEAFMQKASQFILTQQLLDKRYVNYERFIRKIDPKIVKDFLNETVSNFCIKDGLTTSILLKNGIELRFSYKTAE

SEQ ID NO: 819 - protein, 578 aa, Unknown
  Description of Unknown: Integrase B820 sequence
  PTHR30461:SF3,IPR036162,PS51737,IPR011109,PTHR30461, PS00397,PF00239,G3DSA:1.10.10.2600,IPR006119,SSF53041, cd00338,SM00857,IPR025827,IPR038109,PS51736, IPR006118,PF13408,G3DSA:3.40.50.1390,PF07508,Coil
MGYVVKKAAQRFEEKKAAIYVRVSTQYQVDRASLPVQREELINYAKYALGISDYVIFEDAGYSAKNTDRPDYQQMMARMRTGEFSHLLVWKIDRISRNLLDFSVMYAELKELGVVFVSKNEQFDTSSAMGEAMLKIILIFAELERKTTSERVSAVFVSRANDGIWNGGKVPYGYSYDKESKTFSIAEDEAKIVRLIYSLYESEKSIVRVARIMNERGLKSRAGNDWSPTTVHMILSSPFYSGTYRYNYRDESNTKRFREKGKDEWVLVENHHPAIVSPERQAAVGVILESKRYNKNATYQRKNVHVFAGLLTCGCCGSTMAATTDKVRADGWRPSMYICSRRRKSDDCTNKYVSDVSLGPFVLNFFANLIKASNSFGRTTSIETLEKKLLRGEALSHVDHIERPGLEELYNHLRSGFDEKRFEPPTIAATEASADLSERDLLLSEKRRLERALNRLKTIYLYGDDEMASKDFNIERERITKALSEVDSRINELDIANAFDLSLSDEAFMQKASQFILTQQLLDKRYVNYERFIRKIDPKIVKDFLNETVSNFCIKDGLTTSILLKNGIELRFSYKTAE

SEQ ID NO: 820 - protein, 578 aa, Unknown
  Description of Unknown: Integrase B821 sequence
  PTHR30461:SF3,IPR036162,PS51737,IPR011109,PTHR30461, PS00397,PF00239,G3DSA:1.10.10.2600,IPR006119,SSF53041, SM00857,IPR025827,IPR038109,PS51736,cd03768, IPR006118,PF13408,G3DSA:3.40.50.1390,PF07508,Coil
MAYPMKNTAADNRIIAIYVRVSTGYQVDKDSLPFQKKELKAYCKHILHVDLSQVEIFEDAGRSGKNTKRPAYERMMDKVRAGLVSHVLVYKIDRISRNLVDFSLMYDDFKYNRVTFISLNEQFDTSSAIGEAVLKIILVFAELERKLTSERVKDIMIGRATEGKWNGARVPYGWDWDPDAEQPVHSKIEAPYARGMYEMYLEVRSTSKIRDYNNSHNIPTKRGGEWTSKTVSDFLRNPMNKGDYRYNYRESARGRKKPEDEVIYQEGIFEPLVDPKVWERVNRIMDDNASKRNTGGLHPIMKNCNVFAGLIQCADCGSGFQVVKKDRRRKNGFAPSMYGCTSRFRKIHCPAPNVSEVQIGPFVINYISAMVYATKERFKIHSPAALESMLLSDPIFANIAGIESQGLNETFALLTGVSVSGSALWRTDPVKQSDTAATSSEIENLKKQIQKYNRAKERLEDAYYFSDDAMSEKEYLEKKNKFDAARVAAENKLKELTEVQIASHVNDSGFMKSASAFLLAHQLHAGVHIEYRDFAVTVEEESLKEFMNLVLDHISVKDRRVVEIVFSNGLSHRFIYRE

SEQ ID NO: 821 - protein, 578 aa, Unknown
  Description of Unknown: Integrase B822 sequence
  PTHR30461:SF3,cd00338,SM00857,G3DSA:1.10.10.2600,IPR036162, PF13408,PS51737,IPR025827,G3DSA:3.40.50.1390,IPR006119, IPR038109,PF07508,SSF53041,IPR011109,PTHR30461, PS51736,Coil,PF00239
MAKKKKPAGGIAVIYARYSSHNQRDVSIEQQIEACRKHAAELGLTIIATYEDRAISGRTDNRPAFQRLMHDAEKGKFSYVLAWKSNRMGRNMMQAMVNESRLMDCGIKVYYAEEDFDDSAAGRFALRSMMNVNQFYSDNLAEDVRRGLMDNANKCMVNGRQPLGYKRGKDGKVVVDEPAAAIVREVYTRVASGELFTDIARDLNRRGIKTADKGEWNKNSFHRLCSNEKYRGIYIYGDVRIEGGIPTIIDDPLWYKVQEALRVKKLKRNGRHRPGDEDYLLTGKLRCGKCGGYMIGMSGRSKTGNIHYYYACQNRRVGRTCDKKNIRRDVIEPAVAQAIKEYCLTDDAIEWIADKTVEYWEKADRNLQLDSIEGDLVAVQSSISNVMKAIEMGVVTETTRDRLIELEKQRTDLKSKLALAKEEVVHVDRKKLISSLLLFRNGDIHDRQYQEDLFKTFLISVYVYDDDNNGHLKIVFNAFGDNNTVDLPIDFGETDNQSAFSDGAEKFDYSLHRSTRKPSDSFRWLFCFISRCVFGPVRHKALIFSRLPGLYCFLMQQGNTEDRSQANEHLGRIRQRTV

SEQ ID NO: 822 - protein, 578 aa, Unknown
  Description of Unknown: Integrase B823 sequence
  PTHR30461:SF3,IPR036162,PS51737,IPR011109,PTHR30461, PS00397,PF00239,G3DSA:1.10.10.2600,IPR006119,SSF53041, cd00338,SM00857,IPR025827,IPR038109,PS51736, IPR006118,PF13408,G3DSA:3.40.50.1390,PF07508,Coil
MGYVTKKAAQRFEEKKAAIYVRVSTQYQVDRASLPVQREELINYAKYALGISDYVIFEDAGYSAKNTDRPDYQQMMARMRTGEFSHLLVWKIDRISRNLLDFSVMYAELKELGVVFVSKNEQFDTSSAMGEAMLKIILIFAELERKTTSERVSAVFVSRANDGIWNGGKVPYGYSYDKESKTFSIAEDEAKIVRLIYSLYESEKSIVRVARIMNERGLKSRAGSDWSPTTVHTILSSPFYSGTYRYNYRDESNAKRFREKGKDEWVLVENHHPAIVSPERQAAVGVILESKRYNKNATYQRKNVHVFAGLLTCGCCGSTMAATTDKVRADGWRPSMYICSRRRKSEDCTNKYVSDVTLGPFVLNFFANLIKASNSFGRTTSIETLEKKLLRGEALSHVDHIERPGLEELYNHLRSGFDEKCFESPTIAATESSADLSERDLLLSEKRRLERALNRLKTIYLYGDDEMASKDFNIERERITKALSEVDSRINELDIANTFDLSLSDEAFMQKASQFILTQQLLDKRYVNYERFIRKIDPKIVKDFLNETVSNFCIKDGLTTSILLKNGIELRFSYKTAE

SEQ ID NO: 823 - protein, 578 aa, Unknown
  Description of Unknown: Integrase B824 sequence
  PTHR30461:SF3,SM00857,G3DSA:1.10.10.2600,IPR036162,PF13408, IPR025827,G3DSA:3.40.50.1390,PS51737,IPR006119,IPR038109, PF07508,SSF53041,IPR011109,PTHR30461,Coil, PS51736,cd00338,PF00239
MDIHDIRQQLRTKSIYDISLRVTYYARVSSESDEQLNSLGNQIQYYEDFIRRNAAWTFVPGYIDEGLSGISTKHRENFNRMVEDAAEDKFDLIITKEISRFARNTLDSIQFTRQLLSYGVGVFFQNDNINTFDEDSELRLSIMSSIAQDELRKLSSRVKFGHQQAIRNNVVLGNSRIFGYRKDQKRLVIDDEQAPMVRELFELYATDRYSMKQIETLFWEKGYRNLNGKKIAHTTMSNMISNPKYKGYYVGNKVKVVDMFTKKQKFLPPEEWVMFKDETGEIVPAIVSEELWEQANAVLRRRSDDVKNRQGVCNHANLLTGKLYCTCCGTAYYRRESQDRQGNKNSKWVCSGKIKNGADSCDSFPIYEDEIKPLLLDVFRDTEASAEALIEEYVELYKSLNRGGKLDKQIASLQKQLETVEQKRMKLLTYNAQGKLDDADFLAMNKKCSAEARELQTQLTEALTQQESTGSLKQQLDTIRTVLRNAQKDAAKGVITKEFVTRYIDKIFATPEEDGSLRLDIKIFTGESCEKHLQNLRRQAAAQTVVPQAVAAFSPAGDPEVFTGHTFKKMIESYEKNL

SEQ ID NO: 824 - protein, 578 aa, Unknown
  Description of Unknown: Integrase B825 sequence
  PTHR30461:SF3,IPR036162,PS51737,IPR011109,PTHR30461, PS00397,PF00239,G3DSA:1.10.10.2600,IPR006119,SSF53041, cd00338,SM00857,IPR025827,IPR038109,PS51736, IPR006118,PF13408,G3DSA:3.40.50.1390,PF07508,Coil
MGYVTKKAAQRFEEKKAAIYVRVSTQYQVDRASLPVQREELINYAKDALGISDYVIFEDAGYSAKNTDRPDYQQMMARMRTGEFSHLLVWKIDRISRNLLDFSIMYAELKELGVVFVSKNEQFDTSSAMGEAMLKIILIFAELERKTTSERVSAVFVSRANDGIWNGGKVPYGYSYDKEGKTFSIAEDEAKIVRLIYSLYESEKSIVRVARIMNERGLKSRAGNDWSPTTVHTILSSPFYSGTYRYNYRDESNTKRFHEKGKDEWVLVENHHPAIVSPERQAAVGVILESKRYNKNATYQRKNVHVFAGLLTCGCCGSTMAATTDKVRADGWRPSMYICSRRRKSEDCTNKYVSDVTLGPFVLNFFANLIKASNSFGRTTSIETLEKKLLRGEALARVDHIERPGLEELYNHLRSGFDEKRFESPTIAATESSADLSERDLLLSEKRRLERALNRLKTIYLYGDDEMASKDFNIERERITKALSEVDSRINELDIANAFDLSLSDEAFMQKASQFILTQQLLDKRYVNYERFIRKIDPKIVKDFLNETVSNFCIKDGLTTSILLKNGIELRFSYKTAE

SEQ ID NO: 825 - protein, 578 aa, Unknown
  Description of Unknown: Integrase B826 sequence
  PTHR30461:SF3,IPR036162,PS51737,IPR011109,PTHR30461, PS00397,PF00239,G3DSA:1.10.10.2600,IPR006119,SSF53041, cd00338,SM00857,IPR025827,IPR038109,PS51736, IPR006118,PF13408,G3DSA:3.40.50.1390,PF07508,Coil
MGYVVKKAAQRFEEKKAAIYVRVSTQYQVDRASLPVQREELINYAKYALGISDYVIFEDAGYSAKNTDRPDYQQMMARMRTGEFSHLLVWKIDRISRNLLDFSVMYAELKELGVVFVSKNEQFDTSSAMGEAMLKIILIFAELERQTTSERVSAVFVSRANDGIWNGGKVPYGYSYDKESKTFSIVEDEAKVVRLIYSLYEAEKSIVRVARTMNERGIKTRAGNDWSPTTVHTVLSSPFYSGTYRYNYRDESNAKVYRAKDKDEWVLVENHHPVIVSPERQAAVGVILESKHYNKNATYQRKNVHVFAGLLTCGCCGSTMAATTDKVRADGWRPSMYICSRRRKSDDCTNKYVSDVSLGPFVLNFFANLIKASNSFGRTTSIETLEKKLLRGEALSRVDHIERPGLEELYNHLRSGFDEKRFESPTIAATESSADLSERDLLLSEKRRLERALNRLKTIYLYGDDEMASKDFNIERERITKALSEVDSRINELDIANAFDLSLSDKAFMQKASQFILTQQLLDKRYVNYERFIRKIDPKIVKDFLNETVSNFCIKNGLTTSILLKNGIELRFSYKTAE

SEQ ID NO: 826 - protein, 578 aa, Unknown
  Description of Unknown: Integrase B827 sequence
  PTHR30461:SF3,IPR036162,PS51737,IPR011109,PTHR30461, PS00397,PF00239,G3DSA:1.10.10.2600,IPR006119,SSF53041, cd00338,SM00857,IPR025827,IPR038109,PS51736, IPR006118,PF13408,G3DSA:3.40.50.1390,PF07508,Coil
MGYVTKKAAQRFEEKKAAIYVRVSTQYQVDRASLPVQREELINYAKYALGISDYVIFEDAGYSAKNTDRPDYQQMMSRMRTGEFSHLLVWKIDRISRNLLDFSVMYAELKELGVVFVSKNEQFDTSSAMGEAMLKIILIFAELERKTTSERVSAVFVSRANDGIWNGGKVPYGYSYDKESKTFSIAEDEAKIVRLIYSLYESEKSIVRVARIMNERGLKSRAGNDWSPTTVHTILSSPFYSGTYRYNYRDESNTKRFREKGKDEWVLVENHHPAIVSPERQAAVGVILESKRYNKNATYQRKNVHVFAGLLTCGCCGATMAATTDKVRADGWRPSMYICSRRRKSEDCTNKYVSDVTLGPFVLNFFANLIKASNSFGRTTSIETLEKKLLRGEALSCVDHIERPGLEELYNHLRSGFDEKCFESPTIAATESSADLSERDLLLSEKRRLERALNRLKTIYLYGDDEMASKDFNIERERITKALSEVDSRINELDIANAFDLSLSDEAFMQKASQFILTQQLLDKRYVNYERFIRKIDPKIVKDFLNETVSNFCIKDGLTTSILLKNGIELRFSYKTAE

SEQ ID NO: 827 - protein, 578 aa, Unknown
  Description of Unknown: Integrase B828 sequence
  PTHR30461:SF3,IPR036162,PS51737,IPR011109,PTHR30461, PS00397,PF00239,G3DSA:1.10.10.2600,IPR006119,SSF53041, cd00338,SM00857,IPR025827,IPR038109,PS51736, IPR006118,PF13408,G3DSA:3.40.50.1390,PF07508,Coil
MGYVTKKVAQRFEEKKAAIYVRVSTQYQVDRASLPVQREELINYAKYALGISDYVIFEDAGYSAKNTDRPDYQQMMARMRTGEFSHLLVWKIDRISRNLLDFSVMYAELKELGVVFVSKNEQFDTSSAMGEAMLKIILIFAELERKTTSERVSAVFVSRANDGIWNGGKVPYGYSYDKESKTFSIAEDEAKIVRLIYSLYESEKSIVRVARIMNERGLKSRAGNDWSPTTVHMILSSPFYSGTYRYNYRDESNTKRFREKGKDEWVLVENHHPAIVSPERQAAVGVILESKRYNKNATYQRKNVHVFAGLLTCGCCGSTMAATTDKVRADGWRPSMYICSRRRKSDDCTNKYVSDVSLGPFVLNFFANLIKASNSFGRTTSIETLEKKLLRGEALSRVDRIERPGLEELYNHLRSGFEEKRFESPTIAATESSVDLSERDLLLSEKRRLERALNRLKTVYLYGDDEMASKDFNIEREHITKALSEVDSRINELDIANAFDLSLSDEAFMQKASQFILTQQLLDKRYVNYERFIRKIDPKIVKDFLNETVSNFCIKDGLTTSILLKNGIELRFSYKTAE

SEQ ID NO: 828 - protein, 578 aa, Unknown
  Description of Unknown: Integrase B829 sequence
  PTHR30461:SF3,cd00338,SM00857,G3DSA:1.10.10.2600,IPR036162, PF13408,PS51737,G3DSA:3.40.50.1390,IPR025827,IPR006119, IPR038109,PF07508,SSF53041,IPR011109,PTHR30461, PS51736,Coil,PF00239
MAKKKKPAGGIAVIYARYSSHNQRDVSIEQQIEACRKHAAELGLTIIATYEDRAISGRTDNRPAFQRLMHDAEKGKFSYVLAWKSNRMGRNMMQAMVNESRLMDCGIKVYYAEEDFDDSAAGRFALRSMMNVNQFYSDNLAEDVRRGLMDNANKCMVNGRQPLGYKRGKDGKVVVDEPAAAIVREVYTRVASGELFTDIARDLNRRGIKTADKGEWNKNSFHRLCSNEKYRGIYIYGDIRIEGGIPTIIDDTLWYKVQEALRVKKLKRNGRHRPGDEDYLLTGKLRCGKCGGYMIGMSGRSKTGDIHYYYACQNRRVGRTCDKKNIRRDVIEPAVAQAIKEYCLTDDAIEWIADKTVEYWEKADRNLQLDSIEGDLAAVQSSISNVMKAIEMGVVTETTRDRLIELEKQRTDLKSKLALAKEEVVHVDRKKLISSLLLFRNGDIHDRQYQEDLFKTFLISVYVYDDDDNGHLKIVFNAFGDNNTVDLPIDFGETDNQSAFSDGAEKFDYSLHRSTRKPSDSFRWLFCFVSRCVFGPVRHKALIFSRLPGLYCFLMQQGNTEDRSQANEHLGRIRQRTV

SEQ ID NO: 829 - protein, 578 aa, Unknown
  Description of Unknown: Integrase B830 sequence
  PTHR30461:SF3,IPR036162,PS51737,IPR011109,PTHR30461, PS00397,PF00239,G3DSA:1.10.10.2600,IPR006119,SSF53041, cd00338,SM00857,IPR025827,IPR038109,PS51736, IPR006118,PF13408,G3DSA:3.40.50.1390,PF07508,Coil
MGYVTKKAAQRFEEKKAAIYVRVSTQYQVDRASLPVQREELINYAKYALGISDYVIFEDAGYSAKNTDRPDYQQMMARMRTGEFSHLLVWKIDRISRNLLDFSVMYAELKELGVVFVSKNEQFDTSSAMGEAMLKIILIFAELERKTTSERVSAVFVSRANDGIWNGGKVPYGYSYDKESKTFSIAEDEAKIVRLIYSLYESEKSIVRVARIMNERGLKSRAGSDWSPTTVHTILSSPFYSGTYRYNYRDESNTKRFREKGKDEWVLVENHHPAIVPPERQAAVGVILESKRYNKNATYQRKNVHVFAGLLTCGCCGSTMAATTDKVRADGWRPSMYICSRRRKSEDCTNKYVSDVTLGPFVLNFFANLIKASNSFGRTTSIETLEKKLLRGEALSRVDHIERPGLEELYNHLRSGFDEKRFESPTIAATESSADLSERDLLLSEKRRLERALNRLKTIYLYGDDEMASKDFNIERERITKALSEVDSRINELDIANAFDLSLSDEAFMQKASQFILTQQLLDKRYVNYERFIRKIDPKIVKDFLNETVSNFCIKDGLTTSILLKNGIELRFSYKTAE

SEQ ID NO: 830 - protein, 578 aa, Unknown
  Description of Unknown: Integrase B831 sequence
  PTHR30461:SF3,IPR036162,PS51737,IPR011109,PTHR30461, PS00397,PF00239,G3DSA:1.10.10.2600,IPR006119,SSF53041, cd00338,SM00857,IPR025827,IPR038109,PS51736, IPR006118,PF13408,G3DSA:3.40.50.1390,PF07508,Coil
MGYVTKKAAQRFEEKKAAIYVRVSTQYQVDRASLPVQREELINYAKYALGISDYVIFEDAGYSAKNTDRPDYQQMMARMRTGEFSHLLVWKIDRISRNLLDFSVMYAELKELGVVFVSKNEQFDTSSAMGEAMLKIILIFAELERKTTSERVSAVFVSRANDGIWNGGKVPYGYSYDKESKTFSIAEDEAKIVRLIYSLYESEKSIVRVARIMNERGLKSRAGSDWSPTTVHTILSSPFYSGTYRYNYRDESNAKRFREKGKDEWVLVENHHPAIVSPERQAAVGVILESKRYNKNATYQRKNVHVFAGLLTCGCCSSTMAATTDKVRADGWRPSMYICSRRRKSEDCTNKYVSDVTLGPFVLNFFANLIKASNSFGRTTSIETLEKKLLRGEALSHVDHIERPGLEELYNHLRSGFDEKCFESPTIAATESSADLSERDLLLSEKRRLERALNRLKTIYLYGDDEMASKDFNIERERITKALSEVDSRINELDIANAFDLSLSDEAFMQKASQFILTQQLLDKRYVNYERFIRKIDPKIVKDFLNETVSNFCIKDGLTTSILLKNGIELRFSYKTAE

SEQ ID NO: 831 - protein, 578 aa, Unknown
  Description of Unknown: Integrase B832 sequence
  PTHR30461:SF3,IPR036162,PS51737,IPR011109,PTHR30461, PS00397,PF00239,G3DSA:1.10.10.2600,IPR006119,SSF53041, cd00338,SM00857,IPR025827,IPR038109,PS51736, IPR006118,PF13408,G3DSA:3.40.50.1390,PF07508,Coil
MGYVVKKAAQRFEEKKAAIYVRVSTQYQVDRASLPVQREELINYAKYALGISDYVIFEDAGYSAKNTDRPDYQQMMARMRTGEFSHLLVWKIDRISRNLLDFSVMYAELKELGVVFVSKNEQFDTSSAMGEAMLKIILIFAELERKTTSERVSAVFVSRANDGIWNGGKVPYGYSYDKEGKTFSIAEDEAKIVRLIYSLYESEKSIVRVARIMNERGLKSRAGNDWSPTTVHTILSSPFYSGTYRYNYRDESNTKRFREKGKDEWVLVENHHPAIVSPERQAAVGVILESKRYNKNATYQRKNVHVFAGLLTCGCCGSTMAATTDKVRADGWRPSMYICSRRRKSEDCTNKYVSDVALGPFVLNFFANLIKASNSFGRTTSIETLEKKLLHGEALSRVDHIERPGLEELYNHLRSGFDEKRFESPTIAATESSADLSERDLLLSEKRRLERALNRLKTIYLYGDDEMASKDFNIERERITKALSEVDSRIDELDIANAFDLSLSDEAFMQKASQFILTQQLLDKRSVNYERFIRKIDPKIVKDFLNETVSNFCIKDGLTTSILLKNGIELRFSYKTAE

SEQ ID NO: 832 - protein, 578 aa, Unknown
  Description of Unknown: Integrase B833 sequence
  PTHR30461:SF3,IPR036162,PS51737,IPR011109,PTHR30461, PS00397,PF00239,G3DSA:1.10.10.2600,IPR006119,SSF53041, cd00338,SM00857,IPR025827,IPR038109,PS51736, IPR006118,PF13408,G3DSA:3.40.50.1390,PF07508,Coil
MGYVTKKAAQRFEEKKAAIYVRVSTQYQVDRASLPVQREELINYAKYALGISDYVIFEDAGYSAKNTDRPDYQQMMARMRTGEFSHLLVWKIDRISRNLLDFSVMYAELKELGVVFVSKNEQFDTSSAMGEAMLKIILIFAELERKTTSERVSAVFVSRANDGIWNGGKVPYGYSYDKESKTFSIAEDEAKIVRLIYSLYESEKSIVRVARIMNERGLKSRAGNDWSPTTVHTILSSPFYSGTYRYNYRDESNTKRFREKGKDEWVLVENHHPAIVSPERQATVGVILESKRYNKNATYQRKNVHVFAGLLTCGCCGATMAATTDKVRADGWRPSMYICSRRRKSEDCTNKYVSDVTLGPFVLNFFANLIKASNSFGRTTSIETLEKKLLRGEALSRVDHIERPGLEELYNHLRSGFDEKCFESPTIAATESSADLSERDLLLSEKRRLERALNRLKTIYLYGDDEMASKDFNIERERITKALSEVDSRINELDIANAFDLSLSDEAFMQKASQFILTQQLLDKRYVNYERFIRKIDPKIVKDFLNETVSNFCIKDGLTTSILLKNGIELRFSYKTAE

SEQ ID NO: 833 - protein, 578 aa, Unknown
  Description of Unknown: Integrase B834 sequence
  PTHR30461:SF3,IPR036162,PS51737,IPR011109,PTHR30461, PS00397,PF00239,G3DSA:1.10.10.2600,IPR006119,SSF53041, cd00338,SM00857,IPR025827,IPR038109,PS51736, IPR006118,PF13408,G3DSA:3.40.50.1390,PF07508,Coil
MGYVVKKAAQRFEEKKAAIYVRVSTQYQVDRASLPVQREELINYAKYALGISDYVIFEDAGYSAKNTDRPDYQQMMARMRTGEFSHLLVWKIDRISRNLLDFSVMYAELKELGVVFVSKNEQFDTSSAMGEAMLKIILIFAELERKTTSERVSAVFVSRANDGIWNGGKVPYGYSYDKESKTFSIAEDEAKIVRLIYSLYESEKSIVRVARIMNERGLKSRAGSDWSPTTVHTILSSPFYSGTYRYNYRDESNAKRFREKGKDEWVLVENHHPAIVSPERQAAVGVILESKHYNKNATYQRKNVHVFAGLLTCGCCGSTMAATTDKVRADGWRPSMYICSRRRKSEDCTNKYVSDVTLGPFVLNFFANLIKASNSFGRTTSIETLEKKLLRGEALSHVDHIERPGLEELYNHLRSGFDEKCFESPTIAATESSADLSERDLLLSEKRRLERALNRLKTIYLYGDDEMASKDFNIERERITKALSEVDSRINELDIANAFDLSLSDEAFMQKASQFILTQQLLDKRYVNYERFIRKIDPKIVKDFLNETVSNFCIKDGLTTSILLKNGIELRFSYKTAE

SEQ ID NO: 834 - protein, 578 aa, Unknown
  Description of Unknown: Integrase B835 sequence
  PTHR30461:SF3,IPR036162,PS51737,IPR011109,PTHR30461, PS00397,PF00239,G3DSA:1.10.10.2600,IPR006119,SSF53041, cd00338,SM00857,IPR025827,IPR038109,PS51736, IPR006118,PF13408,G3DSA:3.40.50.1390,PF07508,Coil
MGYVTKKVAQRFEEKKAAIYVRVSTQYQVDRASLPVQREELINYAKYALGISDYVIFEDAGYSAKNTDRPDYQQMMARMRTGEFSHLLVWKIDRISRNLLDFSVMYAELKELGVVFVSKNEQFDTSSAMGEAMLKIILIFAELERKTTSERVSAVFVSRANDGIWNGGKVPYGYSYDKESKTFSIAEDEAKIVRLIYSLYESEKSIVRVARIMNERGLKSRAGNDWSPTTVHMILSSPFYSGTYRYNYRDESNTKRFREKGKDEWVLVENHHPAIVSPERQAAVGVILESKRYNKNATYQRKNVHVFAGLLTCGCCGSTMAATTDKVRADGWRPSMYICSRRRKSDDCTNKYVSDVSLGPFVLNFFANLIKASNSFGRTTSIETLEKKLLRGEALSRVDHIERPGLEELYNHLRSGFEEKRFESPTIAATESSADLSERDLLLSEKRRLERALNRLKTVYLYGDDEMASKDFNIERERITKALSEVDSRINELDIANAFDLSLSDEAFMQKASQFILTQQLLDKRYVNYERFIRKIDPKIVKDFLNETVSNFCIKDGLTTSILLKNGIELRFSYKTAE

SEQ ID NO: 835 - protein, 578 aa, Unknown
  Description of Unknown: Integrase B836 sequence
  PTHR30461:SF3,IPR036162,PS51737,IPR011109,PTHR30461, PS00397,PF00239,G3DSA:1.10.10.2600,IPR006119,SSF53041, cd00338,SM00857,IPR025827,IPR038109,PS51736, IPR006118,PF13408,G3DSA:3.40.50.1390,PF07508,Coil
MGYVTKKAAQRFEEKKAAIYVRVSTQYQVDRASLPVQREELINYAKYALGISDYVIFEDAGYSAKNTDRPDYQQMMSRMRTGEFSHLLVWKIDRISRNLLDFSVMYAELKELGVVFVSKNEQFDTSSAMGEAMLKIILIFAELERKTTSERVSAVFVSRANDGIWNGGKVPYGYSYDKESKTFSIAEDEAKIVRLIYSLYESEKSIVRVARIMNERGLKSRAGNDWSPTTVHTVLSSPFYSGTYRYNYRDESNTKRFREKGKDEWVLVENHHPAIVSPERQAAVGLILESKRYNKNATYQRKNVHVFAGLLTCGCCGATMAATTDKVRADGWRPSMYICSRRRKSEDCTNKYVSDVTLGPFVLNFFANLIKASNSFGRTTSIETLEKKLLRGEALSCVDHIERPGLEELYNHLRSGFDEKCFESPTIAATESSADLSERDLLLSEKRRLERALNRLKTIYLYGDDEMASKDFNIERQRITKALSEVDSRINELDIANAFDLSLSDEAFMQKASQFILTQQLLDKRYVNYERFIRKIDPKIVKDFLNETVSNFCIKDGLTTSILLKNGIELRFSYKTAE

SEQ ID NO: 836 - protein, 578 aa, Unknown
  Description of Unknown: Integrase B837 sequence
  PTHR30461:SF3,IPR036162,PS51737,IPR011109,PTHR30461, PS00397,PF00239,G3DSA:1.10.10.2600,IPR006119,SSF53041, cd00338,SM00857,IPR025827,IPR038109,PS51736, IPR006118,PF13408,G3DSA:3.40.50.1390,PF07508,Coil
MGYVTKKAAQRFEEKKAAIYVRVSTQYQVDRASLPVQREELINYAKYALGISDYVIFEDAGYSAKNTDRPDYQQMMARMRTGEFSHLLVWKIDRISRNLLDFSVMYAELKELGVVFVSKNEQFDTSSAMGEAMLKIILIFAELERKTTSERVSAVFVSRANDGIWNGGKVPYGYSYDKEGKTFSIAEDEAKIVRLIYSLYESEKSIVRVARIMNERGLKSRAGSDWSPTTVHTILSSPFYSGTYRYNYRNESNRKRFREKGKDEWVLVENHYPAIVSPERQAAVGVILESKRYNKNATYQRKNVHVFAGLLTCGCCGSTMAATTDKVRADGWRPSMYICSRRRKSEDCTNKYVSDVSLGPFVLNFFANLIKASNSFGRTTSIETLEKKLLRGEALSRVDHIERPGLEELYNHLRSGFDEKRFESPTIAATESSADLSERDLLLSEKRRLERALNRLKTIYLYGDDEMASKDFNIERERITKALSEVDSRINELDIANAFDLSLSDEAFMQKASQFILTQQLLDKRYVNYERFIRKIDPKIVKDFLNETVSNFCIKDGLTTSILLKNGIELRFSYKTAE

SEQ ID NO: 837 - protein, 578 aa, Unknown
  Description of Unknown: Integrase B838 sequence
  PTHR30461:SF3,IPR036162,PS51737,IPR011109,PTHR30461, PS00397,PF00239,G3DSA:1.10.10.2600,IPR006119,SSF53041, cd00338,SM00857,IPR025827,IPR038109,PS51736, IPR006118,PF13408,G3DSA:3.40.50.1390,PF07508,Coil
MGYVTKKAAQRFEEKKAAIYVRVSTQYQIDRASLPVQREELINYAKYALGISDYVIFEDAGYSAKNTDRPDYQQMMARMRTGEFSHLLVWKIDRISRNLLDFSVMYAELKELGVVFVSKNEQFDTSSAMGEAMLKIILIFAELERKTTSERVSAVFVSRANDGIWNGGKVPYGYSYDKESKTFSIAEDEAKIVRLIYSLYESEKSIVRVARIMNERGLKSRAGNDWSPTTVHTILSSPFYSGTYRYNYRDESNTKRFREKGKDEWVLVENHHPAIVSPERQAAVGGILESKRYNKNATYQRKNVHVFAGLLTCGCCGATMAATTDKVRADGWRPSMYICSRRRKSEDCTNKYVSDVTLGPFVLNFFANLIKASNSFGRTTSIETLEKKLLRGEALSCVDHIERPGLEELYNHLRSGFDEKCFESPTIAATESSADLSERDLLLSEKRRLERALNRLKTIYLYGDDEMASKDFNIERERITKALSEVDSRINELDIANAFDLSLSDEAFMQKASQFILTQQLLDKRYVNYERFIRKIDPKIVKDFLNETVSNFCIKDGLTTSILLKNGIELRFSYKTAE

SEQ ID NO: 838 - protein, 578 aa, Unknown
  Description of Unknown: Integrase B839 sequence
  PTHR30461:SF3,IPR036162,PS51737,IPR011109,PTHR30461, PS00397,PF00239,G3DSA:1.10.10.2600,IPR006119,SSF53041, cd00338,SM00857,IPR025827,IPR038109,PS51736, IPR006118,PF13408,G3DSA:3.40.50.1390,PF07508,Coil
MGYVTKKAAQRFEEKKAAIYVRVSTQYQVDRASLPVQREELINYAKYALGISDYVIFEDAGYSAKNTDRPDYQQMMARMRTGEFSHLLVWKIDRISRNLLDFSVMYAELKELGVVFVSKNEQFDTSSAMGEAMLKIILIFAELERKTTSERVSAVFVSRANDGIWNGGKVPYGYSYDKESKTFSIAEDEAKIVRLIYSLYESEKSIVRVARIMNERGLKSRAGNDWSPTTVHTILSSPFYSGTYRYNYRDESNTKRFREKGKDEWVLVENHHPAIVSPERQAAVGVILESKRYNKNATYQRKNVHVFAGLLTCGCCGATMAATTDKVRADGWRPSMYICSRRRKSEDCTNKYVSDVTLGPFVLNFFANLIKASNSFGRTTSIETLEKKLLRGEALSCVDHIERPGLEELYNHLRSGFDEKCFESPTIAATESSADLSERDLLLSEKRRLERALNRLKTIYLYGDDEMASKDFNIERERITKALSEVDSRINELDIANAFDLSLSDEAFMQKASQFILTQQLLDKRYVNYERFIRKIDPKIVKDFLNETVSNFCIKDGLTTSILLKNGIELRFSYKTAE

SEQ ID NO: 839 - protein, 578 aa, Unknown
  Description of Unknown: Integrase B840 sequence
  PTHR30461:SF3,IPR036162,PS51737,IPR011109,PTHR30461, PS00397,PF00239,G3DSA:1.10.10.2600,IPR006119,SSF53041, SM00857,IPR025827,IPR038109,PS51736,cd03768, IPR006118,PF13408,G3DSA:3.40.50.1390,PF07508,Coil
MAYPMKNTAADNRIIAIYVRVSTGYQVDKDSLPFQKKELKAYCKHILHVDLSQVEIFEDAGRSGKNTKRPAYERMMEKVRAGLVSHVLVYKIDRISRNLVDFSLMYDDFKYNRVTFISLNEQFDTSSAIGEAVLKIILVFAELERKLTSERVKDIMIGRATEGKWNGARVPYGWDWDPDAEQPVHSKIEAPYARGMYEMYLKVRSTGKIRDYNNAHGIPTKRGGEWTSKTVSDFLRNPMNKGDYRYNYRESARGRKKPEDEVIYQEGVFEPLVDPEMWERVNRIMDDNASKRNTGGLHPIMKNCNVFAGLIQCAECSSGFQVVKKDRRRKNGFAPSMYGCTSRFRKIHCPAPNVSEVQIGPFVINYISAMVHATKERFKIHSPAALEFMLLSDPIFANIAGIESQGLNETFALLTGVSVSGSALWRTDPVKQSDTAATSSEIENLKKQIQKYNRAKERLEDAYYFSDDAMSEKEYLEKKNKFDAARVAAENKLKELTEVQIASHVDDSGFMKSASAFLLAHQLHAGVHIEYRDFAVTVEEESLKEFMNLVLDHISVKDRRVVEIVFSNGLSHRFIYRE

SEQ ID NO: 840 - protein, 578 aa, Unknown
  Description of Unknown: Integrase B841 sequence
  PTHR30461:SF3,SM00857,G3DSA:1.10.10.2600,IPR036162,PF13408, IPR025827,G3DSA:3.40.50.1390,PS51737,IPR006119,IPR038109, PF07508,IPR011109,SSF53041,PTHR30461,Coil, PS51736,cd00338,PF00239
MDVVGYCRFSSEAQRDGYSIEAQVRAITEWAAREGHTIKKFYIDEARSGTNDNREDFQNMVADAASGTFRAVVVHKLDRFARDRYDSAVYRHKLKTHGVRVISVLEPLDDSPESVMMEAVLEGMAEYYSRNLSREVRKGKKEVALKAQHNGGPVPYGYRVDEQMRYVPIPEEAAVIREIFSRLDGGSSYADVTRWAISQGLRTRRGSYFNEAFIAHMTTNTMLVGRFSYGLRSKVGQEPIIIEDAIEPIVDANVFWRVHNATLARKRGPRPRVKEDDYILTGYLFCAHCGSHLFGFKSKKEYKSRNGADRLYEARFYRCARKDPMKHNRRHEPDVVLQRCHLRSIRKDVLETFVFSAIENVLFSQATMDWVVAELSVRLKQRKQNAQNNAADANAYRKELEKVRNQKARLLDLYLSEALDKATFALKSRELDSREGFLDGEIKRLSTPVSIFVEPDKIKTALEGFIKSPNADSSEYKKRLLATFVDSIAVSNEKIVIYFKFPIPGAGDKAERSFDDFVRKTTSVSTLEVCANISYKRMFSILYAPLSMFPLTILPFSCFKEPIRSPASRARVDGEQET

SEQ ID NO: 841 - protein, 578 aa, Unknown
  Description of Unknown: Integrase B842 sequence
  PTHR30461:SF3,IPR036162,PS51737,IPR011109,PTHR30461, PS00397,PF00239,G3DSA:1.10.10.2600,IPR006119,SSF53041, cd00338,SM00857,IPR025827,IPR038109,PS51736, IPR006118,PF13408,G3DSA:3.40.50.1390,PF07508,Coil
MGYVTKKAAQRFEEKKAAIYVRVSTQYQVDRASLPVQREELINYAKYALGISDYVIFEDAGYSAKNTDRPDYQQMMSRMRTGEFSHLLVWKIDRISRNLLDFSVMYAELKELGVVFVSKNEQFDTSSAMGEAMLKIILIFAELERKTTSERVSAVFVSRANDGIWNGGKVPYGYSYDKESKTFSIAEDEAKIVRLIYSLYESEKSIVRVARIMNERGLKSRAGNDWSPTTVHTVLSSPFYSGTYRYNYRDESNTKRFREKGKDEWVLVENHHPAIVSPERQVAVGLILESKRYNKNATYQRKNVHVFAGLLTCGCCGATMAATTDKVRADGWRPSMYICSRRRKSEDCTNKYVSDVTLGPFVLNFFANLIKASNSFGRTTSIETLEKKLLRGEALSRVDHIERPGLEELYNHLRSGFDEKCFESPTIAATESSADLSERDLLLSEKRRLERALNRLKTIYLYGDDEMASKDFNIERERITKALSEVDSRINELDIANAFDLSLSDEAFMQKASQFILTQQLLDKRYVNYERFIRKIDPKIVKDFLNETVSNFCIKDGLTTSILLKNGIELRFSYKTAE

SEQ ID NO: 842 - protein, 578 aa, Unknown
  Description of Unknown: Integrase B843 sequence
  PTHR30461:SF3,IPR036162,PS51737,IPR011109,PTHR30461, PS00397,PF00239,G3DSA:1.10.10.2600,IPR006119,SSF53041, SM00857,IPR025827,IPR038109,PS51736,cd03768, IPR006118,PF13408,G3DSA:3.40.50.1390,PF07508,Coil
MNTLSALNITPSPPRMCRVAIYIRVSTLQQVDKDSLPMQRKDLIAYSKLILNTDDYVIFEDAGYSGKNTIRPRYQDMMDQIRTGAFTHLLVWKIDRISRNLLDFAQMYQELKELNVTFVSKNEQFNTSTAMGEAMLKIILVFAELERNMTSERVTATMISRANTGKWNGGRVPYGYKYDQEEEDFLIIASESNVVKLIHDKYEELQSLVYLARYMNEHGYRTRSGNEWSPPSLAIILKSWWYCGCYEYNKRKAGNRQKLKDESEWIMIEDHHIAIISYDQKERVLAILKGNKRFATEHNLYVKGIHVHVFGGLCWCRNCGKKMTSTSSNKNRSWQYSKYLCSTRRRSLTKCRGRSTSDPVLGEFIFNYILNMLNAQKGFDSIHSPADLQAALLTGDAFSDIKSIDREELNDLYNTLSSNVSGNIYGRSFNVNKEKKNDEVQSSLTILKSEKKKLDRALDRLTNLYLYDDMAISEKDYMIKKTEIETRIAEIDEKIGIVNKNSVDDSITDEEFVDKASTFIITQKLTDRNYISYKRLATSIDPKILYMFTHDVIDYIDIYNGKVQRIVFRNGLSQTFIR

SEQ ID NO: 843 - protein, 578 aa, Unknown
  Description of Unknown: Integrase B844 sequence
  PTHR30461:SF3,IPR036162,PS51737,IPR011109,PTHR30461, PS00397,PF00239,G3DSA:1.10.10.2600,IPR006119,SSF53041, cd00338,SM00857,IPR025827,IPR038109,PS51736, IPR006118,PF13408,G3DSA:3.40.50.1390,PF07508,Coil
MGYVTKKAAQRFEEKKAAIYVRVSTQYQVDRASLPVQREELINYAKYALGISDYVIFEDAGYSAKNTDRPDYQQMMARMRTGEFSHLLVWKIDRISRNLLDFSVMYAELKELGVVFVSKNEQFDTSSAMGEAMLKIILIFAELERKTTSERVSAVFVSRANDGIWNGGKVPYGYSYDKESKTFSIAEDEAKIVRLIYSLYESEKSIVRVARIMNERGLKSRAGNDWSPTTVHTILSSPFYSGTYRYNYRDESNTKRFREKGKDEWVLVENHHPAIVSPERQAAVGLILESKRYNKNATYQRKNVHVFAGLLTCGCCGATMAATTDKVRADGWRPSMYICSRRRKSEDCTNKYVSDVTLGPFVLNFFANLIKASNSFGRTTSIETLEKKLLRGEALSCVDHIERPGLEELYNHLRSGFDEKCFESPTIAATESSADLSERDLLLSEKRRLERALNRLKTIYLYGDDEMASKDFNIERERITKALSEVDSRINELDIANAFDLSLSDEAFMQKASQFILTQQLLDKRYVNYERFIRKIDPKIVKDFLNETVSNFCIKDGLTTSILLKNGIELRFSYKTAE

SEQ ID NO: 844 - protein, 577 aa, Unknown
  Description of Unknown: Integrase B845 sequence
  PTHR30461:SF3,IPR036162,PS51737,IPR011109,PTHR30461, PS00397,PF00239,G3DSA:1.10.10.2600,IPR006119,SSF53041, SM00857,IPR025827,IPR038109,PS51736,cd03768, IPR006118,PF13408,G3DSA:3.40.50.1390,PF07508,Coil
MISNSAATHAKVAIYIRVSTLHQIDRDSLPMQRQDLIAYAKLILNTDDVTIFEDAGYSGKNTIRPEFQKMMSQLRTGTYTHLLVWKIDRISRNLLDFAEMYQELKDLGVTFVSKNEQFDTSTAMGEAMLKIILVFAELERNMTSERVTATMISRASNGQWNGGRIPYGYDYDPEEQDFSFNSDEYNIAHLIHDKYEELRSLVYLARYLNEHGYRTRAGNDWSPVSLDIILRSVFYCGDYQYNRLKEGDRQRPKDKSEWITVKDHHPAIVSREQKERILALLESNRRLKSFRKSGKSKYTHIFSGLLICGNCGQPMTSSISTIKKTTGRRYSLYFCPTHRKSKLWCTGKSTSDPIVGEFVFNYILNMLNAQKAFSPETSIQELEQQLLSGDTFSPVAAIAPDGLHDLFHTLRTGTIKGEVFGKDVKIKTGSEPPLQLSKLKKEKVRLERAIDRLNKLFLYSEKAMSESEYLTQKIQLSDSLEEVEDKLAFLASEGSLQQSITDDEFIAKASNFILSQKLTDRNYISFQSLSATVSPEVLDSFLSSIIDNIVFKDGAVNSITFRNGLSHTFIYREKPEV

SEQ ID NO: 845 - protein, 577 aa, Unknown
  Description of Unknown: Integrase B846 sequence
  PTHR30461:SF3,IPR036162,PS51737,IPR011109,PTHR30461, PS00397,PF00239,G3DSA:1.10.10.2600,IPR006119,SSF53041, SM00857,IPR025827,IPR038109,PS51736,cd03768, IPR006118,PF13408,G3DSA:3.40.50.1390,PF07508,Coil
MSINRNNTSETPKKAALYVRVSTNYQIDRDSLPMQRQELITYAQLMFGINDYVVFEDAGYSGKNTDRPEFQNMMRRIRAGEFTHLLCWKIDRISRNLLDFASMYQELKDLGVTFVSKNEQFDTSTAIGEAMLKIILVFAELERNMTSERVTATMLSRAQNGLWNGGRVPYGYDYDKDSKTFSINQEEAFLVRKMYDLYSEHRSLVMVSRALNEDGYASRAGNDWSPVSIFIILTNPFYTGIYRYNHYKIPGLKIEKDPSEWIEVPDHHPRIISDEQFGNVNRILQSNSRSKRLPGQQHTSKGIHIFGGLLYCGTCGSQYVSTPSRLLASGYRPSKYACPNLRKKKTCNTKSISDPVIGEFVLNYVLNMMHARAAFSSIHDTSELQDALLNGGTFQNVDHIGKDGLDSCFHMFSSTPLDGKRFRKPKKATTIDPELKRLRAEKRKTERALDRLMNLYLYADNPISEKDFVIRKQALDDYLKEINENLGMIDRGRGIETISDENFIKRASYFIMSKELAGKDYIYFKKLAMDMDAEILRDFFQEIIDSIVMEGSNVKEIVFRNGLAHTFFYKDTEKPEA

SEQ ID NO: 846 - protein, 577 aa, Unknown
  Description of Unknown: Integrase B847 sequence
  PTHR30461:SF3,IPR036162,PS51737,IPR011109,PTHR30461, PS00397,PF00239,G3DSA:1.10.10.2600,IPR006119,SSF53041, SM00857,IPR025827,IPR038109,PS51736,cd03768, IPR006118,PF13408,G3DSA:3.40.50.1390,PF07508,Coil
MISNSAATHAKVAIYIRVSTLHQIDRDSLPMQRQDLIAYAKLILNTDDVTIFEDAGYSGKNTIRPEFQKMMSQLRTGTYTHLLVWKIDRISRNLLDFAEMYQELKNLGVTFVSKNEQFDTSTAMGEAMLKIILVFAELERNMTSERVTATMISRASNGQWNGGRIPYGYDYDPEEQDFSFNSDEYNIAHLIHDKYEELRSLVYLARYLNEHGYRTRAGNDWSPVSLDIILRSVFYCGDYQYNRLKEGDRQRPKDKSEWITVKDHHPAIVSREQKERILALLESNRRLKSFRKSGKSKYTHIFSGLLICGNCGQPMTSSISTVKKTTGRRYSLYFCPTHRKSKLWCTGKSTSDPIIGEFVFNYILNMLNAQKAFSPETSIQELEQQLLSGDTFSPVAAIAPDGLQDLFHTLRTGTVKGEVFGKDVKIKTDSEPPLQLSKLKKEKIRLERAIDRLNKLFLYSEKAMSESEYLSQKIQLSDALEEVEDKLTFLASEDSLQQSITDNEFIAKASNFILSQKLTDRNYVSFQSLSATVSPEVLDSFLSSIIDNIVFKDGAIHSITFRNGLSHTFIYKEKPEV

SEQ ID NO: 847 - protein, 577 aa, Unknown
  Description of Unknown: Integrase B848 sequence
  PTHR30461:SF3,IPR036162,PS51737,IPR011109,PTHR30461, PS00397,PF00239,G3DSA:1.10.10.2600,IPR006119,SSF53041, SM00857,IPR025827,IPR038109,PS51736,cd03768, IPR006118,PF13408,G3DSA:3.40.50.1390,PF07508,Coil
MISNSAATHAKVAIYIRVSTLHQIDRDSLPMQRQDLIAYAKLILNTDDVTVFEDAGYSGKNTIRPEFQKMMSQLRTGTYTHLLVWKIDRISRNLLDFAEMYQELKDLGVTFVSKNEQFDTSTAMGEAMLKIILVFAELERNMTSERVAATMISRASNGQWNGGRIPYGYDYDPEEQTFSFNSDEYNIAHLIHDKYEELRSLVYLARYLNEHGYRTRAGNDWSPVSLDIILRSVFYCGDYQYNRLKEGDRQRPKDKSEWITVKDHHPAIVSRGQKERILALLESNRRLKSFRKSGKSKYTHIFSGLLICGNCGQPMTSSISTVKKTTGRRYSLYFCPTHRKSKLWCTGKSTSDPIIGEFVFNYILNMLNAQKAFSPETSIQELEQQLLSGDTFSPVAAIAPDGLHDLFHTLRTGTIKGEVFGKDVKIKTGSEPPLQLSKLKKEKVRLERAIDRLNKLFLYSEKAMSESEYLTQKIQLSDSLEEVEDKLAFLASEGSLQQSITDDEFIAKASNFILSQKLTDRNYISFQSLSATVSPEVLDSFLSSIIDNIVFKDGAVNSITFRNGLSHTFIYREKPEV

SEQ ID NO: 848 - protein, 577 aa, Unknown
  Description of Unknown: Integrase B849 sequence
  PTHR30461:SF3,IPR036162,PS51737,IPR011109,PTHR30461, PS00397,PF00239,G3DSA:1.10.10.2600,IPR006119,SSF53041, SM00857,IPR025827,IPR038109,PS51736,cd03768, IPR006118,PF13408,G3DSA:3.40.50.1390,PF07508,Coil
MISNSAATHAKVAIYIRVSTLHQIDRDSLPMQRQDLIAYAKLILNTDDVTIFEDAGYSGKNTIRPEFQKMMSQLRTGTYTHLLVWKIDRISRNLLDFAEMYQELKDLGVTFVSKNEQFDTSTAMGEAMLKIILVFAELERNMTSERVAATMISRASNGQWNGGRIPYGYDYDPEEQTFSFNSDEYNIAHLIHDKYEELRSLVYLARYLNEHGYRTRAGNDWSPVSLDIILRSVFYCGDYQYNRLKEGDRQRPKDKSEWITVKDHHPAIVSRGQKERILALLESNRRLKSFRKSGKSKYTHIFSGLLICGNCGQPMTSSISTVKKTTGRRYSLYFCPTHRKSKLWCTGKSTSDPIIGEFVFNYILNMLNAQKAFSPETSIQELEQQLLSGDTFSPVAAIAPDGLQDLFHTLRTGTVKGEVFGKDVKIKTDSEPPLQLSKLKKEKIRLERAIDRLNKLFLYSEKAMSESEYLTQKIQLSDSLEEVEDKLAFLASEDSLQQSITDDEFISKASNFILSQKLTDRNYVSFQSLSATVSPEVLDSFLSSIIDNIVFKDGAVHSITFRNGLSHTFIYKEKPEV

SEQ ID NO: 849 - protein, 577 aa, Unknown
  Description of Unknown: Integrase B850 sequence
  PTHR30461:SF3,IPR036162,PS51737,IPR011109,PTHR30461, PS00397,PF00239,G3DSA:1.10.10.2600,IPR006119,SSF53041, SM00857,IPR025827,IPR038109,PS51736,cd03768, IPR006118,PF13408,G3DSA:3.40.50.1390,PF07508,Coil
MSINRNNTSETPKKAALYVRVSTNYQIDRDSLPMQRQELITYAQLMFGINDYVVFEDAGYSGKNTDRPEFQNMMRRIRAGEFTHLLCWKIDRISRNLLDFASMYQELKDLGVTFVSKNEQFDTSTAIGEAMLKIILVFAELERNMTSERVTATMLSRAQNGLWNGGRVPYGYDYDKDSKTFSINQEEAFLVRKMYDLYSEHRSLVMVSRTLNEDGYASRAGNDWSPVSIFIILTNPFYTGIYRYNHYKIPGLKIEKDPSEWIEVPDHHPRIISDEQFDNVNRILQSNSRSKRLPGQQHTSKGTHIFGGLLYCGTCGSQYVSTPSRLLASGYRPSKYACPNLRKKKTCNTKSISDPVIGEFVLNYVLNMMHARAAFSSIHDTSELQDALLNGGTFQNVDHIGKDGLDSCFHMFSSTPLDGKRFRKPKKATTIDPELKRLRAEKRKTERALDRLMNLYLYADNPISEKDFVIRKQALDDYLKEINENLGMIDRGRGIETISDENFIKRASYFIMSKELAGKDYIYFKKLAMDMDAEILRDFFQEIIDSIVMEGSNVKEIVFRNGLAHTFFYKDTEKPEA

SEQ ID NO: 850 - protein, 577 aa, Unknown
  Description of Unknown: Integrase B851 sequence
  PTHR30461:SF3,IPR036162,PS51737,IPR011109,PTHR30461, PS00397,PF00239,G3DSA:1.10.10.2600,IPR006119,SSF53041, SM00857,IPR025827,IPR038109,PS51736,cd03768, IPR006118,PF13408,G3DSA:3.40.50.1390,PF07508,Coil
MISNSAAAHAKVAIYIRVSTLHQIDRDSLPMQRQDLIAYAKLILNTDDVTIFEDAGYSGKNTIRPEFQKMMSQLRTGTYTHLLVWKIDRISRNLLDFAEMYQELKNLGVTFVSKNEQFDTSTAMGEAMLKIILVFAELERNMTSERVTATMISRASNGQWNGGRIPYGYDYDSEEQAFSFNSDEYNIAHLIHDKYEELRSLVYLARYLNEHGYRTRAGNDWSPVSLDIILRSVFYCGDYQYNRLKEGDRQRPKDKSEWITVKDHHPAIVSREQKERILALLESNRRLKSFRKSGKSKYTHIFSGLLICGNCGQPMTSSISTIKKTTGRRYSLYFCPTHRKSKLWCIGKSTSDPIVGEFVFNYILNMLNAQKAFSPETSIQELEQQLLSGDTFSPVAAIAPDGLHDLFHTLRTGTIKGEVFGKDVKIKTGSEPPLQLSKLKKEKVRLERAIDRLNKLFLYSEKAMSESEYLTQKIQLSDSLEEVEDKLAFLASEGSLQQSITDDEFIAKASNFILSQKLTDRNYVSFQSLSATVSPEVLDSFLSSIIDNIVFKDGAIHSITFRNGLSHTFIYKEKPEV

SEQ ID NO: 851 - protein, 577 aa, Unknown
  Description of Unknown: Integrase B852 sequence
  PTHR30461:SF3,IPR036162,PS51737,IPR011109,PTHR30461, PS00397,PF00239,G3DSA:1.10.10.2600,IPR006119,SSF53041, SM00857,IPR025827,IPR038109,PS51736,cd03768, IPR006118,PF13408,G3DSA:3.40.50.1390,PF07508,Coil
MISNSAATHAKVAIYIRVSTLHQIDRDSLPMQRQDLIAYAKLILNTDDVTIFEDAGYSGKNTIRPEFQKMMSQLRTGTYTHLLVWKIDRISRNLLDFAEMYQELKNLGVTFVSKNEQFDTSTAMGEAMLKIILVFAELERNMTSERVTATMISRASNGQWNGGRIPYGYDYDPEEQAFSFNSDEYNIAHLIHDKYEELRSLVYLARYLNEHGYRTRAGNDWSPVSLDIILRSVFYCGDYQYNRLKEGDRQRPKDKSEWITVKDHHPAIVSREQKERILALLESNRRLKSFRKSGKSKYTHIFSGLLICGNCGQPMTSSISTIKKTTGRRYSLYFCPTHRKSKLWCTGKSTSDPIVGEFVFNYILNMLNAQKAFSPETSIQELEQQLLSGDTFSPVAAIAPDGLHDLFHTLRTGTIKGEVFGKDVKIKTGSEPPLQLSKLKKEKVRLERAIDRLNKLFLYSEKAMSESEYLTQKIQLSDSLEEVEDKLAFLASEDSLQQSITDDEFIAKASNFILSQKLTDRNYVSFQSLSATVSPEVLDSFLSSIIDNIVFKDGAVHSITFRNGLSHTFIYKEKPEV

SEQ ID NO: 852 - protein, 577 aa, Unknown
  Description of Unknown: Integrase B853 sequence
  SM00857,G3DSA:1.10.10.2600,IPR036162,PS51737,G3DSA:3.40.50.1390, IPR006119,IPR038109,PF07508,IPR011109,SSF53041, PTHR30461,Coil,PS51736,cd00338,PF00239
MIKKTRKLSHDEKIVEKRKQLAEKGKVAAIWTRVSSADQYKQNYSIDTQKAACREYCERNNIRIKGYFGGENESAKFAGEKFLDMIGTVGENPEYNTIVVFDFDRFSRNSIDGITYKSTLKRKGITIESVNQPIDTNNILAEQIENILIIMADIDNAMRRHKCHDGMVACIKRGELYSRPPFGYDSRKEGKRHIITINEDGKTLKKAFEWIVEEPEISQAEIIRRLEARGLNISKQKLSQCLHNSFYCGLLEHRYLNGEIIKGKQEAMISESTFYKVQDILAGNNKNYQQAEETPEFPLKMHVFCAKDNHALSGYTVKKKGLKYYKCGVKGCGTNVSAKELHSKYAEILNGLNVPESLLPIYKRVIERKFKEKENDNLISKNAIEKNLSTLKTKLKKAKMRFLTEDGIDNDDYNEVKSDLETKIANCEKELKDCSRDLSNLAEYTDVAFKIASSLGSTWGEMDFKVCQKIQNLAFPKGIKWDGEKRCYRTDGMNEFFRQIGLQRGSARGEGIKETGTDYSMSVLVAGEGHFTGIFGDSYPQLKAVQGRRTGAFGANLAHATAPSGRFPSTNMLIVLH

SEQ ID NO: 853 - protein, 577 aa, Unknown
  Description of Unknown: Integrase B854 sequence
  PTHR30461:SF3,SM00857,G3DSA:1.10.10.2600,IPR036162,PF13408, IPR025827,PS51737,G3DSA:3.40.50.1390,IPR006119,IPR038109, PF07508,IPR011109,SSF53041,PF00239, PTHR30461,PS51736,Coil,cd00338
MDIYKVRQLLKGQSIFDIPLRVVYYVRVSTDKEEQKNSTVNQDTFFEELIASHPAWTFVGKYIDDGASGIMADKREDFQRMISDGQNQMYDLILTKEISRFARNTLDSIRYTRLLLNCGIGVWFYTDNVNTINEDAELHLAILSSIAQNESLKTSTRVRMGHAQSIKRGVVMGNSMLYGYNKDHGKLVIDPYEAEMVRSIYEKYATGVYTTPMLEREIYASGYRNHYGEKISRTVIGHIITNPKYKGYYVGGKVKIIDMFTKKRKFIPKDEWIMYKDETGERVPAIIDEETWELANKYFVERGDAIKARRKVCTTPNTFTGKIYCGTDGAPYWLKHRVLRGKDDSTWYCSDKLKNGTDSCKSFPIKEDEIRSMVVDLITLSPSDIQKYCEMYLEMLRKNIDSSVDKSAKIAELNKEIENNMAKKQKLLDYNLQGILSDDEFISNTKLLNRKIERAQSLIDSFTSKSPVELKSNSVLDKAAKLLNDFSGVKSEDLDNKIVDELIDKIVITPQDTDYASVEFYLKTSEKVHKTYDRKAVLRNDNLLNIMLPVRSTVFYRHPRHLYGHETEIRYDYRLVI

SEQ ID NO: 854 - protein, 577 aa, Unknown
  Description of Unknown: Integrase B855 sequence
  PTHR30461:SF3,SM00857,G3DSA:1.10.10.2600,IPR036162,PF13408, IPR025827,PS51737,G3DSA:3.40.50.1390,IPR006119,IPR038109, PF07508,IPR011109,SSF53041,PTHR30461,Coil, PS51736,cd00338,PF00239
MDIYKVRQLLKGQSIFDIPLRVVYYVRVSTDKEEQKNSTVNQDAFFEELIASHPVWTFVGKYIDDGASGIMADKREDFQRMISDGQNQMYDLILTKEISRFARNTLDSIRYTRLLLNCGVGVWFYTDNVNTINEDAELHLAILSSIAQNESLKTSTRVRMGHAQSIKRGVVMGNSMLYGYNKDHGKLVIDPYEAEMVRSIYEKYATGVYTTPMLEREIYASGYRNHYGEKISRTVIGHIITNPKYKGYYVGGKVKIIDMFTKKRKFIPKDEWIMYKDETGERVPAIIDEETWELANKYFVERGDAIKARRKVCTTPNTFTGKIYCGTDGAPYWLKHRVLRGKDDSTWYCSDKLKNGTDSCKSFPIKEDEIRSMVVDLITLSPSDIQKYCEMYLEMLRKSIDSSVDKSAKIAELNKEIENNMAKKQKLLDYNLQGILSDDEFISNTKLLNRKIERAQSLIDSFTSKSPVELKSNSVLDKAAKLLNDFSGVKSEDLDNKIVDELIDKIVITPQDTDYASVEFYLKTSEKVHKTYDRKAVLRNDNLLNIMLPVRSTVFYRHPRHLYGHETEIRYDYRLVI

SEQ ID NO: 855 - protein, 577 aa, Unknown
  Description of Unknown: Integrase B856 sequence
  PTHR30461:SF3,IPR036162,PS51737,IPR011109,PTHR30461, PS00397,PF00239,G3DSA:1.10.10.2600,IPR006119,SSF53041, SM00857,IPR025827,IPR038109,PS51736,cd03768, IPR006118,PF13408,G3DSA:3.40.50.1390,PF07508,Coil
MNINKNIPNKHHKKAALYVRVSTNYQIDKDSLPMQRQDLITYAQLMFGIEDYVIFEDAGYSGKNTDRPEFQNMMRRIRAREFTHLLCWKIDRISRNLLDFASMYQELKDLGVTFVSKNEQFDTSTAIGEAMLKIILVFAELERNMTSERVTATMLSRAQNGLWNGGRVPYGYDYDKDSKSFSINQEEAKLVHKIYDLYSEHRSLIMVSRALNEDGYSSRAGNDWSPVSTFIILTNPFYTGKYRYNHYKDPGLKVEKDPSEWIEVPDHHPRIISDEQFQNVNRILQANSRSKRLPGQQHTSQNTHIFGGLLYCGTCGSQYVSTPSRTQASGYRPSKYACPNLRKKKTCNTKSVSDPVIGEFVINYVLNMMHAKDNFSSIHNSEDLQLSLLLGGTFQNVDHIGRDGLESYFHMLSTTPLDGKQFRKPKKAVTIDPELKRLRAEKRKTERALDRLMNLYLYSDNPISEKDFIIRKQALDDYLKEINENLGMIDRGHGIETISDENFIKRASYFIMNKELAGKNYIYFKKLAMDMDPEILKNFFHEIIDSIVMEGSNVKEIIFRNGLAHTFYYKDAEKPEA

SEQ ID NO: 856 - protein, 577 aa, Unknown
  Description of Unknown: Integrase B857 sequence
  PTHR30461:SF3,IPR036162,PS51737,IPR011109,PTHR30461, PS00397,PF00239,G3DSA:1.10.10.2600,IPR006119,SSF53041, SM00857,IPR025827,IPR038109,PS51736,cd03768, IPR006118,PF13408,G3DSA:3.40.50.1390,PF07508,Coil
MISNSAATHAKVAIYIRVSTLHQIDRDSLPMQRQDLIAYAKLILNTDDVTVFEDAGYSGKNTIRPEFQKMMSQLRTGTYTHLLVWKIDRISRNLLDFAEMYQELKDLGVTFVSKNEQFDTSTAMGEAMLKIILVFAELERNMTSERVAATMISRASNGQWNGGRIPYGYDYDPEEQTFSFNSDEYNIAHLIHDKYEELRSLVYLARYLNEHGYRTRAGNDWSPVSLDIILRSVFYCGDYQYNRLKEGDRQRPKDKSEWITVKDHHPAIVSRGQKERILALLESNRRLKSFRKSGKSKYTHIFSGLLICGNCGQPMTSSISTVKKTTGRRYSLYFCPTHRKSKLWCTGKSTSDPIIGEFVFNYILNMLNAQKAFSPETSIQELEQQLLSGDTFSPVAAIAPDGLQDLFHTLRTGTVKGEVFGKDVKIKTDSEPPLQLSKLKKEKIRLERAIDRLNKLFLYSEKAMSESEYLTQKIQLSDSLEEVEDKLAFLASEDSLQQSITDDEFISKASNFILSQKLTDRNYVSFQSLSATVSPEVLDSFLSSIIDNIVFKDGAVHSITFRNGLSHTFIYKEKPEV

SEQ ID NO: 857 - protein, 577 aa, Unknown
  Description of Unknown: Integrase B858 sequence
  PTHR30461:SF3,SM00857,G3DSA:1.10.10.2600,IPR036162,PF13408, PS51737,G3DSA:3.40.50.1390,IPR025827,IPR006119,IPR038109, PF07508,IPR011109,SSF53041,PTHR30461,Coil, PS51736,cd00338,PF00239
MDIYKVRQLLKGQSIFDIPLRVVYYVRVSTDKEEQKNSTVNQDTFFEELIASHPAWTFVGKYIDDGASGIMADKREDFQRMISDGQNQMYDLILTKEISRFARNTLDSIRYTRLLLNCGIGVWFYTDNVNTINEDAELHLAILSSIAQNESLKTSTRVRMGHAQSIKRGVVMGNSMLYGYNKDHGKLVIDPYEAEMVRSIYEKYATGVYTTPMLEREIYASGYRNHYGEKISRTVIGHIITNPKYKGYYVGGKVKIIDMFTKKRKFIPKDEWIMYKDETGERVPAIIDEETWELANKYFVERGDAIKARRKVCTTPNTFTGKIYCGTDGAPYWLKHRRLRGKDDSTWYCSDKLKNGTDSCKSFPIKEEEIRSMVIDLITISPSDIQKYCEMYLDMLRKNIDSSVDKSAKIAELNKEIENNMAKKQKLLDYNLQGILSDDEFISNTKLLNRKIERAQSLIDSFTSKSPVELKSNSVLDKAAKLLNDFSGVKSEDLDNKIVDELIDKIVITPQDTDYASVEFYLKTSEKVHKTYDRKAVLRNDNLLNIMLPVRSTVFYRHPRHLYGHETEIRYDYRLVI

SEQ ID NO: 858 - protein, 577 aa, Unknown
  Description of Unknown: Integrase B859 sequence
  PTHR30461:SF3,IPR036162,PS51737,IPR011109,PTHR30461, PS00397,PF00239,G3DSA:1.10.10.2600,IPR006119,SSF53041, SM00857,IPR025827,IPR038109,PS51736,cd03768, IPR006118,PF13408,G3DSA:3.40.50.1390,PF07508,Coil
MISNSAATHAKVAIYIRVSTLHQIDRDSLPMQRQDLIAYAKLILNTDDVTIFEDAGYSGKNTIRPEFQKMMSQLRTGTYTHLLVWKIDRISRNLLDFAEMYQELKNLGVTFVSKNEQFDTSTAMGEAMLKIILVFAELERNMTSERVTATMISRASNGQWNGGRIPYGYDYDPEEQAFSFNSDEYNIAHLIHDKYEELRSLVYLARYLNEHGYRTRAGNDWSPVSLDIILRSVFYCGDYQYNRLKEGDRQRPKDKSEWITVKDHHLAIVSREQKERILALLESNRRLKSFRKSGKSKYTHIFSGLLICGNCGQPMTSSISTVKKTTGRRYSLYFCPTHRKSKLWCTGKSTSDPIVGEFVFNYILNMLNAQKAFSPETSIQELEQQLLSGDTFSPVVAIAPDGLQDLFHTLRTGTVKGEVFGKDVKIKTDSEPPLQLSKLKKEKVRLERAIDRLNKLFLYSEKAMSESEYLTQRIQLSDALEEVEDKLAFLASEDSLQQSITDDEFIAKASNFILSQKLTDRNYVSFHSLSATVSPEVLDSFLSSIIDNIVFKDGAIHSITFRNGLSHTFIYKEKPEV

SEQ ID NO: 859 - protein, 577 aa, Unknown
  Description of Unknown: Integrase B860 sequence
  PTHR30461:SF3,IPR036162,PS51737,IPR011109,PTHR30461, PS00397,PF00239,G3DSA:1.10.10.2600,IPR006119,SSF53041, SM00857,IPR025827,IPR038109,PS51736,cd03768, IPR006118,PF13408,G3DSA:3.40.50.1390,PF07508,Coil
MISNSAATHAKVAIYIRVSTLHQIDRDSLPMQRQDLIAYAKLILNTDDVTIFEDAGYSGKNTIRPEFQKMMSQLRTGTYTHLLVWKIDRISRNLLDFAEMYQELKDLGVTFVSKNEQFDTSTAMGEAMLKIILVFAELERNMTSERVAATMISRASNGQWNGGRIPYGYDYDPEEQTFSFNSDEYNIAHLIHDKYEELRSLVYLARYLNEHGYRTRAGNDWSPVSLDIILRSVFYCGDYQYNRLKEGDRQRPKDKSEWITVKDHHPAIVSREQKERILALLESNRRLKSFRKSGKSKYTHIFSGLLICGNCGQPMTSSISTIKKTTGRRYSLYFCPTHRKSKLWCTGKSTSDPIIGEFVFNYILNMLNAQKAFSSETSIQELEQQLLSGDTFSPVAAIAPDGLQDLFHTLRTGTIKGEVFGKDVKIKTGSEPPLQLSKLKKEKVRLERAIDRLNKLFLYSEKAMSESEYLTQKIQLSDALEEVEDKLTFLASEDSLQQSITDDEFIAKASNFILSQKLTDRNYVSFQSLSATVSPEVLDSFLSSIIDNIVFKDGAIHSITFRNGLSHTFIYKEKPEV

SEQ ID NO: 860 - protein, 577 aa, Unknown
  Description of Unknown: Integrase B861 sequence
  PTHR30461:SF3,IPR036162,PS51737,IPR011109,PTHR30461, PS00397,PF00239,G3DSA:1.10.10.2600,IPR006119,SSF53041, SM00857,IPR025827,IPR038109,PS51736,cd03768, IPR006118,PF13408,G3DSA:3.40.50.1390,PF07508,Coil
MISNSAATHAKVAIYIRVSTLHQIDRDSLPMQRQDLIAYAKLILNTDDVTIFEDAGYSGKNTIRPEFQKMMSQLRTGTYTHLLVWKIDRISRNLLDFAEMYQELKDLGVTFVSKNEQFDTSTAMGEAMLKIILVFAELERNMTSERVTATMISRASNGQWNGGRIPYGYDYDPEEQAFSFNSDEYNIAHLIHDKYEELRSLVYLARYLNEHGYRTRAGNDWSPVSLDIILRSVFYCGDYQYNRLKEGDRQRPKDKSEWITVKDHHPAIVSREQKERILALLESNRRLKSFRKSGKSKYTHIFSGLLICGNCGQPMTSSISTVKKTTGRRYSLYFCPTHRKSKLWCTGKSTSDPIIGEFVFNYILNMLNAQKAFSPETSIQELEQQLLSGDTFSPVAAIAPDGLQDLFHTLRTGTVKGEVFGKDVKIKTDSEPPLQLSKLKKEKIRLERAIDRLNKLFLYSEKAMSESEYLTQKIQLSDSLEEIEDKLAFLASEDSLQQSITDDEFISKASNFILSQKLTDRNYVSFQSLSATVSPEVLDSFLSSIIDNIVFKDGAVHSITFRNGLSHTFIYKEKPEV

SEQ ID NO: 861 - protein, 577 aa, Unknown
  Description of Unknown: Integrase B862 sequence
  PTHR30461:SF3,IPR036162,PS51737,IPR011109,PTHR30461, PS00397,PF00239,G3DSA:1.10.10.2600,IPR006119,SSF53041, cd00338,SM00857,IPR025827,IPR038109,PS51736, IPR006118,PF13408,G3DSA:3.40.50.1390,PF07508,Coil
MALPKKTIPQIEQKRAAIYVRVSTQYQVDRASLPVQRSELVNYAKYALDIPDFVIFEDAGYSAKNTDRPDYQQMMARIRTGEFSHLLVWKIDRISRNLLDFAAMYSELKQLGVVFVSKNEQFDTSSAMGEAMLKIILVFAELERNMTAERVSAVFLSRANDGIWNGGKVPFGYAYDKQTKTFSILEDEAKTVRLIYALYESSKSLVTVSKALNERGIKTRNGSEWSPTTVHTMLSNPFYSGTYRYNYRNESDPHHHVPKKKEDWILVKNHHPAIVSPEHQAAVELILASKSYGKNQTYQRKNIHAFAGLLTCGYCGSTMAATIDRARADGWRPSVYICSRRRMSNDCQNKYVSDVTLGPFVLNFFANLIKASNSFGKSTSIETLEKKLLRGDALSIVDHIERPGLEELYNHLRSGFEEKPFDSLAVNAAEASSDVQERDLLLADKRRLERALKRLNAIYLYGDEEIPGKDFILDRKSITDSLQQIDDRLKELDAAAVFDVSLSDDEFMEKASQFILTQQLLDKRSVNYEKFIRKIDPRIVKDFLNETVSNFCIKDGLTTSVLFKNGIELRFCYKAQQ

SEQ ID NO: 862 - protein, 577 aa, Unknown
  Description of Unknown: Integrase B863 sequence
  PTHR30461:SF3,IPR036162,PS51737,IPR011109,PTHR30461, PS00397,PF00239,G3DSA:1.10.10.2600,IPR006119,SSF53041, SM00857,IPR025827,IPR038109,PS51736,cd03768, IPR006118,PF13408,G3DSA:3.40.50.1390,PF07508,Coil
MSINRNNTSETPKKAALYVRVSTNYQIDRDSLPMQRQELITYAQLMFGINDYVVFEDAGYSGKNTDRPEFQNMMRRIRAGEFTHLLCWKIDRISRNLLDFASMYQELKDLGVTFVSKNEQFDTSTAIGEAMLKIILVFAELERNMTSERVTATMLSRAQNGLWNGGRVPYGYDYDKDSKTFSINQEEAFLVRKMYDLYSEHRSLVMVSRTLNEDGYASRAGNDWSPVSIFIILTNPFYTGIYRYNHYKIPGLKIEKDPSEWIEVPDHHPRIISDEQFDNVNRILQSNSRSKRLPGQQHTSKGTHIFGGLLYCGTCGSQYVSTPSRLLASGYRPSKYACPNLRKKKTCNTKSISDPVIGEFVLNYVLNMMHARAAFSSIHDTSELQDALLSGGTFQNVDHIGKDGLDSCFHMFSSTPLDGKRFRKPKKATTIDPELKRLRAEKRKTERALDRLMNLYLYADNPISEKDFVIRKQALDDYLKEINENLGMIDRGRGIETISDENFIKRASYFIMSKELAGKDYIYFKKLAMDMDAEILRDFFQEIIDSIVMEGSNVKEIVFRNGLAHTFFYKDTEKPEA

SEQ ID NO: 863 - protein, 577 aa, Unknown
  Description of Unknown: Integrase B864 sequence
  IPR036162,PS51737,IPR011109,PTHR30461,PS00397, PF00239,G3DSA:1.10.10.2600,IPR006119,SSF53041,cd00338, SM00857,IPR025827,IPR038109,PS51736,IPR006118, PF13408,G3DSA:3.40.50.1390,PF07508,Coil
MAYRFSQQTAAPDTRTVALYVRVSTGYQVDKDSLPFQKQELRNYCRHVLHIEESRLEVFEDAGKSGKNTKRPAFERMMTKVKAGLVSHVIVYKIDRISRNLVDFSLMYDDFKYNRVTFISLNEQFDTSSAIGEAVLKIILIFAELERKLTSERVTDIMINRALSGQWNGARMPFGWDWDEEKKMPVHSDKEAPTVRLMYDMYEETRSSCRVRDYFNSHDIATKRGGEWTTKTIADLIRNPMNKGDYRYNYRESAKGRRKPDEEVVYVKNVFPPLVPPDQWDRCNQIMDHNAKLRCSSGFPHKGTHIHIFAGLLKCGKCGSYFQVEKRDRVRRNGFAPSLYRCGRRYRKQHCISKSCSEVVVGPFVLNYISAMIRASDMRSQIHSPEELEKILLSDSVFQNVAGIVSDGLNATYAMLSGTDSSVPYRPLPLASHNVQEDDNVQKWEQGIVRIDRAIERLKKVYLFDDAAMSEKEYLETKSELERERIELDNKIKEQESATFPVQTEDLAFIKSASSFLLAHRLKAGDHIQYNTFAPLVDDEVLKDFLNLVIKEIVVVDARITEITFQNGLTHKFLYRE

SEQ ID NO: 864 - protein, 577 aa, Unknown
  Description of Unknown: Integrase B865 sequence
  PTHR30461:SF3,IPR036162,PS51737,IPR011109,PTHR30461, PS00397,PF00239,G3DSA:1.10.10.2600,IPR006119,SSF53041, cd00338,SM00857,IPR025827,IPR038109,PS51736, IPR006118,PF13408,G3DSA:3.40.50.1390,PF07508,Coil
MALPKKTIPQIEQKRAAIYVRVSTQYQVDRASLPVQRSELVNYAKYALDIPDFVIFEDAGYSAKNTDRPDYQQMMARIRTGEFSHLLVWKIDRISRNLLDFAAMYSELKQLGVVFVSKNEQFDTSSAMGEAMLKIILVFAELERNMTAERVSAVFLSRANDGIWNGGKVPFGYAYDKQTKTFSILEDEAKTVRLIYALYESSKSLVTVSKALNERGIKTRNGSEWSPTTVHTMLSNPFYSGTYRYNYRNESDPHHHVPKKKEDWILVKNHHPAIVSPEHQAAVELILASKSYGKNQTYQRKNIHAFAGLLTCGYCGSTMAATIDRARADGWRPSVYICSRRRMSNDCQNKYVSDVTLGPFVLNFFANLIKASNSFGKSTSIETLEKKLLRGDALSIVDHIERPGLEELYNHLRSGFDEKPFDSLAVNAAEASSDVQEHDLLLADKRRLERALKRLNAIYLYGDEEIPGKDFILDRKSITDSLQQIDDRLKELDAAAVFDVSLSDDEFMEKASQFILTQRLLDKRSVNYEKFIRKIDPRIVKDFLNETVSNFCIKDGLTTSVLFKNGIELRFCYKAQQ

SEQ ID NO: 865 - protein, 577 aa, Unknown
  Description of Unknown: Integrase B866 sequence
  PTHR30461:SF3,IPR036162,PS51737,IPR011109,PTHR30461, PS00397,PF00239,G3DSA:1.10.10.2600,IPR006119,SSF53041, SM00857,IPR025827,IPR038109,PS51736,cd03768, IPR006118,PF13408,G3DSA:3.40.50.1390,PF07508,Coil
MISNSAATHAKVAIYIRVSTLHQIDRDSLPMQRQDLIAYAKLILNTDDVTIFEDAGYSGKNTIRPEFQKMMSQLRTGTYTHLLVWKIDRISRNLLDFAEMYQELKNLGVTFVSKNEQFDTSTAMGEAMLKIILVFAELERNMTSERVTATMISRASNGQWNGGRIPYGYDYDPEEQAFSFNFDEYNIAHLIHDKYEELRSLVYLARYLNEHGYRTRAGNDWSPVSLDIILRSVFYCGDYQYNRLKEGDRQRPKDKSEWITVKDHHPAIVSREQKERILALLESNRRLKSFRKSGKSKYTHIFSGLLICGNCGQPMTSSISTIKKTTGRRYSLYFCPTHRKSKLWCTGKSTSDPIVGEFVFNYILNMLNAQKAFSPETSIQELEQQLLSGDTFSPVAAIAPDGLHDLFHTLRTGTIKGEVFGKDVKIKTGSEPPLQLSKLKKEKVRLERAIDRLNKLFLYSEKAMSESEYLTQKIQLSDSLEEVEDKLAFLASEGSLQQSITDDEFIAKASNFILSQKLTDRNYVSFQSLSATVSPEVLDSFLSSIIDNIVFKDGAIHSITFRNGLSHTFIYKEKPEV

SEQ ID NO: 866 - protein, 577 aa, Unknown
  Description of Unknown: Integrase B867 sequence
  PTHR30461:SF3,IPR036162,PS51737,IPR011109,PTHR30461, PS00397,PF00239,G3DSA:1.10.10.2600,IPR006119,SSF53041, SM00857,IPR025827,IPR038109,PS51736,cd03768, IPR006118,PF13408,G3DSA:3.40.50.1390,PF07508,Coil
MISNSAATHAKVAIYIRVSTLHQIDRDSLPMQRQDLIAYAKLILNTDDVTIFEDAGYSGKNTIRPEFQKMMSQLRTGTYTHLLVWKIDRISRNLLDFAEMYQELKDLGVTFVSKNEQFDTSTAMGEAMLKIILVFAELERNMTSERVTATMISRASNGQWNGGRIPYGYDYDPEEQDFSFNSDEYNIAHLIHDKYEELRSLVYLARYLNEHGYRTRAGNDWSPVSLDIILRSVFYCGDYQYNRLKEGDRQRPKDKSEWITVKDHHPAIVSREQKERILALLESNRRLKSFRKSGKSKYTHIFSGLLICGNCGQPMTSSISTIKKTTGRRYSLYFCPTHRKSKLWCTGKSTSDPIVGEFVFNYILNMLNAQKAFSPETSIQELEQQLLSGDTFSPVAAIAPDGLHDLFHTLRTGTIKGEVFGKDVKIKTGSEPPLQLSKLKKEKVRLERAIDRLNKLFLYSEKAMSESEYLTQKIQLSDSLEEVEDKLAFLASEGSLQQSITDDEFIAKASNFILSQKLTNRNYISFQSLSATVSPEVLDSFLSSIIDNIVFKDGAVNSITFRNGLSHTFIYREKPEV

SEQ ID NO: 867 - protein, 577 aa, Unknown
  Description of Unknown: Integrase B868 sequence
  PTHR30461:SF3,SM00857,G3DSA:1.10.10.2600,IPR036162,PF13408, IPR025827,G3DSA:3.40.50.1390,PS51737,IPR006119,IPR038109, PF07508,SSF53041,IPR011109,PF00239,PTHR30461, PS51736,Coil,cd00338
MDIYKVRQLLKEQSIFDIPLRVVYYVRVSTDKEEQKNSTVNQDTFFEDLIASHPAWTFVGKYIDDGASGIMADKREDFQRMISDGQNKMYDLILTKEISRFARNTLDSIRYTRLLLNCGVGVWFYTDNVNTINEDAELHLAILSSIAQNESLKTSTRVRMGHAQSIKRGVVMGNSMLYGYNKDHGRLVIDPYEAEMVRSIYEKYATGVYTTPMLEREIYASGYRNHYGEKISRTVIGHIITNPKYKGYYVGGKVKIIDMFTKKRKFIPKDEWIMYKDETGERVPAIIDEGTWELANKYFVERGDAIKARRKVCTTPNTFTGKIYCGTDGAPYWLKHRVLRGKDDSTWYCSDKLKNGTDSCKSFPIKEDEIRSMVVDLITLSPSDIQKYCEMYLEMLRKSIDSSVDKSAKIAELNKEIENNMAKKQKLLDYNLQGILSDDEFISNTKLLNRKIERAQSLIDSFTSKSPVELKSNSVLDKAAKLLNDFSGVKSEDLDNKIVDELIDKIVITPQDTDYASVEFYLKTSEKVHKTYDRKAVLRNDNLLNIMLPVRSTVFYRHPRHLYGHETEIRYDYRLVI

SEQ ID NO: 868 - protein, 577 aa, Unknown
  Description of Unknown: Integrase B869 sequence
  PTHR30461:SF3,IPR036162,PS51737,IPR011109,PTHR30461, PS00397,PF00239,G3DSA:1.10.10.2600,IPR006119,SSF53041, SM00857,IPR025827,IPR038109,PS51736,cd03768, IPR006118,PF13408,G3DSA:3.40.50.1390,PF07508,Coil
MSINRNNTSETPKKAALYVRVSTNYQIDRDSLPMQRQELITYAQLMFGINDYVVFEDAGYSGKNTDRPEFQNMMRRIRAGEFTHLLCWKIDRISRNLLDFASMYQELKDLGVTFVSKNEQFDTSTAIGEAMLKIILVFAELERNMTSERVTATMLSRAQNGLWNGGRVPYGYDYDKDSKTFSINQEEAFLVHKMYDLYSEHHSLVLVSRDLNEDGYASRAGNDWSPVSIFIILTNPFYTGVYRYNHYKIPGLKIEKDPSEWIEVPDHHPRIISDEQFDNVNRILQANSRSKRLPGQQHTSKGIHIFGGLLYCGTCGSQYVSTPSRLLASGYRPSKYACPNLRKKKTCNTKSISDPVIGEFVLNYVLNMMHARAAFSSIHDTSDLQDALLNGGTFQNVDHIGNDGLDSCFHMFSSTPLDGKRFRKPKKAATIDPELKRLRAEKRKTERALDRLMNLYLYADNPISEKDFVIRKQALDDYLKEINENLGMIDRGRGIETISDENFIKRASYFIMSKELAGKDYIYFKKLAMDMDAEILRDFFQEIIDSIVMEGSNVKEIVFRNGLAHTFFYKGEEKPEA

SEQ ID NO: 869 - protein, 577 aa, Unknown
  Description of Unknown: Integrase B870 sequence
  PTHR30461:SF3,IPR036162,PS51737,IPR011109,PTHR30461, PS00397,PF00239,G3DSA:1.10.10.2600,IPR006119,SSF53041, SM00857,IPR025827,IPR038109,PS51736,cd03768, IPR006118,PF13408,G3DSA:3.40.50.1390,PF07508,Coil
MISNSAATHAKVAIYIRVSTLHQIDRDSLPMQRQDLIAYAKLILNTDDVTIFEDAGYSGKNTIRPEFQKMMSQLRTGTYTHLLVWKIDRISRNLLDFAEMYQELKDLGVTFVSKNEQFDTSTAMGEAMLKIILVFAELERNMTSERVTATMISRASNGQWNGGRIPYGYDYDPEEQDFSFNSDEYNIAHLIHDKYEELRSLVYLARYLNEHGYRTRAGNDWSPVSLDIILRSVFYCGDYQYNRLKEGDRQRPKDKSEWITVKDHHPAIVSREQKERILALLESNRRLKSFHKSGKSKYTHIFSGLLICGNCGQPMTSSISTIKKTTGRRYSLYFCPTHRKSKLWCTGKSTSDPIVGEFVFNYILNMLNAQKAFSPETSIQELEQQLLSGDTFSPVAAIAPDGLHDLFHTLRTGTIKGEVFGKDVKIKTGSEPPLQLSKLKKEKVRLERAIDRLNKLFLYSEKAMSESEYLTQKIQLSDSLEEVEDKLAFLASEGSLQQSITDDEFIAKASNFILSQKLTDRNYISFQSLSATVSPEVLDSFLSSIIDNIVFKDGAVNSITFRNGLSHTFIYREKPEV

SEQ ID NO: 870 - protein, 577 aa, Unknown
  Description of Unknown: Integrase B871 sequence
  PTHR30461:SF3,IPR036162,PS51737,IPR011109,PTHR30461, PS00397,PF00239,G3DSA:1.10.10.2600,IPR006119,SSF53041, SM00857,IPR025827,IPR038109,PS51736,cd03768, IPR006118,PF13408,G3DSA:3.40.50.1390,PF07508,Coil
MISNSAATHAKVAIYIRVSTLHQIDRDSLPMQRQDLIAYAKLILNTDDVTIFEDAGYSGKNTIRPEFQKMMSQLRTGTYTHLLVWKIDRISRNLLDFAEMYQELKNLGVTFVSKNEQFDTSTAMGEAMLKIILVFAELERNMTSERVTATMISRASNGQWNGGRIPYGYDYDPEEQAFSFNSDEYNIAHLIHDKYEELRSLVYLARYLNEHGYRTRAGNDWSPVSLDIILRSVFYCGDYQYNRLKEGDRQRPKDKSEWITVKDHHPAIVSREQKERILALLESNRRLKSFRKSGKSKYTHIFSGLLICGNCGQPMTSSISTIKKTTGRRYSLYFCPTHRKSKLWCTGKSTSDPIVGEFVFNYILNMLNAQKAFSPETSIQELEQQLLSGDTFSPVAAIAPDGLHDLFHTLRTGTIKGEVFGKDVKIKTGSEPPLQLSKLKKEKVRLERAIDRLNKLFLYSEKAMSESEYLTQKIQLSDSLEEVEDKLAFLASEGSLQQSITDDEFIAKASNFILSQKLTDRNYVSFQSLSATVSPEVLDSFLSSIIDNIVFKDGAIHSITFRNGLSHTFIYKEKPEV

SEQ ID NO: 871 - protein, 577 aa, Unknown
  Description of Unknown: Integrase B872 sequence
  PTHR30461:SF3,SM00857,G3DSA:1.10.10.2600,IPR036162,PF13408, IPR025827,G3DSA:3.40.50.1390,PS51737,IPR006119,IPR038109, PF07508,IPR011109,SSF53041,PF00239,PTHR30461, PS51736,Coil,cd00338
MDIYKVRQLLKEQSIFDIPLRVVYYVRVSTDKEEQKNSTVNQDTFFEELIASHPAWTSVGKYIDDGASGIMADKREDFQRMISDGQNQMYDLILTKEISRFARNTLDSIRYTRLLLNCGVGVWFYTDNVNTINEDAELHLAILSSIAQNESLKTSTRVRMGHAQSIKRGVVMGNSMLYGYNKDHGKLVIDPYEAEMVRSIYEKYATGVYTTPMLEREIYASGYRNHYGEKISRTVIGHIITNPKYKGYYVGGKVKIIDMFTKKRKFIPKDEWIMYKDETGERVPAIIDEETWELANKYFVERGDAIKARRKVCTTPNTFTGKIYCGTDGAPYWLKHRVLRGKDDSTWYCSDKLKNGTDSCKSFPIKEDEIRSMVVDLITLSPSDIQKYCEMYLEMLRKSIDSSVDKSAKIAELNKEIENNMAKKQKLLDYNFQGILSDDEFISNTKLLNRKIERAQSLIDSFTSKSPVELKSNSVLDKAAKLLNDFSGVKSEDLDNKIVDELIDKIVITPQDTDYASVEFYLKTSEKVHKTYDRKAVLRNDNLLNIMLPVRSTVFYRHPRHLYGHETEIRYDYRLVI

SEQ ID NO: 872 - protein, 577 aa, Unknown
  Description of Unknown: Integrase B873 sequence
  PTHR30461:SF3,IPR036162,PS51737,IPR011109,PTHR30461, PS00397,PF00239,G3DSA:1.10.10.2600,IPR006119,SSF53041, SM00857,IPR025827,IPR038109,PS51736,cd03768, IPR006118,PF13408,G3DSA:3.40.50.1390,PF07508,Coil
MISNSSATHAKVAIYIRVSTLHQIDRDSLPMQRQDLIAYAKLILNTDDVTIFEDAGYSGKNTIRPEFQKMMSQLRAGTYTHLLVWKIDRISRNLLDFAEMYQELKDLGVTFVSKNEQFDTSTAMGEAMLKIILVFAELERNMTSERVTATMISRASNGLWNGGRIPYGYDYDPAEQEFSFNSDEYNIALLIHDKYEELRSLVYLARYLNEHGYRTRSGNDWSPVSLDIILRSVFYCGDYQYNRLKEGDRQRPKDKSEWITVKDHHPAIVSREQKERILALLESNRRLKSFRKSGKSKYIHIFSGLLICGNCGQPMTSTISTVKKTTSRRYSLYFCPTHRKSKLWCTGKSTSDPIVGEFVFNYILNMLNAQKAFSPETSIQDLEQQLLSGDTFSPVAAIAPDGLQDLFHTLRTGTVKGEVFGKDVKIKTDSEPPLQLSKLKKEKIRLERAIDRLNKLFLYSEKAMSESEYLTQKIQFSDALEEVEDKLAFLASEDSLQQSITDDEFIAKASNFILSQKLTDRNYVSFHSLSTTVSPEVLDSFLSSIIDNIVFKDGAVHSITFRNGLSHTFIYKEKPEV

SEQ ID NO: 873 - protein, 577 aa, Unknown
  Description of Unknown: Integrase B874 sequence
  PTHR30461:SF3,IPR036162,PS51737,IPR011109,PTHR30461, PS00397,PF00239,G3DSA:1.10.10.2600,IPR006119,SSF53041, SM00857,IPR025827,IPR038109,PS51736,cd03768, IPR006118,PF13408,G3DSA:3.40.50.1390,PF07508,Coil
MISNSAATHAKVAIYIRVSTLHQIDRDSLPMQRQDLIAYAKLILNTDDVTIFEDAGYSGKNTIRPEFQKMMSQLRTGTYTHLLVWKIDRISRNLLDFAEMYQELKDLGVTFVSKNEQFDTSTAMGEAMLKIILVFAELERNMTSERVTATMISRASNGQWNGGRIPYGYDYDPEEQDFSFNSDEYNIAHLIHDKYEELRSLVYLARYLNEHGYRTRAGNDWSPVSLDIILRSVFYCGDYQYNRLKEGDRQRPKDKSEWITVKDHHPAIVSREQKERILALLESNRRLKSFRKSGKSKYTHIFSGLLICGNCGQPMTSSISTIKKTIGRRYSLYFCPTHRKSKLWCTGKSTSDPIIGEFVFNYILNMLNAQKAFSSETSIQELEQQLLSGDTFSPVAAIAPDGLQDLFHTLRTGTIKGEVFGKDVKIKTGSEPPLQLSKLKKEKIRLERAIDRLNKLFLYSEKAMSESEYLTQKIQLSDALEEVEDKLTFLASEDSLQQSITDDEFIAKASNFILSQKLTDRNYVSFQSLSATVSPEVLDSFLSSIIDNIVFKDGAIHSITFRNGLSHTFIYKEKPEV

SEQ ID NO: 874 - protein, 577 aa, Unknown
  Description of Unknown: Integrase B875 sequence
  PTHR30461:SF3,IPR036162,PS51737,IPR011109,PTHR30461, PS00397,PF00239,G3DSA:1.10.10.2600,IPR006119,SSF53041, SM00857,IPR025827,IPR038109,PS51736,cd03768, IPR006118,PF13408,G3DSA:3.40.50.1390,PF07508,Coil
MISNSAATHAKVAIYIRVSTLHQIDRDSLPMQRQDLIAYAKLILNTDDVTVFEDAGYSGKNTIRPEFQKMMSQLRTGTYTHLLVWKIDRISRNLLDFAEMYQELKDLGVTFVSKNEQFDTSTAMGEAMLKIILVFAELERNMTSERVAATMISRASNGQWNGGRIPYGYDYDPEEQTFSFNSDEYNIAHLIHDKYEELRSLVYLARYLNEHGYRTRAGNDWSPVSLDIILRSVFYCGDYQYNRLKEGDRQRPKDKSEWITVKDHHPAIVSREQKERILALLESNRRLKSFRKSGKSKYTHIFSGLLICGNCGQPMTSSISTVKKTTGRRYSLYFCPTHRKSKLWCTGKSTSDPIIGEFVFNYILNMLNAQKAFSPETSIQELEQQLLSGDTFSPVAAIAPDGLQDLFHTLRTGTVKGEVFGKDVKIKTDSEPPLQLSKLKKEKIRLERAIDRLNKLFLYSEKAMSESEYLTQKIQLSDSLEEIEDKLAFLASEDSLQQSITDDEFISKASNFILSQKLTDRNYVSFQSLSATVSPEVLDSFLSSIIDNIVFKDGAVHSITFRNGLSHTFIYKEKPEV

SEQ ID NO: 875 - protein, 577 aa, Unknown
  Description of Unknown: Integrase B876 sequence
  PTHR30461:SF3,IPR036162,PS51737,IPR011109,PTHR30461, PS00397,PF00239,G3DSA:1.10.10.2600,IPR006119,SSF53041, SM00857,IPR025827,IPR038109,PS51736,cd03768, IPR006118,PF13408,G3DSA:3.40.50.1390,PF07508,Coil
MISNSAATHAKVAIYIRVSTLHQIDRDSLPMQRQDLIAYAKLILNTDNVTIFEDAGYSGKNTIRPEFQKMMSQLRTGTYTHLLVWKIDRISRNLLDFAEMYQELKDLGVTFVSKNEQFDTSTAMGEAMLKIILVFAELERNMTSERVTATMISRASNGQWNGGRIPYGYDYDPEEQDFSFNSDEYNIAHLIHDKYEELRSLVYLARYLNEHGYRTRAGNDWSPVSLDIILRSVFYCGDYQYNRLKEGDRQRPKDKSEWITVKDHHPAIVSREQKERILALLESNRRLKSFRKSGKSKYTHIFSGLLICGNCGQPMTSSISTIKKTTGRRYSLYFCPTHRKSKLWCTGKSTSDPIVGEFVFNYILNMLNAQKAFSPETSIQELEQQLLSGDTFSPVAAIVPDGLQDLFHTLRTGTIKGEVFGKDVKIKTGSEPPLQLSKLKKEKVRLERAIDRLNKLFLYSEKAMSESEYLTQKIQLSDALEEVEDKLTFLASEDSLQQSITDDEFIAKASNFILSQKLTDRNYVSFQSLSATVSPEVLDSFLSSIIDNIVFKDGAIHSITFRNGLSHTFIYKEKPEV

SEQ ID NO: 876 - protein, 577 aa, Unknown
  Description of Unknown: Integrase B877 sequence
  PTHR30461:SF3,IPR036162,PS51737,IPR011109,PTHR30461, PS00397,PF00239,G3DSA:1.10.10.2600,IPR006119,SSF53041, SM00857,IPR025827,IPR038109,PS51736,cd03768, IPR006118,PF13408,G3DSA:3.40.50.1390,PF07508,Coil
MISNSAATHAKVAIYIRVSTLHQIDRDSLPMQRQDLIAYAKLILNTDDVTIFEDAGYSGKNTIRPEFQKMMSQLRTGTYTHLLVWKIDRISRNLLDFAEMYQELKNLGVTFVSKNEQFDTSTAMGEAMLKIILVFAELERNMTSERVTATMISRASNGQWNGGRIPYGYDYDPEEQAFSFNSDEYNIAHLIHDKYEELRSLVYLARYLNEHGYRTRAGNDWSPVSLDIILRSVFYCGDYQYNRLKEGDRQRPKDKSEWITVKDHHPAIVSREQKERILALLESNRRLKSFRKSGKSKYTHIFSGLLICGNCGQPMTSSISTIKKTTGRRYSLYFCPTHRKSKLWCTGKSTSDPIVGEFVFNYILNMLNAQKAFSPETSIQELEQQLLSGDTFSPVAAIAPDGLHDLFHTLRTGTIKGEVFGKDVKIKTGSEPPLQLSKLKKEKVRLERAIDRLNKLFLYSEKAMSESEYLTQKIQLSDSLEEVEDKLAFLASEGSLQQSITDDEFIAKASNFILSQKLTDRNYVSFQSLSATVSPEVLDSFLSSIIDNIVFKDGAIHSIAFRNGLSHTFIYKEKPEV

SEQ ID NO: 877 - protein, 577 aa, Unknown
  Description of Unknown: Integrase B878 sequence
  PTHR30461:SF3,SM00857,G3DSA:1.10.10.2600,IPR036162,PF13408, PS51737,G3DSA:3.40.50.1390,IPR025827,IPR006119,IPR038109, PF07508,IPR011109,SSF53041,PF00239,PTHR30461, PS51736,Coil,cd00338
MKKENEIRAVVYARYSSHSQTEQSIEGQISAAQIYAKAKGYTIVKEYVDRAKTGKNDNREAFQQMLSDTAKHEFSVIIVWKVDRFGRNREEITFNKYRCKKNDVRVEYIAEAVPDSPEGVILESVLEGMAEYYSLQLAQNIRRGIRASAEKCQAIGGHCSLGYAIDPKTKKYVIDPDTAPTVQLIFEKYAEGYTGMDIVRMLNEKGLRTVRGKPFTKNSLWTILKNERYAGVYLFKDEVRVEGGIPALVSREMFDKVQEMLEINHRSPVNTWNRATYLLTDKLFCGHCGSKMVGECGTSRTGATYNYYICAGKKRERNCSKKAVRQDWIEKVVLQQIRRVLFDQEFLEFIAHKAYTYYLEEKKKLDQSAAIKAQLSSVESSIDNLIRAMEAGIFSASTKSRLDDLENQKAALTRTLAEIKLSEESFDLTEDRILFFLESMRGLDMDDVDSRKRLVKTFVNAVYLYDDKITLAFNFTDSCEKPEIIELTDIADGVVEKFVHRASCSTKKALYFVGSMVLFFLLKPIFGGCIASPAPFSGFCRRFLYNPQRLTLHHFQKGMFSARFFSRLLYHPLQCTA

SEQ ID NO: 878 - protein, 577 aa, Unknown
  Description of Unknown: Integrase B879 sequence
  PTHR30461:SF3,IPR036162,PS51737,IPR011109,PTHR30461, PS00397,PF00239,G3DSA:1.10.10.2600,IPR006119,SSF53041, SM00857,IPR025827,IPR038109,PS51736,cd03768, IPR006118,PF13408,G3DSA:3.40.50.1390,PF07508,Coil
MISNSAATHAKVAIYIRVSTLHQIDRDSLPMQRQDLIAYAKLILNTDDVTIFEDAGYSGKNTIRPEFQKMMSQLRTGTYTHLLVWKIDRISRNLLDFAEMYQELKDLGVTFVSKNEQFDTSTAMGEAMLKIILVFAELERNMTSERVTATMISRASNGQWNGGRIPYGYDYDPEEQDFSLNSDEYNIAHLIHDKYEELRSLVYLARYLNEHGYRTRAGNDWSPVSLDIILRSVFYCGDYQYNRLKEGDRQRPKDKSEWITVKDHHPAIVSREQKERILALLESNRRLKSFRKGGKSKYTHIFSGLLICGNCGQPMTSSISTIKKTTGRRYSLYFCPTHRKSKLWCTGKSTSDPIIGEFVFNYILNMLNAQKAFSSETSIQELEQQLLSGDTFSPVAAIAPDGLQDLFHTLRTGTIKGEVFGKDVKIKTGSEPPLQLSKLKKEKVRLERAIDRLNKLFLYSEKAMSESEYLTQKIQLSDALEEVEDKLTFLASEDSLQQSITDDEFIAKASNFILSQKLTDRNYVSFQSLSATVSPDVLDSFLSSIIDNIVFKDGAIHSITFRNGLSHTFIYKEKPEV

SEQ ID NO: 879 - protein, 577 aa, Unknown
  Description of Unknown: Integrase B880 sequence
  IPR036162,PS51737,IPR011109,PTHR30461,PS00397, PF00239,G3DSA:1.10.10.2600,IPR006119,SSF53041,cd00338, SM00857,IPR025827,IPR038109,PS51736,IPR006118, PF13408,G3DSA:3.40.50.1390,PF07508,Coil
MAYRFSQQTAAPDTRTVALYVRVSTGYQVDKDSLPFQKQELRNYCRHVLHIEESRLEVFEDAGKSGKNTKRPAFERMMTKVKAGLVSHVIVYKIDRISRNLVDFSLMYDDFKYNRVTFISLNEQFDTSSAIGEAVLKIILIFAELERKLTSERVTDIMINRALSGQWNGARMPFGWDWDEEKKMPVHSDKEAPIVRLMYDMYEETRSSCRVCDYFNSHDIATKRGGEWTTKTIADLIRNPMNKGDYRYNYRESAKGRRKPDEEVVYVKNVFPPLVPPDQWDRCNQIMDYNAKLRCSSGFPHKGTHIHIFAGLLKCGKCGSYFQVEKRDRVRRNGFAPSLYRCGRRYRKQHCISKSCSEVVVGPFVLNYISAMIRASDMRSQIHSPEELEKILLSDNVFQNVAGIVSDGLNATYAMLSGTDSSVPYRPLPLASHNVQEDDNVQKWEQGIVRIDRAIERLKKVYLFDDTAMSEKEYLETKNELERERIELDNKIKEQESTAFPVQTEDLAFIKSASSFLLAHRLKAGDHIQYNAFAPLVDDEVLKDFLNLVIKEIVVVDARITEITFQNGLTHKFLYRE

SEQ ID NO: 880 - protein, 577 aa, Unknown
  Description of Unknown: Integrase B881 sequence
  PTHR30461:SF3,IPR036162,PS51737,IPR011109,PTHR30461, PS00397,PF00239,G3DSA:1.10.10.2600,IPR006119,SSF53041, SM00857,IPR025827,IPR038109,PS51736,cd03768, IPR006118,PF13408,G3DSA:3.40.50.1390,PF07508,Coil
MISNSAATHAKVAIYIRVSTLHQIDRDSLPMQRQDLIAYAKLILNTDDVTIFEDAGYSGKNTIRPEFQKMMSQLRTGTYTHLLVWKIDRISRNLLDFAEMYQELKDLGVTFVSKNEQFDTSTAMGEAMLKIILVFAELERNMTSERVTATMISRASNGQWNGGRIPYGYDYDPEEQDFSFNSDEYNIAHLIHDKYEELRSLVYLARYLNEHGYRTRAGNDWSPVSLDIILRSVFYCGDYQYNRLKEGDRQRPKDKSEWITVKGHHPAIVSREQKERILALLESNRRLKSFHKSGKSKYTHIFSGLLICGNCGQPMTSSISTVKKTTGRRYSLYFCPTHRKSKLWCTGKSTSDPIIGEFVFNYILNMLNAQKAFSPETSIQKLEQQLLSGDTFSPVVAIAPDGLQDLFHTLRTGTVKGEVFGKDVKIKTDSEPPLQLSKLKKEKIRLERAIDRLNKLFLYSEKAMSESEYLTQKIQLSDSLEEVEDKLAFLASEDSLQQSITDDEFIAKASNFILSQKLTDRNYVSFQSLSATVSPEVLDSFLSSIIDNIVFKDGAVHSITFRNGLSHTFIYKEKPEV

SEQ ID NO: 881 - protein, 577 aa, Unknown
  Description of Unknown: Integrase B882 sequence
  PTHR30461:SF3,IPR036162,PS51737,IPR011109,PTHR30461, PS00397,PF00239,G3DSA:1.10.10.2600,IPR006119,SSF53041, SM00857,IPR025827,IPR038109,PS51736,cd03768, IPR006118,PF13408,G3DSA:3.40.50.1390,PF07508,Coil
MISNSAATHAKVAIYIRVSTLHQIDRDSLPMQRQDLIAYAKLILNTDDVTIFEDAGYSGKNTIRPEFQKMMSQLRTGTYTHLLVWKIDRISRNLLDFAEMYQELKDLGVTFVSKNEQFDTSTAMGEAMLKIILVFAELERNMTSERVTATMISRASNGQWNGGRIPYGYDYDPEEQDFSFNSDEYNIAHLIHDKYEELRSLVYLARYLNEHGYRTRAGNDWSPVSLDIILRSVFYCGDYQYNRLKEGDRQRPKDKSEWITVKDHHPAIVSREQKERILALLESNRRLKSFRKSGKSKYTHIFSGLLICGNCGQPMTSSISTIKKTTGRRYSLYFCPTHRKSKLWCTGKSTSDPIVGEFVFNYILNMLNAQKAFSPETSIQELEQQLLSGDTFSPVVAIAPDGLQDLFHTLRTGTVKGEVFGKDVKIKTDSEPPLQLSKLKKEKVRLERAIDRLNKLFLYSEKAMSESEYLTQKIQLSDALEEVEDKLAFLASEDSLQQSITDDEFIAKASNFILSQKLTDRNYVSFQSLSATVSPEVLDSFLSSIIDNIVFKDGAIHSITFRNGLSHTFIYKEKPEV

SEQ ID NO: 882 - protein, 577 aa, Unknown
  Description of Unknown: Integrase B883 sequence
  PTHR30461:SF3,SM00857,G3DSA:1.10.10.2600,IPR036162,PF13408, IPR025827,G3DSA:3.40.50.1390,PS51737,IPR006119,IPR038109, PF07508,IPR011109,SSF53041,PTHR30461,Coil, PS51736,cd00338,PF00239
MDIYKVRQLLKGQSIFDIPLRVVYYVRVSTDKEEQKNSTVNQDTFFEELIASHPAWTFVGKYIDDGASGIMADKREDFQRMISDGQNQMYDLILTKEISRFARNTLDSIRYTRLLLNCGIGVWFYTDNVNTINEDAELHLAILSSIAQNESLKTSTRVRMGHAQSIKRGVVMGNSMLYGYNKDHGKLVIDPYEAEMVRSIYEKYATGVYTTPMLEREIYASGYRNHYGEKISRTVIGHIITNPKYKGYYVGGKVKIIDMFTKKRKFIPKDEWIMYKDETGERVPAIIDEETWELANKYFVERGDAIKARRKVCTTPNTFTGKIYCGTDGAPYWLKHRVLRGKDDSTWYCSDKLKNGTDSCKSFPIKEDEIRSMVVDLITLSPSDIQKYCEMYLEMLRKSIDSSVDKSAKIAELNKEIENNMAKKQKLLDYNLQGILSDDEFISNTKLLNRKIERAQSLIDSFTSKSPVELKSNSVLDKAAKLLNDFSGVKSEDLDNKIVDELIDKIVITPQDTDYASVEFYLKTSEKVHKTYDRKAVLRNDNLLNIMLPVRSTVFYRHPRHLYGHETEIRYDYRLVI

SEQ ID NO: 883 - protein, 577 aa, Unknown
  Description of Unknown: Integrase B884 sequence
  PTHR30461:SF3,IPR036162,PS51737,IPR011109,PTHR30461, PS00397,PF00239,G3DSA:1.10.10.2600,IPR006119,SSF53041, SM00857,IPR025827,IPR038109,PS51736,cd03768, IPR006118,PF13408,G3DSA:3.40.50.1390,PF07508,Coil
MISNSAATHAKVAIYIRVSTLHQIDRDSLPMQRQDLIAYAKLILNTDDVTIFEDAGYSGKNTIRPEFQKMMSQLRTGTYTHLLVWKIDRISRNLLDFAEMYQELKNLGVTFVSKNEQFDTSTAMGEAMLKIILVFAELERNMTSERVTATMISRASNGQWNGGRIPYGYDYDPEEQAFSFNSDEYNIAHLIHDKYEELRSLVYLARYLNEHGYRTRAGNDWSPVSLDIILRSVFYCGDYQYNRLKEGDRQRPKDKSEWITVKDHHLAIVSREQKERILALLESNRRLKSFRKSGKSKYTHIFSGLLICGNCGQPMTSSISTVKKTTGRRYSLYFCPTHRKSKLWCTGKSTSDPIVGEFVFNYILNMLNAQKAFSPETSIQELEQQLLSGDTFSPVVAIAPDGLQDLFHTLRTGTVKGEVFGKDVKIKTDSEPPLQLSKLKKEKVRLERAIDRLNKLFLYSEKAMSESEYLTQKIQLSDALEEVEDKLAFLASEDSLQQSITDDEFIAKASNFILSQKLTDRNYVSFQSLSATVSPEVLDSFLSSIIDNIVFKDGAIHSITFRNGLSHTFIYKEKPEV

SEQ ID NO: 884 - protein, 577 aa, Unknown
  Description of Unknown: Integrase B885 sequence
  PTHR30461:SF3,IPR036162,PS51737,IPR011109,PTHR30461, PS00397,PF00239,G3DSA:1.10.10.2600,IPR006119,SSF53041, SM00857,IPR025827,IPR038109,PS51736,cd03768, IPR006118,PF13408,G3DSA:3.40.50.1390,PF07508,Coil
MISNSAATHAKVAIYIRVSTLHQIDRDSLPMQRQDLIAYAKLILNTDDVTIFEDAGYSGKNTIRPEFQKMMSQLRTGTYTHLLVWKIDRISRNLLDFAEMYQELKNLGVTFVSKNEQFDTSTAMGEAMLKIILVFAELERNMTSERVTATMISRASNGQWNGGRIPYGYDYDSEEQAFSFNSDEYNIAHLIHDKYEELRSLVYLARYLNEHGYRTRAGNDWSPVSLDIILRSVFYCGDYQYNRLKEGDRQRPKDKSEWITVKDHHPAIVSREQKERILALLESNRRLKSFRKSGKSKYTHIFSGLLICGNCGQPMTSSISTIKKTTGRRYSLYFCPTHRKSKLWCTGKSTSDPIVGEFVFNYILNMLNAQKAFSPETSIQELEQQLLSGDTFSPVAAIAPDGLHDLFHTLRTGTIKGEVFGKDVKIKTGSEPPLQLSKLKKEKVRLERAIDRLNKLFLYSEKAMSESEYLTQKIQLSDSLEEVEDKLAFLASEGSLQQSITDDEFIAKASNFILSQKLTDRNYVSFQSLSATVSPEVLDSFLSSIIDNIVFKDGAIHSITFRNGLSHTFIYKEKPEV

SEQ ID NO: 885 - protein, 577 aa, Unknown
  Description of Unknown: Integrase B886 sequence
  SM00857,G3DSA:1.10.10.2600,IPR036162,PF13408,PS51737, G3DSA:3.40.50.1390,IPR025827,IPR006119,IPR038109,PF07508, IPR011109,SSF53041,PTHR30461,Coil,PS51736, cd00338,PF00239
MNIYHTRERLRTRSIYDLNLRVAFYARVSTDSEDQQVSIAHQTQYYKEFIKSNRNWKFAKGYIDNGISGIQTKHREQFKEMLEDAKNGKFDMLITKEITRFARNTLDSIQYTRQMLSWGVCVWFQNDNINTIDEDSELRLTIMAGVAQDEVRKLSNRVKFGHKQSIKNGVVLGNSRIYGYDKKDGKLTINESEAQMVRMIFEDYASGEWTTPQLEKKLYNMGYRNYKGGKIDRNVIRHIIRNPKYKGYYAGGKVKIVDMFTKKQEFLPESEWVMFKDDGSHVPQIVDEEVWKKANEYIDARGEIVKTRRTSIKKSENVFTGMLICGNDGASYWLKQRTLRGKEDVKWVCSRKIKEGAASCDSFYIDDGELREVIAKLICESSGDIEQIAEKFIKIYHSSINQADASTEIKRLEKQINVAERKSDKLLEYNLDGAISDAVFIEKSQKLETQIEEYKKQIEKLSTIQDDIVPIENQIRAIAHSVKQLDGISPDDITKTVVDSFLKKIVVNPIGEKEAKLVFYLKDGITTEMSFVSGKSMRCSVNLFNPIFTERSTTFYRALRSFPGHKEPVKYTYFFAF

SEQ ID NO: 886 - protein, 577 aa, Unknown
  Description of Unknown: Integrase B887 sequence
  PTHR30461:SF3,IPR036162,PS51737,IPR011109,PTHR30461, PS00397,PF00239,G3DSA:1.10.10.2600,IPR006119,SSF53041, SM00857,IPR025827,IPR038109,PS51736,cd03768, IPR006118,PF13408,G3DSA:3.40.50.1390,PF07508,Coil
MISNSAATHAKVAIYIRVSTLHQIDRDSLPMQRQDLIAYAKLILNTDDVTVFEDAGYSGKNTIRPEFQKMMSQLRTGTYTHLLVWKIDRISRNLLDFAEMYQELKDLGVTFVSKNEQFDTSTAMGEAMLKIILVFAELERNMTSERVAATMISRASNGQWNGGRIPYGYDYDPEEQTFSFNSDEYNIAHLIHDKYEELRSLVYLARYLNEHCYRTRAGNDWSPVSLDIILRSVFYCGDYQYNRLKEGDRQRPKDKSEWITVKDHHPAIVSREQKERILALLESNRRLKSFRKSGKSKYTHIFSGLLICGNCGQPMTSSISTIKKTTGRRYSLYFCPTHRKSKLWCTGKSTSDPIVGEFVFNYILNMLNAQKAFSSETSIQELEQQLLSGDTFSPVAAIAPDGLQDLFHTLRTGTIKGEVFGKDVKIKTGSEPPLQLSKLKKEKVRLERAIDRLNKLFLYSEKAMSESEYLTQKIQLSDALEEVEDKLTFLASEDSLQQSITDNEFIAKASNFILSQKLTDRNYVSFQSLSATVSPEVLDSFLSSIIDNIVFKDGAIHSITFRNGLSHTFIYKEKPEV

SEQ ID NO: 887 - protein, 577 aa, Unknown
  Description of Unknown: Integrase B888 sequence
  PTHR30461:SF3,IPR036162,PS51737,IPR011109,PTHR30461, PS00397,PF00239,G3DSA:1.10.10.2600,IPR006119,SSF53041, SM00857,IPR025827,IPR038109,PS51736,cd03768, IPR006118,PF13408,G3DSA:3.40.50.1390,PF07508,Coil
MSINRNNTSETPKKAALYVRVSTNYQIDRDSLPMQRQELITYAQLMFGINDYVIFEDAGYSGKNTDRPEFQNMMRRIRAGEFTHLLCWKIDRISRNLLDFASMYQELKDLGVTFVSKNEQFDTSTAIGEAMLKIILVFAELERNMTSERVTATMLSRAQNGLWNGGRVPYGYDYDKDSKTFSINQEEAFLVRKMYDLYSEHRSLVMVSRTLNEDGYASRAGNDWSPVSIFIILTNPFYTGIYRYNHYKIPGLKIEKDPSEWIEVPDHHPRIISDEQFDNVNRILQSNSRSKRLPGQQHTSKGTHIFGGLLYCGTCGSQYVSTPSRLLASGYRPSKYACPNLRKKKTCNTKSISDPVIGEFVLNYVLNMMHARAAFSSIHDTSELQDALLNGGTFQNVDHIGKDGLDSCFHMFSSTPLDGKRFRKPKKATTIDPELKRLRAEKRKTERALDRLMNLYLYADNPISEKDFVIRKQALDDYLKEINENLGMIDRGRGIETISDENFIKRASYFIMSKELAGKDYIYFKKLAMDMDAEILRDFFQEIIDSIVMEGSNVKEIVFRNGLAHTFFYKDTEKPEA

SEQ ID NO: 888 - protein, 577 aa, Unknown
  Description of Unknown: Integrase B889 sequence
  SM00857,G3DSA:1.10.10.2600,IPR036162,PF13408,IPR025827, G3DSA:3.40.50.1390,PS51737,IPR006119,IPR038109,PF07508, IPR011109,SSF53041,PTHR30461,Coil,PS51736, cd00338,PF00239
MNIYHTRERLRTRSIYDLNLRVAFYARVSTDSEDQQVSIEHQTQYYKEFIKSNRNWKFAKGYIDNGISGIQTKHREQFKEMLEDAKNGKFDMLITKEITRFARNTLDSIQYTRQMLSWGVCVWFQNDNINTIDEDSELRLTIMAGVAQDEVRKLSNRVKFGHKQSIKNGVVLGNSRIYGYDKKDGKLTINESEAQMVRMIFEDYASGEWTTPQLEKKLYNMGYRNYKGGKIDRNVIRHIIRNPKYKGYYAGGKVKIVDMFTKKQEFLPESEWVMFKDDGSHVPQIVDEEVWKKANEYIDARGEIVKTRRTSIKKSENVFTGMLICGNDGASYWLKQRTLRGKEDVKWVCSKKIKEGAASCDSFYIDDRELREVIAKLIRESSGDIEQIAEKFIKIYHSSMNQADASTEIKRLEKQINVAERKSDKLLEYNLDGAISDAVFIEKSQKLEAQIEEYKKQIEKLSTIQDDIVPIENQIRAIAHSVKQLDGISPDDITKTVVDSFLKKIVVNPIGEKEAKLVFYLKDGITTEMSFVSGKSMRCSVNLFNPIFTERSTTFYRALRSFPGHKEPVKYTYFFAF

SEQ ID NO: 889 - protein, 577 aa, Unknown
  Description of Unknown: Integrase B890 sequence
  SM00857,G3DSA:1.10.10.2600,IPR036162,PF13408,IPR025827, G3DSA:3.40.50.1390,PS51737,IPR006119,IPR038109,PF07508, IPR011109,SSF53041,PTHR30461,Coil,PS51736, cd00338,PF00239
MNIYHTRERLRTRSIYDLNLRVAFYARVSTDSEDQQVSIEHQTQYYKEFIKSNRNWKFAKGYIDNGISGIQTKHREQFKEMLEDAKNGKFDMLITKEITRFARNTLDSIQYTRQMLSWGVCVWFQNDNINTIDEDSELRLTIMAGVAQDEVRKLSNRVKFGHKQSIKNGVVLGNSRIYGYDKKDGKLTINESEAQMVRMIFEDYASGEWTTPQLEKKLYNMGYRNYKGGKIDRNVIRHIIRNPKYKGYYAGGKVKIVDMFTKKQEFLPESEWVMFKDDGSHVPQIVDEEVWKKANEYIDARGEIVKTRRTSIKKSENVFTGMLICGNDGASYWLKQRTLRGKEDVKWVCSKKIKEGAASCDSFYIDDRELREVIAKLIRESSGDIEQIAEKFIKIYHSSMNQADASTEIKRLEKQINVAERKSDKLLEYNLDGAISDAVFIEKSQKLEAQIEEYKKQIEKLSTIQDDIVPIENQIRAIAHSVKQLDGIGPDDITKTVVDSFLKKIVVNPIGEKEAKLVFYLKDGITTEMSFVSGKSMRCSVNLFNPIFTERSTTFYRALRSFPGHKEPVKYTYFFAF

SEQ ID NO: 890 - protein, 577 aa, Unknown
  Description of Unknown: Integrase B891 sequence
  PTHR30461:SF3,IPR036162,PS51737,IPR011109,PTHR30461, PS00397,PF00239,G3DSA:1.10.10.2600,IPR006119,SSF53041, SM00857,IPR025827,IPR038109,PS51736,cd03768, IPR006118,PF13408,G3DSA:3.40.50.1390,PF07508,Coil
MISNSAATHAKVAIYIRVSTLHQIDRDSLPMQRQDLIAYAKLILNTDDVTIFEDAGYSGKNTIRPEFQKMMSQLRTGTYTHLLVWKIDRISRNLLDFAEMYQELKDLGVTFVSKNEQFDTSTAMGEAMLKIILVFAELERNMTSERVTATMISRASNGQWNGGRIPYGYDYDPEEQDFSFNSDEYNIAHLIHDKYEELRSLVYLARYLNEHGYRTRAGNDWSPVSLDIILRSVFYCGDYQYNRLKEGDRQRPKDKSEWITVKDHHPAIVSREQKERILALLESNRRLKSFRKSGKSKYTHIFSGLLICGNCGQPMTSSISTIKKTTGRRYSLYFCPTHRKSKLWCTGKSTSDPIIGEFVFNYILNMLNAQKAFSSETSIQELEQQLLSGDTFSPVAAIAPDGLQDLFHTLRTGTIKGEVFGKDVKIKTGSEPPLQLSKLKKEKVRLERAIDRLNKLFLYSEKAMSESEYLTQKIQLSDALEEVEDKLAFLASEDSLQQSITDDEFIAKASNFILSQKLTDRNYVSFQSLSATVSPEVLDSFLSSIIDNIVFKDGAVHSITFRNGLSHTFIYKEKPEV

SEQ ID NO: 891 - protein, 577 aa, Unknown
  Description of Unknown: Integrase B892 sequence
  PTHR30461:SF3,IPR036162,PS51737,IPR011109,PTHR30461, PS00397,PF00239,G3DSA:1.10.10.2600,IPR006119,SSF53041, SM00857,IPR025827,IPR038109,PS51736,cd03768, IPR006118,PF13408,G3DSA:3.40.50.1390,PF07508,Coil
MISNSTATHAKVAIYIRVSTLHQIDRDSLPMQRQDLIAYAKLILNTDDVTIFEDAGYSGKNTIRPEFQKMMSQLRTGTYTHLLVWKIDRISRNLLDFAEMYQELKDLGVTFVSKNEQFDTSTAMGEAMLKIILVFAELERNMTSERVTATMISRASNGQWNGGRIPYGYDYDPEEQAFSFNSDEYNIAHLIHDKYEELRSLVYLARYLNEHGYRTRAGNDWSPVSLDIILRSVFYCGDYQYNRLKEGDRQRPKDKSEWITVKDHHLAIVSREQKERILALLESNRRLKSFRKSGKSKYTHIFSGLLICGNCGQPMTSSISTVKKTTGRRYSLYFCPTHRKSKLWCTGKSTSDPIVGEFVFNYILNMLNAQKAFSPETSIQELEQQLLSGDTFSPVVAIAPDGLQDLFHTLRTGTVKGEVFGKDVKIKTDSEPPLQLSKLKKEKVRLERAIDRLNKLFLYSEKAMSESEYLTQKIQLSDALEEVEDKLAFLASEDSLQQSITDDEFIAKASNFILSQKLTDRNYVSFHSLSATVSPEVLDSFLSSIIDNIVFKDGAIHSITFRNGLSHTFIYKEKPEV

SEQ ID NO: 892 - protein, 577 aa, Unknown
  Description of Unknown: Integrase B893 sequence
  PTHR30461:SF3,IPR036162,PS51737,IPR011109,PTHR30461, PS00397,PF00239,G3DSA:1.10.10.2600,IPR006119,SSF53041, SM00857,IPR025827,IPR038109,PS51736,cd03768, IPR006118,PF13408,G3DSA:3.40.50.1390,PF07508,Coil
MISNSSATHAKVAIYIRVSTLHQIDRDSLPMQRHDLIAYAKLILNTDDVTIFEDAGYSGKNTIRPEFQKMMSQLRTGTYTHLLVWKIDRISRNLLDFAEMYQELKDLGVTFVSKNEQFDTSTAMGEAMLKIILVFAELERNMTSERVTATMISRASNGQWNGGRIPYGYDYDPEEQGFSFNSDEYNIAHLIHDKYEELRSLVYLARYLNEHGYRTRAGNDWSPVSLDIILRSVFYCGDYQYNRLKEGDRQRPKDKSEWITVKDHHPAIVSREQKERILALLESNRRLKSFRKSGKSKYTHIFSGLLICGNCGQPMTSSISTIKKTTGRRYSLYFCPTHRKSKLWCTGKSTSDPIVGEFVFNYILNMLNAQKAFSPETSIQELEQQLLSGDTFSPVAAIAPDGLHDLFHTLRTGTIKGEVFGKDVKIKTGSEPPLQLSKLKKEKVRLERAIDRLNKLFLYSEKAMSESEYLTQKIQLSDSLEEVEDKLAFLASEGSLQQSITDDEFIAKASNFILSQKLTDRNYISFQSLSATVSPEVLDSFLSSIIDNIVFKDGAVNSITFRNGLSHTFIYREKPEV

SEQ ID NO: 893 - protein, 577 aa, Unknown
  Description of Unknown: Integrase B894 sequence
  PTHR30461:SF3,IPR036162,PS51737,IPR011109,PTHR30461, PS00397,PF00239,G3DSA:1.10.10.2600,IPR006119,SSF53041, SM00857,IPR025827,IPR038109,PS51736,cd03768, IPR006118,PF13408,G3DSA:3.40.50.1390,PF07508,Coil
MISNSAATHAKVAIYIRVSTLHQIDRDSLPMQRQDLIAYAKLILNTDDVTVFEDAGYSGKNTIRPEFQKMMSQLRTGTYTHLLVWKIDRISRNLLDFAEMYQELKDLGVTFVSKNEQFDTSTAMGEAMLKIILVFAELERNMTSERVAATMISRASNGQWNGGRIPYGYDYNPEEQDFSFNSDEYNIAHLIHDKYEELRSLVYLARYLNEHGYRTRAGNDWSPVSLDIILRSVFYCGDYQYNRLKEGDRQRPKDKSEWITVKDHHPAIVSREQKERILALLESNRRLKSFRKSGKSKYTHIFSGLLICGNCGQPMTSSISTVKKTTGRRYSLYFCPTHRKSKLWCTGKSTSDPIIGEFVFNYILNMLNAQKAFSPETSIQELEQQLLSGDTFSPVAAIAPDGLQDLFHTLRTGTVKGEVFGKDVKIKTDSEPPLQLSKLKKEKIRLERAIDRLNKLFLYSEKAMSESEYLTQKIQLSDSLEEIEDKLAFLASEDSLQQSITDDEFISKASNFILSQKLTDRNYVSFQSLSATVSPEVLDSFLSSIIDNIVFKDGAVHSITFRNGLSHTFIYKEKPEV

SEQ ID NO: 894 - protein, 577 aa, Unknown
  Description of Unknown: Integrase B895 sequence
  PTHR30461:SF3,IPR036162,PS51737,IPR011109,PTHR30461, PS00028,PF00239,G3DSA:1.10.10.2600,IPR006119,SSF53041, IPR013087,cd00338,SM00857,IPR025827,IPR038109, PS51736,PF13408,G3DSA:3.40.50.1390,PF07508,Coil
MRQKFKIDLSMLTPEEQQQFRDDPTTLTKGEVDVALYLRFSSERQKEQSIEGQLRDCIAYCKRKSFRIVAIYVDRATTARKDVEKRVHFQEMISDSIHHLWNFVVVWKLDRFARNREDSAVFKMRLRKNGVRVKSATETISENPEGIILESVLEGIAEYYSADLSQKITRGLRESAMKGHSVGGHVPLGYKIEDHKLVINPATAHIVQEAFQLYANGESMAEICRIFNNKGYRTAKNSEFNRSSFKSMFKNVRYIGTYIYKDIEKENAIPAIIDKDLFETVQRRLSLTADAPARGKAKVDYLLSGKLFCGHCGAAMNGDSGTGRHGETHNYYKCFSRKKHKNCNKKPLKKDFIERIVAQDAMALLTNDVIEELADMAMSQADRDLKENTRIPELSTRLTEVEQGINNITKAVEKGIASDALLNRLTELEKEKKDLTSQLREEEKYIYRIDRDQVVFWLTKFQGGDIEDEDCRRRIIDLLVNSVTVWDEPDGYKITTAYNLTSCKTKTFRVSNNADSPSGEGFGFGELSSTMKADLFRQVCFSYALMQTFVLSFAPPLHAACNCWNCSKDTLNSTSSV

SEQ ID NO: 895 - protein, 577 aa, Unknown
  Description of Unknown: Integrase B896 sequence
  PTHR30461:SF3,SM00857,G3DSA:1.10.10.2600,IPR036162,PF13408, PS51737,G3DSA:3.40.50.1390,IPR025827,IPR006119,IPR038109, PF07508,IPR011109,SSF53041,PF00239,PTHR30461, PS51736,Coil,cd00338
MRVSVNLNAQKPDTTTNAVIYARYSSHGQTEQSIEGQLAKGHEYAAAQGYTVVHEYIDRAMTGRNDNREAFQKMLSDTGKHQFQVVIVWKVDRFGRNREEIAFNKHTCKKNGVRVEYVAESLPNSPEAVILESVLEGMAEYYSIQLSQNIRRGQLESAKKCQCVGGSVPLGYTLDSDKHFVIDPQTAPVVKKIFDLYAEGATISEITGQLNEQGIRTIRKQLFTKNSLTKLLKNEKYIGVYTYKDIVRVEGGVPAIVDKSTFDRVQELLKINRRAPSHTWTKVEYLLTDKLFCGHCGSPMVGESGFSHTGAKYSYYGCIKRRREKACDKKPVRQDWIEALVLDETVKLLHDDELMEYIIDRTWEYYQVTDKVQEEKAVLEAQLAEVDKAINNLVRAIEAGIFNAATKSRMDELDAQKAALTTSLADLELTSGIRITRDHIEYFLLRLRDLDVKDRECQKRLVQTFVNAVFVYDDGRVKITYNYSGQSSTITLNQIASAEKGKGFVCCLPCSTSRNPWRCKGFGFFSAAVYPHHTHKRFRFHTHEKPLCAQFCVSYSVPMNFSILAAAFCDIWLLTCP

SEQ ID NO: 896 - protein, 577 aa, Unknown
  Description of Unknown: Integrase B897 sequence
  PTHR30461:SF3,IPR036162,PS51737,IPR011109,PTHR30461, PS00397,PF00239,G3DSA:1.10.10.2600,IPR006119,SSF53041, SM00857,IPR025827,IPR038109,PS51736,cd03768, IPR006118,PF13408,G3DSA:3.40.50.1390,PF07508,Coil
MISNSAATHAKVAIYIRVSTLHQIDRDSLPMQRQDLIAYAKLILNTDDVTIFEDAGYSGKNTIRPEFQKMMSQLRTGTYTHLLVWKIDRISRNLLDFAEMYQELKDLGVTFVSKNEQFDTSTAMGEAMLKIILVFAELERNMTSERVTATMISRASNGQWNGGRIPYGYDYDPEEQDFSFNSDEYNIAHLIHDKYEELRSLVYLARYLNEHGYRTRAGNDWSPVSLDIILRSVFYCGDYQYNRLKEGDRQRPKDKSKWITVKDHHPAIVSREQKERILALLESNRRLKSFRKSGKSKYTHIFSGLLICGNCGQPMTSSISTIKKTTGRRYSLYFCPTHRKSKLWCTGKSTSDPIVGEFVFNYILNMLNAQKAFSPETSIQELEQQLLSGDTFSPVAAIAPDGLHDLFHTLRTGTIKGEVFGKDVKIKTGSEPPLQLSKLKKEKVRLERAIDRLNKLFLYSEKAMSESEYLTQKIQLSDSLEEVEDKLAFLASEGSLQQSITDDEFIAKASNFILSQKLTDRNYISFQSLSATVSPEVLDSFLSSIIDNIVFKDGAVNSITFRNGLSHTFIYREKPEV

SEQ ID NO: 897 - protein, 577 aa, Unknown
  Description of Unknown: Integrase B898 sequence
  PTHR30461:SF3,IPR036162,PS51737,IPR011109,PTHR30461, PS00397,PF00239,G3DSA:1.10.10.2600,IPR006119,SSF53041, SM00857,IPR025827,IPR038109,PS51736,cd03768, IPR006118,PF13408,G3DSA:3.40.50.1390,PF07508
MNQNYEMPESGTEKRVRVAIYVRVSTVYQIDKDSLPMMKQDLTSYCKYILNTDDYVIFEDAGYSGKNTARPAYQKMMSQIREGLFTHLLVWKIDRISRNLLDFANMYQELKDLGVTFVSKNEQFDTSTAIGEAMLKIILIFAELERNMTSERVTATMINRASNGVWNGGRVPYGYDYDKENQIFSINPEENVIYNFLLDTYEKTGSMVITARTLNDSGYRTRNNNLWSPVGVCIILHNPWYKGVYRYNYYKIPGRKAVKDQDEWVVVENHHPASIDPERFEHIQKLIASNARNRNAPGRKTTRKNTHVFSNLLWCAECGAAFVASPGKIRASGYRPSKYGCPNVRKTEKCHAKYVSDGTLGEFLLNYILNILNVQKNFASIQSIEDLQKQLLHGSTFENVDHINEDGLLSLYTMLEKFPGKESVLTRPVTVKPKVDPEIKRLVADQKKQQRALERLDHLYLYSDNPMSEREYVIRKQQILDCLQEINETLGMTSQEPWTRIVSDNEFIRQASSFILTQKLSDRQYIYYDTLAESIQPEILKNFFLSLLDSVILKDGLPQTIVFRNGLCHTFTYKNNS

SEQ ID NO: 898 - protein, 577 aa, Unknown
  Description of Unknown: Integrase B899 sequence
  PTHR30461:SF3,SM00857,G3DSA:1.10.10.2600,IPR036162,PF13408, IPR025827,G3DSA:3.40.50.1390,PS51737,IPR006119,IPR038109, PF07508,IPR011109,SSF53041,PF00239,PTHR30461, PS51736,Coil,cd00338
MDIYKVRQLLKEQSIFDIPLRVVYYVRVSTDKEEQKNSTVNQDTFFEDLIASHPAWTFVGKYIDDGASGIMADKREDFQRMISDGQNKMYDLILTKEISRFARNTLDSIRYTRLLLNCGIGVWFYTDNVNTINEDAELHLAILSSIAQNESLKTSTRVRMGHAQSIKRGVVMGNSMLYGYNKDHGKLVIDPYEAEMVRSIYEKYATGVYTTPMLEREIYASGYRNHYGEKISRTVIGHIITNPKYKGYYVGGKVKIIDMFTKKRKFIPKDEWIMYKDETGERVPAIIDEETWELANKYFVERGDAIKARRKVCTTPNTFTGKIYCGTDGAPYWLKHRVLRGKDDSTWYCSDKLKNGTDSCKSFPIKEDEIRSMVVDLITLSPSDIQKYCEMYLEMLRKNIDSSVDKSAKIAELNKEIENNMAKKQKLLDYNLQGILSDDEFISNTKLLNRKIERAQSLIDSFTSKSPVELKSNSVLDKAAKLLNDFSGVKSEDLDNKIVDELIDKIVITPQDTDYASVEFYLKTSEKVHKTYDRKAVLRNDNLLNIMLPVQSTVFYRHPRHLYGHETEIRYDYRLVI

SEQ ID NO: 899 - protein, 577 aa, Unknown
  Description of Unknown: Integrase B900 sequence
  PTHR30461:SF3,IPR036162,PS51737,IPR011109,PTHR30461, PS00397,PF00239,G3DSA:1.10.10.2600,IPR006119,SSF53041, SM00857,IPR025827,IPR038109,PS51736,cd03768, IPR006118,PF13408,G3DSA:3.40.50.1390,PF07508,Coil
MISNSAATHTKVAIYIRVSTLHQIDRDSLPMQRQDLIAYAKLILNTDDVTIFEDAGYSGKNTIRPEFQKMMSQLRTGTYTHLLVWKIDRISRNLLDFAEMYQELKNLGVTFVSKNEQFDTSTAMGEAMLKIILVFAELERNMTSERVTATMISRASNGQWNGGRIPYGYDYDPEEQAFSFNSDEYNIAHLIHDKYEELRSLVYLARYLNEHGYRTRAGNDWSPVSLDIILRSVFYCGDYQYNRLKEGDRQRPKDKSEWITVKDHHPAIVSREQKERILALLESNRRLKSFRKSGKSKYTHIFSGLLICGNCGQPMTSSISTIKKTTGRRYSLYFCPTHRKSKLWCTGKSTSDPIVGEFVFNYILNMLNAQKAFSPETSIQELEQQLLSGDTFSPVAAIAPDGLHDLFHTLRTGTIKGEVFGKDVKIKTGSEPPLQLSKLKKEKVRLERAIDRLNKLFLYSEKAMSESEYLTQKIQLSDSLEEVEDKLAFLASEGSLQQSITDDEFIAKASNFILSQKLTDRNYVSFQSLSATVSPEVLDSFLSSIIDNIVFKDGAIHSITFRNGLSHTFIYKEKPEV

SEQ ID NO: 900 - protein, 577 aa, Unknown
  Description of Unknown: Integrase B901 sequence
  PTHR30461:SF3,SM00857,G3DSA:1.10.10.2600,IPR036162,PF13408, PS51737,G3DSA:3.40.50.1390,IPR025827,IPR006119,IPR038109, PF07508,SSF53041,IPR011109,PF00239,PTHR30461, Coil,cd00338
MDIYNVANQMKLERKTIFDLNIRVTFYARVSTTRDEQENSIENQIAYFTEMIKGNKNWEYVEGYVDRIRGESAENRTEFMQMINDGKGGKFDLIITKEVSRFARDTVDSLNYTRDLLRCGVGVFFQNDNICTVDTDSELRLTIMASIAADEVRKLSERIRWGHRRSIESGNVLGNNRIFGYDLYDKKLHINEREAEMVKLIFELYSSGHYSVRKIEQKLYDEGFRGRNGNRIHHNTISGIIQNPKYKGYFCGGKVKITDFRTRQQRFLPEEEWIMHKDLTGETVPAIVSEDLWDRCNQIFKERSEIVKSKERSIKDRSVFTGKIWCAVDGKAYWRTSYSNSKQKGKSIYQWICSEKKRINAKACPSFSILESELYQMVGEFFQSVVPSIESYTDNFISIYQKNDSAAVIRKQLREIEDKIGREKAKKDKLFELYLDEIITKNEFKKRNDDSDSLIASLESNAKELNRESSSDKTVETIKEITAYIKDVYSPGEPMPKELVDDLVETIIDRIDVEPVNDNSMKVSIKLRTGEKQDYKYSNSGRRLRNNEIGNLCSSGIMSFTIWPPIEPACFAVSSPL

SEQ ID NO: 901 - protein, 577 aa, Unknown
  Description of Unknown: Integrase B902 sequence
  PTHR30461:SF3,IPR036162,PS51737,IPR011109,PTHR30461, PS00397,PF00239,G3DSA:1.10.10.2600,IPR006119,SSF53041, SM00857,IPR025827,IPR038109,PS51736,cd03768, IPR006118,PF13408,G3DSA:3.40.50.1390,PF07508,Coil
MISNSAATHAKVAIYIRVSTLHQIDRDSLPMQRQDLIAYAKLILNTDDVTIFEDAGYSGKNTIRPEFQKMMSQLRTGTYTHLLVWKIDRISRNLLDFAEMYQELKDLGVTFVSKNEQFDTSTAMGEAMLKIILVFAELERNMTSERVTATMISRASNGQWNGGRIPYGYDYDPEEQDFSFNSDEYNIAHLIHDKYEELRSLVYLARYLNEHGYRTRAGNDWSPVSLDIILRSVFYCGDYQYNRLKEGDRQRPKDKSEWITVKDHHPAIVSREQKERILALLESNRRLKSFRKSGKSKYTHIFSGLLICGNCGQPMTSSISTIKKTTGRRYSLYFCPTHRKSKLWCTGKSTSDPIVGEFVFNYILNMLNAQKAFSPETSIQELEQQLLSGDTFSPVAAIAPDGLHDLFHTLRTGTIKGEVFGKDVKIKTGSEPPLQLSKLKKEKVRLERAIDRLNKLFLYSEKAMSESEYLTQKIQLSDSLEEVEDKLAFLASEDSLQQSITDDEFIAKASNFILSQKLTDRNYVSFQSLSATVSPEVLDSFLSSIIDNIVFKDGAVHSITFRNGLSHTFIYKEKPEV

SEQ ID NO: 902 - protein, 577 aa, Unknown
  Description of Unknown: Integrase B903 sequence
  PTHR30461:SF3,IPR036162,PS51737,IPR011109,PTHR30461, PS00397,PF00239,G3DSA:1.10.10.2600,IPR006119,SSF53041, SM00857,IPR025827,IPR038109,PS51736,cd03768, IPR006118,PF13408,G3DSA:3.40.50.1390,PF07508,Coil
MISNSAATHAKVAIYIRVSTLHQIDRDSLPMQRQDLIAYAKLILNTDDVTVFEDAGYSGKNTIRPEFQKMMSQLRTGTYTHLLVWKIDRISRNLLDFAEMYQELKDLGVTFVSKNEQFDTSTAMGEAMLKIILVFAELERNMTSERVAATMISRASNGQWNGGRIPYGYDYDTEEQTFSFNSDEYNIAHLIHDKYEELRSLVYLARYLNEHGYRTRAGNDWSPVSLDIILRSVFYCGDYQYNRLKEGDRQRPKDKSEWITVKDHHPAIVSRGQKERILALLESNRRLKSFRKSGKSKYTHIFSGLLICGNCGQPMTSSISTVKKTTGRRYSLYFCPTHRKSKLWCTGKSTSDPIIGEFVFNYILNMLNAQKAFSPETSIQELEQQLLSGDTFSPVAAIAPDGLQDLFHTLRTGTVKGEVFGKDVKIKTDSEPPLQLSKLKKEKIRLERAIDRLNKLFLYSEKAMSESEYLTQKIQLSDSLEEVEDKLAFLASEDSLQQSITDDEFISKASNFILSQKLTDRNYVSFQSLSATVSPEVLDSFLSSIIDNIVFKDGAVHSITFRNGLSHTFIYKEKPEV

SEQ ID NO: 903 - protein, 577 aa, Unknown
  Description of Unknown: Integrase B904 sequence
  PTHR30461:SF3,IPR036162,PS51737,IPR011109,PTHR30461, PS00397,PF00239,G3DSA:1.10.10.2600,IPR006119,SSF53041, SM00857,IPR025827,IPR038109,PS51736,cd03768, IPR006118,PF13408,G3DSA:3.40.50.1390,PF07508,Coil
MSINRNNTNETPKKAALYVRVSTNYQIDRDSLPMQRQELITYAQLMFGINDYVVFEDAGYSGKNTDRPEFQNMMRRIRAGEFTHLLCWKIDRISRNLLDFASMYQELKDLGVTFVSKNEQFDTSTAIGEAMLKIILVFAELERNMTSERVTATMLSRAQNGLWNGGRVPYGYDYDKDSKTFSINQEEAFLVHKMYDLYSEHRSLVMVSRALNEDGYASRAGNDWSPVSIFIILTNPFYTGKYRYNHYKIPGLKIEKDPSEWIEVPDHHPRIISDEQFGNVNRILQANSRSKRLPGQQHTSKGTHIFGGLLYCGTCGSQYVSTPSRLLASGYRPSKYACPNLRKKKTCNTKSISDPVIGEFVLNYVLNMMHARAAFSSIHDTSELQDALLNGGTFQNVDHIGKDGLDGCFHMFSSTPLDGKRFRKPKKATTIDPELKRLRAEKRKTERALDRLMNLYLYADNPISEKDFIIRKQALDDYLKEINENLGMIDRGRGIETISDENFIKRASYFIMSKELAGKDYIYFKKLAMDMDAEILRDFFQEIIDSIVMEGSNVKEIVFRNGLAHTFFYKDAEKPEA

SEQ ID NO: 904 - protein, 577 aa, Unknown
  Description of Unknown: Integrase B905 sequence
  PTHR30461:SF3,SM00857,G3DSA:1.10.10.2600,IPR036162,PF13408, IPR025827,PS51737,G3DSA:3.40.50.1390,IPR006119,IPR038109, PF07508,IPR011109,SSF53041,PF00239,PTHR30461, PS51736,Coil,cd00338
MDIYKVRQLLKGQSIFDIPLRVVYYVRVSTDKEEQKNSTVNQDTFFEELIASHPAWTFVGKYIDDGASGIMADKREDFQRMISDGQNQMYDLILTKEISRFARNTLDSIRYTRLLLNCGIGVWFYTDNVNTINEDAELHLAILSSIAQNESLKTSTRVRMGHAQSIKRGVVMGNSMLYGYNKDHGKLVIDPYEAEMVRSIYEKYATGVYTTPMLEREIYASGYRNHYGEKISRTVIGHIITNPKYKGYYVGGKVKIIDMFTKKRKFIPKDEWIMYKDETGERVPAIIDEETWELANKYFVERGDAIKARRKVCTTPNTFTGKIYCGTDGAPYWLKHRVLRGKDDSTWYCSDKLKNGTDSCKSFPIKEDEIRSMVVDLITLSPSDIQKYCEMYLEMLRKNIDSSVDKSAKIAELNKEIENNMAKKQKLLDYNLQGILSDDEFISNTKLLNRKIERAQSLIDSFTSKSPVELKSNSVLDKAAKLLNDFSGVKSEDLDNKIVDELIDKIVITPQDTDYASVEFYLKTSEKVHKTYDRKAVLRNDNLLNIMLPVRSTVFYRHPRHLYGHETGIRYDYRLVI

SEQ ID NO: 905 - protein, 577 aa, Unknown
  Description of Unknown: Integrase B906 sequence
  PTHR30461:SF3,IPR036162,PS51737,IPR011109,PTHR30461, PS00397,PF00239,G3DSA:1.10.10.2600,IPR006119,SSF53041, SM00857,IPR025827,IPR038109,PS51736,cd03768, IPR006118,PF13408,G3DSA:3.40.50.1390,PF07508,Coil
MISNSAATHAKVAIYIRVSTLHQIDRDSLPMQRQDLIAYAKLILNTDDVTIFEDAGYSGKNTIRPEFQKMMSQLRTGTYTHLLVWKIDRISRNLLDFAEMYQELKNLGVTFVSKNEQFDTSTAMGEAMLKIILVFAELERNMTSERVTATMISRASNGQWNGGRIPYGYDYDPEEQAFSFNSDEYNIAHLIHDKYEELRSLVYLARYLNEHGYRTRAGNDWSPVSLDIILRSVFYCGDYQYNRLKEGDRQRPKDKSEWITVKDHHPAIVSREQKERILALLESNRRLKSFRKSGKSKYTHIFSGLLICGNCGQPMTSSISTVKKTTGRRYSLYFCPTHRKSKLWCTGKSTSDPIIGEFVFNYILNMLNAQKAFSPETSIQKLEQQLLSGDTFSPVVAIAPDGLQDLFHTLRTGTVKGEVFGKDVKIKTDSEPPLQLSKLKKEKIRLERAIDRLNKLFLYSEKAMSESEYLTQKIQLSDSLEEVEDKLAFLASEDSLQQSITDDEFIAKASNFILSQKLTDRNYVSFQSLSATVSPEVLDSFLSSIIDNIVFKDGAVHSITFRNGLSHTFIYKEKPEV

SEQ ID NO: 906 - protein, 577 aa, Unknown
  Description of Unknown: Integrase B907 sequence
  PTHR30461:SF3,IPR036162,PS51737,IPR011109,PTHR30461, PS00397,PF00239,G3DSA:1.10.10.2600,IPR006119,SSF53041, SM00857,IPR025827,IPR038109,PS51736,cd03768, IPR006118,PF13408,G3DSA:3.40.50.1390,PF07508,Coil
MISNSAATHAKVAIYIRVSTLHQIDRDSLPMQRQDLIAYAKLILNTDDVTIFEDAGYSGKNTIRPEFQKMMSQLRTGTYTHLLVWKIDRISRNLLDFAEMYQELKNLGVTFVSKNEQFDTSTAMGEAMLKIILVFAELERNMTSERVTATMISRASNGHWNGGRIPYGYDYNPEEQDFSFNSDEYNIAHLIHDKYEELHSLVYLARYLNEHGYRTRAGNDWSPVSLNIILRSVFYCGDYQYNRLKEGDRQRPKDKSEWITVKDHHPAIVSREQKERILALLESNRRLKSFRKSGKSKYTHIFSGLLICGNCGQPMTSSISTIKRTTGRRYSLYFCPTHRKSKLWCTGKSTSDPIVGEFVFNYILNMLNAQKAFSPETSIQELEQQLLSGDTFSPVAAIAPDGLHDLFHTLRTGTIKGEVFGKDVKIKTGSEPPLQLSKLKKEKVRLERAIDRLNKLFLYSEKAMSESEYLTQKIQLSDSLEEVEDKLAFLASEGSLQQSITDDEFIAKASNFILSQKLTDRNYVSFQSLSATVSPEVLDSFLSSIIDNIVFKDGTVNSITFRNGLSHTFIYREKPEV

SEQ ID NO: 907 - protein, 577 aa, Unknown
  Description of Unknown: Integrase B908 sequence
  PTHR30461:SF3,IPR036162,PS51737,IPR011109,PTHR30461, PS00397,PF00239,G3DSA:1.10.10.2600,IPR006119,SSF53041, SM00857,IPR025827,IPR038109,PS51736,cd03768, IPR006118,PF13408,G3DSA:3.40.50.1390,PF07508,Coil
MSINRNNTSETPKKAALYVRVSTNYQIDRDSLPMQRQELITYAQLMFGINDYVIFEDAGYSGKNTDRPEFQNMMRRIRAGEFTHLLCWKIDRISRNLLDFASMYQELKDLGVTFVSKNEQFDTSTAIGEAMLKIILVFAELERNMTSERVTATMLSRAQNGLWNGGRVPYGYDYDKDSKTFSINQEEAFLVRKMYDLYSEHRSLVMVSRTLNEDGYASRAGNDWSPVSIFIILTNPFYTGIYRYNHYKIPGLKIEKDPSEWIEVPDHHPRIISDEQFDNVNRILQSNSRSKRLPGQQHTSKGTHIFGGLLYCGTCGSQYVSTPSRLLASGYRPSKYACPNLRKKKTCNTKSISDPVIGEFVLNYVLNMMHARAAFSSIHDTSELQDALLSGGTFQNVDHIGKDGLDSCFHMFSSTPLDGKRFRKPKKATTIDPELKRLRAEKRKTERALDRLMNLYLYADNPISEKDFVIRKQALDDYLKEINENLGMIDRGRGIETISDENFIKRASYFIMSKELAGKDYIYFKKLAMDMDAEILRDFFQEIIDSIVMEGSNVKEIVFRNGLAHTFFYKGTEKPEA

SEQ ID NO: 908 - protein, 577 aa, Unknown
  Description of Unknown: Integrase B909 sequence
  PTHR30461:SF3,IPR036162,PS51737,IPR011109,PTHR30461, PS00397,PF00239,G3DSA:1.10.10.2600,IPR006119,SSF53041, cd00338,SM00857,IPR025827,IPR038109,PS51736, IPR006118,PF13408,G3DSA:3.40.50.1390,PF07508,Coil
MALPKKTIPQIEQKRAAIYVRVSTQYQVDRASLPVQRSELVNYAKYALDIPDFVIFEDAGYSAKNTDRPDYQQMMARIRTGEFSHLLVWKIDRISRNLLDFAAMYSELKQLGVVFVSKNEQFDTSSAMGEAMLKIILVFAELERNMTAERVSAVFLSRANDGIWNGGKVPFGYAYDKQTKTFSILEDEAKTVRLIYALYESSKSLVTVSKALNERGIKTRNGSEWSPTTVHTMLSNPFYSGTYRYNYRNESDPHHHVPKKKEDWILVKNHHPAIVSPEHQAAVELILASKSYGKNQTYQRKNIHAFAGLLTCGYCGSTMAATIDRARADGWRPSVYICSRRRMSNDCQNKYVSDVTLGPFVLNFFANLIKASNSFGKSTSIETLEKKLLRGDALSIVDHIERPGLEELYNHLRSGFDEKPFDSLAVNAAEASSDVQERDLLLADKRRLERALKRLNAIYLYGDEEIPGKDFILDRKSITDSLQQIDDRLKELDAAAVFDVSLSDDEFMEKASQFILTQQLLDKRSVNYEKFIRKIDPRIVKDFLNETVSNFCIKDGLTTSVLFKNGIELRFCYKAQQ

SEQ ID NO: 909 - protein, 577 aa, Unknown
  Description of Unknown: Integrase B910 sequence
  PTHR30461:SF3,IPR036162,PS51737,IPR011109,PTHR30461, PS00397,PF00239,G3DSA:1.10.10.2600,IPR006119,SSF53041, SM00857,IPR025827,IPR038109,PS51736,cd03768, IPR006118,PF13408,G3DSA:3.40.50.1390,PF07508,Coil
MISNSAATHAKVAIYIRVSTLHQIDRDSLPMQRQDLIAYAKLILNTDDVTVFEDAGYSGKNTIRPEFQKMMSQLRTGTYTHLLVWKIDRISRNLLDFAEMYQELKDLGVTFVSKNEQFDTSTAMGEAMLKIILVFAELERNMTSERVAATMISRASNGQWNGGRIPYGYDYDPEEQTFSFNSDEYNIAHLIHDKYEELRSLVYLARYLNEHGYRTRAGNDWSPVSLDIILRSVFYCGDYQYNRLKEGDRQRPKDKSEWITVKDHHPAIVSREQKERILALLESNRRLKSFRKSGKSKYTHIFSGLLICGNCGQPMTSSISTIKKTTGRRYSLYFCPTHRKSKLWCTGKSTSDPIVGEFVFNYILNMLNAQKAFSSETSIQELEQQLLSGDTFSPVAAIAPDGLQDLFHTLRTGTIKGEVFGKNVKIKTGSEPPLQLSKLKKEKVRLERAIDRLNKLFLYSEKAMSESEYLTQKIQLSDALEEVEDKLTFLASEDSLQQSITDDEFIAKASNFILSQKLTDRNYVSFQSLSATVSPEVLDSFLSSIIDNIVFKDGAIHSITFRNGLSHTFIYKEKPEV

SEQ ID NO: 910 - protein, 577 aa, Unknown
  Description of Unknown: Integrase B911 sequence
  PTHR30461:SF3,IPR036162,PS51737,IPR011109,PTHR30461, PS00397,PF00239,G3DSA:1.10.10.2600,IPR006119,SSF53041, SM00857,IPR025827,IPR038109,PS51736,cd03768, IPR006118,PF13408,G3DSA:3.40.50.1390,PF07508,Coil
MISNSAATHAKVAIYIRVSTLHQIDRDSLPMQRQDLIAYAKLILNTDDVTVFEDAGYSGKNTIRPEFQKMMSQLRTGTYTHLLVWKIDRISRNLLDFAEMYQELKDLGVTFVSKNEQFDTSTAMGEAMLKIILVFAELERNMTSERVAATMISRASNGQWNGGRIPYGYDYDPEEQTFSFNSDEYNIAHLIHDKYEELRSLVYLARYLNEHGYRTRAGNDWSPVSLDIILRSVFYCGDYQYNRLKEGDRQRPKDKSEWITVKDHHPAIVSREQKERILALLESNRRLKSFRKSGKSKYTHIFSGLLICGNCGQPMTSSISTIKKTTGRRYSLYFCPTHRKSKLWCTGKSTSDPIVGEFVFNYILNMLNAQKAFSSETSIQELEQQLLSGDTFSPVAAIAPDGLQDLFHTLRTGTIKGEVFGKDVKIKTGSEPPLQLSKLKKEKVRLERAIDRLNKLFLYSEKAMSESEYLTQKIQLSDALEEVEDKLTFLASEDSLQQSITDDEFIAKASNFILFQKLTDRNYVSFQSLSATVSPEVLDSFLSSIIDNIVFKDGAIHSITFRNGLSHTFIYKEKPEV

SEQ ID NO: 911 - protein, 577 aa, Unknown
  Description of Unknown: Integrase B912 sequence
  PTHR30461:SF3,IPR036162,PS51737,IPR011109,PTHR30461, PS00397,PF00239,G3DSA:1.10.10.2600,IPR006119,SSF53041, SM00857,IPR025827,IPR038109,PS51736,cd03768, IPR006118,PF13408,G3DSA:3.40.50.1390,PF07508,Coil
MSINRNNTNETPKKAALYVRVSTNYQIDRDSLPMQRQELITYAQLMFGINDYVVFEDAGYSGKNTDRPEFQNMMRRIRAGEFTHLLCWKIDRISRNLLDFASMYQELKDLGVTFVSKNEQFDTSTAIGEAMLKIILVFAELERNMTSERVTATMLSRAQNGLWNGGRVPYGYDYDKDSKTFSINQEEAFLVRKMYNLYSEHRSLVIVSRALNEDGYASRAGNDWSPVSIFIILTNPFYTGIYRYNHYKIPGLKIEKDPSEWIEVPDHHPRIISDEQFDNVNRILQANSRSKRLPGQQHTSKGIHIFGGLLYCGTCGSQYVSTPSRLLASGYRPSKYACPNLRKKKTCNTKSISDPVIGEFVLNYVLNMMHARVAFSSIHDTSELQDALLNGGTFQNVDYIGKDGLDSCFHMFSSTPLDGKRFRKPKKATTIDPELKRLRAEKRKTERALDRLMNLYLYADNPISEKDFVIRKQALDDYLKEINENLGMIDRGRGIETISDENFIKRASYFIMSKELAGKDYIYFKKLAMDMDAEILRDFFQEIIDSIVMEGSNVKEIVFRNGLAHTFFYKDEEKPEA

SEQ ID NO: 912 - protein, 577 aa, Unknown
  Description of Unknown: Integrase B913 sequence
  PTHR30461:SF3,SM00857,G3DSA:1.10.10.2600,IPR036162,PF13408, PS51737,G3DSA:3.40.50.1390,IPR025827,IPR006119,IPR038109, PF07508,IPR011109,SSF53041,PTHR30461,Coil, PS51736,cd00338,PF00239
MDIYKVRQLLKEQSIFDIPLRVVYYVRVSTDKEEQKNSTVNQDTFFEDLIASHPAWTFVGKYIDDGASGIMADKREDFQRMISDGQNKMYDLILTKEISRFARNTLDSIRYTRLLLNCGVGVWFYTDNVNTINEDAELHLAILSSIAQNESLKTSTRVRMGHAQSIKRGVVMGNSMLYGYNKDHGRLVIDPYEAEMVRSIYEKYATGVYTTPMLEREIYASGYRNHYGEKISRTVIGHIITNPKYKGYYVGGKVKIIDMFTKKRKFIPKDEWIMYKDETGERVPAIIDEETWELANKYFVERGDAIKARRKVCTTPNTFTGKIYCGVDGAPYWLKHRRLRGKDDSTWYCSDKLKNGTDSCKSFPIKEEEIRSMVIDLITISPSDIQKYCEMYLEMLRKSIDSSVDKSAKIAELNKEIENNMAKKQKLLDYNLQGILSDDEFISNTKLLNRKIERAQSIIDSFTSKSPVELKSNSVLDKSAKLLNDFSGVKSEDLDNKIVDELIDKIVITPQDTDYASVEFYLKTSEKVHKTYDRKAVLRNDNLLNIMLPVRSTVFYRHPRHLYGHETEIRYDYRLVI

SEQ ID NO: 913 - protein, 577 aa, Unknown
  Description of Unknown: Integrase B914 sequence
  PTHR30461:SF3,IPR036162,PS51737,IPR011109,PTHR30461, PS00397,PF00239,G3DSA:1.10.10.2600,IPR006119,SSF53041, SM00857,IPR025827,IPR038109,PS51736,cd03768, IPR006118,PF13408,G3DSA:3.40.50.1390,PF07508,Coil
MISNSAATHAKVAIYIRVSTLHQIDRDSLPMQRQDLIAYAKLILNTDDVTVFEDAGYSGKNTIRPEFQKMMSQLRTGTYTHLLVWKIDRISRNLLDFAEMYQELKDLGVTFVSKNEQFDTSTAMGEAMLKIILVFAELERNMTSERVAATMISRASNGQWNGGRIPYGYDYDPEEQTFSFNSDEYNIAHLIHDKYEELRSLVYLARYLNEHGYRTRAGNDWSPVSLDIILRSVFYCGDYQYNRLKEGDRQRPKDKSEWITVKDHHPAIVSREQKERILALLESNRRLKSFRKSGKSKYTHIFSGLLICGNCGQPMTSSISTVKKTTGRRYSLYFCPTHRKSKLWCTGKSTSDPIIGEFVFNYILNMLNAQKAFSPETSIQELEQQLLSGDTFSPVAAIAPDGLQDLFHTLRTGTVKGEVFGKDVKIKTDSEPPLQLSKLKKEKIRLERAIDRLNKLFLYSEKAMSESEYLTQKIQLSDSLEEVEDKLAFLASEDSLQQSITDDEFISKASNFILSQKLTDRNYVSFQSLSATVSPEVLDSFLSSIIDNIVFKDGAVHSITFRNGLSHTFIYKEKPEV

SEQ ID NO: 914 - protein, 577 aa, Unknown
  Description of Unknown: Integrase B915 sequence
  PTHR30461:SF3,cd00338,SM00857,G3DSA:1.10.10.2600,IPR036162, PF13408,IPR025827,G3DSA:3.40.50.1390,PS51737,IPR006119, IPR038109,PF07508,IPR011109,SSF53041,PTHR30461, Coil,PF00239
MDECRIKRYTECGNGRYYKPSHCRTFFDNEIKPIPTFYDESEEFTMTKNNNRVCCLYRVSTDKQVDFNSNHEADLPMQRKACHKFAESKGWVIVHEEQEEGVSGHKVRAAARDKLQIIKDYARKGKFDILLVFMFDRIGRIADETPFVVEWFVRNGIRVWSTQEGEQRFDNHTDKLLNYIRFWQADGESEKTSVRTRTSLRQLVEEGHFKGGNAPYGYDLVRSGRINKRKHELYELHINEQEAAVVRIVFDKYVYEGYGPQHIATYLNNSGYRARSGKCWHPSSIRGMVQNLTYTGVLRCGDARSELMPDLQIVPQEQFENAQRIRNERSVRSTAEAENRLPLNIHGKSLLAGNAYCGHCGAKLELTSSRKWRKMADGSLDDTLRIRYTCYGKLRKQTNCTGQTGYTVHILDEIIDKAVRQIFSKMRGIPKEQIVTKRYEKENAERKNHLQDLQTQRNKAEKDLLALKTEVLACIKGESVLPRETLAEMITAQEEKLTELENLCEAASEELEKTAELMDKVSRLYDELISYADLYDSANFEAKKMIVNQLIRRVDVYRGYQINISFNFDLTPYIEGE

SEQ ID NO: 915 - protein, 577 aa, Unknown
  Description of Unknown: Integrase B916 sequence
  SM00857,G3DSA:1.10.10.2600,IPR036162,PF13408,PS51737, G3DSA:3.40.50.1390,IPR025827,IPR006119,IPR038109,PF07508, IPR011109,SSF53041,PTHR30461,Coil,PS51736, cd00338,PF00239
MNIYHTRERLRTRSIYDLNLRVAFYARVSTDSEDQQVSIEHQTQYYKEFIKSNRNWKFAKGYIDNGISGIQTKHREQFKEMLEDAKNGKFDMLITKEITRFARNTLDSIQYTRQMLSWGVCVWFQNDNINTIDEDSELRLTIMAGVAQDEVRKLSNRVKFGHKQSIKNGVVLGNSRIYGYDKKDGKLTINESEAQMVRMIFEDYASGEWTTPQLEKKLYNMGYRNYKGGKIDRNVIRHIIRNPKYKGYYAGGKVKVVDMFTKKQEFLPESEWVMFKDDGSHVPQIVDEEVWKKANEYIDARGEIVKTRRTSIKKSENVFTGMLICGNDGASYWLKQRTLRGKEDVKWVCSKKIKEGAASCDSFYIDDGELREVIAKLIRESSGDIEQIAEKFIKIYHSSMSQADASTEIKRLEKQINVAERKSDKLLEYNLDGAISDAVFIEKSQKLEAQIEEYKKQIEKLSTIQDDIVPIENQIRAIAHSVKQLDGIGPDDITKTVVDSFLKKIVVNPIGEKEAKLVFYLKDGITTEMSFVSGKSMRCSVNLFNPIFTERSTTFYRALRSFPGHKEPVKYTYFFAF

SEQ ID NO: 916 - protein, 577 aa, Unknown
  Description of Unknown: Integrase B917 sequence
  PTHR30461:SF3,IPR036162,PS51737,IPR011109,PTHR30461, PS00397,PF00239,G3DSA:1.10.10.2600,IPR006119,SSF53041, SM00857,IPR025827,IPR038109,PS51736,cd03768, IPR006118,PF13408,G3DSA:3.40.50.1390,PF07508,Coil
MISNSAATHAKVAIYIRVSTLHQIDRDSLPMQRQDLIAYAKLILNTDDVTIFEDAGYSGKNTIRPEFQKMMSQLRTGTYTHLLVWKIDRISRNLLDFAEMYQELKNLGVTFVSKNEQFDTSTAMGEAMLKIILVFAELERNMTSERVTATMISRASNGQWNGGRIPYGYDYDSEEQAFSFNSDEYNIAHLIHDKYEELRSLVYLARYLNEHGYRTRAGNDWSPVSLDIILRSVFYCGDYQYNRLKEGDRQRPKDKSEWITVKDHHPAIVSREQKERILALLESNRRLKSFRKSGKSKYTHIFSGLLICGNCGQPMTSSISTIKKTTGRRYSLYFCPTHRKSKLWCTGKSTSDPIVGEFVFNYILNMLNAQKAFSLETSIQELEQQLLSGDTFSPVAAIAPDGLHDLFHTLRTGTIKGEVFGKDVKIKTGSEPPLQLSKLKKEKVRLERAIDRLNKLFLYSEKAMSESEYLTQKIQLSDSLEEVEDKLAFLASEGSLQQSITDDEFIAKASNFILSQKLTDRNYVSFQSLSATVSPEVLDSFLSSIIDNIVFKDGAVNSITFRNGLSHTFIYKEKPEV

SEQ ID NO: 917 - protein, 577 aa, Unknown
  Description of Unknown: Integrase B918 sequence
  PTHR30461:SF3,IPR036162,PS51737,IPR011109,PTHR30461, PS00397,PF00239,G3DSA:1.10.10.2600,IPR006119,SSF53041, SM00857,IPR025827,IPR038109,PS51736,cd03768, IPR006118,PF13408,G3DSA:3.40.50.1390,PF07508,Coil
MISNSAAAHAKVAIYIRVSTLHQIDRDSLPMQRQDLIAYAKLILNTDDVTIFEDAGYSGKNTIRPEFQKMMSQLRTGTYTHLLVWKIDRISRNLLDFAEMYQELKNLGVTFVSKNEQFDTSTAMGEAMLKIILVFAELERNMTSERVTATMISRASNGQWNGGRIPYGYDYDPEEQAFSFNSDEYNIAHLIHDKYEELRSLVYLARYLNEHGYRTRAGNDWSPVSLDIILRSVFYCGDYQYNRLKEGDRQRPKDKSEWITVKDHHPAIVSREQKERILALLESNRRLKSFRKSGKSKYTHIFSGLLICGNCGQPMTSSISTIKKTTGRRYSLYFCPTHRKSKLWCIGKSTSDPIVGEFVFNYILNMLNAQKAFSPETSIQELEQQLLSGDTFSPVAAIAPDGLHDLFHTLRTGTIKGEVFGKDVKIKTGSEPPLQLSKLKKEKVRLERAIDRLNKLFLYSEKAMSESEYLTQKIQLSDSLEEVEDKLAFLASEGSLQQSITDDEFIAKASNFILSQKLTDRNYVSFQSLSATVSPEVLDSFLSSIIDNIVFKDGAIHSITFRNGLSHTFIYKEKPEV

SEQ ID NO: 918 - protein, 577 aa, Unknown
  Description of Unknown: Integrase B919 sequence
  PTHR30461:SF3,IPR036162,PS51737,IPR011109,PTHR30461, PS00397,PF00239,G3DSA:1.10.10.2600,IPR006119,SSF53041, SM00857,IPR025827,IPR038109,PS51736,cd03768, IPR006118,PF13408,G3DSA:3.40.50.1390,PF07508,Coil
MISNSAATHAKVAIYIRVSTLHQIDRDSLPMQRQDLIAYAKLILNTDDVTIFEDAGYSGKNTIRPEFQKMMSQLRTGTYTHLLVWKIDRISRNLLDFAEMYQELKDLGVTFVSKNEQFDTSTAMGEAMLKIILVFAELERNMTSERVAATMISRASNGQWNGGRIPYGYDYDPEEQTFSFNSDEYNIAHLIHDKYEELRSLVYLARYLNEHGYRTRAGNDWSPVSLDIILRSVFYCGDYQYNRLKEGDRQRPKDKSEWITVKDHHPAIVSREQKERILALLESNRRLKSFRKSGKSKYTHIFSGLLICGNCGQPMTSSISTIKKTTGRRYSLYFCPTHRKSKLWCTGKSTSDPIVGEFVFNYILNMLNAQKAFSSETSIQELEQQLLSGDTFSPVAAIAPDGLQDLFHTLRTGTIKGEVFGKDVKIKTGSEPPLQLSKLKKEKVRLERAIDRLNKLFLYSEKAMSESEYLTQKIQLSDALEEVEDKLTFLASEDSLQQSITDDEFIAKASNFILSQKLTDRNYVSFQSLSATVSPEVLDSFLSSIIDNIVFKDGAIHSITFRNGLSHTFIYKEKPEV

SEQ ID NO: 919 - protein, 577 aa, Unknown
  Description of Unknown: Integrase B920 sequence
  PTHR30461:SF3,IPR036162,PS51737,IPR011109,PTHR30461, PS00397,PF00239,G3DSA:1.10.10.2600,IPR006119,SSF53041, SM00857,IPR025827,IPR038109,PS51736,cd03768, IPR006118,PF13408,G3DSA:3.40.50.1390,PF07508,Coil
MISNSAATHAKVAIYIRVSTLHQIDRDSLPMQRQDLIAYAKLILNTDDVTVFEDAGYSGKNTIRPEFQKMMSQLRTGTYTHLLVWKIDRISRNLLDFAEMYQELKDLGVTFVSKNEQFDTSTAMGEAMLKIILVFAELERNMTSERVAATMISRASNGQWNGGRIPYGYDYDPEEQTFSFNSDEYNIAHLIHDKYEELRSLVYLARYLNEHGYRTRAGNDWSPVSLDIILRSVFYCGDYQYNRLKEGDRQRPKDKSEWITVKDHHPAIVSREQKERILALLESNRRLKSFRKSGKSKYTHIFSGLLICGNCGQPMTSSISTVKKTTGRRYSLYFCPTHRKSKLWCTGKSTSDPIIGEFVFNYILNMLNAQKAFSPETSIQELEQQLLSGDTFSPVAAIAPDGLQDLFHTLRTGTVKGEVFGKDVKIKTDSEPPLQLSKLKKEKIRLERAIDRLNKLFLYSEKAMSESEYLTQKIQLSDSLEEVEDKLAFLASEDSLQQSITDDEFISKASNFILSQKLTDRNYVSFQSLSATVSPEILDSFLSSIIDNIVFKDGAVHSITFRNGLSHTFIYKEKPEV

SEQ ID NO: 920 - protein, 577 aa, Unknown
  Description of Unknown: Integrase B921 sequence
  PTHR30461:SF3,SM00857,G3DSA:1.10.10.2600,IPR036162,PS51737, G3DSA:3.40.50.1390,IPR006119,IPR038109,PF07508,IPR011109, SSF53041,PF00239,PTHR30461,PS51736,Coil, cd00338
MKKRVYTLYRVSTIGQVEKDDIPMQKEACHEFAERQGWEIVKEFSEKGVSGFKKSAKDRDQLQLLQQAAAAGEFDVLLVFMFDRLGRRDDETPFIVEWFTKQGVEVWSVNEGQQRFDSHVDKLMNYIRYWQASGESIKTSIRTRTRIEQLTEEGHYTGGTVAFGYKRVQKGRLNKKNQAVCDLEIDEEEAAIVRLIFQKYVYEGYGVKRICNYLVENHIMGRNGKNIPTTTLVRMVRNKCYTGYLINGNVEKECPELRIIEQEVFDRAQELRDTRRREKGEDSDSYSPHALLCGKVFCAHCGNRLNITSSGRTRLRADGSTVKEKRFRYSCHYNVRHPGQCDGQSGYGVTKLDAIVESIVCTKFSEILECSKSKLLQDMLRKDMEVAQKEVSRAKSELDLKDDERNALKDEMIRVIREKSSIDRDMIQQLLDENQAAIQAAQDALTAAQNKLEEIEQENKKAENDCSNLFTWASTYQNASFQQRQAILNQFIKEVRVGRDYDIEIILNVPLEEFEEFKSHSLSVRTPSGRKMDLKQAPVRGLGTPNGGIVVFDKTSGEAMNIMPKSSAHVTLRCQDE

SEQ ID NO: 921 - protein, 577 aa, Unknown
  Description of Unknown: Integrase B922 sequence
  PTHR30461:SF3,IPR036162,PS51737,IPR011109,PTHR30461, PS00397,PF00239,G3DSA:1.10.10.2600,IPR006119,SSF53041, SM00857,IPR025827,IPR038109,PS51736,cd03768, IPR006118,PF13408,G3DSA:3.40.50.1390,PF07508,Coil
MISNSAATHAKVAIYIRVSTLHQIDRDSLPMQRQDLIAYAKLILNTDDVTIFEDAGYSGKNTIRPEFQKMMAQLRTGTYTHLLVWKIDRISRNLLDFAEMYQELKDLGVTFVSKNEQFDTSTAMGEAMLKIILVFAELERNMTSERVTATMISRASNGQWNGGRIPYGYDYDPEEQDFSFNSDEYNIAHLIHDKYEELRSLVYLARYLNEHGYRTRAGNDWSPVSLDIILRSVFYCGDYQYNRLKEGDRQRPKDKSEWITVKDHHPAIVSREQKERILALLESNRRLKSFRKSGKSKYTHIFSGLLICGNCGQPMTSSISTIKKTTGRRYSLYFCPTHRKSKLWCTGKSTSDPIIGEFVFNYILNMLNAQKAFSSETSIQELEQQLLSGDTFSPVAAIAPDGLQDLFHTLRTGTIKGEVFGKNVKIKTGSEPPLQLSKLKKEKVRLERAIDRLNKLFLYSEKAMSESEYLTQKIQLSDALEEVEDKLAFLASEDSLQQSITDDEFIAKASNFILSQKLTDRNYVSFQSLSATVSPEILDSFLSSIIDNIVFKDGAVHSITFRNGLSHTFIYKEKPEV

SEQ ID NO: 922 - protein, 577 aa, Unknown
  Description of Unknown: Integrase B923 sequence
  PTHR30461:SF3,IPR036162,PS51737,IPR011109,PTHR30461, PS00397,PF00239,G3DSA:1.10.10.2600,IPR006119,SSF53041, SM00857,IPR025827,IPR038109,PS51736,cd03768, IPR006118,PF13408,G3DSA:3.40.50.1390,PF07508,Coil
MISNSAATHAKVAIYIRVSTLHQIDRDSLPMQRQDLIAYAKLILNTDDVTVFEDAGYSGKNTIRPEFQKMMSQLRTGTYTHLLVWKIDRISRNLLDFAEMYQELKDLGVTFVSKNEQFDTSTAMGEAMLKIILVFAELERNMTSERVTATMISRASNGQWNGGRIPYGYDYDPEEQGFSFNSDEYNIAHLIHDKYEELRSLVYLARYLNEHGYRTRAGNDWSPVSLDIILRSVFYCGDYQYNRLKEGDRQRPKDKSEWITVKDHHPAIVSREQKERILALLESNRRLKSFRKSGKSKYTHIFSGLLICGNCGQPMTSSISTIKKTTGRRYSLYFCPTHRKSKLWCTGKSTSDPIVGEFVFNYILNMLNAQKAFSPETSIQELEQQLLSGDTFSPVAAIAPDGLHDLFHTLRTGTIKGEVFGKDVKIKTGSEPPLQLSKLKKEKVRLERAIDRLNKLFLYSEKAMSESEYLTQKIQLSDSLEEVEDKLAFLASEGSLQQSITDDEFIAKASNFILSQKLTDRNYISFQSLSATVSPEVLDSFLSSIIDNIVFKDGAVNSITFRNGLSHTFIYREKPEV

SEQ ID NO: 923 - protein, 577 aa, Unknown
  Description of Unknown: Integrase B924 sequence
  PTHR30461:SF3,SM00857,G3DSA:1.10.10.2600,IPR036162,PF13408, PS51737,IPR025827,G3DSA:3.40.50.1390,IPR006119,IPR038109, PF07508,IPR011109,SSF53041,PF00239,PTHR30461, PS51736,Coil,cd00338
MDIYKVRQLLKEQSIFDIPLRVVYYVRVSTDKEEQKNSTVNQDTFFEDLIASHPAWTFVGKYIDDGASGIMADKREDFQRMISDGQNKMYDLILTKEISRFARNTLDSIRYTRLLLNCGVGVWFYTDNVNTINEDAELHLAILSSIAQNESLKTSTRVRMGHAQSIKRGVVMGNSMLYGYNKDHGRLVIDPYEAEMVRSIYEKYATGVYTTPMLEREIYASGYRNHYGEKISRTVIGHIITNPKYKGYYVGGKVKIIDMFTKKRKFIPKDEWIMYKDETGERVPAIIDEETWELANKYFVERGDAIKARRKVCTTPNTFTGKIYCGTDGAPYWLKHRVLRGKDDSTWYCSDKLKNGTDSCKSFPIKEDEIRSMVVDLITLSPSDIQKYCEMYLEMLRKSIDSSVDKSAKIAELNKEIENNMAKKQKLLDYNLQGILSDDEFISNTKLLNRKIERAQSLIDSFTSKSPVELKSNSILDKAAKLLNDFSGVKSEDLDNKIVDELIDKIVITPQDTDYASVEFYLKTSEKVHKTYDRKAVLRNDNLLNIMLPVRSTVFYRHPRHLYGHETEIRYDYRLVI

SEQ ID NO: 924 - protein, 577 aa, Unknown
  Description of Unknown: Integrase B925 sequence
  PTHR30461:SF3,IPR036162,PS51737,IPR011109,PTHR30461, PS00397,PF00239,G3DSA:1.10.10.2600,IPR006119,SSF53041, SM00857,IPR025827,IPR038109,PS51736,cd03768, IPR006118,PF13408,G3DSA:3.40.50.1390,PF07508,Coil
MISNSAATHAKVAIYIRVSTLHQIDRDSLPMQRQDLIAYAKLILNTDDVTIFEDAGYSGKNTIRPEFQKMMSQLRTGTYTHLLVWKIDRISRNLLDFAEMYQELKDLGVTFVSKNEQFDTSTAMGEAMLKIILVFAELERNMTSERVTATMISRASNGQWNGGRIPYGYDYDPEEQDFSFNSDEYNIAHLIHDKYEELRSLVYLARYLNEHGYRTRAGNDWSPVSLDIILRSVFYCGDYQYNRLKEGDRQRPKDKSEWITVKDHHPAIVSREQKERILALLESNRRLKSFRKSGKSKYTHIFSGLLICGNCGQPMTSSISTIKKTTGRRYSLYFCPTHRKSKLWCTGKSTSDPIIGEFVFNYILNMLNAQKAFSSETSIQELEQQLLSGDTFSPVAAIAPDGLQDLFHTLRTGTIKGEVFGKDVKIKTGSEPPLQLSKLKKEKIRLERAIDRLNKLFLYSEKAMSESEYLTQKIQLSDALEEVEDKLTFLASEDSLQQSITDDEFIAKASNFILSQKLTDRNYVSFQSLSATVSPEVLDSFLSSIIDNIVFKDGAIHSITFRNGLSHTFIYKEKPEV

SEQ ID NO: 925 - protein, 577 aa, Unknown
  Description of Unknown: Integrase B926 sequence
  SM00857,G3DSA:1.10.10.2600,IPR036162,PF13408,PS51737, G3DSA:3.40.50.1390,IPR025827,IPR006119,IPR038109,PF07508, IPR011109,SSF53041,PTHR30461,Coil,PS51736, cd00338,PF00239
MNIYHTRERLRTRSIYDLNLRVAFYARVSTDSEDQQVSIEHQTQYYKEFIKSNRNWKFAKGYIDNGISGIQTKHREQFKEMLEDAKNGKFDMLITKEITRFARNTLDSIQYTRQMLSWGVCVWFQNDNINTIDEDSELRLTIMAGVAQDEVRKLSNRVKFGHKQSIKNGVVLGNSRIYGYDKKDGKLTINESEAQMVRMIFEDYASGEWTTPQLEKKLYNMGYRNYKGGKIDRNVIRHIIRNPKYKGYYAGGKVKIVDMFTKKQEFLPESEWVMFKDDGSHVPQIVDEEVWKKANEYIDARGEIVKTRRTSIKKSENVFTGMLVCGNDGASYWLKQRTLRGKEDVKWVCSRKIKEGAASCDSFYIDDRELREVIAKLIRESSGDIEQIAEKFIKIYHSSMNQADTSTEIKRLEKQINVAERKSDKLLEYNLDGAISDAVFIEKSQKLETQIEEYKKQIEKLSTIQDDIVPIENQIRAIAHSVKQLDGISPDDITKTVVDSFLKKIVVNPIGEKEAKLVFYLKDGITTEMSFVGGKSMRCSVNLFNPIFTERSTTFYRALRSFPGHKEPVKYTYFFAF

SEQ ID NO: 926 - protein, 577 aa, Unknown
  Description of Unknown: Integrase B927 sequence
  PTHR30461:SF3,IPR036162,PS51737,IPR011109,PTHR30461, PS00397,PF00239,G3DSA:1.10.10.2600,IPR006119,SSF53041, SM00857,IPR025827,IPR038109,PS51736,cd03768, IPR006118,PF13408,G3DSA:3.40.50.1390,PF07508,Coil
MISNSAATHAKVAIYIRVSTLHQIDRDSLPMQRQDLIAYAKLILNTDDVTIFEDAGYSGKNTIRPEFQKMMSQLRTGTYTHLLVWKIDRISRNLLDFAEMYQELKNLGVTFVSKNEQFDTSTAMGEAMLKIILVFAELERNMTSERVTATMISRASNGHWNGGRIPYGYDYDPEEQDFSFNSDEYNIAHLIHDKYEELHSLVYLARYLNEHGYRTRAGNDWSPVSLNIILRSVFYCGDYQYNRLKEGDRQRPKDKSEWITVKDHHPAIVSREQKERILALLESNRRLKSFRKSGKSKYTHIFSGLLICGNCGQPMTSSISTIKRTTGRRYSLYFCPTHRKSKLWCTGKSTSDPIIGEFVFNYILNMLNAQKAFSPETSIQKLEQQLLSGDTFSPVVAIAPDGLQDLFHTLRTGTVKGEVFGKDVKIKTDSEPPLQLSKLKKEKIRLERAIDRLNKLFLYSEKAMSESEYLTQKIQLSDSLEEVEDKLTFLASEDSLQQSITDDEFIAKASNFILSQKLTDRNYVSFQSLSATVSPEVLDSFLSSIIDNIVFKDGAVHSITFRNGLSHTFIYKEKPEV

SEQ ID NO: 927 - protein, 577 aa, Unknown
  Description of Unknown: Integrase B928 sequence
  PTHR30461:SF3,IPR036162,PS51737,IPR011109,PTHR30461, PS00397,PF00239,G3DSA:1.10.10.2600,IPR006119,SSF53041, SM00857,IPR025827,IPR038109,PS51736,cd03768, IPR006118,PF13408,G3DSA:3.40.50.1390,PF07508,Coil
MSVNRNIAKEKPKKAALYVRVSTSYQADKDSLPMQRQELVAYAKLMFDIEDYVIFEDAGYSGKNTDRPEFQNMMRRVRAGEFTHLLCWKIDRVSRNLLDFASMYQELKDLGVTFVSKNEQFDTSTAIGEAMLKIILVFAELERNMTSERVTATMLSRAQNGFWNGGRIHYGYDYDKDSKQHSINEQEALVVHKMADLYEEYKSLLVVSRMLNEEGYRTRAGNEWSPVTICTILSNPFYTGRYRYNHYKTPGVRIEKDPSEWIVIQDHHPRILSDEQFDKISCILRANSRSKRKPGQQHTSQNTHIFGGLLYCGTCGCQYISTPSRMQASGYKPSKYACPNLRKKKSCNTKSVSDPVIGEFIINYVLNMMHARRDFSKIHNPSDLQDALLKGGTFENVDRIGKDGLDSCFNMFTTTPLEGKRFRKPKTVNTIDPELKRLRAEKRKTERALDRLMNMYLYDDNPIGEKDFIIRKQALDDYLKEINESLGMIDRGHGIETISDENFIKRASYFIMGKELADKDYIYFKKLAMDIDSEILRDFFHEIIDSIIMEGSNVREIVFKNGLSHIFFYKDKKEPGA

SEQ ID NO: 928 - protein, 577 aa, Unknown
  Description of Unknown: Integrase B929 sequence
  PTHR30461:SF3,IPR036162,PS51737,IPR011109,PTHR30461, PS00397,PF00239,G3DSA:1.10.10.2600,IPR006119,SSF53041, SM00857,IPR025827,IPR038109,PS51736,cd03768, IPR006118,PF13408,G3DSA:3.40.50.1390,PF07508,Coil
MISNSAATHAKVAIYIRVSTLHQIDRDSLPMQRQDLIAYAKLILNTDDVTVFEDAGYSGKNTIRPEFQKMMSQLRTGTYTHLLVWKIDRISRNLLDFAEMYQELKNLGVTFVSKNEQFDTSTAMGEAMLKIILVFAELERNMTSERVTATMISRASNGQWNGGRIPYGYDYDPEEQEFSFNSDEYNIAHLIHDKYEELRSLVYLARYLNEHGYRTRAGNDWSPVSLDIILRSVFYCGDYQYNRLKEGDRQRPKDKSEWITVKDHHPAIVSREQKERILALLESNRRLKSFRKSGKSKYTHIFSGLLICGNCGQPMTSSISTVKKTTGRRYSLYFCPTHRKSKLWCTGKSTSDPIVGEFVFNYILNMLNAQKAFSPETSIQELEQQLLSGDTFSPVAAIAPDGLQDLFHTLRTGTVKGEVFGKDVKIKTDSEPPLQLSKLKKEKIRLERAIDRLNKLFLYSEKAMSESEYLTQKIQLSDSLEEVEDKLAFLASEDSLQQSITDDEFIAKASNFILSQKLTDRNYVSFQSLSATVSLEVLDSFLSSIIDNIVFKDGAVHSITFRNGLSHTFIYKEKPEV

SEQ ID NO: 929 - protein, 577 aa, Unknown
  Description of Unknown: Integrase B930 sequence
  PTHR30461:SF3,SM00857,G3DSA:1.10.10.2600,IPR036162,PF13408, IPR025827,G3DSA:3.40.50.1390,PS51737,IPR006119,IPR038109, PF07508,IPR011109,SSF53041,PTHR30461,mobidb-lite, cd00338,PF00239
MPTSKNTARKYAAGGGSDNSCGVEPLRAVIYARYSSSGQREESIEGQLRDCYEFAKKHGIIVIGEYIDKAMTGRVDRRPDFQRMMKDSEKGRFNCVLLWKMDRFARNRYDSAMYKYKLKKNGIRIFYAKETIPDGPEGIILESVMEGYAEYYSENLAQNVKRGNYDSALELKTLGKTCLGLKTGPDGRYMIDQAEAAIVRRIFEEYAEGERAKDIYERQNSGGYRTGRGGKFNKNSLRRILSNKKYIGVYEYEDIYVENGIPAIITDRDLFERVQKMLKINHDAPARGKAQNFLLTTKLFCGLCGSPMIGDGGTSHTGKAYAYYSCTKRKRGRSCKKESVPKDWIEDLVVGELVKIVHNDELIEQIADRVMEYQKREKDQSGLHALEIRQKENEKAISNMLAAIEAGIITPSTKTRLMELEADRADIEKGIAHELLAEPEFERDQIIYFLERFRSGDINDEAYRIMLVDTFLNSVYLYDDDHLVLVMNYSGENCKVDLKLVEGAVSGDGCKGSAFAPSSALETRKASQMGCFFVSKRLRLLNPWVQGLLAINGSSVGSVGKRSTGPFSDSTSPHLPR

SEQ ID NO: 930 - protein, 577 aa, Unknown
  Description of Unknown: Integrase B931 sequence
  SM00857,G3DSA:1.10.10.2600,IPR036162,PF13408,IPR025827, G3DSA:3.40.50.1390,PS51737,IPR006119,IPR038109,PF07508, IPR011109,SSF53041,PTHR30461,Coil,PS51736, cd00338,PF00239
MNIYHTRERLRTRSIYDLNLRVAFYARVSTDSEDQQVSIEHQTQYYKEFIKSNRNWKFAKGYIDNGISGIQTKHREQFKEMLEDAKNGKFDMLITKEITRFARNTLDSIQYTRQMLSWGVCVWFQNDNINTIDEDSELRLTIMAGVAQDEVRKLSNRVKFGHKQSIKNGVVLGNSRIYGYDKKDGKLTINESEAQMVRMIFEDYASGEWTTPQLEKKLYNMGYRNYKGGKIDRNVIRHIIRNPKYKGYYAGGKVKIVDMFTKKQEFLPESEWVMFKDDGSHVPQIVDEEVWKKANEYIDARGEIVKTRRTSIKKSENVFTGMLICGNDGASYWLKQRTLRGKEDVKWVCSKKIKEGAASCDSFYIDDRELREVIAKLIRESSGDIEQIAEKFIKIYHSSMNQADASTEIKRLEKQINVAERKSDKLLEYNLDGAISDAVFIEKSQKLEAQIEEYKKQIEKLSTIQDDIVPIENQIRAIAHSVKQLDGIGPDDITKTVVDSFLKKIVVNPIGEKEAKLVFYLKDGITTEMSFVSGKSMRCSVNLFNPIFTERNTTFYRALRSFPGHKEPVKYTYFFAF

SEQ ID NO: 931 - protein, 577 aa, Unknown
  Description of Unknown: Integrase B932 sequence
  PTHR30461:SF3,SM00857,G3DSA:1.10.10.2600,IPR036162,PF13408, IPR025827,PS51737,G3DSA:3.40.50.1390,IPR006119,IPR038109, PF07508,SSF53041,IPR011109,PTHR30461,Coil, cd00338,PF00239
MDIYNVANQMKLERKTIFDLNIRVTFYARVSTTRDEQENSIENQIAYFTEMIKGNKNWEYVEGYVDRIRGESAENRTEFMQMINDGKGGKFDLIITKEVSRFARDTVDSLNYTRDLLRCGVGVFFQNDNICTVDTDSELRLTIMASIAADEVRKLSERIRWGHRRSIESGNVLGNNRIFGYDLYDKKLHINEREAEMVKLIFELYSSGHYSVRKIEQKLYDEGFRGRNGNRIHHNTISGIIQNPKYKGYFCGGKVKITDFRTRQQRFLPEEEWIMHKDLTGETVPAIVSEDLWDRCNQIFKERSEIVKSKERSIKDRSVFTGKIWCAVDGKAYWRTSYSNSKQKGKSIYQWICSEKKRINAKACPSFSILESELYQMVGEFFQSVVPSIESYVDNFISIYQKNDSAAVIRKQLREIEDKIGREKSKKDKLFELYLDEIITKNEFKKRNDDSDSLIASLENNARELKRESSSDKTIETIKEITAYIKDVYNPGEPMPKELVDDLVETIIDRIDVEPVNDNSMRVSIKLRTGEKQDYKYSNSGRRLRNNEIGNRCSSGIMSFTIWPPIEPACFAVSSPL

SEQ ID NO: 932 - protein, 577 aa, Unknown
  Description of Unknown: Integrase B933 sequence
  PTHR30461:SF3,IPR036162,PS51737,IPR011109,PTHR30461, PS00397,PF00239,G3DSA:1.10.10.2600,IPR006119,SSF53041, SM00857,IPR025827,IPR038109,PS51736,cd03768, IPR006118,PF13408,G3DSA:3.40.50.1390,PF07508,Coil
MISNSAATHAKVAIYIRVSTLHQIDRDSLPMQRQDLIAYAKLILNTDDVTVFEDAGYSGKNTIRPEFQKMMSQLRTGTYTHLLVWKIDRISRNLLDFAEMYQELKDLGVTFISKNEQFDTSTAMGEAMLKIILVFAELERNMTSERVAATMISRASNGQWNGGRIPYGYDYDPEEQTFSFNSDEYNIAHLIHDKYEELRSLVYLARYLNEHGYRTRAGNDWSPVSLDIILRSVFYCGDYQYNRLKEGDRQRPKDKSEWITVKDHHPAIVSREQKERILALLESNRRLKSFRKSGKSKYAHIFSGLLICGNCGQPMTSSISTIKKTTGRRYSLYFCPTHRKSKLWCTGKSTSDPIIGEFVFNYILNMLNAQKAFSSETSIQELEQQLLSGDTFSPVAAIAPDGLQDLFHTLRTGTIEGEVFGKDVKIKTGSEPPLQLSKLKKEKVRLERAIDRLNKLFLYSEKAMSESEYLTQKIQLSDALEEVEDKLTFLASEDSLQQSITDDEFIAKASNFILSQKLTDRNYVSFQSLSATVSPEVLDSFLSSIIDNIVFKDGAIHSITFRNGLSHTFIYKEKPEV

SEQ ID NO: 933 - protein, 577 aa, Unknown
  Description of Unknown: Integrase B934 sequence
  PTHR30461:SF3,IPR036162,PS51737,IPR011109,PTHR30461, PS00397,PF00239,G3DSA:1.10.10.2600,IPR006119,SSF53041, cd00338,SM00857,IPR025827,IPR038109,PS51736, IPR006118,PF13408,G3DSA:3.40.50.1390,PF07508,Coil
MALPKKTIPQIEQKRAAIYVRVSTQYQVDRASLPVQRSELVNYAKYALDIPDFVIFEDAGYSAKNTDRPDYQQMMARIRTGEFSHLLVWKIDRISRNLLDFAAMYSELKQLGVVFVSKNEQFDTSSAMGEAMLKIILVFAELERNMTAERVSAVFLSRANDGIWNGGKVPFGYAYDKQAKTFSILEDEAKTVRLIYALYESSKSLVTVSKALNERGIKTRNGSEWSPTTVHTMLSNPFYSGTYRYNYRNESDPHHHVPKKKEDWILVKNHHPAIVSPEHQAAVELILASKSYGKNQTYQRKNIHAFAGLLTCGYCGSTMAATIDRARADGWRPSVYICSRRRMSNDCQNKYVSDVTLGPFVLNFFANLIKASNSFGKSTSIETLEKKLLRGDALSIVDHIERPGLEELYNHLRSGFDEKPFDSLAVNAAEASSDVQERDLLLADKRRLERALKRLNAIYLYGDEEIPGKDFILDRKSITDSLQQIDDRLKELDAAAVFDVSLSDDEFMEKASQFILTQQLLDKRSVNYEKFIRKIDPRIVKDFLNETVSNFCIKDGLTTSVLFKNGIELRFCYKAQQ

SEQ ID NO: 934 - protein, 577 aa, Unknown
  Description of Unknown: Integrase B935 sequence
  PTHR30461:SF3,SM00857,G3DSA:1.10.10.2600,IPR036162,PF13408, IPR025827,PS51737,G3DSA:3.40.50.1390,IPR006119,IPR038109, PF07508,IPR011109,SSF53041,PTHR30461,Coil, PS51736,cd00338,PF00239
MDIYKVRQLLKGQSIFDIPLRVVYYVRVSTDKEEQKNSTVNQDAFFEELIASHPVWTFVGKYIDDGASGIMADKREDFQRMISDGQNQMYDLILTKEISRFARNTLDSIRYTRLLLNCGVGVWFYTDNVNTINEDAELHLAILSSIAQNESLKTSTRVRMGHAQSIKRGVVMGNSMLYGYNKDHGKLVIDPYEAEMVRSIYEKYATGVYTTPMLEREIYASGYRNHYGEKISRTVIGHIITNPKYKGYYVGGKVKIIDMFTKKRKFIPKDEWIMYKDETGERVPAIIDEETWELANKYFVERGDAIKARRKVCTTPNTFTGKIYCGTDGAPYWLKHRVLRGKDDSTWYCSDKLKNGTDSCKSFPIKEDEIRSMVVDLITLSPSDIQKYCEMYLEMLRKSIDSSVDKSAKIAELNKEIENNMAKKQKLLDYNLQGILSDDEFISNTKLLNRKIERAQSLIDSFTSKSPVELKSNSVLDKAAKLLNDFSGVKSEDLDNKIVDELIDKIVITPQDTDYASVEFYLKTSEKVHKTYDRKAVLRNDNLLNIMLPVRSAVFYRHPRHLYGHETEIRYDYRLVI

SEQ ID NO: 935 - protein, 577 aa, Unknown
  Description of Unknown: Integrase B936 sequence
  PTHR30461:SF3,cd00338,SM00857,G3DSA:1.10.10.2600,IPR036162, PS51737,G3DSA:3.40.50.1390,IPR006119,IPR038109,PF07508, IPR011109,SSF53041,PTHR30461,PS51736,Coil, PF00239
MRVAVYARVSTEHEAQINALENQLEWYKIECSRHSDWEIVEVYVDQGITGTQAQKRPEFLRMMEDAQKGKFDLIITREVSRFARNTVDTLSYTRELKARGVDVFFINDGINTATNDGELRLTIMSSMAQDESRKISERVKAGQKISREKHVLYGSGNILGYRRENGTYVPDPDQAETVRLIFQMYSTGENGLVKIVNELYRLGRLDAGGHVSWDASKVSRVLHNATYKGCICYNKSHSDGYLTQKRVKNLDESSYIYVKGDFEPLVSEEMWDRCQQILASKSARVIDENGKKHKYMRNTPKSVWTAKLRCSCGAGFIQFKWRVNRDGAVVHGFQCYRRTRRPSISYLQEHGLDLGISCQIRAICEWKLDLMAAKVFEHLTFDKGKTVKEVYKILNRCMAEEKTVRISRKAMLENSIARQRERLDKYIDLCADGIITKQELAERRKGLDAQIAELQSQYENVEQEDERSGTLDMNLIAQKLDEWQKASRNDVDRELINSCVAQITPLTNEEYRWVLDFQLTEVQSRNSATCTLDGFMEMARFRISFEEAKAFKASRNQGIRKNEWHDLTVAVGIRTKA

SEQ ID NO: 936 - protein, 577 aa, Unknown
  Description of Unknown: Integrase B937 sequence
  SM00857,G3DSA:1.10.10.2600,IPR036162,PF13408,IPR025827, G3DSA:3.40.50.1390,PS51737,IPR006119,IPR038109,PF07508, IPR011109,SSF53041,PTHR30461,Coil,PS51736, cd00338,PF00239
MNIYHTRERLRTRSIYDLNLRVAFYARVSTDSEDQQVSIEHQTQYYKEFIKSNRNWKFAKGYIDNGISGIQTKHREQFKEMLEDAKNGKFDMLITKEITRFARNTLDSIQYTRQMLSWGVCVWFQNDNINTIDEDSELRLTIMAGVAQDEVRKLSNRVKFGHKQSIKNGVVLGNSRIYGYDKKDGKLTINESEAQMVRMIFEDYASGEWTTPQLEKKLYNMGYRNYKGGKIDRNVIRHIIRNPKYKGYYAGGKVKIVDMFTKKQEFLPESEWVMFKDDGSHVPQIVDEEVWKKANEYIDARGEIVKTRRTSIKKSENVFTGMLICGNDGASYWLKQRTLRGKEDVKWVCSKKIKEGAASCDSFYIDDRELREVIAKLIRESSGDIEQIAEKFIKIYHSSMNQADASTEIKRLEKQINVAERKSDKLLEYNLDGAISDAVFIEKSQKLEAQIEEYKKQIEKLSTIQDDIVPIENQIRAIAHSIKQLDGISPDDITKTVVDSFLKKIVVNPIGEKEAKLVFYLKDGITTEMSFVSGKSMRCSVNLFNPIFTERSTTFYRALRSFPGHKEPVKYTYFFAF

SEQ ID NO: 937 - protein, 577 aa, Unknown
  Description of Unknown: Integrase B938 sequence
  PTHR30461:SF3,IPR036162,PS51737,IPR011109,PTHR30461, PS00397,PF00239,G3DSA:1.10.10.2600,IPR006119,SSF53041, SM00857,IPR025827,IPR038109,PS51736,cd03768, IPR006118,PF13408,G3DSA:3.40.50.1390,PF07508,Coil
MISNSAATHAKVAIYIRVSTLHQIDRDSLPMQRQDLIAYAKLILNTDDVTIFEDAGYSGKNTIRPEFQKMMSQLRTGTYTHLLVWKIDRISRNLLDFAEMYQELKDLGVTFVSKNEQFDTSTAMGEAMLKIILVFAELERNMTSERVTATMISRASNGQWNGGRIPYGYDYDPEEQDFSFNSDEYNIAHLIHDKYEELRSLVYLARYLNEHGYRTRAGNDWSPVSLDIILRSVFYCGDYQYNRLKEGDRQRPKDKSEWITVKDHHPAIVSREQKERILALLESNRRLKSFRKSGKSKYTHIFSGLLICGNCGQPMTSSISTIKKTTGRRYSLYFCPTHRKSKLWCTGKSTSDPIIGEFVFNYILNMLNAQKAFSPETSMQELEQQLLSGDTFSPVAAIAPDGLQDLFHTLRTGTIKGEVFGKDVKIKTGSEPPLQLSKLKKEKVRLERAIDRLNKLFLYSEKAMSESEYLTQKIQLSDALEEVEDKLTFLASEDSLQQSITDNEFIAKASNFILSQKLTDRNYVSFQSLSATVSPEVLDSFLSSIIDNIVFKDGAIHSITFRNGLSHTFIYKEKPEV

SEQ ID NO: 938 - protein, 577 aa, Unknown
  Description of Unknown: Integrase B939 sequence
  PTHR30461:SF3,IPR036162,PS51737,IPR011109,PTHR30461, PS00397,PF00239,G3DSA:1.10.10.2600,IPR006119,SSF53041, SM00857,IPR025827,IPR038109,PS51736,cd03768, IPR006118,PF13408,G3DSA:3.40.50.1390,PF07508,Coil
MISNSAATHAKVAIYIRVSTLHQIDRDSLPMQRQDLIAYAKLILNTDDVTVFEDAGYSGKNTIRPEFQKMMSQLRTGTYTHLLVWKIDRISRNLLDFAEMYQELKDLGVTFVSKNEQFDTSTAMGEAMLKIILVFAELERNMTSERVAATMISRASNGQWNGGRIPYGYDYDPEEQTFSFNSGEYNIAHLIHDKYEELRSLVYLARYLNEHGYRTRAGNDWSPVSLDIILRSVFYCGDYQYNRLKEGDRQRPKDKSEWITVKDHHPAIVSREQKERILALLESNRRLKSFRKSGKSKYTHIFSGLLICGNCGQPMTSSISTIKKTTGRRYSLYFCPTHRKSKLWCTGKSTSDPIVGEFVFNYILNMLNAQKAFSSETSIQELEQQLLSGDTFSPVAAIAPDGLQDLFHTLRTGTIKGEVFGKDVKIKTGSEPPLQLSKLKKEKVRLERAIDRLNKLFLYSEKAMSESEYLTQKIQLSDALEEVEDKLTFLASEDSLQQSITDDEFIAKASNFILSQKLTDRNYVSFQSLSATVSPEVLDSFLSSIIDNIVFKDGAIHSITFRNGLSHTFIYKEKPEV

SEQ ID NO: 939 - protein, 577 aa, Unknown
  Description of Unknown: Integrase B940 sequence
  PTHR30461:SF3,IPR036162,PS51737,IPR011109,PTHR30461, PS00397,PF00239,G3DSA:1.10.10.2600,IPR006119,SSF53041, SM00857,IPR025827,IPR038109,PS51736,cd03768, IPR006118,PF13408,G3DSA:3.40.50.1390,PF07508,Coil
MISNSSATHAKVAIYIRVSTLHQIDRDSLPMQRHDLIAYAKLILNTDDVTIFEDAGYSGKNTIRPEFQKMMSQLRTGTYTHLLVWKIDRISRNLLDFAEMYQELKDLGVTFVSKNEQFDTSTAMGEAMLKIILVFAELERNMTSERVTATMISRASNGQWNGGRIPYGYDYDPEEQGFSFNSDEYNIAHLIHDKYEELRSLVYLARYLNEHGYRTRAGNDWSPVSLDIILRSVFYCGDYQYNRLKEGDRQRPKDKSEWITVKDHHPAIVSREQKERILALLESNRRLKSFRKSGKSKYTHIFSGLLICGNCGQPMTSSISTIKKTTGRRYSLYFCPTHRKSKLWCTGKSTSDPIVGEFVFNYILNMLNAQKAFSPETSIQELEQQLLSGDTFSPVAAIAPDGLHDLFHTLRTGTIKGEVFGKDVKIKTGSEPPLQLSKLKKEKVRLERAIDRLNKLFLYSEKAMSESEYLTQKIQLSDSLEEVEDKLAFLASEGSLQQSITDDEFIAKASNFILSQKLTDRNYISFQSLSATVSPEVLDSFLSSIIDNIVFKDGAVHSITFRNGLSHTFIYKEKPEV

SEQ ID NO: 940 - protein, 577 aa, Unknown
  Description of Unknown: Integrase B941 sequence
  PTHR30461:SF3,IPR036162,PS51737,IPR011109,PTHR30461, PS00397,PF00239,G3DSA:1.10.10.2600,IPR006119,SSF53041, cd00338,SM00857,IPR025827,IPR038109,PS51736, IPR006118,PF13408,G3DSA:3.40.50.1390,PF07508,Coil
MALPKKTIPQIKQKRAAIYVRVSTQYQVDRASLPVQRSELVNYAKYALDIPDFVIFEDAGYSAKNTDRPDYQQMMARIRTGEFSHLLVWKIDRISRNLLDFAAMYSELKQLGVVFVSKNEQFDTSSAMGEAMLKIILVFAELERNMTAERVSAVFLSRANDGIWNGGKVPFGYAYDKQTKTFSILEDEAKTVRLIYALYESSKSLVTVSKALNERGIKTRSGSEWSPTTVHTMLSNPFYSGTYRYNYRNESDPHHHVPKKKEDWILVKNHHPAIVSPEHQASVELILASKSYGKNQTYQRKNIHAFAGLLTCGYCGSTMAATIDRARADGWRPSVYICSRRRMSNDCQNKYVSDVTLGPFVLNFFANLIKASNSFGKSTSIETLEKKLLRGDALSIVDHIERPGLEELYNHLRSGFDEKPFDSLAVNAAEASSDVQERDLLLAEKRRLERALKRLNAIYLYGDEEIPGKDFILDRKSITDSLQQIDDRLKELDAAAVFDVSLSDDEFMEKASQFILTQQLLDKRSVNYEKFIRKIDPRIVKDFLNETVSNFCIKDGLTTSVLLKNGIELRFCYKAQQ

SEQ ID NO: 941 - protein, 577 aa, Unknown
  Description of Unknown: Integrase B942 sequence
  PTHR30461:SF3,IPR036162,PS51737,IPR011109,PTHR30461, PS00397,PF00239,G3DSA:1.10.10.2600,IPR006119,SSF53041, SM00857,IPR025827,IPR038109,PS51736,cd03768, IPR006118,PF13408,G3DSA:3.40.50.1390,PF07508,Coil
MSINRNNTSETPKKAALYVRVSTNYQIDRDSLPMQRQELITYAQLMFGINDYVIFEDAGYSGKNTDRPEFQNMMRRIRAGEFTHLLCWKIDRISRNLLDFASMYQELKDLGVTFVSKNEQFDTSTAIGEAMLKIILVFAELERNMTSERVTATMLSRAQNGLWNGGRVPYGYDYDKDSKTFSINQEEAFLVRKMYDLYSEHRSLVMVSRTLNEDGYASRAGNDWSPVSIFIILTNPFYTGIYRYNHYKIPGLKIEKDPSEWIEVPDHHPRIISDEQFDNVNRILQSNSRSKRLPGQQHTSKGTHIFGGLLYCGTCGSQYVSTPSRLLASGYRPSKYACPNLRKKKTCNTKSISDPVIGEFVLNYVLNMMHARAAFSSIHDTSELQDALLNGGTFQNVDHIGKDGLDSCFHMFSSTPLDGKRFRKPKKAITIDPELKRLRAEKRKTERALDRLMNLYLYADNPISEKDFVIRKQALDDYLKEINENLGMIDRGRGIETISDENFIKRASYFIMSKELAGKDYIYFKKLAMDMDAEILRDFFQEIIDSIVMEGSNVKEIVFRNGLAHTFFYKGTEKPEA

SEQ ID NO: 942 - protein, 577 aa, Unknown
  Description of Unknown: Integrase B943 sequence
  SM00857,G3DSA:1.10.10.2600,IPR036162,PF13408,IPR025827, G3DSA:3.40.50.1390,PS51737,IPR006119,IPR038109,PF07508, IPR011109,SSF53041,PTHR30461,Coil,PS51736, cd00338,PF00239
MNIYHTRERLRTRSIYDLNLRVAFYARVSTDSEDQQVSIEHQTQYYKEFIKSNRNWKFAKGYIDNGISGIQTKHREQFKEMLEDAKNGKFDMLITKEITRFARNTLDSIQYTRQMLSWGVCVWFQNDNINTIDEDSELRLTIMAGVAQDEVRKLSNRVKFGHKQSIKNGVVLGNSRIYGYDKKDGKLTINESEAQMVRMIFEDYASGEWTTPQLEKKLYNMGYRNYKGGKIDRNVIRHIIRNPKYKGYYAGGKVKIVDMFTKKQEFLPESEWVMFKDDGSHVPQIVDEEVWKKANEYIDARGEIVKTRRTSIKKSENVFTGMLICGNDGASYWLKQRTLRGKEDVKWVCSKKIKEGAASCDSFYIDDRELREVIAKLIRESSGDIEQIAEKFIKIYHSSMNQADASTEIKRLEKQINVAERKSDKLLEYNLDGAISDAVFIEKSQKLEAQIEEYKKQIEKLSTIQDDIVPVENQIRAIAHSVKQLDGISPDDITKTVVDSFLKKIVVNPIGEKEAKLVFYLKDGITTEMSFVSGKSMRCSVNLFNPIFTERSTTFYRALRSFPGHKEPVKYTYFFAF

SEQ ID NO: 943 - protein, 577 aa, Unknown
  Description of Unknown: Integrase B944 sequence
  IPR036162,PS51737,IPR011109,PTHR30461,PS00397, PF00239,G3DSA:1.10.10.2600,IPR006119,SSF53041,cd00338, SM00857,IPR025827,IPR038109,PS51736,IPR006118, PF13408,G3DSA:3.40.50.1390,PF07508,Coil
MAYRFSQQTAAPDTRTVALYVRVSTGYQVDKDSLPFQKQELRNYCRHVLHIEENRLEVFEDAGKSGKNTKRPAFERMMTKVKAGLVSHVIVYKIDRISRNLVDFSLMYDDFKYNRVTFISLNEQFDTSSAIGEAVLKIILIFAELERKLTSERVTDIMINRALSGQWNGARMPFGWDWNEEKKMPVHSDKEAPTVRLMYDMYEETRSSCRVRDYFNSHDIATKRGGEWTTKTIADLIRNPMNKGDYRYNYRESAKGRRKPDEEVVYVKNVFPPLVPPDQWDRCNQIMDRNAKLRCSSGFSHKSTHVHIFAGLLKCGKCGSYFQVEKMDRVRRNGFAPSLYRCGRRYRKQSCISKSCSEVVIGPFVLNYISAMIRASDMRSQIRSPEELEKILLSDTVFQNVAGIVSDGLNATYAMLSGTDSSAPYRPLPLTSHNVQTDDNIQKWEQGIVRIDRAIERLKKVYLFDDAAMSEKEYLETKSELERERIELDNKIKEQESTAFPVQTEDLAFIKSASSFLLAHRLKAGDHIQYNTFAPLVDDEVLKDFVNLVIKEIVVVDARITEIIFQNGLTHKFLYRE

SEQ ID NO: 944 - protein, 577 aa, Unknown
  Description of Unknown: Integrase B945 sequence
  PTHR30461:SF3,IPR036162,PS51737,IPR011109,PTHR30461, PS00397,PF00239,G3DSA:1.10.10.2600,IPR006119,SSF53041, SM00857,IPR025827,IPR038109,PS51736,cd03768, IPR006118,PF13408,G3DSA:3.40.50.1390,PF07508,Coil
MISNSSATHSKVAIYIRVSTLHQIDRDSLPMQRHDLIAYAKLILNTDDVTIFEDAGYSGKNTIRPEFQKMMSQLRTGTYTHLLVWKIDRISRNLLDFAEMYQELKDLGVTFVSKNEQFDTSTAMGEAMLKIILVFAELERNMTSERVTATMISRASNGQWNGGRIPYGYDYDPEEQGFSFNSDEYNIAHLIHDKYEELRSLVYLARYLNEHGYRTRAGNDWSPVSLDIILRSVFYCGDYQYNRLKEGDRQRPKDKSEWITVKDHHPAIVSREQKERILALLESNRRLKSFRKSGKSKYTHIFSGLLICGNCGQPMTSSISTIKKTTGRRYSLYFCPTHRKSKLWCTGKSTSDPIVGEFVFNYILNMLNAQKAFSPETSIQELEQQLLSGDTFSPVAAIAPDGLHDLFHTLRTGTIKGEVFGKDVKIKTGSEPPLQLSKLKKEKVRLERAIDRLNKLFLYSEKAMSESEYLTQKIQLSDSLEEVEDKLAFLASEGSLQQSITDDEFIAKASNFILSQKLTDRNYISFQSLSATVSPEVLDSFLSSIIDNIVFKDGAVNSITFRNGLSHTFIYREKPEV

SEQ ID NO: 945 - protein, 577 aa, Unknown
  Description of Unknown: Integrase B946 sequence
  SM00857,G3DSA:1.10.10.2600,IPR036162,PF13408,IPR025827, G3DSA:3.40.50.1390,PS51737,IPR006119,IPR038109,PF07508, IPR011109,SSF53041,PTHR30461,Coil,PS51736, cd00338,PF00239
MNIYHTRERLRTRSIYDLNLRVAFYARVSTDSEDQQVSIEHQTQYYKEFIKSNRNWKFAKGYIDNGISGIQTKHREQFKEMLEDAKNGKFDMLITKEITRFARNTLDSIQYTRQMLSWGVCVWFQNDNINTIDEDSELRLTIMAGVAQDEVRKLSNRVKFGHKQSIKNGVVLGNSRIYGYDKKDGKLTINESEAQMVRMIFEDYASGEWTTPQLEKKLYNMGYRNYKGGKIDRNVIRHIIRNPKYKGYYAGGKVKIVDMFTKKQEFLPESEWVMFKDDGSHVPQIVDEEVWKKANEYIDARGEIVKTRRTSIKKSENVFTGMLICGNDGASYWLKQRTLRGKEDVKWVCSKKIKEGAASCDSFYIDDRELREVIAKLIRESSGDIEQIAEKFIKIYHSSMNQADASTEIKRLEKQINVAERKSDKLLEYNLDGAISDAVFIEKSQKLEAQIEEYKKQIEKLSTIQDDIVPIENRIRAIAHSVKQLDGISPDDITKTVVDSFLKKIVVNPIGEKEAKLVFYLKDGITTEMSFVSGKSMRCSVNLFNPIFTERSTTFYRALRSFPGHKEPVKYTYFFAF

SEQ ID NO: 946 - protein, 577 aa, Unknown
  Description of Unknown: Integrase B947 sequence
  PTHR30461:SF3,SM00857,G3DSA:1.10.10.2600,IPR036162,PF13408, IPR025827,G3DSA:3.40.50.1390,PS51737,IPR006119,IPR038109, PF07508,SSF53041,IPR011109,PTHR30461,cd00338, PF00239
MDIYNVANQMKLERKTIFDLNIRVTFYARVSTTRDEQENSIENQIAYFTEMIKGNKNWEYVEGYVDRIRGESAENRTEFMQMINDGKGGKFDLIITKEVSRFARDTVDSLNYTRDLLRCGVGVFFQNDNICTVDTDSELRLTIMASIAADEVRKLSERIRWGHRRSIESGNVLGNNRIFGYDLYDKKLHINEREAEMVKLIFELYSSGHYSVRKIEQKLYDEGFRGRNGNRIHHNTISGIIQNPKYKGYFCGGKVKITDFRTRQQRFLPEEEWIMHKDLTGETVPAIVSEDLWDRCNQIFKERSEIVKSKERSIKDRSVFTGKIWCAVDGKAYWRTSYSNSKQKGKSIYQWICSEKKRINAKACPSFSILESELYQMVGEFFQSVVPSIESYVDNFISIYQKNDSAAVIRKQLREIEDKIGREKSKKDKLFELYLDEIITKNEFKKRNDDSDSLIASLGNNARELKRESSSDKTIETIKEITAYIKDVYNPGEPMPKELVDDLVETIIDRIDVEPVNDNSMRVSIKLRTGEKQDYKYSNSGRRLRNNEIGNRCSSGIMSFTIWPPIEPACFAVSSPL

SEQ ID NO: 947 - protein, 577 aa, Unknown
  Description of Unknown: Integrase B948 sequence
  PTHR30461:SF3,IPR036162,PS51737,IPR011109,PTHR30461, PS00397,PF00239,G3DSA:1.10.10.2600,IPR006119,SSF53041, SM00857,IPR025827,IPR038109,PS51736,cd03768, IPR006118,PF13408,G3DSA:3.40.50.1390,PF07508,Coil
MISNSSATHAKVAIYIRVSTLHQIDRDSLPMQRHDLIAYAKLILNTDDVTIFEDAGYSGKNTIRPEFQKMMSQLRTGTYTHLLVWKIDRISRNLLDFAEMYQELKDLGVTFVSKNEQFDTSTAMGEAMLKIILVFAELERNMTSERVTATMISRASNGQWNGGRIPYGYDYDPEEQAFSFNSDEYNIAHLIHDKYEELRSLVYLARYLNEHGYRTRAGNEWSPVSLDIILRSVFYCGDYQYNRLKEGDRQRPKDKSEWITVKDHHLAIVSREQKERILALLESNRRLKSFRKSGKSKYTHIFSGLLICGNCGQPMTSSISTVKKTTGRRYSLYFCPTHRKSKLWCTGKSTSDPIVGEFVFNYILNMLNAQKAFSPETSIQELEQQLLSGDTFSPVVAIAPDGLQDLFHTLRTGTVKGEVFGKDVKIKTDSEPPLQLSKLKKEKVRLERAIDRLNKLFLYSEKAMSESEYLTQKIQLSDALEEVEDKLAFLASEDSLQQSITDDEFIAKASNFILSQKLTDRNYVSFQSLSATVSPEVLDSFLSSIIDNIVFKDGAVHSITFRNGLSHTFIYKEKPEV

SEQ ID NO: 948 - protein, 577 aa, Unknown
  Description of Unknown: Integrase B949 sequence
  PTHR30461:SF3,IPR036162,PS51737,IPR011109,PTHR30461, PS00397,PF00239,G3DSA:1.10.10.2600,IPR006119,SSF53041, cd00338,SM00857,IPR025827,IPR038109,PS51736, IPR006118,PF13408,G3DSA:3.40.50.1390,PF07508,Coil
MALPKKTIPQIEQKRAAIYVRVSTQYQVDRASLPVQRSELVNYAKYALDIPDFVIFEDAGYSAKNTDRPDYQQMMARIRTGEFSHLLVWKIDRISRNLLDFAAMYSELKQLGVVFVSKNEQFDTSSAMGEAMLKIILVFAELERNMTAERVSAVFLSRANDGIWNGGKVPFGYAYDKQTKTFSILEDEAKTVRLIYALYESYKSLVTVSKALNERGIKTRNGSEWSPTTVHTMLSNPFYSGTYRYNYRNESDPHHHVPKKKEDWILVKNHHPAIVSPEHQAAVELILASKSYGKNQTYQRKNIHAFAGLLTCGYCGSTMAATIDRARADGWRPSVYICSRRRMSNDCQNKYVSDVTLGPFVLNFFANLIKASNSFGKSTSIETLEKKLLRGDALSIVDHIERPGLEELYNHLRSGFDEKPFDSLAVNAAEASSDVQERDLLLADKRRLERALKRLNAIYLYGDEEIPGKDFILDRKSITDSLQQIDDRLKELDAAAVFDVSLSDDEFMEKASQFILTQQLLDKRSVNYEKFIRKIDPRIVKDFLNETVSNFCIKDGLTTSVLFKNGIELRFCYKAQQ

SEQ ID NO: 949 - protein, 577 aa, Unknown
  Description of Unknown: Integrase B950 sequence
  PTHR30461:SF3,IPR036162,PS51737,IPR011109,PTHR30461, PS00397,PF00239,G3DSA:1.10.10.2600,IPR006119,SSF53041, SM00857,IPR025827,IPR038109,PS51736,cd03768, IPR006118,PF13408,G3DSA:3.40.50.1390,PF07508,Coil
MISNSAATHAKVAIYIRVSTLHQIDRDSLPMQRQDLIAYAKLILNTDDVTVFEDAGYSGKNTIRPEFQKMMSQLRTGTYTHLLVWKIDRISRNLLDFAEMYQELKDLGVTFVSKNEQFDTSTAMGEAMLKIILVFAELERNMTSERVAATMISRASNGQWNGGRIPYGYDYDPEEQTFSFNSDEYNIAHLIHDKYEELRSLVYLARYLNEHGYRTRAGNDWSPVSLDIILRSVFYCGDYQYNRLKEGDRQRPKDKSEWITVKDHHPAIVSREQKERILALLESNRRLKSFRKSGKSKYTHIFSGLLICGNCGQPMTSSISTIKKTTGRRYSLYFCPTHRKSKLWCTGKSTSDPIVGEFVFNYILNMLNAQKAFSSETSIQELEQQLLSGDTFSPVAAIAPDGLQDLFHTLRTGTIKGEVFGKDVKIKTGSEPPLQLSKLKKEKVRLERAIDRLNKLFLYSEKAMSESEYLTQKIQLSDALEEVEDKLTFLASEDSLQQSITDNEFIAKASNFILSQKLTDRNYVSFQSLSATVSPEVLDSFLSSIIDNIVFKDGAIHSITFRNGLSHTFIYKEKPEV

SEQ ID NO: 950 - protein, 577 aa, Unknown
  Description of Unknown: Integrase B951 sequence
  PTHR30461:SF3,IPR036162,PS51737,IPR011109,PTHR30461, PS00397,PF00239,G3DSA:1.10.10.2600,IPR006119,SSF53041, SM00857,IPR025827,IPR038109,PS51736,cd03768, IPR006118,PF13408,G3DSA:3.40.50.1390,PF07508,Coil
MISNSAATHAKVAIYIRVSTLHQIDRDSLPMQRQDLIAYAKLILNTDDVTIFEDAGYSGKNTIRPEFQKMMSQLRTGTYTHLLVWKIDRISRNLLDFAEMYQELKNLGVTFVSKNEQFDTSTAMGEAMLKIILVFAELERNMTSERVTATMISRASNGQWNGGRIPYGYDYDSEEQAFSFNSDEYNIAHLIHDKYEELRSLVYLARYLNEHGYRTRAGNDWSPVSLDIILRSVFYCGDYQYNRLKEGDRQRPKDKSEWITVKDHHPAIVSREQKERILALLESNRRLKSFRKSGKSKYTHIFSGLLICGNCGQPMTSSISTIKKTTGRRYSLYFCPTHRKSKLWCIGKSTSDPIVGEFVFNYILNMLNAQKAFSPETSIQELEQQLLSGDTFSPVAAIAPDGLHDLFHTLRTGTIKGEVFGKDVKIKTGSEPPLQLSKLKKEKVRLERAIDRLNKLFLYSEKAMSESEYLTQKIQLSDSLEEVEDKLAFLASEGSLQQSITDDEFIAKASNFILSQKLTDRNYVSFQSLSATVSPEVLDSFLSSIIDNIVFKDGAIHSITFRNGLSHTFIYKEKPEV

SEQ ID NO: 951 - protein, 577 aa, Unknown
  Description of Unknown: Integrase B952 sequence
  PTHR30461:SF3,IPR036162,PS51737,IPR011109,PTHR30461, PS00397,PF00239,G3DSA:1.10.10.2600,IPR006119,SSF53041, SM00857,IPR025827,IPR038109,PS51736,cd03768, IPR006118,PF13408,G3DSA:3.40.50.1390,PF07508,Coil
MISNSAATHAKVAIYIRVSTLHQIDRDSLPMQRQDLIAYAKLILNTDDVTVFEDAGYSGKNTIRPEFQKMMSQLRTGTYTHLLVWKIDRISRNLLDFAEMYQELKDLGVTFVSKNEQFDTSTAMGEAMLKIILVFAELERNMTSERVAATMISRASNGQWNGGRIPYGYDYDPEEQTFSFNSDEYNIAHLIHDKYEELRSLVYLARYLNEHGYRTRAGNDWSPVSLDIILRSVFYCGDYQYNRLKEGDRQRPKDKSEWITVKDHHPAIVSREQKERILALLESNRRLKSFRKSGKSKYTHIFSGLLICGNCGQPMTSSISTIKKTTGRRYSLYFCPTHRKSKLWCTGKSTSDPIIGEFVFNYILNMLNAQKAFSSETSIQELEQQLLSGDTFSPVAAIAPDGLQDLFHTLRTGTIKGEVFGKDVKIKTGSEPPLQLSKLKKEKVRLERAIDRLNKLFLYSEKAMSESEYLTQKIQLSDALEEVEDKLAFLASEDSLQQSITDDEFIAKASNFILSQKLTDRNYVSFQSLSATVSPEVLDSFLSSIIDNIVFKDGAVHSITFRNGLSHTFIYKEKPEV

SEQ ID NO: 952 - protein, 577 aa, Unknown
  Description of Unknown: Integrase B953 sequence
  SM00857,G3DSA:1.10.10.2600,IPR036162,PF13408,IPR025827, G3DSA:3.40.50.1390,PS51737,IPR006119,IPR038109,PF07508, IPR011109,SSF53041,PTHR30461,Coil,PS51736, cd00338,PF00239
MNIYHTRERLRTRSIYDLNLRVAFYARVSTDSEDQQVSIEHQTQYYKEFIKSNRNWKFAKGYIDNGISGIQTKHREQFKEMLEDAKNGKFDMLITKEITRFARNTLDSIQYTRQMLSWGVCVWFQNDNINTIDEDSELRLTIMAGVAQDEVRKLSNRVKFGHKQSIKNGVVLGNSRIYGYDKKDGKLTINESEAQMVRMIFEDYASGEWTTPQLEKKLYNMGYRNYKGGKIDRNVIRHIIRNPKYKGYYAGGKVKIVDMFTKKQEFLPESEWVMFKDDGSHVPQIVDEEVWKKANEYIDARGEIVKTRRTSIKKSENVFTGMLICGNDGASYWLKQRTLRGKEDVKWVCSRKIKEGAASCDSFYIDDRELREVIAKLIRESSGDIEQIAEKFIKIYHSAMNQADASTEIERLKKQINVAERKSDKLLEYNLDGTISDAVFIEKSQKLEAQIEEYKKQIKKLSTIQDDIVPIENQIRAIAHSVKQLDGISPDDITKTVVDSFLEKIVVNPIGEKEAKLVFYLKDGITTEMPFFSGKNMRCSVNLFNPIFTERSTTFYRALRSFPGHKEPVKYTYFFAF

SEQ ID NO: 953 - protein, 577 aa, Unknown
  Description of Unknown: Integrase B954 sequence
  SM00857,G3DSA:1.10.10.2600,IPR036162,PF13408,IPR025827, G3DSA:3.40.50.1390,PS51737,IPR006119,IPR038109,PF07508, IPR011109,SSF53041,PTHR30461,Coil,PS51736, cd00338,PF00239
MNIYHTRERLRTRSIYDLNLRVAFYARVSTDSEDQQVSIEHQTQYYKEFIKSNRNWKFAKGYIDNGISGIQTKHREQFKEMLEDAKNGKFDMLITKEITRFARNTLDSIQYTRQMLSWGVCVWFQNDNINTIDEDSELRLTIMAGVAQDEVRKLSNRVKFGHKQSIKNGVVLGNSRIYGYDKKDGKLTINESEAQMVRMIFEDYASGEWTTPQLEKKLYNMGYRNYKGGKIDRNVIRHIIRNPKYKGYYAGGKVKIVDMFTKKQEFLPESEWVMFKDDGSHVPQIVDEEVWKKANEYIDARGEIVKTRRTSIKKSENVFTGMLICGNDGASYWLKQRTLRGKEDVKWVCSKKIKEGAASCDSFYIDDRELREVIAKLIRESSGDIEQIAEKFIKIYHSSMNQADASTEIKRLEKQINVAERKSDKLLEYNLDGAISDAVFIEKSQKLEAQIEEYKKQIQKLSTIQDDIVPIENQIRAIAHSVKQLDGISPDDITKTVVDSFLKKIVVNPIGEKEAKLVFYLKDGITTEMSFVSGKSMRCSVNLFNPIFTERSTTFYRALRSFPGHKEPVKYTYFFAF

SEQ ID NO: 954 - protein, 577 aa, Unknown
  Description of Unknown: Integrase B955 sequence
  PTHR30461:SF3,IPR036162,PS51737,IPR011109,PTHR30461, PS00397,PF00239,G3DSA:1.10.10.2600,IPR006119,SSF53041, SM00857,IPR025827,IPR038109,PS51736,cd03768, IPR006118,PF13408,G3DSA:3.40.50.1390,PF07508,Coil
MSKLTDKLNSIRVAIYVRVSTHYQIDKDSLPVQKEELAAYAKYVLNASSYEVFEDAGYSAKNTDRPDYQKMMSRVRSGEFTHILVWKLDRISRNLLDFAAMYDELKKLGVTFVSKNEQFDTSSAMGEAMLKIILVFAELERKMTAERVTAVMVARAGNGQWNGGRVPYGYSWDKDTETFSIAEEEAKVVLRMYDMYEERHSLLYVAKTLNTAGIHPRSGKEWSPTAVSIILKNMFYTGAYRYNYFDMSKRGSRQDIKPESEWVIVEEHHPAIVPKERWRNVVLTLERNRRGWGASGKTYNRKNIHVFAGLLTCGCCGANMSATSNCRELKGGYRPSIYACMSHRKNSGCPNKYITDTTLGPFALNYIANLIKAKESFGKTTSPEALQKKLLRGEMFENVACIKEHGLMELYSLYKSQVSGIKYTPKLSGEEDADNASERDILLSERRRIERALSRLKSLYLYSEEDMAEKDYIIEKKQLDEQLEKVNARLDELSEGLTSQFSISDDELMAKASYFIMSQKLSDKRFVNYRRLLEETDPRILKDFINSVSSNFCIENGKIRSITFKNGIIHEFVYKDD

SEQ ID NO: 955 - protein, 577 aa, Unknown
  Description of Unknown: Integrase B956 sequence
  PTHR30461:SF3,IPR036162,PS51737,IPR011109,PTHR30461, PS00397,PF00239,G3DSA:1.10.10.2600,IPR006119,SSF53041, SM00857,IPR025827,IPR038109,PS51736,cd03768, IPR006118,PF13408,G3DSA:3.40.50.1390,PF07508,Coil
MISNSAATHAKVAIYIRVSTLHQIDRDSLPMQRQDLIAYAKLILNTDDVTIFEDAGYSGKNTIRPEFQKMMSQLRTGTYTHLLVWKIDRISRNLLDFAEMYQELKNLGVTFVSKNEQFDTSTAMGEAMLKIILVFAELERNMTSERVTATMISRASNGQWNGGRIPYGYDYDPEEQAFSFNSDEYNIAHLIHDKYEELRSLVYLARYLNEHGYRTRAGNDWSPVSLDIILRSVFYCGDYQYNRLKEGDRQRPKDKSEWITVKDHHPAIVSREQKERILALLESNRRLKSFRKSGKSKYTHIFSGLLICGNCGQPMTSSISTIKKTTGRRYSLYFCPTHRKSKLWCTGKSTSDPIIGEFVFNYILNMLNAQKAFSPETSIQKLEQQLLSGDTFSPVVAIAPDGLQDLFHTLRTGTVKGEVFGKDVKIKTDSEPPLQLSKLKKEKIRLERAIDRLNKLFLYSEKAMSESEYLTQKIQLSDSLEEVEDKLAFLASEDSLQQSITDDEFIAKASNFILSQKLTDRNYVSFQSLSATVSPEVLDSFLSSIIDNIVFKDGAVHSITFRNGLSHTFIYKEKPEV

SEQ ID NO: 956 - protein, 577 aa, Unknown
  Description of Unknown: Integrase B957 sequence
  PTHR30461:SF3,IPR036162,PS51737,IPR011109,PTHR30461, PS00397,PF00239,G3DSA:1.10.10.2600,IPR006119,SSF53041, SM00857,IPR025827,IPR038109,PS51736,cd03768, IPR006118,PF13408,G3DSA:3.40.50.1390,PF07508,Coil
MISNSAATHAKVAIYIRVSTLHQIDRDSLPMQRQDLIAYAKLILNTDDVTIFEDAGYSGKNTIRPEFQKMMSQLRTGTYTHLLVWKIDRISRNLLDFAEMYQELKDLGVTFVSKNEQFDTSTAMGEAMLKIILVFAELERNMTSERVTATMISRASNGQWNGGRIPYGYDYDPEEQDFSFNSDEYNIAHLIHDKYEELRSLVYLARYLNEHGYRTRAGNDWSPVSLDIILRSVFYCGDYQYNRLKEGDRQRPKDKSEWITVKDHHPAIVSREQKERILALLESNRRLKSFRKSGKSKYTHIFSGLLICGNCGQPMTSSISTIKKTTGRRYSLYFCPTHRKSKLWCTGKSTSDPIVGEFVFNYILNMLNAQEAFSPETSIQELEQQLLSGDTFSPVVAIAPDGLQDLFHTLRTGTVKGEVFGKDVKIKTDSEPPLQLSKLKKEKVRLERAIDRLNKLFLYSEKAMSESEYLTQKIQLSDALEEVEDKLAFLASEDSLQQSITDDEFIAKASNFILSQKLTDRNYVSFQSLSATVSPEVLDSFLSSIIDNIVFKDGAIHSITFRNGLSHTFIYKEKPEV

SEQ ID NO: 957 - protein, 576 aa, Unknown
  Description of Unknown: Integrase B958 sequence
  PTHR30461:SF3,SM00857,G3DSA:1.10.10.2600,IPR036162,PF13408, IPR025827,PS51737,G3DSA:3.40.50.1390,IPR006119,IPR038109, PF07508,IPR011109,SSF53041,PF00239,PTHR30461, PS51736,Coil,cd00338
MKKFPIDLSCLTEEEISQFQEDPYTLYNGDQNVAIYLRYSSTGQSDQSIEGQLRDCRTFCKANHYRIVAIYVDRATTARKDVEKRVHLMEMISDSAKQNWEYVIVWKLDRFARNRNDSAIMKMRLRKNGVKVLSATEHLTDSPESIILESVLEGMAEFFSAELSQKVTRGMRESALKCHSVGGHIPLGYKVENHKLVVDPDTAHIVQEAFSLYANGESVAAICRKFNSAGYKTAKNTEFNRSSFKAMFRNTRYIGTYTYKDIVIENGIPAIIDKELFETVQRRLSKTATAPARGKAKVDYLLSGKLFCGRCGASMNGESGAGRHGKVYHYYSCYTKKRKLGCDKRPLKKDYIEGIVARDALNLLTDQLIDEIADMAIRQSEQDLINDTHIPQLTAQLSEVEKSITNITAAIEKGIASETLMNRLVQLEHEKKTLNKEIKAEEKFVYRIDRDQIVFWLSQFKYGNIEDENFRRRLIDLLVNSVTVWDEPDGYKITTAYNLTSCKTKTFRVEKNPAAEEATGFDFGESECTSSKIPETFWFPGFLFSFCRVGQHVCHFLLATPEVSLSAAAIGPLEGI

SEQ ID NO: 958 - protein, 576 aa, Unknown
  Description of Unknown: Integrase B959 sequence
  PTHR30461:SF3,IPR036162,PS51737,IPR011109,PTHR30461, PS00397,PF00239,G3DSA:1.10.10.2600,IPR006119,SSF53041, SM00857,IPR025827,IPR038109,PS51736,cd03768, IPR006118,PF13408,G3DSA:3.40.50.1390,PF07508,Coil
MKNNFKMPGSGSETHIRVAIYVRVSTVYQIDKDSLPMMKQDLTSYCKYILNTDDFVIFEDAGYSGKNTDRPAYQKMMSQIRQGLFTHLLVWKIDRISRNLLDFANMYAELKDLGVTFVSKNEQFDTSTAIGEAMLKIILVFAELERNMTSERVTATMINRASNGVWNGGRIPFGYSYDKPTQVFSIDPEENKIYNFMVETYEDTQSIVHTSRRLNEAGYRSRNGNMWSPVAVWTILRNPWYKGVYRYNYYKIPGRKAIKDESEWVIVENHHPASIDPDRFDRIQATLDKNARYRNTPGRKTAQKNVHVFSGLVWCAECGSAFTASPGKLHVSGYRPSKYGCPNVRKTKTCHAKYTSDVVLGEFLLNYILNILNAQKQFAYIHSTDDLQKRLLHGSTFSNVDHVDPDGLASLLNMLEKCSGSDPVLLKRPRSKPKMDPELKRMMADQKKQQRALDRLNDLYLYSDDSISEREYLVRKQQITDRLQEINEAIGMMSQEPWMRTMNDEEFIRQASSFILTQKLADKQYIYYESLAESLDPEILKNFFVSILDSIILRDGRPETVVFRNGLSHTFTYKDS

SEQ ID NO: 959 - protein, 576 aa, Unknown
  Description of Unknown: Integrase B960 sequence
  PTHR30461:SF3,IPR036162,PS51737,IPR011109,PTHR30461, PS00397,PF00239,G3DSA:1.10.10.2600,IPR006119,SSF53041, SM00857,IPR025827,IPR038109,PS51736,cd03768, IPR006118,PF13408,G3DSA:3.40.50.1390,PF07508,Coil
MKKNFKMPGSGSETPIRVAIYVRVSTVYQIDKDSLPMMKQDLTSYCKYILNTDDFVIFEDAGYSGKNTDRPAYQKMMSQIRQGLFTHLLVWKIDRISRNLLDFANMYAELKDLGVTFVSKNEQFDTSTAIGEAMLKIILVFAELERNMTSERVTATMINRASNGVWNGGRIPFGYSYDKPTQVFSIDPEENKIYNFMVETYEDTQSIVHTSRRLNEAGYRSRNGNMWSPVAVWTILRNPWYKGVYRYNYYKIPGRKAIKDESEWVIVENHHPASIDPDRFDRIQATLDKNARYRNTPGRKTAQKNVHVFSGLVWCAECGSAFTASPGKLHVSGYRPSKYGCPNVRKTKTCHAKYTSDVVLGEFLLNYILNILNAQKQFAYIHSTDDLQKRLLHGSTFSNVDHVDPDGLASLLNMLEKCSGSDPVLLKRPRSKPKMDPELKRMMADQKKQQRALDRLNDLYLYSDDSISEREYLVRKQQITDRLQEINEAIGMMSQEPWMRTMNDEEFIRQASSFILTQKLADKQYIYYESLAESLDPEILKNFFVSILDSIILRDGRPETVVFRNGLSHTFTYKDS

SEQ ID NO: 960 - protein, 576 aa, Unknown
  Description of Unknown: Integrase B961 sequence
  PTHR30461:SF3,IPR036162,PS51737,IPR011109,PTHR30461, PS00397,PF00239,G3DSA:1.10.10.2600,IPR006119,SSF53041, SM00857,IPR025827,IPR038109,PS51736,cd03768, IPR006118,PF13408,G3DSA:3.40.50.1390,PF07508,Coil
MKKNFKMPGSGSETPIRVAIYVRVSTVYQIDKDSLPMMKQDLTSYCKYILNTDDFVIFEDAGYSGKNTDRPAYQKMMSQIRQGLFTHLLVWKIDRISRNLLDFANMYAELKDLGVTFVSKNEQFDTSTAIGEAMLKIILVFAELERNMTSERVTATMINRASNGVWNGGRIPFGYSYDKPTQVFSIDPEENKIYNFMVETYEDTQSIVHTSRRLNEAGYRSRNGNMWSPVAVWTILRNPWYKGVYRYNYYKIPGRKAIKDESEWVIVENHHPASIDPDRFDRIQATLDKNARYRNTPGRKTAQKNVHVFSGLVWCAECGSAFTASPGKLHVSGYRPSKYGCPNVRKTKTCHAKYTSDVVLGEFLLNYILNILNAQKQFAYIHSTDDLQKRLLHGSTFSNVDHVDPDGLASLLNMLEKCSGSDPVLLKRPRSKPKMDPELKRMMADQKKQQRALDRLNDLYLYSDDSISEREYLVRKQQITDRLQEINEAIGMMSQEPWMRTMNDEEFIRQASSFILTQKLADKQYIYYENLAESLDPEILKNFFVSILDSIILRDGRPETVVFRNGLSHTFTYKDS

SEQ ID NO: 961 - protein, 576 aa, Unknown
  Description of Unknown: Integrase B962 sequence
  PTHR30461:SF3,IPR036162,PS51737,IPR011109,PTHR30461, PS00397,PF00239,G3DSA:1.10.10.2600,IPR006119,SSF53041, SM00857,IPR025827,IPR038109,PS51736,cd03768, IPR006118,PF13408,G3DSA:3.40.50.1390,PF07508,Coil
MLRGNTENGSNQRIRVAIYVRVSTVYQIDKDSLPMMKQDLTAYCKYILNTEDYVIFEDAGYSGKNMDRPAYQKMMSQVRQGLFTHILVWKIDRISRNLLDFANMYAELKELGVTFVSKNEQFDTSTAIGEAMLKIILVFAELERNMTSERVTATMINRANNGIWNGGRVPFGYTYDKESQVFSFDEAEQKIVRLIFDTYEKTGSIVHTSRKLNDSGFLTRGGNIWSATAVWIILRNPWYKGVYRYNYYKIPGRKAVKDKKEWVIVENHHKPSIDPERFDKIQLTLTNNARYRRSPGRSNVQKNVHIFAGLLWCGECGAAFTSSPGKLHASGYRPSKYGCPNVRKTKTCHAKYTSDVVVGEFIINYILNIINAHKDIKLVRSPEDLQQHLLRGSTFSDICSIDSDGLSDMYDMLTSCSKSGMLFKRVKPKFKVDPELKQLQSEQKKQQRALDRLNELYLYSDESMSEREYIVRKQQITDKLDEINDAIGMMSQEPWMHTMGDSEFIQQASSFILNQKLHDRQYVYFTSLAESVDAEILKAFFGSIIDSIVITSGKIQRVTFRNGISHTFTYKNKPED

SEQ ID NO: 962 - protein, 576 aa, Unknown
  Description of Unknown: Integrase B963 sequence
  PTHR30461:SF3,IPR036162,PS51737,IPR011109,PTHR30461, PS00397,PF00239,G3DSA:1.10.10.2600,IPR006119,SSF53041, SM00857,IPR025827,IPR038109,PS51736,cd03768, IPR006118,PF13408,G3DSA:3.40.50.1390,PF07508,Coil
MKKNFKMPGSGSETPIRVAIYVRVSTVYQIDKDSLPMMKQDLTSYCKYILNTDDFVIFEDAGYSGKNTDRPAYQKMMSQIRQGLFTHLLVWKIDRISRNLLDFANMYAELKDLGVTFVSKNEQFDTSTAIGEAMLKIILVFAELERNMTSERVTATMINRASNGVWNGGRIPFGYSYDKPNQVFSIDPEENKIYNFMVETYEDTQSIVHTSRRLNEAGYRSRNGNMWSPVAVWTILRNPWYKGVYRYNYYKIPGRKAIKDESEWVIVENHHPASIDPDRFDRIQATLDKNARYRNTPGRKTAQKNVHVFSGLVWCAECGSAFTASPGKLHVSGYRPSKYGCPNVRKTKTCHAKYTSDVVLGEFLLNYILNILNAQKQFAYIHSTDDLQKRLLHGSTFSNVDHVDPDGLASLLNMLEKCSGSDPVLLKRPRSKPKMDPELKRMMADQKKQQRALDRLNDLYLYSDDSISEREYLVRKQQITDRLQEINEAIGMMSQEPWMRTMNDEEFIRQASSFILTQKLADKQYIYYESLAESLDPEILKNFFVSILDSIILRDGRPETVVFRNGLSHTFTYKDS

SEQ ID NO: 963 - protein, 576 aa, Unknown
  Description of Unknown: Integrase B964 sequence
  cd03768,SM00857,G3DSA:1.10.10.2600,IPR036162,PF13408, IPR025827,G3DSA:3.40.50.1390,PS51737,IPR006119,IPR038109, PF07508,IPR011109,SSF53041,PTHR30461,PS51736, Coil,PF00239
MRGAIYSRVSTIDQDYNRQTNELKEYAKYMGIEITHVFEEKESGFNDDRPEFAKLKELTKDDIDIVLVWELSRLSRRSLYLQQQIEYFTKKGICVYAKKENLRTLDENGEEDRNTKFIIGIIAMIAEQEVATLKSRSISSKRNKIIKEGNSYTYKAPYGYDYSTETKKLSINEEEAKTVRRVIELSANDYSSARIALILNAENIPTRSKTKIWTMGTINTMLSNPVYKGEAEYMLKGTEPKKGKRYKRPIEVAIVKTPAIVSAELFDLSREKMKGRAFRSKSTGVKHFQLLRGLIYCPYCKIKYTYEGGRDLYVCHDKHKKAKNKPDCFSKAIKATRIEKIVWELVRLLFSQELATGKAQEQEEPLRQEIEAHKKLLIGIENKLNDLTAQANAIVNAAIDIKREMPNMPDLYINKLREAASLDKESKKYQYEKDRLNKLILSCEDKIKAINSLSNEKVLVDSITDDMERYELIHKVIDHMVIYGEDSIYSLVVVTFKTGQEVYIGYKSKGYQYYTIFHPSQSVWFDTEKRLGYITTMKSPDSLVLSLETVTKEYSVTNFIKVLDVPKNRRYYENQS

SEQ ID NO: 964 - protein, 576 aa, Unknown
  Description of Unknown: Integrase B965 sequence
  PTHR30461:SF3,SM00857,G3DSA:1.10.10.2600,IPR036162,PF13408, PS51737,IPR025827,G3DSA:3.40.50.1390,IPR006119,IPR038109, PF07508,SSF53041,IPR011109,PTHR30461,Coil, PS51736,cd00338,PF00239
MKITAPARSARAVSLEAFVDNLNLANVVIYARYSSAGQNDQSIDGQLAKCREYAQQRGYRVVGEYCDRALSGRYAETRPEFQRLIADSAKRAFDFVLVWKLDRFSRDRYDSAIYKKKLRTNGVRVLSVTEGVGDSSESVLLEAILEAMAEEYSRQLAQNVRRGMRQNAEKGLSLGGLAPLGYRVVNKQYEINEDEARIVRFIHEQYADGAGQKQIVADCARLGYRNQRGNPLTLTSVKRILANERYAGRYDYLGEIVIEDAFPAIVSKDLKKRVRDRLKANAKAPGHAKAKVEYLLHGKLFCGECGAPMIGECGRGRHGATYYYYTCAARKKQHTCKKRNERKDELEASIVDYIGSCVLTDSWIDGAAERVVAEYQKSYDASGIKPLEKQIRDADKEIDQLVDALISATAEAARRRINERIETAEARKQALEADLASLRIASRVQIRKEDIVVWLNQFRTGDRSDLEYRKKVIDLFVNAIYLYDDSFKLFLNVADSSQVTYADALALAPPSVSDFGVSGVPEKQLISFWNQLLFFFVLYYRRSTKRLPLYARGAVGVSVYLLVQTIRLDGKNRISS

SEQ ID NO: 965 - protein, 576 aa, Unknown
  Description of Unknown: Integrase B966 sequence
  PTHR30461:SF3,IPR036162,PS51737,IPR011109,PTHR30461, PF00239,G3DSA:1.10.10.2600,IPR006119,SSF53041,cd00338, SM00857,IPR025827,IPR038109,mobidb-lite,PS51736, PF13408,G3DSA:3.40.50.1390,PF07508,Coil
MAQQKKAVGAVFDGTPRAVIYARYSSTHQRERSIEDQIADCRAYAERCGLMVVGIYADRAISGKTDERPDFQRMIDDSKKRQFDRVIVWKLDRFARNRYDSALYKHKLKQNGVSVLSAMENIGEGDESIILEAILEASAEYYSRDLRKKVLRGMTTSAKKGLHNTGSVPYGYRLEGESAIPDGDRAEFVKHVFEAYAKGETPAELYREMQRRGLDTKVNGRKVSDNIIGSILRNEKYTGRGMWRGIPVEWPRLIDDELFEAARSRTEKNRRAPAAYKAAEPFILCGKAFCGYCGAPLMSGGGKGRSGKYYRHYICRTKKRERACGKKTEDKDFLEWYIVEQTCAYVLAPERLEYIADRVVECYKESFDGQRVSALEARIAKLDRDLDKTTDLLFAAPSAAAVDRINKHVVELEAQKNELEAELSGLKIAAAITYTRDEVVAWLKQFCNGDPLEAEFRRRIVETFINSVYVYDDRIVIYFNVRGGKQISYAEMLESAGDVDPLPPGPENKKSGGPDNGTAASNSKERFLHGKNTEQTAESAVRFCSGLVHQIPTKTNQSFIFVNGVFGIVVAREPSN

SEQ ID NO: 966 - protein, 576 aa, Unknown
  Description of Unknown: Integrase B967 sequence
  PTHR30461:SF3,IPR036162,PS51737,IPR011109,PTHR30461, PS00397,PF00239,G3DSA:1.10.10.2600,IPR006119,SSF53041, SM00857,IPR025827,IPR038109,PS51736,cd03768, IPR006118,PF13408,G3DSA:3.40.50.1390,PF07508,Coil
MKKNFKMPGSGSETPIRVAIYVRVSTVYQIDKDSLPMMKQDLTSYCKYILNTDDFVIFEDAGYSGKNTDRPAYQKMMSQIRQGLFTHLLVWKIDRISRNLLDFANMYAELKDLGVTFVSKNEQFDTSTAIGEAMLKIILVFAELERNMTSERVTATMINRASNGVWNGGRIPFGYSYDKPTQVFSIDPEENKVYDFLVETYEDTQSIVHTSRKLNEAGYRSRNGNMWSPVAVWTILRNPWYKGVYRYNYYKIPGRKAIKDESEWVIVENHHPASIDPDRFDRIQATLDKNARYRNTPGRKTAQKNVHVFSGLIWCAECGSAFTASPGKLHVSGYRPSKYGCPNVRKTKTCHAKYTSDVVLGEFLLNYILNILNAQKQFAYIHSTDDLQKRLLHGSTFSNVDHVDPDGLASLLNMLEKCSGSDPVLLKRPRSKPKMDPELKRMMADQKKQQRALDRLNDLYLYSDDSISEREYLVRKQQITDRLQEINEAIGMMSQEPWMRTMNDEEFIRQASSFILTQKLADKQYIYYESLAESLDPEILKNFFVSILDSIILRDGRPETVVFRNGLSHTFTYKDS

SEQ ID NO: 967 - protein, 576 aa, Unknown
  Description of Unknown: Integrase B968 sequence
  PTHR30461:SF3,SM00857,G3DSA:1.10.10.2600,IPR036162,PF13408, PS51737,G3DSA:3.40.50.1390,IPR025827,IPR006119,IPR038109, PF07508,IPR011109,SSF53041,PF00239,PTHR30461, Coil,cd00338
MYEEIKTACLYLRYSSSNQTEQSIEGQMHVCQDFCKRHNIRIVEMYIDRATSASKDIEKRVEFLKMIKDSEKGNFNAVIVYKLDRFARSRYDSATYKYRLKRNGVQLISATENITQDPEGIILESVLEGMAEFYSAELSQKINRGMRESAMKHNSIGGAIPLGYKTVDKKLVIDETTAPIVREAFQMYADGESVAEICRTFNNRGYKTSKGTRFGKSSFTKIFRNEKYIGVYKYHDYRAEDVIPPIIDKDLWDRVQVRVGKIKKAPARNKARHTYLLTGKLFCGHCGSAMNADGNSQGYLYYRCYGKKNLDKQCNKRNMEKNLIERLVAQDAMSFLTDEYIEKIATIACDRNKQEIESDSPIPVIRDRIRQVDVSLNNLLKAIETGSAPDMLVKRMGELETEKKDMEVQLKKEMAHQVYIDKEQVIFWLEKFREGDINDEEFCQTVIDLFVNSVTVWDEPDDKFKITIAYNLTSIPQKTYRLSKDGRLSDYASNTPDRESQKDLVIRTHIHLFFHNRRSIFFITHFHTASGFFIHPVKIKLCIWNFRLNLKQIRFYFLCDHLCYFFCCSACTEKCH

SEQ ID NO: 968 - protein, 576 aa, Unknown
  Description of Unknown: Integrase B969 sequence
  PTHR30461:SF3,IPR036162,PS51737,IPR011109,PTHR30461, PF00239,G3DSA:1.10.10.2600,IPR006119,SSF53041,cd00338, SM00857,IPR025827,IPR038109,mobidb-lite,PS51736, PF13408,G3DSA:3.40.50.1390,PF07508,Coil
MPRAAQAAGAEFDGTPRAVIYARYSSTHQRERSIEDQIADCRAYAERCGLMVVGIYADRAISGKTDERPDFQRMIDDSKKRQFDRVIVWKLDRFARNRYDSALYKHKLKQNGVSVLSAMENIGEGDESIILEAILEASAEYYSRDLRKKVLRGMTTSAKKGLHNTGSVPYGYRLEGESAVPDGDRAEFVKHVFEAYAKGETPAELYREMRSRGLDTKVNGRKVSDNIIGSILRNEKYTGRGMWRGIPVEWPRLIDDELFDAARARTEKNRRAPAAYKAAEPFILCGKAFCGYCGAPLMSGGGKGRSGKYYRHYICRTKKRERACGKKTEDKDFLEWYTVEQTCAYVLAPERLEYIAERVVECYKESFDGQRVSALEARIAKLDRDLDKTTDLLFAAPSAAAVDRINKHVVELEAQKSELEAELSGLKIAAAITYTRDEVVAWLKQFCNGDPLEAEFRRRIVETFINSVYVYDDRIVIYFNVRGGKQISYAEMLESSGDVEPLPPGPENKKSGGPDNGTAASNSKERFLHGKNTEQTAESAVRFCSGLVHQTQTKTNQSFIFVNGVFGIVVAREPGN

SEQ ID NO: 969 - protein, 576 aa, Unknown
  Description of Unknown: Integrase B970 sequence
  PTHR30461:SF3,SM00857,G3DSA:1.10.10.2600,IPR036162,PF13408, PS51737,IPR025827,G3DSA:3.40.50.1390,IPR006119,IPR038109, PF07508,IPR011109,SSF53041,PTHR30461,Coil, PS51736,cd00338,PF00239
MKITAPARSARAVSLEAFVDNLNLANVVIYARYSSAGQNDQSIDGQLAKCREYAQQRGYRVVGEYCDRALSGRYAETRPEFQRLIADSAKRAFDFVLVWKLDRFSRDRYDSAIYKKKLRANGVRVLSVTEGVGDSSESVLLEAILEAMAEEYSRQLAQNVRRGMRQNAEKGLSLGGLAPLGYRVVNKQYEINEDEARIVRFIHEQYADGAGQKQIVADCARLGYRNQRGNPLTLASVKRILANERYVGMYDYLGEIVIEDAFPSIVSKDLKKRVRDRLKANAKAPGHAKAKVEYLLHGKLFCGECGAPMIGECGRGRHGATYYYYTCAARKKQHTCKKRNERKDELEASIVDYIGSCVLTDSWIDGAAERVVAEYQKSYDASGIKPLEKQIRDADKEIDQLVDALISATAEAARRRINERIETAEARKQALEADLASLRIASRVQIKKEDIVVWLNQFRTGDRSDLEYRKKVIDLFVNAIYLYDDSFKLFLNVADSAQVTYADAVALAPPSVSDFGASGVPEKQLISFWNQLLFFFVLHYRRSTKRLPLYARGAVGASVYLLVQTIRLDGKNRISS

SEQ ID NO: 970 - protein, 576 aa, Unknown
  Description of Unknown: Integrase B971 sequence
  PTHR30461:SF3,IPR036162,PS51737,IPR011109,PTHR30461, PS00397,PF00239,G3DSA:1.10.10.2600,IPR006119,SSF53041, SM00857,IPR025827,IPR038109,PS51736,cd03768, IPR006118,PF13408,G3DSA:3.40.50.1390,PF07508,Coil
MKKNFKMLESGSETSIRVAIYVRVSTVYQIDKDSLPMMKQDLTSYCKYILNTDDFVIFEDAGYSGKNTDRPAYQKMMSQIRQGLFTHLLVWKIDRISRNLLDFANMYAELKDLGVTFVSKNEQFDTSTAIGEAMLKIILVFAELERNMTSERVTATMINRASNGVWNGGRIPYGYSYDKPAQVFSIDPGENKVYNFLVETYEDTQSIVHTSRKLNEAGYRSRNGNMWSPVAVWTILRNPWYKGVYRYNYYKIPGRKAIKDESEWVIVENHHPASIDTDRFDRIQATLDKNARYRNTPGRKTTQKNVHVFSGLVWCAECGSAFTASPGKLHVSGYRPSKYGCPNVRKTKTCHAKYTSDVVLGEFLLNYILNILNAQKQFAYIHSTDDLQKYLLRGSTFSNVDHVDPDGLASLLNMLKKCSGSDPVLLKRPRSKPKIDPELKRMMADQKKQQRALDRLNDLYLYSDDSISEREYLVRKQQITDRLQEINETIGMMSQEPWMHTMNDEEFIRQASSFILTQKLADKQYIYYENLAESLDPEILKNFFVSILDSIILRDGRPETVVFRNGLSHTFTYKDS

SEQ ID NO: 971 - protein, 576 aa, Unknown
  Description of Unknown: Integrase B972 sequence
  PTHR30461:SF3,IPR036162,PS51737,IPR011109,PTHR30461, PS00397,PF00239,G3DSA:1.10.10.2600,IPR006119,SSF53041, SM00857,IPR025827,IPR038109,PS51736,cd03768, IPR006118,PF13408,G3DSA:3.40.50.1390,PF07508,Coil
MKKNFKMPGSGSETPIRVAIYVRVSTVYQIDKDSLPMMKQDLTSYCKYILNTDDFVIFEDAGYSGKNTDRPAYQKMMSQIRQGLFTHLLVWKIDRISRNLLDFANMYAELKDLGVTFVSKNEQFDTSTAIGEAMLKIILVFAELERNMTSERVTATMINRASNGVWNGGRIPFGYSYDKPTQVFSIDPEENKIYNFMVETYEDTQSIVHTSRRLNEAGYRSRNGNMWSPVAVWTILRNPWYKGVYRYNYYKIPGRKAIKDESEWVIVENHHTASIDPDRFDRIQATLDKNARYRNTPGRKTAQKNVHVFSGLVWCAECGSAFTASPGKLHVSGYRPSKYGCPNVRKTKTCHAKYTSDVVLGEFLLNYILNILNAQKQFAYIHSTDDLQKRLLHGSTFSNVDHVDPDGLASLLNMLEKCSGSDPVLLKRPRSKPKMDPELKRMMADQKKQQRALDRLNDLYLYSDDSISEREYLVRKQQITDRLQEINEAIGMMSQEPWMRTMNDEEFIRQASSFILTQKLADKQYIYYENLAESLDPEILKNFFVSILDSIILRDGRPETVVFRNGLSHTFTYKDS

SEQ ID NO: 972 - protein, 576 aa, Unknown
  Description of Unknown: Integrase B973 sequence
  PTHR30461:SF3,IPR036162,PS51737,IPR011109,PTHR30461, PS00397,PF00239,G3DSA:1.10.10.2600,IPR006119,SSF53041, SM00857,IPR025827,IPR038109,PS51736,cd03768, IPR006118,PF13408,G3DSA:3.40.50.1390,PF07508,Coil
MKKNFKMPGSGSETPIRVAIYVRVSTVYQIDKDSLPMMKQDLTSYCKYILNTDDFVIFEDAGYSGKNTDRPAYQKMMSQIRQGLFTHLLVWKIDRISRNLLDFANMYAELKDLGVTFVSKNEQFDTSTAIGEAMLKIILVFAELERNMTSERVTATMINRASNGVWNGGRIPFGYSYDKPTQVFSINPEENKIYNFMVETYEDTQSIVHTSRRLNEAGYRSRNGNMWSPVAVWTILRNPWYKGVYRYNYYKIPGRKAIKDESEWVIVENHHPASIDPDRFDRIQATLDKNARYRNTPGRKTAQKNVHVFSGLVWCAECGSAFTASPGKLHVSGYRPSKYGCPNVQKTKTCHAKYTSDVVLGEFLLNYILNILNAQKQFAYIHSTDDLQKRLLHGSTFSNVDHVDPDGLASLLNMLEKCSGSDPVLLKRPRSKPKMDPELKRMMADQKKQQRALDRLNDLYLYSDDSISEREYLVRKQQITDRLQEINEAIGMMSQEPWMRTMNDEEFIRQASSFILTQKLADKQYIYYENLAESLDPEILKNFFVSILDSIILRDGRPETVVFRNGLSHTFTYKDS

SEQ ID NO: 973 - protein, 576 aa, Unknown
  Description of Unknown: Integrase B974 sequence
  PTHR30461:SF3,IPR036162,PS51737,IPR011109,PTHR30461, PS00397,PF00239,G3DSA:1.10.10.2600,IPR006119,SSF53041, SM00857,IPR025827,IPR038109,PS51736,cd03768, IPR006118,PF13408,G3DSA:3.40.50.1390,PF07508,Coil
MKKNFKMPGSGSETPIRVAIYVRVSTVYQIDKDSLPMMKQDLTSYCKYILNTDDFVIFEDAGYSGKNTDRPAYQKMMSQIRQGLFTHLLVWKIDRISRNLLDFANMYAELKDLGVTFVSKNEQFDTSTAIGEAMLKIILVFAELERNMTSERVTATMINRASNGVWNGGRIPFGYSYDKPTQVFSIDPEENKIYNFMVETYEDTQSIVHTSRRLNEAGYRSRNGNMWSPVAVWTILRNPWYKGVYRYNYYKIPGRKAIKDESEWVIVENHHPASIDPDRFDRIQATLDKNARYRNTPGRKTAQKNVHVFSGLVWCAECGSAFTASPGKLHVSGYRPSKYGCPNVRKTKTCHAKYTSDVVLGEFLLNYILNILNAQKQFAYIHSTDDLQKRLLHGSTFSNVDHVDPDGLASLLNMLEKCSGSDPVLLKRPRSKPKMDPELKRMMADQKKQQRALDRLNDLYLYSDDSISEREYLVRKQQITDRLQEINEAIGMMSQEPWMRTMNDEEFIRQASSFILTQKLADKQYIYYENLAESLDPEILKNFFVSILDSIILRDGRPETLVFRNGLSHTFTYKDS

SEQ ID NO: 974 - protein, 576 aa, Unknown
  Description of Unknown: Integrase B975 sequence
  PTHR30461:SF3,IPR036162,PS51737,IPR011109,PTHR30461, PS00397,PF00239,G3DSA:1.10.10.2600,IPR006119,SSF53041, SM00857,IPR025827,IPR038109,PS51736,cd03768, IPR006118,PF13408,G3DSA:3.40.50.1390,PF07508,Coil
MKKNFKMPGSGSETPIRVAIYVRVSTVYQIDKDSLPMMKQDLTSYCKYILNTDDFVIFEDAGYSGKNTDRPAYQKMMSQIRQGLFTHLLVWKIDRISRNLLDFANMYAELKDLGVTFVSKNEQFDTSTAIGEAMLKIILVFAELERNMTSERVTATMINRASNGVWNGGRIPYGYSYDKPTQVFSIDPEENKIYNFMVETYEDTQSIVHTSRRLNEAGYRSRNGNMWSPVAVWTILRNPWYKGVYRYNYYKIPGRKAIKDESEWVIVENHHPASIDSDRFDRIQATLDKNARYRNTPGRKTAQKNVHVFSGLVWCAECGSAFTASPGKLHVSGYRPSKYGCPNVRKTKTCHAKYTSDVVLGEFLLNYILNILNAQKQFAYIHSTDDLQKRLLHGSTFSNVDHVDPDGLASLLNMLEKCSGSDPVLLKRPRSKPKMDPELKRMMADQKKQQRALDRLNDLYLYSDDSISEREYLVRKQQITDRLQEINEAIGMMSQEPWMRTMNDEEFIRQASSFILTQKLADKQYIYYENLAESLDPEILKNFFVSILDSIILRDGRPETVVFRNGLSHTFTYKDS

SEQ ID NO: 975 - protein, 576 aa, Unknown
  Description of Unknown: Integrase B976 sequence
  PTHR30461:SF3,IPR036162,PS51737,IPR011109,PTHR30461, PS00397,PF00239,G3DSA:1.10.10.2600,IPR006119,SSF53041, SM00857,IPR025827,IPR038109,PS51736,cd03768, IPR006118,PF13408,G3DSA:3.40.50.1390,PF07508,Coil
MIRENTENGSNRRIRVAIYVRVSTVYQIDKDSLPMMKQDLTAYCKYILNTEDYVIFEDAGYSGKNMDRPAYQKMMSQVRQGLFTHILVWKIDRISRNLLDFANMYAELKELGVTFVSKNEQFDTSTAIGEAMLKIILVFAELERNMTSERVTATMINRANNGIWNGGRVPFGYTYDKESQTFSFDEAEQKIVRLIFDTYEKTGSIVHTSRKLNDSGFLTRGGNIWSATAVWIILRNPWYKGVYRYNYYKIPGRKAVKDKKEWVIVENHHKPSIDSERFDKIQLTLTNNARYRRSPGRSNVQKNVHIFAGLLWCGECGAAFTSSPGKLHTSGYRPSKYGCPNVRKTKTCHAKYTSDVVVGEFVINYILNIINAHKDIKLVRSPEDLQQHLLRGSTFSDICSIDSDGLSAMYDMLTCCSKSGMLFKRVKPKFKVDPELKHLQSEQKKQQRALDRLNELYLYSDESMSEREYIVRKQQITDKLDEINDAIGMMSQEPWMHTMGDSEFIQQASSFILNQKLHDRQYVYFTSLAESVDAEILKAFFGSIIDSIVITSGKIQRVTFRNGISHTFTYKNKPED

SEQ ID NO: 976 - protein, 576 aa, Unknown
  Description of Unknown: Integrase B977 sequence
  PTHR30461:SF3,IPR036162,PS51737,IPR011109,PTHR30461, PS00397,PF00239,G3DSA:1.10.10.2600,IPR006119,SSF53041, SM00857,IPR025827,IPR038109,PS51736,cd03768, IPR006118,PF13408,G3DSA:3.40.50.1390,PF07508,Coil
MKKNFKMPGSGSETPIRVAIYVRVSTVYQIDKDSLPMMKQDLTSYCKYILNTDDFVIFEDAGYSGKNTDRPAYQKMMSQIRQGLFTHLLVWKIDRISRNLLDFANMYAELKDLGVTFVSKNEQFDTSTAIGEAMLKIILVFAELERNMTSERVTATMINRASNGVWNGGRIPFGYSYDKPTQVFSINPEENKIYNFMVETYEDTQSIVHTSRRLNEAGYRSRNGNMWSPVAVWTILRNPWYKGVYRYNYYKIPGRKAIKDESEWVIVENHHPASIDPDRFDRIQATLDKNARYRNAPGRKTAQKNVHVFSGLVWCAECGSAFTASPGKLHVSGYRPSKYGCPNVRKTKTCHAKYTSDVVLGEFLLNYILNILNAQKQFAYIHSTDDLQKRLLHGSTFSNVDHVDPDGLASLLNMLEKCSGSDPVLLKRPRSKPKMDPELKRMMADQKKQQRALDRLNDLYLYSDDSISEREYLVRKQQITDRLQEINEAIGMMSQEPWMRTMNDEEFIRQASSFILTQKLADKQYIYYENLAESLDPEILKNFFVSILDSIILRDGRPETVVFRNGLSHTFTYKDS

SEQ ID NO: 977 - protein, 576 aa, Unknown
  Description of Unknown: Integrase B978 sequence
  PTHR30461:SF3,IPR036162,PS51737,IPR011109,PTHR30461, PS00397,PF00239,G3DSA:1.10.10.2600,IPR006119,SSF53041, SM00857,IPR025827,IPR038109,PS51736,cd03768, IPR006118,PF13408,G3DSA:3.40.50.1390,PF07508,Coil
MKKNFKMPGSGSETPIRVAIYVRVSTVYQIDKDSLPMMKQDLTSYCKYILNTDDFVIFEDAGYSGKNTDRPAYQKMMSQIRQGLFTHLLVWKIDRISRNLLDFANMYAELKDLGVTFVSKNEQFDTSTAIGEAMLKIILVFAELERNMTSERVTATMINRASNGVWNGGRIPYGYSYDKPTQVFSIDPEENKVYNFLVETYEDTQSIVHTSRKLNEAGYRSRNGNMWSPVAVWTILRNPWYKGVYRYNYYKIPGRKAIKDESEWVIVENHHPASIDPDRFDRIQATLDKNARYRNTPGRKTAQKNVHVFSGLVWCAECGSAFTASPGKLHVSGYRPSKYGCPNVRKTKTCHAKYTSDVVLGEFLLNYILNILNAQKQFAYIHSTDDLQKHLLHGSTFSNVDHVDPDGLASLLNMLEKCFGSDPVLLKRPRSKPKMDPELKRMMADQKKQQRALDRLNDLYLYSDDSISEREYLVRKQQITDRLQEINEAIGMMSQEPWMRTMNDEEFIRQASSFILTQKLADKQYIYYENLAESLDPEILKNFFVSILDSIILRDGRPETVVFRNGLSHTFTYKDS

SEQ ID NO: 978 - protein, 576 aa, Unknown
  Description of Unknown: Integrase B979 sequence
  PTHR30461:SF3,SM00857,G3DSA:1.10.10.2600,IPR036162,PF13408, PS51737,IPR025827,G3DSA:3.40.50.1390,IPR006119,IPR038109, PF07508,SSF53041,IPR011109,PTHR30461,Coil, PS51736,cd00338,PF00239
MKKRVRILLRVSSNQQLEADGDLSVQREIVLDYISKQNNWKLDNKEYFEGSNSGYKNAVKDRDVLQEALFDAKNNEYDILVVYKDDRIGRRMWEIGSYVMQLKSYGVDIYTTKDGCISPENNDVMGQMMLALRYGNAQKSSSDTGQRVKDTAQKLVKRGKFMGGKAPYGYELILSGELSKHGRALHKLKKIPEKVEVVKKIYDLSINKEFGSSKIARILNEDTYYHSLAPKDDWKSGTITSILTNPIYCGITAYKRREKIDGKYHSLDSQDWIYAEEINEEIAIIDKDIWNDIQEKRSNRSIKYRKDVLKEKGVNVLLRNDGELALIDVAYCGYCGGKLTNGSKYNYWTLKGTGEKRASKIPAYKCQTAWAGVPHDKTRMFRADKIEDIVFKYVAQYISVLQDNSEVYEKIQTNNKKEKESFNQRIKKEKQELKKITDGIEVMKSHIPDAMLGNYPLSVEVIADTIKQFEEKEKIQKQKIQELEQQYEEMEIEEQDWDEVCKIIPSWIEVFNDADKKTKRVLINKLVDKVIVKKDEITVKFKINLSKPRHRQSRMSEYNGVSKQRIRFYNYFIYSI

SEQ ID NO: 979 - protein, 576 aa, Unknown
  Description of Unknown: Integrase B980 sequence
  PTHR30461:SF3,IPR036162,PS51737,IPR011109,PTHR30461, PS00397,PF00239,G3DSA:1.10.10.2600,IPR006119,SSF53041, SM00857,IPR025827,IPR038109,PS51736,cd03768, IPR006118,PF13408,G3DSA:3.40.50.1390,PF07508,Coil
MIRENTENGSNQRIRVAIYVRVSTVYQIDKDSLPMMKQDLTAYCKYILNTEDYVIFEDAGYSGKNMDRPAYQKMMSQVRQGLFTHILVWKIDRISRNLLDFANMYAELKELSVTFVSKNEQFDTSTAIGEAMLKIILVFAELERNMTSERVTATMINRANNGIWNGGRVPFGYAYDKESQTFSFDETEQKIVQLIFDTYEKTGSIVHTSRKLNDSGFLTRGGNVWSATAVWIILRNPWYKGVYRYNYYKIPGRKAVKDKKEWVIVENHHKPSIDSERFDKIQLTLTNNARYRRSPGRSNVQKNVHIFAGLLWCGECGAAFTSSPGKLHASGYRPSKYGCPNVRKTKTCHAKYTSDVVVGEFVINYILNIINAHKDIKLVRSPEDLQQHLLRGSTFSDICSIDSDGLSAMYDMLTCCSKSGMLFKRVKPKFKVDPELKHLQSEQKKQQRALDRLNELYLYSDESMSEREYIVRKQQITDKLDEINDAIGMMSQEPWMHTMGDSEFIQQASSFILNQKLHDRQYVYFTSLAESVDAEILKAFFGSIIDSIVITSGKIQRVTFRNGISHTFTYKNKPEN

SEQ ID NO: 980 - protein, 576 aa, Unknown
  Description of Unknown: Integrase B981 sequence
  PTHR30461:SF3,cd00338,SM00857,G3DSA:1.10.10.2600,IPR036162, PF13408,IPR025827,G3DSA:3.40.50.1390,PS51737,IPR006119, IPR038109,PF07508,SSF53041,IPR011109,PTHR30461, PS51736,Coil,PF00239
MAQVEIIAANLKDKNNNITIANKKKRVCAYGRVSTDDEEQITSYNSQIKYYTEKIKSNPEWEFVGIYADEGISGTQVKNRCEFQRMIDDALNGKIDIILAKSISRFARNTLDTLKYCRELRDKKVDVFFEKENIHTIDLDSEMFLTLYSAFAQAESESTSQNVKLGLKAMMKRGEYVGSPDCYGYDWNKETKQLDINEEQAEVVRMVFNWYCEGLGCRRIANKLEEMKIPSYTGARWSTSSISNMIHQEKYVGDLLQNKSYTVSPITHKCVKNKGEKEKYYVKDHHEPIISREVWDKVQELSKKRYEGITFNKNDYKSRETRKYAFSGKIKCAFCGTNFCRRQSSYSKKHPKYNYYWTCFKKREHSDACPDSVGISENKLEETFVMIYNDIIKNKHKTKNALIKAIKDVINNNDYQDKLNNLLKEKETIEQRLSKIIDMELDNDIDRKELFIRKERELLDKLNQVKEEINNYQQLLDENRGLSKQLKSIDEYFDNYHTTLKKFNREAFENMIECIIVGDYDSDGNKLPRVARFVLKTGKEYKFEISGNSNKDNSNNDKNNDVSLCTRNVSLFNCTC

SEQ ID NO: 981 - protein, 576 aa, Unknown
  Description of Unknown: Integrase B982 sequence
  PTHR30461:SF3,IPR036162,PS51737,IPR011109,PTHR30461, PS00397,PF00239,G3DSA:1.10.10.2600,IPR006119,SSF53041, SM00857,IPR025827,IPR038109,PS51736,cd03768, IPR006118,PF13408,G3DSA:3.40.50.1390,PF07508,Coil
MGKNFKMPGSGSETPIRVAIYVRVSTVYQIDKDSLPMMKQDLTSYCKYILNTDDFVIFEDAGYSGKNTDRPAYQKMMSQIRQGLFTHLLVWKIDRISRNLLDFANMYAELKDLGVTFVSKNEQFDTSTAIGEAMLKIILVFAELERNMTSERVTATMINRASNGVWNGGRIPFGYSYDKPTQVFSIDPEENKIYNFMVETYEDTQSIVHTSRRLNEAGYRSRNGNMWSPVAVWTILRNPWYKGVYRYNYYKIPGRKAIKDESEWVIVENHHPASIDPDRFDRIQATLDKNARYRNTPGRKTAQKNVHVFSGLVWCAECGSAFTASPGKLHVSGYRPSKYGCPNVRKTKTCHAKYTSDVVLGEFLLNYILNILNAQKQFAYIHSTDDLQKRLLHGSTFSNVDHVDPDGLASLLNMLEKCSGSDPVLLKRPRSKPKMDPELKRMMADQKKQQRALDRLNDLYLYSDDSISEREYLVRKQQITDRLQEINEAIGMMSQEPWMRTMNDEEFIRQASSFILTQKLADKQYIYYESLAESLDPEILKNFFVSILDSIILRDGRPETVVFRNGLSHTFTYKDS

SEQ ID NO: 982 - protein, 576 aa, Unknown
  Description of Unknown: Integrase B983 sequence
  cd00338,SM00857,G3DSA:1.10.10.2600,IPR036162,PF13408, IPR025827,G3DSA:3.40.50.1390,PS51736,PS51737,IPR006119, IPR038109,PF07508,SSF53041,IPR011109,PTHR30461, mobidb-lite,Coil,PF00239
MSVDIKWQVPKAQPEASELAVVYARYSSHSQGEQSIEGQLSNARDYAAAHGYTIVHEYVDRAKSGRTDNRAEFQQMLKDTAKRQFSVIILWKVDRFGRNREEIAINKMKCRKNGVRVEYVAETIPDSPEGVILESVLEGFAEYYSLQLSQNIRRGRAESAEKCQSLGGNRPLGYKTGPDKKFVIDENTAPTVKMIFTMYADGKTVTEIVDKLNEMGLRTLRGGPFTKNSLHSILKNKKYIGIYEYQGREIKNGVPRIIEDDVFNKVQEMLKINKRAPAKTWSRADYILTDKLFCGKCGALMFGESGTSKTGAKHNYYICSNKKRFRSCDKKAVRQADIEDTVLNATHELLQDDELLDYIVDRTWEYYLAQDNSQEELRNLQRQLAQTDTAISNLIRAIEAGILTEETKKRMDELTQQKADLKASIADREIARGFHLQKSHIAFYLRSLRDADWSDKEAQKRLIQTFVNAVFVYDDHITLTYNFSGDKSTVTLRDMQRFEDGEEFGCRASRSTNNKRTALAVLLLLKKHRIIRTPSSPKGLKRFAPEETTESVQTDAQTGVQNPRRSLSYAREEIYP

SEQ ID NO: 983 - protein, 576 aa, Unknown
  Description of Unknown: Integrase B984 sequence
  PTHR30461:SF3,SM00857,G3DSA:1.10.10.2600,IPR036162,PF13408, PS51737,IPR025827,G3DSA:3.40.50.1390,IPR006119,IPR038109, PF07508,IPR011109,SSF53041,PTHR30461,Coil, PS51736,cd00338,PF00239
MKKRVRILLRVSSNQQLEADGDLSVQREIVLDYISKQNDWKLDNKEYFEGSNSGYKNAVKDRDVLQEALFDAKNNEYDILVVYKDDRIGRRMWEIGSYVMQLKSYGVDIYTTKDGCISPENNDVMGQMMLALRYGNAQKSSSDTGQRVKDTAQKLVKRGKFMGGKAPYGYELILSGELSKHGRALHKLKKIPEKVEVVKKIYDLSINKEFGSSKIARILNEDTYYHSLAPKDDWKSGTITSILTNPIYCGITAYKRREKIDGKYHSLDSQDWIYAEEINEEIAIIDKDIWNNIQEKRSNRSIKYRKDVLKEKGVNVLLRNDGELALIDVAYCGYCGGKLTNGSKYNYWTLKGTGEKRASKIPAYKCQTAWAGVPHDKTRMFRADKIEDIVFKYVAQYISVLQDNSEVYEKIQTNNKKEKESFNQRIKKEKQELKKITDGIEVMKSHIPDAMLGNYPLSVEVIADTIKQFEEKEKIQKQKIQELEQQYEEMEIEEQDWDEVCKIIPSWIEVFNDADKKTKRVLINKLVDKVIVKKDEITVKFKINLSKPRHRQSRMSGYNGVSKQRIRFYNYFIYSI

SEQ ID NO: 984 - protein, 576 aa, Unknown
  Description of Unknown: Integrase B985 sequence
  PTHR30461:SF3,IPR036162,PS51737,IPR011109,PTHR30461, PF00239,G3DSA:1.10.10.2600,IPR006119,SSF53041,cd00338, SM00857,IPR025827,IPR038109,PS51736,mobidb-lite, PF13408,G3DSA:3.40.50.1390,PF07508,Coil
MKKRINTNSAARAVIYARYSSANQRDCSIEQQVEKCRELAAREGVTVIEIYADRAISGKTDRRPNFQRMMKDASLRQFDVVLAWKSNRMGRNMLQAMMNEEQLRGNGIRTIYAEEDFDDTAAGRFALRNMMNVNQFYSENMAEDISRGLMDNASKCMSNGSLPLGYKTGKDQKVVLDEAEAAIVQEIFTRVSCYEPFIDIARDLNRRGIKTKKGAEWGRSSFHTICRNERYRGIYIYRDIRVEGGMPRIVSDELFYKVQEVLKVKKNPQGRRKRSGYEEYLLTGKLYCGHCGSPMTGIAGTSKTGAMHYYYTCQKRRTDHSCDKKAVRRDQIEKAVAIAIQQQLLTDENIQMMADETMAYNARTEIKYRLQSLQQQLYSNETSTANIMKAIEMGIITDTTKARLLALEQEHGQLLAKIDTAKAEMVPINREDFVSLLDIYRTGDVNNKKYLAALFDTFLVRVDLYDDHFKITFDPTGGKMLVDIPIGAEDSPESPGDSPESSDFEASPQDAEKFVLALHNRTKRKAPNLGSGLFVWSCGEEDLNRATAPQRRGKLSCGQFASLRENPFIRTKILER

SEQ ID NO: 985 - protein, 576 aa, Unknown
  Description of Unknown: Integrase B986 sequence
  PTHR30461:SF3,IPR036162,PS51737,IPR011109,PTHR30461, PS00397,PF00239,G3DSA:1.10.10.2600,IPR006119,SSF53041, SM00857,IPR025827,IPR038109,PS51736,cd03768, IPR006118,PF13408,G3DSA:3.40.50.1390,PF07508,Coil
MIRENTENGSNQRIRVAIYVRVSTVYQIDKDSLPMMKQDLTSYCKYILNTDDFVIFEDAGYSGKNTDRPAYQKMMSQIRQGLFTHLLVWKIDRISRNLLDFANMYAELKDLGVTFVSKNEQFDTSTAIGEAMLKIILVFAELERNMTSERVTATMINRANNGIWNGGRVPFGYAYDKESQTFSFDETEQKIVQLIFDTYEKTGSIVHTSRKLNDSGFLTRGGNIWSATAVWIILRNPWYKGVYRYNYYKIPGRKAVKDKKEWVIVENHHKPSIDPERFDKIQLTLTNNARYRRSPGRSNVQKNVHIFAGLLWCGECGAAFTSSPGKLHASGYRPSKYGCPNVRKTKTCHAKYTSDVVVGEFIINYILNIINAHKDIKLVRSPEDLQQHLLRGSTFSDICSIDSDGLSAMYDMLTCCSKSGMLFKRVKPKFKVDPELKHLQSEQKKQQRALDRLNELYLYSDESMSEREYIVRKQQITDKLDEINDAIGMMSQEPWMHTMGDSEFIQQASSFILNQKLHDRQYVYFTSLAESVDAEILKAFFGSIIDSIVITSGKIQRVIFRNGISHTFTYKNKPEN

SEQ ID NO: 986 - protein, 576 aa, Unknown
  Description of Unknown: Integrase B987 sequence
  PTHR30461:SF3,IPR036162,PS51737,IPR011109,PTHR30461, PS00397,PF00239,G3DSA:1.10.10.2600,IPR006119,SSF53041, SM00857,IPR025827,IPR038109,PS51736,cd03768, IPR006118,PF13408,G3DSA:3.40.50.1390,PF07508,Coil
MKKNFKMPGSGSETPIRVAIYVRVSTVYQIDKDSLPMMKQDLTSYCKYILNTDDFVIFEDAGYSGKNTDRPAYQKMMSQIRQGLFTHLLVWKIDRISRNLLDFANMYAELKDLGVTFVSKNEQFDTSTAIGEAMLKIILVFAELERNMTSERVTATMINRASNGVWNGGRIPFGYSYDKPTQVFSIDPEENKVYNFLVETYEDTQSIVHTSRKLNEAGYRSRNGNMWSPVAVWTILRNPWYKGVYRYNYYKIPGRKAIKDESEWVIIENHHPASIDPDRFDRIQATLDKNARYRNTPGRKTAQKNVHVFSGLIWCAECGSAFTASPGKLHVSGYRPSKYGCPNVRKTKTCHAKYTSDVVLGEFLLNYILNILNAQKQFAYIHSTDDLQKRLLHGSTFSNVDHVDPDGLASLLNMLEKCSGSDPVLLKRPRSKPKMDPELKRMMADQKKQQRALDRLNDLYLYSDDSISEREYLVRKQQITDRLQEINEAIGMMSQEPWMRTMNDEEFIRQASSFILTQKLADKQYIYYENLAESLDPEILKNFFVSILDSIILRDGRPETVVFRNGLSHTFTYKDS

SEQ ID NO: 987 - protein, 576 aa, Unknown
  Description of Unknown: Integrase B988 sequence
  PTHR30461:SF3,IPR036162,PS51737,IPR011109,PTHR30461, PS00397,PF00239,G3DSA:1.10.10.2600,IPR006119,SSF53041, SM00857,IPR025827,IPR038109,PS51736,cd03768, IPR006118,PF13408,G3DSA:3.40.50.1390,PF07508,Coil
MKKNFKMPGSGSETPIRVAIYVRVSTVYQIDKDSLPMMKQDLTSYCKYILNTDDFVIFEDAGYSGKNTDRPAYQKMMSQIRQGLFTHLLVWKIDRISRNLLDFANMYAELKDLGVTFVSKNEQFDTSTAIGEAMLKIILVFAELERNMTSERVTATMINRASNGVWNGGRIPFGYSYDKPTQVFSIDPEENKIYNFMVETYEDTQSIVHTSRRLNEAGYRSRNGNMWSPVAVWTILRNPWYKGVYRYNYYKIPGRKAIKHESEWVIVENHHPASIDPDRFDRIQATLDKNARYRNTPGRKTAQKNVHVFSGLVWCAECGSAFTASPGKLHVSGYRPSKYGCPNVRKTKTCHAKYTSDVVLGEFLLNYILNILNAQKQFAYIHSTDDLQKRLLHGSTFSNVDHVDPDGLASLLNMLEKCSGSDPVLLKRPRSKPKMDPELKRMMADQKKQQRALDRLNDLYLYSDDSISEREYLVRKQQITDRLQEINEAIGMMSQEPWMRTMNDEEFIRQASSFILTQKLADKQYIYYENLAESLDPEILKNFFVSILDSIILRDGRPETVVFRNGLSHTFTYKDS

SEQ ID NO: 988 - protein, 576 aa, Unknown
  Description of Unknown: Integrase B989 sequence
  PTHR30461:SF3,IPR036162,PS51737,IPR011109,PTHR30461, PS00397,PF00239,G3DSA:1.10.10.2600,IPR006119,SSF53041, SM00857,IPR025827,IPR038109,PS51736,cd03768, IPR006118,PF13408,G3DSA:3.40.50.1390,PF07508,Coil
MKKNFKMPGSGSETPIRVAIYVRVSTVYQIDKDSLPMMKQDLTSYCKYILNTDDFVIFEDAGYSGKNTDRPAYQKMMSQIRQGLFTHLLVWKIDRISRNLLDFANMYAELKDLGVTFVSKNEQFDTSTAIGEAMLKIILVFAELERNMTSERVTATMINRASNGVWNGGRIPFGYSYDKPTQVFSINPEENKIYNFMVETYEDTQSIVHTSRRLNEAGYRSRNGNMWSPVAVWTILRNPWYKGVYRYNYYKIPGRKAIKDESEWVIVENHHPASIDPDRFDRIQATLDKNARYRNTPGRKTAQKNVHVFSGLVWCAECGSAFTASPGKLHVSGYRPSKYGCPNVRKTKTCHAKYTSDVVLGEFLLNYILNILNAQKQFAYIHSTDDLQKRLLHGSTFSNVDHVDPDGLASLLNMLEKCSGSDPVLLKRPRSKPKMDPELKRMMADQKKQQRALDRLNDLYLYSDDSISEREYLVRKQQITDRLQEINEAIGMMSQEPWMRTMNDEEFIRQASSFILTQKLADKQYIYYENLAESLDPEILKNFFVSILDSIILRDGRPETVVFRNGLSHTFTYKDS

SEQ ID NO: 989 - protein, 576 aa, Unknown
  Description of Unknown: Integrase B990 sequence
  PTHR30461:SF3,IPR036162,PS51737,IPR011109,PTHR30461, PS00397,PF00239,G3DSA:1.10.10.2600,IPR006119,SSF53041, SM00857,IPR025827,IPR038109,PS51736,cd03768, IPR006118,PF13408,G3DSA:3.40.50.1390,PF07508,Coil
MKKNFKMPGSSSETPIRVAIYVRVSTVYQIDKDSLPMMKQDLTSYCKYILNTDDFVIFEDAGYSGKNTDRPAYQKMMSQIRQGLFTHLLVWKIDRISRNLLDFANMYAELKDLGVTFVSKNEQFDTSTAIGEAMLKIILVFAELERNMTSERVTATMINRASNGVWNGGRIPFGYSYDKPTQVFSINPEENKIYNFMVETYEDTQSIVHTSRRLNEAGYRSRNGNMWSPVAVWTILRNPWYKGVYRYNYYKIPGRKAIKDESEWVIVENHHPASIDPDRFDRIQATLDKNARYRNTPGRKTAQKNVHVFSGLVWCAECGSAFTASPGKLHVSGYRPSKYGCPNVRKTKTCHAKYTSDVVLGEFLLNYILNILNAQKQFAYIHSTDDLQKRLLHGSTFSNVDHVDPDGLASLLNMLEKCSGSDPVLLKRPRSKPKMDPELKRMMADQKKQQRALDRLNDLYLYSDDSISEREYLVRKQQITDRLQEINEAIGMMSQEPWMRTMNDEEFIRQASSFILTQKLADKQYIYYENLAESLDPEILKNFFVSILDSIILRDGRPETVVFRNGLSHTFTYKDS

SEQ ID NO: 990 - protein, 576 aa, Unknown
  Description of Unknown: Integrase B991 sequence
  PTHR30461:SF3,IPR036162,PS51737,IPR011109,PTHR30461, PS00397,PF00239,G3DSA:1.10.10.2600,IPR006119,SSF53041, SM00857,IPR025827,IPR038109,PS51736,cd03768, IPR006118,PF13408,G3DSA:3.40.50.1390,PF07508,Coil
MKKNFKMPGSGSETPIRVAIYVRVSTVYQIDKDSLPMMKQDLTSYCKYILNTDDFVIFEDAGYSGKNTDRPAYQKMMSQIRQGLFTHLLVWKIDRISRNLLDFANMYAELKDLGVTFVSKNEQFDTSTAIGEAMLKIILVFAELERNMTSERVTATMINRASNGVWNGGRIPYGYSYDKPTQVFSIDPEENKVYNFLVETYEDTQSIVHTSRKLNEAGYCSRNGNMWSPVAVWTILRNPWYKGVYRYNYYKIPGRKAIKDESEWVIVENHHPASIDTDRFDRIQATLDKNARYRNTPGRKTTQKNVHVFSGLVWCAECGSAFTASPGKLHVSGYRPSKYGCPNVRKTKTCHAKYTSDVVLGEFLLNYILNILNAQKQFAYIHSTDDLQKRLLHGSTFSNVDHVDPDGLASLLNMLEKCSGSDPVLLKRPRSKPKMDPELKRMMADQKKQQRALDRLNDLYLYSDDSISEREYLVRKQQITDRLQEINEAIGMMSQEPWMRTMNDEEFIRQTSSFILTQKLADKQYIYYENLAESLDPEILKNFFVSILDSIILRDGRPETVVFRNGLSHTFTYKDS

SEQ ID NO: 991 - protein, 576 aa, Unknown
  Description of Unknown: Integrase B992 sequence
  PTHR30461:SF3,IPR036162,PS51737,IPR011109,PTHR30461, PS00397,PF00239,G3DSA:1.10.10.2600,IPR006119,SSF53041, SM00857,IPR025827,IPR038109,PS51736,cd03768, IPR006118,PF13408,G3DSA:3.40.50.1390,PF07508,Coil
MLRENTENGSNQRIRVAIYVRVSTVYQIDKDSLPMMKQDLTAYCKYILNTEDYVIFEDAGYSGKNMDRPAYQKMMSQVRQGLFTHILVWKIDRISRNLLDFANMYAELKELGVTFVSKNEQFDTSTAIGEAMLKIILVFAELERNMTSERVTATMINRANNGIWNGGRVPFGYAYDKESQTFSFDEAEQKIVRLIFDTYEKTGSIVHTSRKLNDSGFLTRSGNVWSATAVWIILRNPWYKGVYRYNYYKIPGRKAVKDKKEWVIVENHHKPSIDPERFDKIQLTLTNNARYRRSPGRSNVQKNVHIFAGLLWCGECGAAFTSSPGKLHASGYRPSKYGCPNVRKTKTCHAKYTSDVVVGEFVINYILNIINAHKDIKLVRSPEDLQQHLLRGSTFSDICSIDSGGLSDMYDMLTSCSKSGMLFKRVKPKFKVDPELKQLQSEQKKQQRALDRLNELYLYSDESMSEREYIVRKQQITDKLDEINDAIGMMSQEPWMHTMGDSEFIQQASSFILNQKLHDRQYVYFTSLAESVDAEILKAFFGSIIDSIVITSGKIQRVTFRNGISHTFTYKNKPED

SEQ ID NO: 992 - protein, 576 aa, Unknown
  Description of Unknown: Integrase B993 sequence
  PTHR30461:SF3,IPR036162,PS51737,IPR011109,PTHR30461, PS00397,PF00239,G3DSA:1.10.10.2600,IPR006119,SSF53041, SM00857,IPR025827,IPR038109,PS51736,cd03768, IPR006118,PF13408,G3DSA:3.40.50.1390,PF07508,Coil
MKKNFKMPGSGSETPIRVAIYVRVSTVYQIDKDSLPMMKQDLTSYCKYILNTDDFVIFEDAGYSGKNTDRPAYQKMMSQIRQGLFTHLLVWKIDRISRNLLDFANMYAELKDLGVTFVSKNEQFDTSTAIGEAMLKIILVFAELERNMTSERVTATMINRASNGVWNGGRIPFGYSYDKPTQVFSIDPEENKVYNFLVETYEDTQSIVHTSRRLNEAGYRSRNGNMWSPVAVWTILRNPWYKGVYRYNYYKIPGRKAIKDESEWVIVENHHPASIDPDRFDRIQATLDKNARYRNTPGRKTAQKNVHVFSGLVWCAECGSAFTASPGKLHVSGYRPSKYGCPNVRKTKTCHAKYTSDVVLGEFLLNYILNILNAQKQFAYIHSTDDLQKRLLHGSTFSNVDHVNPDGLASLLNMLEKCSGSDPVLLKRPRSKPKMDPELKRMMADQKKQQRALDRLNDLYLYSDDSISEREYLVRKQQITDRLQEINEAIGMMSQEPWMRTMNDEEFIRQASSFILTQKLADKQYIYYENLAESLDPEILKNFFVSILDSIILRNGRPETVVFRNGLSHTFTYKDS

SEQ ID NO: 993 - protein, 576 aa, Unknown
  Description of Unknown: Integrase B994 sequence
  PTHR30461:SF3,IPR036162,PS51737,IPR011109,PTHR30461, PS00397,PF00239,G3DSA:1.10.10.2600,IPR006119,SSF53041, SM00857,IPR025827,IPR038109,PS51736,cd03768, IPR006118,PF13408,G3DSA:3.40.50.1390,PF07508,Coil
MKKNFKMPGSGSETSIRVAIYVRVSTVYQIDKDSLPMMKQDLTSYCKYILNTDDFVIFEDAGYSGKNTDRPAYQKMMSQIRQGLFTHLLVWKIDRISRNLLDFANMYAELKDLGVTFVSKNEQFDTSTAIGEAMLKIILVFAELERNMTSERVTATMINRASNGVWNGGRIPFGYSYDKPTQVFSIDPEENKIYNFILETYEDTQSIVHTSRRLNEAGYRSRNGNMWSPVAVWTILRNPWYKGVYRYNYYKTPGRKAIKDESEWVIVENHHPASIDPDRFDRIQATLDKNARYRNTPGRKTAQKNVHVFSGLVWCAECGSAFTASPGKLHVSGYRPSKYGCPNVRKTKTCHAKYTSDVVLGEFLLNYILNILNAQKQFAYIHSTDDLQKYLLRGSTFSNVDHVDPDGLASLLNMLEKCSGSDPVLLKRPRSKPKIDPELKRMMADQKKQQRALDRLNDLYLYSDDSISEREYLVRKQQITDRLQEINEAIGMMSQEPWMHTMNDEEFIRQASSFILTQKLADKQYIYYENLAESLDPEILKNFFVSILDSIILRDGRPETVVFRNGLSHTFTYKDS

SEQ ID NO: 994 - protein, 576 aa, Unknown
  Description of Unknown: Integrase B995 sequence
  PTHR30461:SF3,cd00338,SM00857,G3DSA:1.10.10.2600,IPR036162, PF13408,PS51737,G3DSA:3.40.50.1390,IPR025827,IPR006119, IPR038109,PF07508,SSF53041,IPR011109,PTHR30461, PS51736,Coil,PF00239
MKITKFPIDLSMLTEEEIDQFRQDPSTLFEGDTDVCLYLRFSSERQREQSIEGQLRDCRTFCKLNSYRITAIYVDRATTARKDVEKRVHFQEMIRDSEKKPWEYVVVWKLDRFARNRTDSALFKFRLRKNGVKVISATENISEKPEGIILEAVLEGMAEFYSADLSQKITRGMRESALKCHSIGGHVPLGYKIEDHKLVINPATAHIVQEAFELYANGETVADICRIFNTKGYRTAKGVEFNRNSFKSMFRNKRYIGVYTYKDIEVEGGVPAIIDKELFETVGHRLSKNAEAPARGKAKVDYLLAGKLFCGHCGGSMNGESGTSKTGAIHNYYTCYTRKRKHACDKKPLKKDWIEYIVAQDAMELLTDDTIQELADMAISQTEQDLRENTRIPELTDRMKETESGITNITKAIEKGIASDALMNRLVELEKEKKNLLRLLAEEEKYVCKIERSQIVYWLTEFKGGRIEDERYRRIIIDLMINSVTVWDEPDGFRITTAYNLTSCKSKTFRIAPSGEKGFGFEGSECTKKERHDLGRVFLFLLSVAGVGLPFIWFEDPALGRDPFLSQLIWKIFEME

SEQ ID NO: 995 - protein, 576 aa, Unknown
  Description of Unknown: Integrase B996 sequence
  PTHR30461:SF3,cd00338,SM00857,G3DSA:1.10.10.2600,IPR036162, PF13408,PS51737,G3DSA:3.40.50.1390,IPR025827,IPR006119, IPR038109,PF07508,SSF53041,IPR011109,PTHR30461, PS51736,Coil,PF00239
MAKKKKPAGGIAVIYARYSSHNQRDVSIEQQIEACRKHAAELGLTIIATYEDRAISGRTDNRPAFQRLMHDAEKGKFSYVLAWKSNRMGRNMMQAMVNESRLMDCGIKVYYAEEDFDDSAAGRFALRSMMNVNQFYSDNLAEDVRRGLMDNANKCMVNGRQPLGYKRGKDGKVVVDEPAAAIVREVYTRVASGELFTDIARDLNRRGIKTADKGEWNKNSFHRLCSNEKYRGIYIYGDVRIEGGIPTIIDDPLWYKVQEALRVKKLKRNGRHRPGDEDYLLTGKLRCGKCGGYMIGMSGRSKTGDIHYYYACQNRRVGRTCDKKNIRRDVIEPAVAQAIKEYCLTDDAIEWIADKTVEYWEKADRNLQLDSIEGDLAAVQSSISNVMKAIEMGVVTETTRDRLIELEKQRTDLKSKLALAKEEVVHVDRKKLISSLLLFRNGDIHDRQYQEDLFKTFLISVYVYDDDDNGHLKIVFNAFGDNNTVDLPIDFGETDNQSAFSDGVEKFDYSLHRSTKKTSEHFGCLFLFCFVYRESQKERYSKRCIALFTLTVISNSDRSRCGSSCRRHRSRRSCRP

SEQ ID NO: 996 - protein, 576 aa, Unknown
  Description of Unknown: Integrase B997 sequence
  cd03768,SM00857,G3DSA:1.10.10.2600,IPR036162,PF13408, IPR025827,G3DSA:3.40.50.1390,PS51737,IPR006119,IPR038109, PF07508,IPR011109,SSF53041,PTHR30461,PS51736, Coil,PF00239
MKKAVIYSRVSTLEQDYTSQTAELKKEAERMGYEVTHIYEEKESGFVDDRPELAKVLALTNADTDAVFVWEISRLSRRTVMVLSTIEDIEKKGILIYAKNENYRSWNEKGVKDSTSKLVLTLYASIAEAEALKFKERVKRGKRYRVLVEKKSYCNTSVFGYMKDENGRLVINEEEAEIVRDIFNKALEGYSGRRLKLYLKSKWGLDWSANTLNYLLHNTAYMGQKKVGGKTYYKAEKKKLEEGSKIRFFNPETDVVETPAIISAEVFNKVQTAILNRKTRSNAKEARNAKPKLLKGLVLCGRCGKVYTNTGRMYTCTSGTNEYSERCGSTSVATASLDSAVWNVTKEIFSEAMAKELAAQKSEPIAAEIARLKEEIEGYNEAISNLKKQVGNLLRIASKADDVADDIIEKINILKKEQQMAKAEIADREAKIALLQKRLDAPAEMTEITDEDEKFEYLHKVIEAVFVYGEHKHKILAIQYLNGITAYCIRLWKDWYWFLDRGDLVISDAVALQKNSPADLKINDSILIEVTDSNSAYYSGEDTDVEIYGRYTTEAFFAAMMKNKQLKPVAGVKKDK

SEQ ID NO: 997 - protein, 576 aa, Unknown
  Description of Unknown: Integrase B998 sequence
  PTHR30461:SF3,IPR036162,PS51737,IPR011109,PTHR30461, PS00397,PF00239,G3DSA:1.10.10.2600,IPR006119,SSF53041, SM00857,IPR025827,IPR038109,PS51736,cd03768, IPR006118,PF13408,G3DSA:3.40.50.1390,PF07508,Coil
MIRENTENGSNQRIRVAIYVRVSTVYQIDKDSLPMMKQDLTSYCKYILNTDDFVIFEDAGYSGKNTDRPAYQKMMSQIRQGLFTHLLVWKIDRISRNLLDFANMYAELKDLGVTFVSKNEQFDTSTAIGEAMLKIILVFAELERNMTSERVTATMINRANNGIWNGGRVPFGYAYDKESQTFSFDETEQKIVQLIFDTYEKTGSIVHTSRKLNDSGFLTRGGNIWSATAVWIILRNPWYKGVYRYNYYKIPGRKAVKDKKEWVIVENHHKPSIDPERFDKIQLTLTNNARYRRSPGRSNVQKNVHIFAGLLWCGECGAAFTSSPGKLHASGYRPSKYGCPNVRKTKTCHAKYTSDVVVGEFIINYILNIINAHKDIKLVRSPEDLQQHLLRGSTFSDICSIDSDGLSAMYDMLTCCSKSGMLFKRVKPKFKVDPELKHLQSEQKKQQRALDRLNELYLYSDESMSEREYIVRKQQITDKLDEINDAIGMMSQEPWMHTMGDSEFIQQASSFILNQKLHDRQYVYFTSLAESVDAEILKAFFGSIIDSIVITSGKIQRVTFRNGISHTFTYKNKPED

SEQ ID NO: 998 - protein, 576 aa, Unknown
  Description of Unknown: Integrase B999 sequence
  PTHR30461:SF3,cd00338,SM00857,G3DSA:1.10.10.2600,IPR036162, PF13408,PS51737,IPR025827,G3DSA:3.40.50.1390,IPR006119, IPR038109,PF07508,IPR011109,SSF53041,PTHR30461, PS51736,Coil,PF00239
MKKKPIEPEMQDAVIYTRYSSHNQRDCSIEQQVADCEIFARQNNLRVVKVYADRHLSGTTDNRPQFQQMLKDAAHGHWAYVICWKIDRFARNRYDSATYKFRLKKAGVRVLYAKESIPDGPEGILLESVLEGSAEYYSAALAQNIRRGMKFNAEQCKVNSGSIPFGYCKGPDGRFAIHEANAEVVREIFRKAAAGMPFVDIANDLNSRGLKTSRGGRWNKGSFRLLMNEAYIGVYHFSDTRIEGGMPALIDQGTFWAANERLKANSSVRGRHQDGGDYLLTGKLKCAHCGSYMLGFSGTGKSGELHYYYGCQKRRRERACKKANVPREWIERVVVKAALDYVLRPEVMEWIADAVMEYQEREAASAQLAALTAELEENRKATDNVMKAIEAGIITSTTKQRLLDLEAKAQDLKRAIELEKLSHVRLERDQILFWLDRFRGGSLQSQEFRRKVIDAFVSVVYLFDDHLRIAFNYSGGSNAEADFDLVMDAEAAAGELSKKFAQGHVASTKQEPDEPCVFAQGRLCSANENRLDSLKSRRFSFFRPHFWVIVCISRFWFLATTWTGDACLLHSPSDTD

SEQ ID NO: 999 - protein, 576 aa, Unknown
  Description of Unknown: Integrase B1000 sequence
  PTHR30461:SF3,SM00857,IPR036162,PF13408,IPR025827, G3DSA:3.40.50.1390,IPR006119,PF07508,IPR011109,SSF53041, PTHR30461,Coil,PS51736,cd00338,PF00239
MKKQQKCYIYTRVSTSMQVDGYSLDAQKDKLRKYAEYQEMSIAGEYSDEGKSGKSVEGRPQFKQMLADVESGKDNVDYVLVFKLSRFGRNAADVLSSLQKMQDYGVNLICVEDGIDSSKDVGKLMISVLSAVAEIERENILVQTIEGFSTSFVKGVLDNPIYCGKLAFGRRKNEKIPGTRNEYHIVKQKDYLLSDGVHEAIISEEMWNQAHRKRQETGVLQVKTHSLEHEHILSGIIKCPVCGSGMYGNVNRKKHPDGGYYKDYFYYACKHRKLVDGHRCTYKRQWNEDRINAAVEEIIRKFVKNPKFEQEIRKQIGSSIDTSELDKEYDGLKDRLSQTTGAKNRLADQMDHLSVSDKNYDKKYNDMQERLDKLYDEITDIEDAMEEVETRLYNIRQDKISEDNVYQFLLFFDKLYDKFTDLEKKTFLKSFLSDVFIYEEEQKDGRILKGLRFKFPIYMNGRNVLGVDWDNESTDETVVKLSLKKDTPKIEVTMKPDEESNYTPEEKARYPKIKEYVKNKYGVNVHTSYIAQVKRMCGLDMGENYNKSKKKNPEVKQCPQEKVEYIKDALRYFKLI

SEQ ID NO: 1000 - protein, 576 aa, Unknown
  Description of Unknown: Integrase B1001 sequence
  PTHR30461:SF3,SM00857,G3DSA:1.10.10.2600,IPR036162,PF13408, PS51737,G3DSA:3.40.50.1390,IPR025827,IPR006119,IPR038109, PF07508,SSF53041,IPR011109,PTHR30461, Coil,PS51736,cd00338,PF00239
MSYDEIVSAVIRGENLRNLPLRVTYYCRVSTDSDVQINSLENQLDYYRNYIRSNPNWTFVEGYYDEGITGVVITKRDDFKRMIRDAKLNKFDLIVTKEVSRFARDLEDSIHTIRELKEHGVGLFFENQALNTFDPNSEMILNTLFSVAQEESKKLSSRVKFGHKQAMEKGHVLGSSNITGYKKDKCKLVIVEEEAKFIRTLFELYATGEYGFHKLSKKLSAMGYLNKKGRMYDKDSLKRMIMNPKYKGFYRSHEHEIMDYRTKRRKKLPIEEQKIYKTEEEIIPAIVSEELWDKANEILITRTKSYQNNNYWSGGLKYPFSSKIYCKDCNANFQRSHGSRRKNRPTWSCGMYLQYRIEACESPIIAEIDLYNILKQIMDNIIPNKSSIVDNMLELYNNIDKTNQYDKDLAAIDKDIKVIEDKKALAFDMVFNGELTRDALKSQFDSFEENLQRLKNRKEEVLKQIEILKQSNDNIDKMSKSIQEEIDGGSIEEFIRKFVDEIIVSKVDGDRYNIKLDIFLNLFGTERSHTKGAKYIGGPLENEILYMKNQKCDTIEHKRTEHTPNQFTYDVYVETL

SEQ ID NO: 1001 - protein, 576 aa, Unknown
  Description of Unknown: Integrase B1002 sequence
  PTHR30461:SF3,IPR036162,PS51737,IPR011109,PTHR30461, PS00397,PF00239,G3DSA:1.10.10.2600,IPR006119,SSF53041, SM00857,IPR025827,IPR038109,PS51736,cd03768, IPR006118,PF13408,G3DSA:3.40.50.1390,PF07508,Coil
MKRNYKMPNSGSETHIRVAIYVRVSTVYQIDKDSLPMMKQDLTSYCKYILNTDDFVIFEDAGYSGKNTDRPAYQKMMSQIRQGLFTHLLVWKIDRISRNLLDFANMYAELKELGVTFVSKNEQFDTSTAIGEAMLKIILVFAELERNMTSERVTATMINRASNGVWNGGRIPFGYTYDKPSQVFSIDPVENKIYNFLVDTYEDTQSIVHTSRKLNEAGYRSRNGNLWSPVAVWTILRNPWYKGVYRYNYYKIPGRKAIKDESEWVVIENHHPASIDPDRFDRIQVTLDKNARYRNTPGRKTSQKNVHVFSGLIWCAECGSAFTASPGRLHKSGYRPSKYGCPNVRKTKTCHAKYTSDVVLGEFLLNYILNILNAQKQFATIRSPEDLQDHLLRGSTFSDVDYVDPDGLVSLFNMLEKCSGSDPVLLKRPRSKPKVDPELKRMMADQKKQQRALDRLNDLYLYSDDSISEREYLIRKQQITDRLQEINESIGMMSQEPWMRTMNDEEFIRQASSFILTQKLADKQYIYYENLAESLDPEILKNFFVSILDSIILRDGRPGTVVFRNGLSHTFTYKDS

SEQ ID NO: 1002 - protein, 576 aa, Unknown
  Description of Unknown: Integrase B1003 sequence
  PTHR30461:SF3,SM00857,G3DSA:1.10.10.2600,IPR036162,PF13408, IPR025827,PS51737,G3DSA:3.40.50.1390,IPR006119,IPR038109, PF07508,IPR011109,SSF53041,PTHR30461,Coil, PS51736,cd00338,PF00239
MKKRVRILLRVSSNQQLEADGDLSVQREIVLDYISKQNDWKLDNKEYFEGSNSGYKNAVKDRDVLQEALFDAKNNEYDILVVYKDDRIGRRMWEIGSYVMQLKSYGVDIYTTKDGCISPENNDVMGQMMLALRYGNAQKSSSDTGQRVKDTAQKLVKRGKFMGGKAPYGYELILSGELSKHGRALHKLKKIPEKVEVVKKIYDLSINKEFGSSKIARILNEDTYYHSLAPKDDWKSGTITSILTNPIYCGITAYKRREKIDGKYHSLDSQDWIYAEEINEEIAIIDKDIWNDIQEKRSNRSIKYRKDVLKEKGVNVLLRNDGELALIDVAYCGYCGGKLTNGSKYNYWTLKGTGEKRASKIPAYKCQTAWAGVPHDKTRMFRADKIEDIVFKYVAQYISVLQDNSEVYEKIQTNNKKEKESFNQRIKKEKQELKKITDGIEVMKSHIPDAMLGNYPLSVEVIADTIKQFEEKEKIQKQKIQELEQQYEEMEIEEQDWDEVCKIIPSWIEVFNDADKKTKRVLINKLVDKVIVKKDEITVKFKINLSKPRHRQSRMSEYNGVSKQRIRFYNYFIYSI

SEQ ID NO: 1003 - protein, 576 aa, Unknown
  Description of Unknown: Integrase B1004 sequence
  PTHR30461:SF3,IPR036162,PS51737,IPR011109,PTHR30461, PS00397,PF00239,G3DSA:1.10.10.2600,IPR006119,SSF53041, SM00857,IPR025827,IPR038109,PS51736,cd03768, IPR006118,PF13408,G3DSA:3.40.50.1390,PF07508,Coil
MKKNFKMPGSGSETPIRVAIYVRVSTVYQIDKDSLPMMKQDLTSYCKYILNTDDFVIFEDAGYSGKNTDRPAYQKMMSQIRQGLFTHLLVWKIDRISRNLLDFANMYAELKDLGVTFVSKNEQFDTSTAIGEAMLKIILVFAELERNMTSERVTATMINRASNGVWNGGRIPYGYSYDKPTQVFSIDPEENKVYNFLVETYEDTQSIVHTSRKLNEAGYRSRNGNMWSPVAVWTILRNPWYKGVYRYNYYKIPGRKAIKDESEWVIVENHHPASIDPDRFDRIQATLDKNARYRNTPGRKTAQKNVHVFSGLVWCAECGSAFTASPGKLHVSGYRPSKYGCPNVRKTKTCHAKYTSDVVLGEFLLNYILNILNAQKQFAYIHSTDDLQKRLLHGSTFSNVDHVDPDGLASLLNMLEKCSGSDPVLLKRPRSKPKMDPELKRMMADQKKQQRALDRLNDLYLYSDDSISEREYLVRKQQITDRLQEINEAIGMMSQEPWMRTMNDEEFIRQASSFILTQKLADKQYIYYENLAESLDPEILKNFFVSILDSIILRDGRPETLVFRNGLSHTFTYKDS

SEQ ID NO: 1004 - protein, 576 aa, Unknown
  Description of Unknown: Integrase B1005 sequence
  PTHR30461:SF3,IPR036162,PS51737,IPR011109,PTHR30461, PS00397,PF00239,G3DSA:1.10.10.2600,IPR006119,SSF53041, SM00857,IPR025827,IPR038109,PS51736,cd03768, IPR006118,PF13408,G3DSA:3.40.50.1390,PF07508,Coil
MIRENTENGSNQRIRVAIYVRVSTVYQIDKDSLPMMKQDLTAYCKYILNTEDYVIFEDAGYSGKNMDRPAYQKMMSQVRQGLFTHILVWKIDRISRNLLDFANMYAELKELGVTFVSKNEQFDTSTAIGEAMLKIILVFAELERNMTSERVTATMINRANNGIWNGGRVPFGYAYDKESQTFSFDETEQKIVQLIFDTYEKTGSIVHTSRKLNDSGFLTRGGNIWSATAVWIILRNPWYKGVYRYNYYKIPGRKAVKDKKEWVIVENHHKPSIDPERFDKIQITLTNNARYRRSPGRSNVQKNVHIFAGLLWCGECGAAFTSSPGKLHASGYRPSKYGCPNVRKTKTCHAKYTSDVVVGEFVINYILNIINAHKDIKLVRSPEDLQQHLLRGSTFSDICSIDSDGLSAMYDMLTCCSKSGMLFKRVKPKFKVDPELKHLQSEQKKQQRALDRLNELYLYSDESMSEREYIVRKQQITDKLDEINDAIGMMSQEPWMHTMGDSEFIQQASSFILNQKLHDRQYVYFTSLAESVDAEILKAFFGSIIDSIVITSGKIQRVTFRNGISHTFTYKNKPEN

SEQ ID NO: 1005 - protein, 576 aa, Unknown
  Description of Unknown: Integrase B1006 sequence
  PTHR30461:SF3,IPR036162,PS51737,IPR011109,PTHR30461, PS00397,PF00239,G3DSA:1.10.10.2600,IPR006119,SSF53041, SM00857,IPR025827,IPR038109,PS51736,cd03768, IPR006118,PF13408,G3DSA:3.40.50.1390,PF07508,Coil
MSINRNNTSETPKKAALYVRVSTNYQIDRDSLPMQRQELITYAQLMFGINDYVVFEDAGYSGKNTDRPEFQNMMRRIRAGEFTHLLCWKIDRISRNLLDFASMYQELKDLGVTFVSKNEQFDTSTAIGEAMLKIILVFAELERNMTSERVTATMLSRAQNGLWNGGRVPYGYDYDKDSKTFSINQEEAFLVRKMYDLYSEHRSLVMVSRTLNEDGYASRAGNDWSPVSIFIILTNPFYTGIYRYNHYKIPGLKIEKDPSEWIEVPDHHPRIISDEQFDNMNRILQSNSRSKRLPGQQHTSKGIHIFGGLLYCGTCGSQYVSTPSRLLASGYRPSKYACPNLRKKKTCNTKSISDPVIGEFVLNYVLNMMHARAASSSIHDTSELQDALLNGGTFQNVDHIGKDGLDSCFHMFSSTPLDGKRFRKPKKATTIDPELKRLRAEKRKTERALDRLMNLYLYADNPISEKDFVIRKQALDDYLKEINENLGMIDRGRGIETISDENFIKRASYFIMSKELAGKDYIYFKKLAMDMDAEILRDFFQEIIDSIVMEGSNVKEIVFRNGLAHTFFYGSIPKFV

SEQ ID NO: 1006 - protein, 576 aa, Unknown
  Description of Unknown: Integrase B1007 sequence
  PTHR30461:SF3,IPR036162,PS51737,IPR011109,PTHR30461, PS00397,PF00239,G3DSA:1.10.10.2600,IPR006119,SSF53041, SM00857,IPR025827,IPR038109,PS51736,cd03768, IPR006118,PF13408,G3DSA:3.40.50.1390,PF07508,Coil
MKKNFKMPGSGSETPIRVAIYVRVSTVYQIDKDSLPMMKQDLTSYCKYILNTDDFVIFEDAGYSGKNTDRPAYQKMMSQIRQGLFTHLLVWKIDRISRNLLDFANMYAELKDLGVTFVSKNEQFDTSTAIGEAMLKIILVFAELERNMTSERVTATMINRASNGVWNGGRIPFGYSYDKPTQVFSIDPEENKIYNFMVETYEDTQSIVHTSRRLNEAGYRSRNGNMWSPVAVWTILRNPWYKGVYRYNYYKIPGRKAIKDESEWVIVENHHPASIDPDRFDRIQATLDKNARYRNTPGRKTAQKNVHVFSGLVWCAECGSAFTASPGKLHVSGYRPSKYGCPNVRKTKTCHAKYTSDVVLGEFLLNYILNILNAQKQFAYIHSTDDLQKRLLHGSTFSNVDHVDPDGLASLLNMLEKCSGSDPVLLKRPRSKPKMDPELKRMMADQKKQQRALDRLNDLYLYSDDSISEREYLVRKQQITDRLQEINEAIGMMSQESWMRTMNDEEFIRQASSFILTQKLADKQYIYYENLAESLDPEILKNFFVSILDSIILRDGRPETVVFRNGLSHTFTYKDS

SEQ ID NO: 1007 - protein, 576 aa, Unknown
  Description of Unknown: Integrase B1008 sequence
  PTHR30461:SF3,IPR036162,PS51737,IPR011109,PTHR30461, PS00397,PF00239,G3DSA:1.10.10.2600,IPR006119,SSF53041, SM00857,IPR025827,IPR038109,PS51736,cd03768, IPR006118,PF13408,G3DSA:3.40.50.1390,PF07508,Coil
MKKNFKMPGSGSETPIRVAIYVRVSTVYQIDKDSLPMMKQDLTSYCKYILNTDDFVIFEDAGYSGKNTDRPAYQRMMSQIRQGLFTHLLVWKIDRISRNLLDFANMYAELKDLGVTFVSKNEQFDTSTAIGEAMLKIILVFAELERNMTSERVTATMINRASNGVWNGGRIPFGYSYDKPNQVFSIDPEENKIYNFMVETYEDTQSIVHTSRRLNEAGYRSRNGNMWSPVAVWTILRNPWYKGVYRYNYYKIPGRKAIKDESEWVIVENHHPASIDPDRFDRIQATLDKNARYRNTPGRKTAQKNVHVFSGLVWCAECGSAFTASPGKLHVSGYRPSKYGCPNVRKTKTCHAKYTSDVVLGEFLLNYILNILNAQKQFAYIHSTDDLQKRLLHGSTFSNVDHVDPDGLASLLNMLEKCSGSDPVLLKRPRSKPKMDPELKRMMADQKKQQRALDRLNDLYLYSDDSISEREYLVRKQQITDRLQEINEAIGMMSQEPWMRTMNDEEFIRQASSFILTQKLADKQYIYYENLAESLDPEILKNFFVSILDSIILRDGRPETVVFRNGLSHTFTYKDS

SEQ ID NO: 1008 - protein, 576 aa, Unknown
  Description of Unknown: Integrase B1009 sequence
  PTHR30461:SF3,cd00338,SM00857,G3DSA:1.10.10.2600,IPR036162, PF13408,IPR025827,G3DSA:3.40.50.1390,PS51737,IPR006119, IPR038109,PF07508,IPR011109,SSF53041,PTHR30461, PS51736,Coil,PF00239
MKKRVRILLRVSSNQQLEADGDLSVQREIVLDYISKQNDWKLDNKEYFEGSNSGYKNAVKDRDVLQEALIDAKNNEYDILVVYKDDRIGRRMWEIGSYVMQLKSYGVDIYTTKDGCISPENNDVMGQMMLALRYGNAQKSSSDTGQRVKDTAQKLVKRGKFMGGKAPYGYELILSGELSKHGRALHKLKKIPEKVEVVKKIYDLSINKEFGSSKIARILNEDTYYHSLAPKDDWKSGTITSILTNPIYCGITAYKRREKINGKYHSLDSQDWIYAEEINEEIAIIDKDIWNDIQEKRSNRSIKYRKDVLKEKGVNVLLRNDGELALIDVAYCGYCGGKLTNGSKYNYWTLKGTGEKRASKIPAYKCQTAWAGVPHDKTRMFRADKIEDIVFKYVAQYISVLQDNSEVYEKIQTNNKKEKESFNQRIKKEKQELKKISDGIEVMKSHIPDAMLGNYPLSVEVIADTIKQFEEKEKIQKQKIQELEQQYEEMEIEEQDWDEVCKIIPSWIEVFNDADKKTKRVLINKLVDKVIVKKDEITVKFKINLSKPRHRQSRMSGYNGVSKQRIRFYNYFIYSI

SEQ ID NO: 1009 - protein, 575 aa, Unknown
  Description of Unknown: Integrase B1010 sequence
  PTHR30461:SF3,IPR036162,PS51737,IPR011109,PTHR30461, PS00397,PF00239,G3DSA:1.10.10.2600,IPR006119,SSF53041, SM00857,IPR025827,IPR038109,PS51736,cd03768, IPR006118,PF13408,G3DSA:3.40.50.1390,PF07508,Coil
MNKIIDTLNTQKAAIYIRVSTHHQIDKDSLPLQREDLINYAKYALNIDNYELFEDAGYSAKNTERPSYQYMMSKLRTGEFSHLLVWKIDRISRNLLDFATMYEELKTLGVTFVSKNEQFDTSSAIGEAMLKIILVFAELERNMTSERVSAVMLSRATNGQWNGGRVPYGYNYDKSTKQFSIHPIEGNYIKKLYDLYFETQSMLAVAKYFNEHGIKTKTGNNWSPTTIGKILASRFYLGEYQYNLHKDGIGGAGVASLKPEDEWITVKDHHPAIIEIEQWDKCAEIRAYNHRRSNAPKRYKRKNTHIFAGLIICGKCGSTYQATIDRARTGGYRPSIYLCSRRKQYSDCQNKYMSDITLGPFILNYISNIIKANANMGKTTTPDMFKKKLLRGDVFKDVKDIAPSGLNEMYNMIVSKKFNSDPFTSTVHRDESQPDFASERELLISEKRKYLRALDRLKTLYLYNDNAMAEKDYIIENKNILDNLKRVDERLEEIEKNSSQNFTITDSEFIEKASYFIISQELSNQRYINFNSLIQHIDTNVLKNFIQSVIKKIVVLDGRITSIQFKNGIEHDFLY

SEQ ID NO: 1010 - protein, 575 aa, Unknown
  Description of Unknown: Integrase B1011 sequence
  PTHR30461:SF3,IPR036162,PS51737,IPR011109,PTHR30461, PF00239,G3DSA:1.10.10.2600,IPR006119,SSF53041,cd00338, SM00857,IPR025827,IPR038109,PS51736,mobidb-lite, PF13408,G3DSA:3.40.50.1390,PF07508,Coil
MGKKQKTNGGDAVIYARYSSHNQRDVSIEQQVEACRKHAAELGLTVTATYEDRAISGKTDKRPSFQRMMRDAEQHKFAYVLAWKSNRIGRNMMQALVNESRLVDCGVKVFYAEEDFDDNAAGRFALRSMMNVNQFYIENMAEDVKRGLYDNAKKGLVNGSLPLGYKRGADGKPEIDEPKAAIVREIYTRVAAGELFASIADDLNARGIKTARGREWNKGSFHVLCHNDRYRGIYMYGDIRIPGGMPRIISDELFYDAQEAYGMKKDNRYGRARHGAENYLLTGKLYCGHCGGYMVGISGTSKTGEMHYYYACQKHRLEHTCEKKAIRRDVIENAVARAIMMYCLDDETIDFIVDSTIAYFKQKDHELHIEAMENELAAVQQAISNLMKAIEAGIITPTTRTRLLDLEEQQSKLSAKINTAKAERVEINRDDLIAGLQLFRTGDIKNKKFLAKLFNTFLIAVYLYDDNRLKIVFSFTGNHNSVEIPLELDNDCPDSEIVSDETEVRMSHLECRKNLGSSPSSGEAEKDDDCSDGRFVRTAPLPPHSKCTVRTLGSNVTIQMVGSVFVLYCEIPTRQ

SEQ ID NO: 1011 - protein, 575 aa, Unknown
  Description of Unknown: Integrase B1012 sequence
  PTHR30461:SF3,IPR036162,PS51737,IPR011109,PTHR30461, PS00397,PF00239,G3DSA:1.10.10.2600,IPR006119,SSF53041, SM00857,IPR025827,IPR038109,PS51736,cd03768, IPR006118,PF13408,G3DSA:3.40.50.1390,PF07508,Coil
MAYNKLSLPGHIRVAIYVRVSTMHQIDRDSLPMQKQDLLAYAKIMLGTDDCIIFEDAGYSGKNTDRPKFQEMMSQIRAGGFTHLLVWKIDRISRNLLDFATMYNELKELGVVFVSKNEQFDTSTAMGEAMLKIVLIFAELERNMTSERVTATMISRASNGLWNGGRVPYGYEWDSKSKEFSYNTDEYNIARLIHDLYEEERSLIREARILNAKGYRTRSGNEWNPVSLHIILRNVFYCGDYRYNVLKEGDRQKVKAESEWITIENHHPAIVSREQKMRIISILDSNSRINKKKNNYKSGKYTHIFSGLIFCGSCGNPMGAAPVSLRADGWRYSKYSCPTRRKSSMACIGKSTSDPIVGEFVFNYILNMLNTQRDFSKITSIDEMQDKLLTGNTFNYIDHIQEEGVLDLYDVLAKGNVQGAIYGKGVSIPSKQEKSSEIASLRVEKQKTERALDRLRNLYLYSEDAMSEKEYILERTRLTEKLEEINEEIGMMQSDEWQQSVSDEMFIARASEFIIAQKLTDRNYVNYKRLAKSVDAEVLRSFVTSIIDSIIIQDGKVQRITFKNGLSHTFIFKKS

SEQ ID NO: 1012 - protein, 575 aa, Unknown
  Description of Unknown: Integrase B1013 sequence
  PTHR30461:SF3,IPR036162,PS51737,IPR011109,PTHR30461, PS00397,PF00239,G3DSA:1.10.10.2600,IPR006119,SSF53041, SM00857,IPR025827,IPR038109,PS51736,cd03768, IPR006118,PF13408,G3DSA:3.40.50.1390,PF07508,Coil
MNKIIDTLNTQKAAIYIRVSTHHQIDKDSLPLQREDLINYAKYALNIDNYEIFEDAGYSAKNTERPSYQYMMSKLRTGEFSHLLVWKIDRISRNLLDFATMYEELKTLGVTFVSKNEQFDTSSAIGEAMLKIILVFAELERNMTSERVSAVMLSRATNGQWNGGRVPYGYNYDKSTKQFSIHPIEGNHIKKLYDLYLETQSMLAVAKYFNEHGIKTKTGNNWSPTTIGKILASRFYLGEYQYNLHKDGIGGAGVASLKPEDEWITVKDHHPAIIEIEQWDKCAEIRAYNHRRSNAPKRYKRKNTHIFAGLIICGKCGSTYQATIDRARTGGYRPSIYLCSRRKQYSDCQNKYMSDITLGPFILNYISNIIKANANMGKTTTPDMFKKKLLRGDVFKDVKDIAPSGLNEMYNMIVSKKFNSDPFTSTVHRDESQPDFASERELLISEKRKYLRALDRLKTLYLYNDNAMAEKDYIIENKNILDNLKRVDERLEEIEKNSSQNFTITDSEFIEKASYFIISQELSNQRYINFNSLIQHIDTNVLKNFIQSVIKKIVVLDGRITSIQFKNGIEHDFLY

SEQ ID NO: 1013 - protein, 575 aa, Unknown
  Description of Unknown: Integrase B1014 sequence
  PTHR30461:SF3,IPR036162,PS51737,IPR011109,PTHR30461, PS00397,PF00239,G3DSA:1.10.10.2600,IPR006119,SSF53041, SM00857,IPR025827,IPR038109,PS51736,cd03768, IPR006118,PF13408,G3DSA:3.40.50.1390,PF07508,Coil
MAYNKLSLPGHIRVAIYVRVSTMHQIDRDSLPMQKQDLLAYAKIMLGTDDCIIFEDAGYSGKNTDRPKFQEMMSQIRAGGFTHLLVWKIDRISRNLLDFATMYNELKELGVVFVSKNEQFDTSTAMGEAMLKIVLIFAELERNMTSERVTATMISRASNGLWNGGRVPYGYEWDSKSKEFSYNTDEYNIARLIHDLYEEERSLIREARILNAKGYRTRSGNEWNPVSLHIILRNVFYCGDYRYNVLKEGDRQKVKAESEWITIENHHPAIVSREQKMRIISILDSNSRINKKKNNYKSGKYTHIFSGLIFCGSCGNPMGAAPVSLRADGWRYSKYSCPTRRKSSMACIGKSTSDPIVGEFVFNYILNMLNTQRDFSKITSIDEMQDKLLTGNTFNYIDHIQEEGVLDLYDVLAKGNVQGAIYGKGVSIPSKQEKSSEIASLRVEKQKTERALDRLRNLYLYSEDAMSEKEYILERTRLTEKLEEINEEIGMMQSDEWQQSVSDEMFIARASEFIIAQKLTDRNYVNYKRLAKSVDAEVLHSFVTSIIDSIIIQDGKVQRITFKNGLSHTFIFKKS

SEQ ID NO: 1014 - protein, 575 aa, Unknown
  Description of Unknown: Integrase B1015 sequence
  PTHR30461:SF3,IPR036162,PS51737,IPR011109,PTHR30461, PS00397,PF00239,G3DSA:1.10.10.2600,IPR006119,SSF53041, SM00857,IPR025827,IPR038109,PS51736,cd03768, IPR006118,PF13408,G3DSA:3.40.50.1390,PF07508,Coil
MNKIIDTLNTQKAAIYIRVSTHHQIDKDSLPLQREDLINYAKYALNIDNYEIFEDAGYSAKNTERPSYQYMMSKLRTGEFSHLLVWKIDRISRNLLDFATMYEELKTLGVTFVSKNEQFDTSSAIGEAMLKIILVFAELERNMTSERVSAVMLSRATNGQWNGGRVPYGYNYDKSTKQFSIHPIEGNHIKKLYDLYLETQSMLAVAKYFNEHGIKTKTGNNWSPTTIGKILASRFYLGEYQYNLHKDSIGGAGVASLKPEDEWITVKDHHPAIVSIEQWDKCAEIRAYNHRRSNAPKRYRRKNTHIFAGLIICGECGSTYQATIDRARTGGYRPSIYLCSRRKQYSDCQNKYMSDITLGPFILNYISNIIKANANMGKTTTPDMFKKKLLRGDVFKDVKDIAPSGLNEMYNMIVSKKFNSDPFTSAVNRDESQPDFASERELLISEKRKYLRALDRLKTLYLYNDNAMAEKDYIIENKNILDNLKRVDERLEEIEKNSSQNFTITDSEFIEKASYFIISQELSNQRYINFNSLIQHIDTNVLKNFIQSVIKKIVVLDGRIISIQFKNGIEHDFLY

SEQ ID NO: 1015 - protein, 575 aa, Unknown
  Description of Unknown: Integrase B1016 sequence
  cd03768,SM00857,G3DSA:1.10.10.2600,IPR036162,PF13408, IPR025827,G3DSA:3.40.50.1390,PS51737,IPR006119,IPR038109, PF07508,SSF53041,IPR011109,PTHR30461,PS51736, Coil,PF00239
MRGVIYSRVSTIDQDYSKQTNELKDFAKKNNIDIVHIFEEKESGFNNDRPEFKKVQQLTKDEVDILLVWELSRLSRRSIYIQQQVRNFADKGICIYTKKENLYTLNEDGTENKSAMLLIGFTSIIAEQEVATLKERTISSKRNRIIKEGYSYTYNAPYGYIYDKETKKLSINPIEAEVVKRIFELSANGYSAYRIPVLLNADGIPTKTGKKWTLPTIATILTNTVYKGEAHYKLKGEKPKEGKRYSRTTEYAVVETPAIVTSELFDLSRKMMKERLSRSKSSGVKYNPLLRGLIVCPYCNVKYIFNRRDNLYSCHERYEKATNKTTQCFSKSISITKIDEIIWNLVKILFSKELAAGKTDEQIEPINRELENYKLQVVNLEHKQNELTEKANIIANAAIDIKIQFPNLPDLYLNKLKEVESINKEAGRYLNEIKHLEKLMESCRNKIQAINTLSDESIVVESIVDETEKYDLVHKVIDNIVVYGEGHYTLVVVTFQTGQVAYIGYYSFKRYKYYTIFYPSQSVWFDTEKRLGYIMTMKDSKSLKLSLETVTKEYSITDFINMFDVPENRHYYENQ

SEQ ID NO: 1016 - protein, 575 aa, Unknown
  Description of Unknown: Integrase B1017 sequence
  cd03768,SM00857,G3DSA:1.10.10.2600,IPR036162,PF13408, PS51737,G3DSA:3.40.50.1390,IPR025827,IPR006119,IPR038109, PF07508,IPR011109,SSF53041,PTHR30461,PS51736, Coil,PF00239
MRGAIYSRVSTLDQDYNRQTNELKEYAQYMGIEITHVFEEKESGFNDDRPEFAKLKELTKDDIDIVLVWELSRLSRRSLYLQQQIEYFTKKGICVYAKKENLRTLDEKGEEDRNTKFIIGIIAMIAEQEVATLKSRSISSKRNKIINEGNSYTYKAPYGYDYNTETKKLSINEEEAKIVRRVIELSANGYSSARIALILNAENIPTRSKTKIWTMGTINSMLANPVYKGEAEYMLKGTEPKKGKRYKRPIEVAIVKTPAIVSAELYDLSREKMKGRAFRSKSTGVKHFQLLRGLIYCPYCKIKYTYEGGRDLYVCHDKHKKSKNKPDCFSKAIKATRIEKIVWELVKLLFAQELATGKAQEQEEPLRQEIEAHKKLLMGIEEKLNDLTTQANAIVNAAIDIKREMPNMPDLYINKIREAASLDKESKKYQYEKDRLNKLILSCEDKIKAINSLSNEKVLVDSITDDMERYELIHKVIDHMIIYGEDSAYSLVVVTFKTGQDVYIGYKSKGYQYYTIFYPSQSVWVDTEKRLGCIMTMKDPKSLELSLETITKEYSITDFIKMFDIPKNRRYYENQ

SEQ ID NO: 1017 - protein, 575 aa, Unknown
  Description of Unknown: Integrase B1018 sequence
  PTHR30461:SF3,IPR036162,PS51737,IPR011109,PTHR30461, PF00239,G3DSA:1.10.10.2600,PF14287,IPR006119,SSF53041, IPR025378,SM00857,IPR025827,cd03770,IPR038109, PF13408,G3DSA:3.40.50.1390,PF07508,Coil
MTATQKHDIIPICTTVLSADQPPKEDIMLDQQKITILYCRLSNEDAQEGESNSIANQREYLTRYARDHGYTNLKILVDDGYTGTNFNRPGVQEGFELVKQGLVGCWLVKDLSRFGRDYLTVGQYTDIIFPSYDVRFIAINDGVDSNRGDSEGFAAIRNLFNEWYPRDTSKKVRVSLRQRGTSGKHMGKPPYGYRCDPEDKDHWILDEEAAPVVKLIFDLCIDGKGPEQIARILEEKQIMTAKALYAKRKKKPMPERPYHWGNQSIAGILERQEYTGCTCNFKTYSKSYKLKKRIPNEPENMFYLPDTQEAIVSQAQFDRVQELRKNKRRPAKAERQGLFSGLLFCADCGGKLHFATSKSFEGKQDHYVCNNYKSNRGTCTAHYIREDVLREIVLERIRAVNEYIRSDVDGFQEEWLQCRRTDQERSIRDDKKKLEQAKKRLADLDVIIARLYEDYVLGNLNQDRYRKMSADYEAEQERLKLEIEVIEEWVEQREEMNDGLDAFIALTQKYVDVEELTQTIVNEYIKKIIVYAPDKSSGKRKQKVKIFFNFVDDVDIPVISEPIVTQTTYERRKTA

SEQ ID NO: 1018 - protein, 575 aa, Unknown
  Description of Unknown: Integrase B1019 sequence
  PTHR30461:SF3,IPR036162,PS51737,IPR011109,PTHR30461, PF00239,G3DSA:1.10.10.2600,IPR006119,PF14287,SSF53041, IPR025378,SM00857,IPR025827,cd03770,IPR038109, PF13408,G3DSA:3.40.50.1390,PF07508,Coil
MTATQKHDIIPVCTTVLSADQQPKEDIMLDQQKITILYCRLSNEDAQDGESNSIANQREYLTRYARDHGYTNLKILVDDGYTGTNFNRPGVQEGFELVKQGLVGCWLVKDLSRFGRDYLTVGQYTDIIFPSYDVRFIAVNDGVDSNRGDSEGFAAIRNLFNEWYPRDTSKKVRVSLRQRGTSGKHMGKPPYGYRCDPEDKDHWILDEEAAPVVKLIFDLCIDGKGPEQIARILEEKQILTAKALYAKRKKKPMPERPYHWSNQSIVGILERQEYTGCTCNFKTYSKSYKLKKRIPNEPENMFYLPDTQEAIVSQAQFDRVQELRKNKRRPAKAERQGLFSGLLFCADCGGKLHFATSKSFEGKQDHYVCNNYKSNRGTCTAHYIREDVLREIVLERIRAVNEYIRSDVDGFQEEWLQCRRTDQERSIRDDKKKLEQAKKRLADLDVIISRLYEDYVLGNLNQDRYRKMSADYEAEQERLKLEIEVIEEWVEQREEMNDGLDAFIALTQKYVDVEELTQTIVNEYIKKIVVYAPDKSSGKRKQKVKIFFNFVDDVDIPVISEPIVTQTTYERRKTA

SEQ ID NO: 1019 - protein, 575 aa, Unknown
  Description of Unknown: Integrase B1020 sequence
  cd03768,SM00857,G3DSA:1.10.10.2600,IPR036162,PF13408, IPR025827,G3DSA:3.40.50.1390,PS51737,IPR006119,IPR038109, PF07508,IPR011109,SSF53041,PTHR30461,PS51736, Coil,PF00239
MRGVIYSRVSTIDQDYSKQTNELKDFAKKNNIDIVHIFEEKESGFNNDRPEFKKVQQLTKDEVDILLVWELSRLSRRSIYIQQQVRNFADKGICIYTKKENLYTLNEDGTENKSAMLLIGFTSIIAEQEVATLKERTISSKRNRIIKEGYSYTYNAPYGYIYDKETKKLSINPIEAEVVKRIFELSANGYSAYRIPVLLNADGIPTKTGKKWTLSTIATILTNTVYKGEAHYKLKGEKPKEGKRYSRTTEYAVVETPAIVTSELFDLSRKMMKERLSRSKSSGVKYNPLLRGLIVCPYCNVKYIFNRRDNLYSCHERYEKATNKTTQCFSKSISINKIDEIIWNLVKILFSKELAAGKTDEQIEPINRELENYKLQVVNLEHKQNELTEKANIIANAAIDIKIQFPNLPDLYLNKLKEVESINKEAGRYLNEIKHLEKLMESCRNKIQAINTLSDESIVVESIVDETEKYDLVHKVIDNIVVYGEGHYTLVVVTFQTGQVAYIGYYSFKRYKYYTIFYPSQSVWFDTEKRLGYIMTMKDSKSLKLSLETVTKEYSITDFINMFDVPENRHYYENQ

SEQ ID NO: 1020 - protein, 575 aa, Unknown
  Description of Unknown: Integrase B1021 sequence
  PTHR30461:SF3,cd00338,SM00857,G3DSA:1.10.10.2600,IPR036162, PF13408,IPR025827,G3DSA:3.40.50.1390,PS51737,IPR006119, IPR038109,PF07508,SSF53041,IPR011109,PTHR30461, PS51736,Coil,PF00239
MKKKFSSVPEPDIQDAVIYARYSSHSQRDCSIEQQVADCELFAQQNGLRVVRIYADRHLSGTTDNRPQFQQMLKDAAHGHWPFVICWKIDRFARNRYDSATYKYKLKKAGVRVLYAKESIPDGPEGILLESVLEGSAEYYSASLAQNIRRGMRFNAENCKVNSGSIPFGYCKGPDGRFAIHETNAEIVREIFRKAAAGVPFVDIATELNNKGLKTSRGGRWNKNSFVLLKNESYIGVYHFSDIRIEGGMPAIIDPGTFLAANERMNANRRVRGRHHDGGDYLLTGKLKCAHCGSYMIGFSGTAKNGESHYYYGCQKRRRERACKKANVPREWIERVVVKAALDYVLRPDVMEWITDAVMEYQEREAASSQLAALTAELEENQNATDNLMRAIEAGIITATTKQRLLDLETKAKDLKRAIELEKLSHVRLEREQILYWLEQFQGGSLQSQEFRRKVIDTFVSVVYLSDDHLRIAFNYSGQNRSEADFNLIMDAETASADYPINSFSLPLSPPHKKNPNLFPSGKGSDFFVCRISYRVIFISSLSSAAFLSMPPAYPVRLPFAPTTRWQGMMIEITL

SEQ ID NO: 1021 - protein, 575 aa, Unknown
  Description of Unknown: Integrase B1022 sequence
  PTHR30461:SF3,SM00857,G3DSA:1.10.10.2600,IPR036162,PF13408, PS51737,G3DSA:3.40.50.1390,IPR025827,IPR006119,IPR038109, PF07508,IPR011109,SSF53041,PF00239,PTHR30461, PS51736,Coil,cd00338
MKKKFSSVPDPDIQDAVIYARYSSHSQRDCSIEQQVADCELFAQQNGLRVVKIYADRHLSGTTDNRPEFQQMLKDAAHGHWPFVICWKIDRFARNRYDSATYKYKLKKAGVRVLYAKESIPDGPEGILLESVLEGSAEYYSASLAQNIRRGMRFNAENCKVNSGSIPFGYCKGPDGRYAIHETNAEIVRDIFRKAAAGVPFVDIATELNNKGLKTSRGGRWNKNSFVLLKNESYIGVYHFSDIRIEGGMPAIIDPGTFLAANERMNANRRVRGRHHDGGDYLLTGKLKCAHCGSYMIGFSGTAKNGESHYYYGCQKRRRERACKKANVPREWIEKVVVKAALDYVLQPDVMEWITDAVMEYQEREAASSQLAALTAELEENQKATDNVMKAIEAGIITATTKQRLLDLETKAKDLKRAIELEKLSHVRLEREQILYWLEQFQGGSLQSQEFRRKVIDTFVSVVYLSDDHLRIAFNYSGQNRSEADFNLIMDAETASADYPMNSFSLPLCPPHKKNPNLFPSGKGSDFFVYRISYRVIFISSLSNAAFLSMPPAYPVRLPFVPTTRWQGMMIEITL

SEQ ID NO: 1022 - protein, 575 aa, Unknown
  Description of Unknown: Integrase B1023 sequence
  PTHR30461:SF3,IPR036162,PS51737,IPR011109,PTHR30461, PF00239,G3DSA:1.10.10.2600,IPR006119,PF14287,SSF53041, IPR025378,SM00857,IPR025827,cd03770,IPR038109, PF13408,G3DSA:3.40.50.1390,PF07508,Coil
MTATQKHDIIPICTTVLSADQPPKEDIMLDQQKITILYCRLSNEDAQEGESNSIANQREYLTRYARDHGYTNLKILVDDGYTGTNFNRPGVQEGFELVKQGLVGCWLVKDLSRFGRDYLTVGQYTDIIFPSYDVRFIAINDGVDSNRGDSEGFAAIRNLFNEWYPRDTSKKVRVSLRQRGTSGKHMGKPPYGYRCDPEDKDHWILDEEAAPVVKLIFDLCIDGKGPEQIARILEEKQILTAKALYAKRKKKPMPERPYHWGNQSIVGILERQEYTGCTCNFKTYSKSYKLKKRIPNEPENMFYLPDTQEAIVSQAQFDRVQELRKNKRRPAKAERQGLFSGLLFCADCGGKLHFATSKNFEGKQDHYVCNNYKSNRGTCTAHYIREDVLREIVLERIRAVNEYIRSDVDGFQEEWLQCRRTDQERSIRDDKKKLEQAKKRLADLDVIIARLYEDYVLGNLNQDRYRKMSADYEAEQERLKLEIEVIEEWVEQREEMNDGLDAFIALTQKYVDVEELTQTIVNEYIKKIIVYAPDKSSGKRKQKVKIFFNFVDDVDIPVISEPIITQTTYEHRKTA

SEQ ID NO: 1023 - protein, 575 aa, Unknown
  Description of Unknown: Integrase B1024 sequence
  PTHR30461:SF3,SM00857,G3DSA:1.10.10.2600,IPR036162,PS51737, G3DSA:3.40.50.1390,IPR006119,IPR038109,PF07508,IPR011109, SSF53041,PTHR30461,Coil,PS51736,cd00338, PF00239
MYDIYNQKPTSRKVVIYARVSTEHEAQLSALENQKDWYKPILQQHPEWDIVKMYVDEGITGTSAKKRPQFMQMIQDASSGNFDLILTREVSRFARNTVDTLQYTRELKSKGVEVFFLNDNIKTFDGDGELRLTIMATLAQDESRKTSVRVKSGQQTSMENGVFYGNGNILGYDRVGKDMVINPEQAKTVRMIFDWYLDGWGMRKIQFELEKAGRLTAMGKSNWHVSNISKILRNSFYCGIITYHKEFTPDFLEQKKIRNFGDMEFTQVRGNHKPIITEEEYDQAQKRINSRRKTLSVDTSGQRMYGEKPPSDVWVKLLECECGHKFNRKMWHNTTEGKQYGYQCYSSIRTGTVRTRLNKGLPIDGICQTPMIAGWKLQMMAKYIFKNYLSDTDQVLSLAESMLEKHIDDEEEVCDNTDIINQKKEELQKLLKRLDNLIEMRADGELARDIFILKKESTENSISQLKKELAELEPSEIESEIDEVTSKEKITILKYALDQYTNFDSDADIPESVIEAFVEKIIARKDGFDWYLRFNPEESPMGCLVDGKRKRGAKVSSFCSPQHRQLSLRRMHNYK

SEQ ID NO: 1024 - protein, 575 aa, Unknown
  Description of Unknown: Integrase B1025 sequence
  SM00857,G3DSA:1.10.10.2600,IPR036162,PF13408,IPR025827, G3DSA:3.40.50.1390,PS51737,IPR006119,IPR038109,PF07508, SSF53041,IPR011109,PTHR30461,Coil,PS51736, cd00338,PF00239
MAYRKITDIKDTIGMRAVFYARVSTAEEEQLNAIELQIEENRGCIKDHGWKLVGEYIDRSKSGTMIKGRDDYQRLYEDLYEDLFDIVVIKDQERLQRNTLDWYLFINRVVQTGKLLFMYMDGKFYSPDDALITGVRAIIAEEFSRNLSKKLHNYHDHRIEKARQGQEIALQGSGNVYGWDKKDGKYYINPEQAKVRRLMCEGIMARKGSTLIAKELNDAGYRNTVGKPWKPMDIPKFVYDCKNVGTMIINKERHDFESKQTIKLPKEEWVYVENALPPIVTQEEWDLICKIHEERVIATGSDRRGKKTSGYSFSGKLVCGICGAPYWRKQRVSKDEYWVCSTKQTKGRRTRKRDSTMGKAGEINPLGCDNENISYNSLMEIMGVVSERLQANTDTIKHDMINWLTKLRKQLLEANGGHTEADLQRELSRKSKLLDAYLDGILNKQEYQKKAEELDERIIQLKAETEKNKANSGDIAEIDKVLANIDEEVSRYVDGNEKLKVEYLLEHLEQVQIFPDKVIVIVPILSEGIVVEKAQYVSREKRRRKKHGYENDFESYPARCWRGSAFRRKSYQSQL

SEQ ID NO: 1025 - protein, 575 aa, Unknown
  Description of Unknown: Integrase B1026 sequence
  cd03768,SM00857,G3DSA:1.10.10.2600,IPR036162,PF13408, IPR025827,PS51737,G3DSA:3.40.50.1390,IPR006119,IPR038109, PF07508,SSF53041,IPR011109,PTHR30461,PS51736, Coil,PF00239
MRGVIYSRVSTIDQDYSKQTNELKDFAKKNNIDIVHIFEEKESGFNNDRPEFKKVQQLTKDDVDILLVWELSRLSRRSIYIQQQVKDFADKGICIYTKKENLYTLNEDGTENKSAMLLIGFTSIIAEQEVATLKERTISSKRNRIIKEGYSYTYNAPYGYIYDKETKKLSINPIEAEVIKRIFELSANGYSAYRIPVLLNADGIPTKTGKKWTLPTIATILTNTVYKGEAHYKLKGEKPKEGKRYSKTTEYAVVETPAIVTSELFDLSRKMMKERLSRSKSSGVKYNPLLRGLIVCPYCNVKYIFNRRDNLYSCHERYEKATNKTIQCFSKSISINKIDEIIWNLVKILFSKELAAGKTDEQIEPINRELESYRLQVVNLEHKQNELTQKANIIANAAIDIKIQFPNLPDLYLNKLKEVESINKEAGKYLNEIKHLEKLMESCRNKIQAINTLSDESIVVESIIDETEKYDLVHKVIDNIIIYGEGHYTLVVVTFQTGQVAYIGYYSFKRYKYYTIFYPSQSVWFDTEKRLGYITTMKDPKSLELSLETVTKEYSITDFINMFDTPENRHYYENQ

SEQ ID NO: 1026 - protein, 575 aa, Unknown
  Description of Unknown: Integrase B1027 sequence
  cd03768,PTHR30461:SF3,SM00857,G3DSA:1.10.10.2600,IPR036162, PF13408,IPR025827,G3DSA:3.40.50.1390,PS51737,IPR006119, IPR038109,PF07508,IPR011109,SSF53041,PTHR30461, PS51736,Coil,PF00239
MKTKDKPQAKQYVIYSRKSKFTGKGESIENQIELCRQYIAMHFGEEAAENVLVYEDEGFSGGNLERPQFKKMMKDSQKIAFAAIVVYRLDRISRNIGDFAKLIEDLGDRHIDFISIREQFDTSSPMGRAMMYIASVFSQLERETIAERIRDNMHELSKTGRWLGGTTPTGYASESLSSVTVDGKVKKACKLKPIPEEIQLVKTIFSVFMETGSLSKTDQYLLEHRCVTKRGKQFTRFAIRGILTNPVYMIADDTAYQYLKENNVDLFAERAEFDGEHGVMAYNRTLQRPGKANQIRPMEEWIVAVGKHPGIIAGSDWVQVQAMLDVNKSKSYRRPRSNVALLSGLLRCGECGDYMRPKLTNRRTADGELIYTYMCSTKERSHGTICSMKNCNGNTLDAKIIEEIRKLSADKETLAKLLAQTKKVISGSKEGYDAELALLREKHAETEDRIKRLVESLSVASDTSAKYVMEQIDALHRESETQQARLSELEALTEQSRMLHQEFAFHQEMIESFASAVDSATLEEKRRLLRTIVKKVVWDGKNAYVYLFAEDGEADLPPIDQPMYPLGEDSECSMD

SEQ ID NO: 1027 - protein, 575 aa, Unknown
  Description of Unknown: Integrase B1028 sequence
  SM00857,G3DSA:1.10.10.2600,IPR036162,PF13408,IPR025827, G3DSA:3.40.50.1390,PS51737,IPR006119,IPR038109,PF07508, IPR011109,SSF53041,PTHR30461,Coil,PS51736, cd00338,PF00239
MAYRRAQDTKGLRAVFYARVSTAEEEQLNAIELQIEENRNTITKHGWKKVDEYIDRSKSGTMVKGRDEYQRLYEDLLGDAFDVVVIKDQERLMRNTLDWYLFINRLVQTGKILYMYLEDKFYSPDDALITGIKAIIAEEFSRNLSKKLHNYHDGRIEKARKGLEIDLQGSGNVFGWDKVDGKYVINPEQAKVRRLMCEGIMARKGSTQIAKELNDAGYRNTVGKPWKPMDIPKFVYDCKNVGTMIINRERHDFESKQTVKLPESEWVYVKGALPPIVTEEEWALIEKIHEERVVATGCNRRGKKTSGYSFSGKLVCGVCGAPYWRKTKTSKEEYWVCSTKQQKGRKTRARDAVGGKAGEINPEGCDNENISYNALMEIMAIVSERLQADTGFIREFMLSRLDTYEKRITEANRGATEADLQREISRKDKLLDAYLDNLLTKEEYQRKAQALDEHILELKREVEANKANLADLAEIQRVRENIDAEVAQYLDENEQLKVEFVLEHLSQVIIYPDKVLVIFDVFGEGVMVEKSQYVSREKWRGQDYHDRVHFRYSEGRRRICFYFRVRPSKEPKRTL

SEQ ID NO: 1028 - protein, 575 aa, Unknown
  Description of Unknown: Integrase B1029 sequence
  PTHR30461:SF3,IPR036162,PS51737,IPR011109,PTHR30461, PS00397,PF00239,G3DSA:1.10.10.2600,IPR006119,SSF53041, SM00857,IPR025827,IPR038109,PS51736,cd03768, IPR006118,PF13408,G3DSA:3.40.50.1390,PF07508,Coil
MISNSSATHAKVAIYIRVSTLHQIDRDSLPMQRHDLIAYAKLILNTDDVTIFEDAGYSGKNTIRPEFQKMMSQLRTGTYTHLLVWKIDRISRNLLDFAEMYQELKDLGVTFVSKNEQFDTSTAMGEAMLKIILVFAELERNMTSERVTATMISRASNGQWNGGRIPYGYDYDPEEQGFSFNSDEYNIAHLIHDKYEELRSLVYLARYLNEHGYRTRAGNDWSPVSLDIILRSVFYCGDYQYNRLKEGDRQRPKDKSEWITVKDHHPAIVSREQKERILALLESNRRLKSFRKSGKSKYTHIFSGLLICGNCGQPMTSSISTIKKTTGRRYSLYFCPTHRKSKLWCTGKSTSDPIVGEFVFNYILNMLNAQKAFSPETSIQELEQQLLSGDTFSPVAAIAPDGLHDLFHTLRTGTIKGEVFGKDVKIKTGSEPPLQLSKLKKEKVRLERAIDRLNKLFLYSEKAMSESEYLTQKIQLSDSLEEVEDKLAFLASEGSLQQSITDDEFIAKASNFILSQKLTDRNYISFQSLSATVSPEVLDSFLSSIIDNIVFKDGAVNSITFRNGLSHTFIYRVGG

SEQ ID NO: 1029 - protein, 575 aa, Unknown
  Description of Unknown: Integrase B1030 sequence
  cd03768,SM00857,G3DSA:1.10.10.2600,IPR036162,PF13408, PS51737,IPR025827,G3DSA:3.40.50.1390,IPR006119,IPR038109, PF07508,SSF53041,IPR011109,PTHR30461,PS51736, Coil,PF00239
MRGAIYSRVSTLDQDYNRQTNELKEYAKYMGIEITHVFEEKESGFNDDRPEFAKLKELTKDDIDIVLVWELSRLSRRSLYLQQQIEYFTKKGICVYAKKENLRTLDEKGEEDRNTKFIIGIIAMIAEQEVATFKARSLSSKKNKILKEGNSYTYKAPYGYDYSTETKKLSINEEEAKTVRRVIELSANGYSSARIALILNAENIPTRSKTKIWTMGTINSMLTNPVYKGEAEYMLKGTEPKKGKRYKRPIEVAIVKTPAIVSAELYDLSKEKMKGRAIRSKSTGVKHFQLLRGLIYCPYCKIKYTYEGGRDLYVCHDKHMKSKNKPACFSKAIKAARIEKIVWELVKLLFSQELATGKAQEQEEPLRQEIEAHKKLLMGIEEKLNDLTAQANAIVNAAIDIKREMPNMPDLYINKIREAASLDKESKKYQYEKDRLNKLILSCENKIKAINSLSNEKVLVDSITDDMERYELIHKVIDHMIIYGEDSAYSLVVVTFKTGQEVYIGYKSKGYQYYTIFYPSQSVWVDTEKRLGCIMTMKAPKSLELSLETITKEYSITDFIKMFDIPKNRHYYENH

SEQ ID NO: 1030 - protein, 575 aa, Unknown
  Description of Unknown: Integrase B1031 sequence
  cd03768,SM00857,G3DSA:1.10.10.2600,IPR036162,PF13408, PS51737,G3DSA:3.40.50.1390,IPR025827,IPR006119,IPR038109, PF07508,IPR011109,SSF53041,PTHR30461,PS51736, Coil,PF00239
MRGAIYSRVSTLDQDYNRQTNELKEYAKYMGIEITHVFEEKESGFNDDRPEFAKLKELTKDDIDIVLVWELSRLSRRSLYLQQQIEHFTKKGICVYAKKENLRTLDENGEEDRNTKFIIGIIAMIAEQEVATLKSRSISSKRNKILKEGNSYTYKAPYGYDYSTETKRLSINEEEAKTVRRVIELSANGYSSARIALMLNAENIPTRSKTKIWTMGTINSMLTNPVYKGEAEYMLKGTEPKKGKRYKRPIEVAIIQTPAIVSTELYDLSREKMKGRAFRSKSTGVKHFQLLRGLIYCPYCKIKYTYEGGRDLYVCHDKHMKSKNKPACFSKAIKATRIEKIVWELVKGLFSQEFAIDKAQEQEEPLRQEIETHQKLLMGIEGKLADLTAQANAIVNAAIDIKREMPNMPDLYINKIREAASLDKESKKYQYEKDRLNKLIQSCESKIEAINSLSNEKVLVDSITDDMERYELIHKVIDHMIIYGEDSAYSLVVVTFKTGQKVYIGYKSKGYQYYTIFYPSQSVWIDTEKRLGCIMTMKDSKSLELSLETVTKEYSITAFVKMFDTPKNRRYYENQ

SEQ ID NO: 1031 - protein, 575 aa, Unknown
  Description of Unknown: Integrase B1032 sequence
  SM00857,G3DSA:1.10.10.2600,IPR036162,PF13408,IPR025827, G3DSA:3.40.50.1390,PS51737,IPR006119,IPR038109,PF07508, SSF53041,IPR011109,PTHR30461,Coil,cd00338, PF00239
MAYRKITDIKDTIGMRAVFYARVSTAEEEQLNAIELQIEENRGCIKDHGWKLVGEYIDRSKSGTMVKGRDDYQRLYEDLYEDLFDIVVIKDQERLQRNTLDWYLFINRVVQTGKLLFMYMDGKFYSPDDALITGVRAIIAEEFSRNLSKKLHNYHDHRIEKARQGQEIALQGSGNVYGWDKKDGKYYINPEQAKVRRLMCEGIMARKGSTLIAKELNDAGYRNTVGKPWKPMDIPKFVYDCKNVGTMIINKERHDFESKQTIKLPKEEWVYVENALPPIVTQEEWDLICKIHEERVIATGSDRRGKKTSGYSFSGKLVCGICGAPYWRKQRVSKDEYWVCSTKQTKGRRTRKRDSTMGKAGEINPLGCDNENISYNSLMEIMGVVSERLQANTDTIKHDMINWLTKLRKQLLEANGGHTEADLQRELSRKSKLLDAYLDGILNKQEYQKKAEELDERIIQLKAETEKNKANSGDIAEIDKVLANIDEEVSRYVDGNEKLKVEYLLEHLEQVQIFPDKVIVIVPILSEGIVVEKAQYVSREKRRRKKHGYENDFESYPARCWRGSAFRRKSYQSQL

SEQ ID NO: 1032 - protein, 574 aa, Unknown
  Description of Unknown: Integrase B1033 sequence
  PTHR30461:SF3,SM00857,G3DSA:1.10.10.2600,IPR036162,PF13408, PS51737,G3DSA:3.40.50.1390,IPR025827,IPR006119,IPR038109, PF07508,SSF53041,IPR011109,PTHR30461,Coil, PS51736,cd00338,PF00239
MNVYRTREILKTCSIFDLKLKVAFYARVSTESEDQQVSIHHQDEYYRNFIAKNKNWVFVGAYIDNGISGIRTEKRDEFQRMMADAKTGKIDMIVTKEITRFARNTLDSIRYTRELLMYGVCVWFQNDNINTIDEDSELRLTIMSGIAQDESRKLSNRIKFGHAQSIKNGVVLGARIYGYIKKDGKLTVDPKTAPMVKEIFEKYSTGEWSTSTIEKYLYKKGYRNYKGGKLSRDNIKKIIKNPKYKGYYCGGKVKVVDMFTKKQEFLPEDEWTMYKDDGNHVPQIVDESVWNKANVIMQTRSDAIKSHRTSFKQNNLFTGYIFCGNDGAPYWMKQHTIRGREDARWVCSYRIKNGAQSCNSFGIREKELRVMLADLINKSGDIQTAIEKYISLVEKNIDFSNDGAEISRLKNMVLQLEKKKEKLLDLNLDGIITNAEYIEKNEKFKNEIQDISNKLSEMESKEEADKDSHLKLKEIGKILNDLQGIGPEDITKTILGEFLDKIVINPKHPQECEILFFLKTGDVKKKSIIERDKQSCSEYFFLNKFSERHAVFYRKINYVDGCEKEFNYTYAFAI

SEQ ID NO: 1033 - protein, 574 aa, Unknown
  Description of Unknown: Integrase B1034 sequence
  PTHR30461:SF3,IPR036162,PS51737,IPR011109,PTHR30461, PF00239,G3DSA:1.10.10.2600,IPR006119,SSF53041,cd00338, SM00857,IPR025827,IPR038109,PS51736,mobidb-lite, PF13408,G3DSA:3.40.50.1390,PF07508,Coil
MGKKQKANGGDAVIYARYSSHNQRDVSIEQQVEACRKHAAELGLTVTATYEDRAISGKTDKRPSFQRMMRDAEQHKFAYVLAWKSNRIGRNMMQALVNESRLVDCGVKVFYAEEDFDDNAAGRFALRSMMNVNQFYIENMAEDVKRGLYDNAKKGLVNGSLPLGYKRGADGKPEIDESKAAIVREIYTRVAAGELFASIAADLNARGIRTARGREWNKGSFHVLCHNDRYRGIYMYGDIRIPGGMPRIISDELFYDAQEAYGMKKDNRYGRARHGAENYLLTGKLYCGHCGSYMVGISGTSKTGEMHYYYACQKHRLEHTCEKKAIRRDVIENAVARAIMMYCLDDETIDFIVDSTIAYFKQKDHELHIEAMENELAAVQQAISNLMKAIEAGIITPTTRTRLLDLEEQQAKLSAKINTAKAERVEIDRDDLIAGLQLFRTGDIKNKKFLAKLFNTFLLAVYLYDDNRLKIVFSFTGNHNNIEIPLELDNDCPDSESGSYETEVRMSHLECGGSGTVRTNLPPEQPSPFSAPPDEGGVPEFFRHSKCTVRTLGSNVTIQMVGSVFVLYCEIPTR

SEQ ID NO: 1034 - protein, 574 aa, Unknown
  Description of Unknown: Integrase B1035 sequence
  PTHR30461:SF3,IPR036162,PS51737,IPR011109,PTHR30461, PS00397,PF00239,G3DSA:1.10.10.2600,IPR006119,SSF53041, SM00857,IPR025827,IPR038109,PS51736,cd03768, IPR006118,PF13408,G3DSA:3.40.50.1390,PF07508,Coil
MAYNKLSLPGHIRVAIYVRVSTLHQIDRDSLPMQKQDLLAYAKIMLGTDDCVIFEDAGYSGKNTDRPKFQEMMSQIRAGRFTHLLVWKIDRISRNLLDFATMYNELKDLGVVFVSKNEQFDTSTAMGEAMLKIILVFAELERNMTSERVTATMISRANNGLWNGGRVPFGYDWDSEQQIFSINSEECNIVHMIHDLYEDERSLVREARILNAKGYRTRHGNEWSPVSLHIILRNVWYCGDYRYNVLKEGNRQKVKDESEWITVENHHPAIISREQKQRIMSILDSNSRINKKKNNYKSGKYTHIFSGLIFCGSCGSPMGAAPASLRADGWRYSKYSCPTRRKSSTSCVGKSTSDPIVGEFVFNYILNMLNVQRDFQEIASADEMQGRLLTGNTFNYIDRIQEDGLLDLYDVLAKGKVQGAVYGKGANIQPKQENGSEIASLRVEKQKTERALDRLRSLYLYSEDAMSEKEYILERTKLTDKLEELNEEIGIMQSDEWQQSVSDEMFIARASEFIIAQKLTDRNYINYKRLAQSVDAEVLRSFVTSIIDSIFIQDGKVQRITFKNGLSHAFIFKS

SEQ ID NO: 1035 - protein, 574 aa, Unknown
  Description of Unknown: Integrase B1036 sequence
  PTHR30461:SF3,IPR036162,PS51737,IPR011109,PTHR30461, PS00397,PF00239,G3DSA:1.10.10.2600,IPR006119,SSF53041, cd00338,SM00857,IPR025827,IPR038109,PS51736, IPR006118,PF13408,G3DSA:3.40.50.1390,PF07508,Coil
MRKKKIDAPKEKPQRAAIYLRVSTAYQVDRDSLPMQRKDLVGYCEYALNISDYTIFEDAGYSGKNTDRPAFQKMMMQIRNGMYSHLLVWKIDRISRNLLDFAQMYEELKTLGVTFISRNEQFDTSTAMGEAMLKMVLIFAELERKTTAERVTATMISRANDGTWNGGRVPFGYDHNKETQTFSVNGDESFIVLEMYDLYEKTDSLVHTARELNDRGYVSRQHNPFSPVSVWTILRNPWYIGTYRYNYYKIPGRKAIKDESEWVVIPDHHTPLVSKERFDRVQKMLDSNARYRNTPGRSATQKNVNIFSGLIWCACCGAAFTASPGKLHASGYRSAKYGCPNVRKTKTCNAKYTSDTVLGEFLLNFILNVINAQKRFDQIKSPADLEAQLLRGDTFKNVAGIDSASVDALYEMLAEYSPADSVLLKKPTVKKNLDPELRKLRADKRKTERALARLDHIYLYSNKQMSDKEYLIKKNDLMNDLKEQDKSIGLLTSESWAQSLSDDDFLEQASSFIMSQRLQEREYIYFQGLAECTEPSVLRSFFLSIVDSVRMRNGHVETLTFKNGISHKFTYLAI

SEQ ID NO: 1036 - protein, 574 aa, Unknown
  Description of Unknown: Integrase B1037 sequence
  PTHR30461:SF3,SM00857,G3DSA:1.10.10.2600,IPR036162,PF13408, IPR025827,G3DSA:3.40.50.1390,PS51737,IPR006119,IPR038109, PF07508,IPR011109,SSF53041,PTHR30461,Coil, PS51736,cd00338,PF00239
MNVYRTREILKTCSIFDLKLKVAFYARVSTESEDQQVSIHHQDEYYRNFIAQNKNWVFVGAYIDNGISGIRTEKRDEFQRMMADAKTGKIDMIVTKEITRFARNTLDSIRYTRELLMYGVCVWFQNDNINTIDEDSELRLTIMSGIAQDESRKLSNRIKFGHAQSIKNGVVLGSRIYGYIKKDGKLTIDPKTAPMVKEIFEKYSTGEWSTSTIERYLYKKGYRNYKGGKLSRDNIKKIIKNPKYKGYYCGGKVKVVDMFTKKQEFLPEDEWTMYKDDGNHVPQIVDESVWNKANVIMQTRSDAIKSHRTSFKQNNLFTGYIFCGNDGSPYWMKQHTIRGREDARWVCSYRIKNGAQSCNSFGIREKELRVMLADLINKSGDIQTAIEKYISLVEKNIDFSNDGAEINRLKNMILQLEKKKDKLLDLNLDGIITNSEYLEKNERFKDEIQNINNKLSELESKEEANKDSHLKLKEIGKILNDLQGTGPEDITKTVLGEFLDKIVINPKRPQECEILFFLKTGDVKKKSIIERGKQSCSEYFFLNKFSERHTVFYRKINYVDGCEKEFNYTYAFAI

SEQ ID NO: 1037 - protein, 574 aa, Unknown
  Description of Unknown: Integrase B1038 sequence
  PTHR30461:SF3,SM00857,G3DSA:1.10.10.2600,IPR036162,PF13408, PS51737,G3DSA:3.40.50.1390,IPR025827,IPR006119,IPR038109, PF07508,IPR011109,SSF53041,PTHR30461,Coil, PS51736,cd00338,PF00239
MNVYRTREILKTCSIFDLKLKVAFYARVSTESEDQQVSIHHQDEYYRNFIAQNKNWVFVGAYIDNGISGIRTEKRDEFQRMMADAKAGKIDMIVTKEITRFARNTLDSIKYTRELLMYGVCVWFQNDNINTIDEDSELRLTIMSGIAQDESRKLSNRIKFGHAQSIKNGVVLGARIYGYIKKDGKLTIDPKTAPMVKEIFEKYSTGEWSTSTIEKYLYKKGYRNYKGGKLSRDNIKKIIKNPKYKGYYCGGKVKVVDMFTKKQEFLPEDEWTMYKDDGNHVPQIVDESVWNKANVIMQTRSDAIKSHRTSFKQNNLFTGYIFCGNDGAPYWMKQHTIRGREDARWVCSYRIKNGAQSCNSFGIREKELRMMLADLINKSGDIQTAIEKYISLVEKNIDFSNDGAEISRLKNMILQIEKKKDKLLDLNLDGIITNSEYIEKSEKFKDEIESINNKLSELESKEEANKDSHLKLKEIGKILNDLQGVGPEDITKTVLGEFLDKIVINPKRPQECEILFFLKTGDVKKKSIIERDKQGCSEYFFLNKFSERHAVFYRKINYVDGCEKEFNYTYAFAI

SEQ ID NO: 1038 - protein, 574 aa, Unknown
  Description of Unknown: Integrase B1039 sequence
  PTHR30461:SF3,SM00857,G3DSA:1.10.10.2600,IPR036162,PF13408, IPR025827,G3DSA:3.40.50.1390,PS51737,IPR006119,IPR038109, PF07508,IPR011109,SSF53041,PF00239,PTHR30461, PS51736,Coil,cd00338
MNVYRTREILKTCSIFDLKLKVAFYARVSTESEDQQVSIHHQDEYYRNFIAQNKNWVFVGAYIDNGISGIRTEKRDEFQRMMADAKTGKIDMIVTKEITRFARNTLDSIKYTRELLMYGVCVWFQNDNINTIDEDSELRLTIMSGIAQDESRKLSNRIKFGHAQSIKNGVVLGSRIYGYIKKDGKLTVDPKTAPMIKEIFEKYSTGEWSTSTIEKYLYKKGYRNYKGGKLSRDNIKKIIKNPKYKGYYCGGKVKIVDMFTKKQEFLPEDEWTMYKDDGNHVPQIVDESVWEKANVIMQTRSNAIKSHRTSFKQNNLFTGYIFCGNDGAPYWMKQRTARGREDVRWVCSYRIKNGAQSCNSFGIHEKELRIMLADLINKSGDIQTAIERYIGLVEKNIDFSNDGAEINRLKNMIFQIEKKKDRLLDLNLDGIITNSEYLEKSEKFKGEIQNINNKIYELESKEEANKDSHLKLKEIGKTLNDLQGIGPEDITKAVLGEFLDKIIVNPKCPQECEILFFLKTGDVKKKSIIERDKQGCSEYFFLNKFSERHAVFYRKINYVDGCEKEFNYTYAFAI

SEQ ID NO: 1039 - protein, 574 aa, Unknown
  Description of Unknown: Integrase B1040 sequence
  PTHR30461:SF3,SM00857,G3DSA:1.10.10.2600,IPR036162,PF13408, PS51737,G3DSA:3.40.50.1390,IPR025827,IPR006119,IPR038109, PF07508,IPR011109,SSF53041,PTHR30461,Coil, PS51736,cd00338,PF00239
MNVYRTREILKTCSIFDLKLKVAFYARVSTESEDQQVSIHHQDEYYRNFIAQNKNWVFVGAYIDNGISGIRTEKRDEFQRMMADAKTGKIDMIVTKEITRFARNTLDSIKYTRELLMYGVCVWFQNDNINTIDEDSELRLTIMSGIAQDESRKLSNRIKFGHAQSIKNGVVLGSRIYGYIKKDGKLTIDPKTAPMVKEIFEKYSTGEWSTSAIEKYLYKKGYRNYKGGKLSRDNIKKIIKNPKYKGYYCGGKVKIVDMFTKKQEFLPEDEWTMYKDDGNHVPQIVDESVWNKANAIMQTRSDAIKSHRTSFKQNNLFTGYIFCGNDGAPYWMKQHTIRGREDARWVCSYRIKNGAQSCNSFGIREKELRVMLADLINKSGDIQTAIEKYISLVEKNIDFSNDGAEISRLKNMILQIEKKKDKLLDLNLDGIITNSEYIEKSEKFKDEIEIINNKLSELESKEEASKDFHLKLKEIGMILNDLQGVGPEDITKTVLGEFLDKIVINPKHPQECEILFFLKTGDVKKKSITERDKPGCSEYFFLNKFSERHAVFYRKINYVDGCEKEFNYTYAFAI

SEQ ID NO: 1040 - protein, 574 aa, Unknown
  Description of Unknown: Integrase B1041 sequence
  PTHR30461:SF3,SM00857,G3DSA:1.10.10.2600,IPR036162,PF13408, PS51737,G3DSA:3.40.50.1390,IPR025827,IPR006119,IPR038109, PF07508,IPR011109,SSF53041,PF00239,PTHR30461, PS51736,Coil,cd00338
MNVYRTREILKTCSIFDLKLKVAFYARVSTESEDQQVSIHHQDEYYRNFIAKNKNWAFVGAYIDNGISGIRTEKRDEFQRMMADAKTGKIDMIVTKEITRFARNTLDSIRYTRELLMYGVCVWFQNDNINTIDEDSELRLTIMSGIAQDESRKLSNRIKFGHAQSIKNGVVLGARIYGYIKKDGKLTVDPKTAPMVKEIFEKYSTGEWSTSTIEKYLYKKGYRNYKGGKLSRDNIKKIIKNPKYKGYYCGGKVKVVDMFTKKQEFLPEDEWTMYKDDGNHVPQIVDESVWNKANVIMQTRSDAIKSHRTSFKQNNLFTGYIFCGNDGAPYWMKQHTIRGREDARWVCSYRIKNGAQSCNSFGVREKELRVMLADLINKSGDIQAAIEKYISLVEKNIDFSDDWAEISRLKNMVLQLKKKKEKLLDLNLDGIITNSEYLDKSKKFKDEIQNINNKLSELESKEEANKDSHLKLKEIGKILNDLQGIGPEDITKTVLGEFLDKIVINPKHPQECEILFFLKTGDVKKKSIIERDKQSCSEYFFLNKFSERHAVFYRKINYVDGCEKEFNYTYAFAI

SEQ ID NO: 1041 - protein, 574 aa, Unknown
  Description of Unknown: Integrase B1042 sequence
  PTHR30461:SF3,SM00857,G3DSA:1.10.10.2600,IPR036162,PF13408, PS51737,G3DSA:3.40.50.1390,IPR025827,IPR006119,IPR038109, PF07508,IPR011109,SSF53041,PTHR30461,Coil, PS51736,cd00338,PF00239
MNVYHTREILKTCSIFDLKLKVAFYARVSTESEDQQVSIHHQDEYYRNFIAQNKNWVFVGAYIDNGISGIRTEKRDEFQRMMADAKTGKIDMIVTKEITRFARNTLDSIKYTRELLMYGVCVWFQNDNINTIDEDSELRLTIMSGIAQDESRKLSNRIKFGHAQSIKNGVVLGSRIYGYIKKDGKLTVDPKTAPMIKEIFEKYSTGEWSTSTIEKYLYKKGYRNYKGGKLSRDNIKKIIKNPKYKGYYCGGKVKVIDMFTKQQEFLPENEWTMYKDDGNHVPQIVDESVWDKANVIMQTRSNAIKSHRTSFKQNNLFTGYIFCGNDGAPYWMKQHTIRGREDARWVCSYRIKNGAQSCNSFGIREKELRVMLADLINKSGDIQTAIEKYISLVEKNMDFSNDGAEISRLKNMILQIEKKKDRLLDLNLDGIITNSEYLEKSEKFKDEIQNINNKLFELESKEEASKDSHLKLKEIGKTLNDLQGIGPEDITKAVLGEFLDKIIVNPKCPQECEILFFLKTGDVKKKSIIEQGKQGCSEYFFLNKFSERHAVFYRKINYVERYEKEFNYTYAFAI

SEQ ID NO: 1042 - protein, 574 aa, Unknown
  Description of Unknown: Integrase B1043 sequence
  PTHR30461:SF3,cd00338,SM00857,G3DSA:1.10.10.2600,IPR036162, PF13408,IPR025827,G3DSA:3.40.50.1390,PS51737,IPR006119, IPR038109,PF07508,SSF53041,IPR011109,PTHR30461, PS51736,Coil,PF00239
MARKKNIAAGLDAVIYARYSSHNQREVSIEQQIAECTKHAAALGLRIVGTYEDRAISGKTDNRPRFQQMMRDAEKGKFQAVVAWKSNRIGRNMLQAMVNEAKLDDYGVKVFYAEEDFDDTAAGRFALRNMMNVNQFYSENMAEDITRGLYDNANKCMANGRQPLGYKRGADGKVMLDEPAAAVVREIFTRVAAGDLFVDIARDLNAKGIKTSKGATWNKGSFQSICQNERYKGIYIYGNVRIVDGIPRIVSDELWYKVQEAMRMKKNPVGTRHRVGAEDYLLTGKLRCGHCGSYMTGVSGTSRNGELHYYYTCQKRRTEHACNKKNVRRDVIEPAIAQAIKMYCLTDDVIEWVANRTVEYWEKHDNDLHIEALEQQLEENKKATSNMLKAIEMGIITDATRSRMIELETEQSKLAVQLNAAKADVVKIDRDDLIDELQIFRDMDVNNRSVQAELFKDFLVAAYIYDDNRLKLVFSFMGKDNSVEIPLETGEDPPDGEDSPDAKMFVLTPDCSTKKALYFVGSMVLFFFSAAKNGGCTALSASFSDVLQAVQCSPRVIGASAGQRMPVQLTISSI

SEQ ID NO: 1043 - protein, 574 aa, Unknown
  Description of Unknown: Integrase B1044 sequence
  PTHR30461:SF3,cd00338,SM00857,G3DSA:1.10.10.2600,IPR036162, PF13408,PS51737,IPR025827,G3DSA:3.40.50.1390,IPR006119, IPR038109,PF07508,IPR011109,SSF53041,PTHR30461, PS51736,Coil,PF00239
MARKKNIAAGQNAVIYARYSSHNQREVSIEQQVRECMKHAAELGLHVVGTYEDRAISGKTDKRPNFQRMMRDAEKGKFQAVVAWKSNRIGRNMLQAMVNEAKLEDCGVKVFYAEEDFDDTAAGRFALRNMMNVNQFYSENMAEDITRGLYDNASKCMANGRQPLGYKRGEDGRVVLDEANAAVVREIFTRVAAGDLFVDIARDLNAQGIKTSKGANWNKGSFQSICQNERYRGIYIYGDVRVADGIPRIVSDDLWYRVQEAMRMKKNPVGTRHRVGAEDYLLTGKLRCGHCGSYMTGVSGTSRNGELHYYYTCQKRRTEHACDKKNIRRDVIEPAVAQAIKMYCLTDDVIAWIADRTVEYWEKHDNDLQIEALEQQLEENKKATSNMLKAIEMGIITEATRTRMVELETEQSRLSVQLNVAKEDVVKIDREQIISYLELLQQGDIHDRDFQMELFKNFLVAVYVYDDNRMKLVFSCMGDQNSVEIPLETGEDPPDGGLSPDAKMFVLTPDSSTKKALYFVGSMVLFFFSAAKNGGCTALSASFSDVLQAVQCSPRVIGASAGQKVPVQLTISSI

SEQ ID NO: 1044 - protein, 574 aa, Unknown
  Description of Unknown: Integrase B1045 sequence
  PTHR30461:SF3,IPR036162,PS51737,IPR011109,PTHR30461, PS00397,PF00239,G3DSA:1.10.10.2600,IPR006119,SSF53041, cd00338,SM00857,IPR025827,IPR038109,PS51736, IPR006118,PF13408,G3DSA:3.40.50.1390,PF07508,Coil
MRKKKIDAPKEKPQRAAIYLRVSTAYQVDRDSLPMQRKDLVGYCEYALNISDYTIFEDAGYSGKNTDRPAFQKMMMQIRNGMYSHLLVWKIDRISRNLLDFAQMYEELKTLGVTFISRNEQFDTSTAMGEAMLKMVLIFAELERKTTAERVTATMISRANDGTWNGGRVPFGYDYNKETQTFSVNGDESFIVLEMYDLYEKTDSLVHTARELNDRGYVSRQHNPFSPVSVWTILRNPWYIGTYRYNYYKIPGRKAIKDESEWVVIPDHHTPLVSKERFDRVQKMLDSNARYRNTPGRSATQKNVNIFSGLIWCACCGAAFTASPGKLHASGYRSAKYGCPNVRKTKTCNAKYTSDTVLGEFLLNFILNVINAQKSFDQIKSPADLEARLLRGDTFKNVAGIDSASVAALYEMLAEYSPADSVLLKKPTVKKNLDPELRKLRADKRKTERALARLDHIYLYSNKQMSDKEYLIKKNDLMNDLKEQDKSIGLLTSESWAQSLSDDDFLEQASSFIMSQRLQEREYIYFQGLAECTEPSVLRSFFLSIVDSVRMRNGHVETLTFKNGISHKFTYLAI

SEQ ID NO: 1045 - protein, 574 aa, Unknown
  Description of Unknown: Integrase B1046 sequence
  PTHR30461:SF3,cd00338,SM00857,G3DSA:1.10.10.2600,IPR036162, PF13408,PS51737,IPR025827,G3DSA:3.40.50.1390,IPR006119, IPR038109,PF07508,IPR011109,SSF53041,PTHR30461, PS51736,Coil,PF00239
MARKKNIAAGQNAVIYARYSSHNQREVSIEQQVSECMKHAAELGLHVVGTYEDRAISGKTDKRPNFQRMMRDAEKGKFQAVVAWKSNRIGRNMLQAMVNEAKLEDCGVKVFYAEEDFDDTAAGRFALRNMMNVNQFYSENMAEDITRGLYDNASKCMANGRQPLGYKRGEDGRVVLDEANAAVVREIFTRVAAGDLFVDIARDLNAQGIKTSKGANWNKGSFQSICQNERYRGIYIYGDVRVVDGIPRIVSDDLWYRVQEAMRMKKNPVGTRHRVGAEDYLLTGKLRCGHCGSYMTGVSGTSRNGELHYYYTCQKRRTEHACDKKNIRRDVIEPAVAQAIKMYCLTDDVIEWMADRTVEYWEKHDNDLQIEALERQLEENKKATSNMLKAIEMGIITEATRTRMVELETEQSRLSVQLNAAKEDVVKIDREQIISYLELLQQGDIHDRDFQMELFKNFLVAVYVYDDNRMKLVFSCMGDQNSVEIPLETGEDPPDGGLSPDAKMFVLTPDSSTKKALYFVESMVLFFFSAAKNGGCTALPASFSDVLQAVQCSPQVIGASAGQKVPVQLTISSI

SEQ ID NO: 1046 - protein, 574 aa, Unknown
  Description of Unknown: Integrase B1047 sequence
  SM00857,G3DSA:1.10.10.2600,IPR036162,PF13408,IPR025827, PS51737,G3DSA:3.40.50.1390,IPR006119,IPR038109,PF07508, IPR011109,SSF53041,PTHR30461,Coil,cd00338, PF00239
MAYRKITDIRDTIGMRAVFYARVSTAEEEQLNAIELQIEENRGCIKEHGWKLVGEYIDRSKSGTMVKGRDDYQRLYEDLYEDLFDIVVIKDQERLQRNTLDWYLFINRVVQTGKLLFMYMDGKFYSPDDALITGVRAIIAEEFSRNLSKKLHNYHDHRIEKARQGQEIALQGSGNVYGWDKKDGKYYINPEQAKVRRLMCEGIMARKGSTLIAKELNDAGYRNTVGKPWKPMDIPKFVYDCKNVGTMIINKERHDFESKQTIKLPKEEWVYVENALPPIVTQEEWDLICKIHEERVIATGSDRRGKKTSGYSFSGKLVCGICGAPYWRKQRVSKDEYWVCSTKQTKGRRTRKRDSTMGKAGEINPLGCDNENISYNSLMEIMGVVSERLQANTDTIKHDMINWLTKLRKQLLEANGGHTEADLQRELSRKSKLLDAYLDGILNKQEYQTKAEELDERIIQLKAETEKNKANSGDIAEIDKVLANIDEEVSRYVDGNEKLKVEYLLEHLEQVQIFPDKVIVIVPILSEGIVVEKTQYVSREKRCRKDDILPLYYGGKEALSRQLLSGRNRYRGRS

SEQ ID NO: 1047 - protein, 574 aa, Unknown
  Description of Unknown: Integrase B1048 sequence
  PTHR30461:SF3,cd00338,SM00857,G3DSA:1.10.10.2600,IPR036162, PF13408,PS51737,IPR025827,G3DSA:3.40.50.1390,IPR006119, IPR038109,PF07508,IPR011109,SSF53041,PTHR30461, PS51736,Coil,PF00239
MARKKNIAAGQNAVIYARYSSHNQREVSIEQQVRECMKHAAELGLHVVGTYEDRAISGKTDKRPNFQRMMRDAEKGKFQAVVAWKSNRIGRNMLQAMVNEAKLEDCGVKVFYAEEDFDDTAAGRFALRNMMNVNQFYSENMAEDITRGLYDNASKCMANGRQPLGYKRGEDGRVVLDEANAAVVREIFTRVAAGDLFVDIARDLNAQGIKTSKGANWNKGSFQSICQNERYRGIYIYGDVRVADGIPRIVSDDLWYRVQEAMRMKKNPVGTRHRVGAEDYLLTGKLRCGHCGSYMTGVSGTSRNGELHYYYTCQKRRTEHACDKKNIRRDVIEPAVAQAIKMYCLTDDVIAWIADRTVEYWEKHDNDLQIEALEQQLEENKKATSNMLKAIEMGIITEATRTRMVELETEQSRLSVQLNVAKEDVVKIDREQIISYLELLQQGDIHDRDFQMELFKNFLVAVYVYDDNRMKLVFSCMGDQNSVEIPLETGEDPPDGGLSPDAKMFVLTPDSSTKKALYFVGSMVLFFFSAAKNGGCTALPASFSDVLQAVQCSPRVIGASAGQKVPVQLTISSI

SEQ ID NO: 1048 - protein, 574 aa, Unknown
  Description of Unknown: Integrase B1049 sequence
  PTHR30461:SF3,IPR036162,PS51737,IPR011109,PTHR30461, PS00397,PF00239,G3DSA:1.10.10.2600,IPR006119,SSF53041, cd00338,SM00857,IPR025827,IPR038109,PS51736, IPR006118,PF13408,G3DSA:3.40.50.1390,PF07508
MRKKKIDAPKEKPQRAAIYLRVSTAYQVDRDSLPMQRKDLVGYCEYALNISDYTIFEDAGYSGKNTDRPAFQKMMMQIRNGMYSHLLVWKIDRISRNLLDFAQMYEELKMLGVTFISRNEQFDTSTAMGEAMLKMVLIFAELERKTTAERVTATMISRANDGTWNGGRVPFGYDYNKETQTFSVNGDESFIVLEMYDLYEKTDSLVHTARELNDRGYVSRQHNPFSPVSVWTILRNPWYIGTYRYNYYKIPGRKAIKDESEWVVIQDHHTPLVSKERFDRVQKMLDSNARYRNTPGRSATQKNVNIFSGLIWCACCGAAFTASPGKLHASGYRSAKYGCPNVRKTKTCNAKYTSDTVLGEFLLNFILNVINAQKSFDQIKSPADLEARLLRGDTFKNVAGIDSASVAALYEMLAEYSPADSVLLKKPTVKKNLDPELRKLRADKRKTERALTRLDHIYLYSNKQMSDKEYLIKKNDLMNDLKEQDKSIGLLTSESWAQSLSDDDFLEQASSFIMSQRLQEREYIYFQGLAECTEPSVLRSFFLSIVDSVRMRNGHVEMLTFKNGISHKFTYKAI

SEQ ID NO: 1049 - protein, 574 aa, Unknown
  Description of Unknown: Integrase B1050 sequence
  PTHR30461:SF3,SM00857,G3DSA:1.10.10.2600,IPR036162,PF13408, PS51737,G3DSA:3.40.50.1390,IPR025827,IPR006119,IPR038109, PF07508,IPR011109,SSF53041,PTHR30461,Coil, PS51736,cd00338,PF00239
MNVYRTREVLKTCSIFDLKLKVAFYARVSTESEDQQVSIHHQDEYYRNFIAKNKNWAFVGAYIDNGISGIRTEKRDEFQRMMADAKTGKIDMIVTKEITRFARNTLDSIRYTRELLMYGVCVWFQNDNINTIDEDSELRLTIMSGIAQDESRKLSNRIKFGHAQSIKNGVVLGARIYGYIKKDGKLTIDPKTAPMVKEIFEKYSTGEWSTSTIEKYLYKKGYRNYKGGKLSRDNIKKIIKNPKYKGYYCGGKVKVVDMFTKKQEFLPEDEWTMYKDDGNHVPQIVDESVWNKANVIMQTRSNAIKSHRTSFKQNNLFTGYIFCGNDGAPYWMKQHTIRGREDARWVCSYRIKNGAQSCSSFGVREKELRVMLADLINKSGDIQAAIEKYISLVEKNIDFSDDGAEISRLKNMVLQLEKKKEKLLDLNLDGIITNSEYLDKSEKFKDEIQNINNKLSELESKEEANKDSHLKLKEIGKILNDLQGIGPEDITKTVLGEFLDKIVINPKRPQECEILFFLKTGDVKKKSIIERDKQGCSEYFFLNKFSERHAVFYRKINYVDGCEKEFNYTYAFAI

SEQ ID NO: 1050 - protein, 574 aa, Unknown
  Description of Unknown: Integrase B1051 sequence
  PTHR30461:SF3,IPR036162,PS51737,IPR011109,PTHR30461, PS00397,PF00239,G3DSA:1.10.10.2600,IPR006119,SSF53041, cd00338,SM00857,IPR025827,IPR038109,PS51736, IPR006118,PF13408,G3DSA:3.40.50.1390,PF07508,Coil
MRKKKIDAPKEKPQRAAIYLRVSTAYQVDRDSLPMQRKDLVGYCEYALNISDYTIFEDAGYSGKNTDRPAFQKMMMQIRNGMYSHLLVWKIDRISRNLLDFAQMYEELKTLGVTFISRNEQFDTSTAMGEAMLKMVLIFAELERKTTAERVTATMISRANDGTWNGGRVPFGYDYNKETQTFSVNGDESFIVLEMYDLYEKTDSLVHTARELNDRGYVSRQHNPFSPVSVWTILRNPWYIGTYRYNYYKIPGRKAIKDESEWVVIPDHHTPLVSKERFDRVQKMLDSNARYRNTPGRSATQKNVNIFSGLIWCACCGAAFTASPGKLHASGYRSAKYGCPNVRKTKTCNAKYTSDTVLGEFLLNFILNVINAQKRFDQIKSPADLEAQLLRGDTFKNVAGIDSASVDALYEMLAEYSPADSVLLKKPTVKKNLDPELRKLRADKRKTERALARLDHIYLYSNKQMSDKEYLIKKNDLMNDLKEQDKSIGLLTSESWAQSLSDDDFLEQASSFIMSQRLQEREYIYFQGLAECTEPSVLRSFFLSIVDSVRMRNGHVETLTFKNGISHKFTYLAI

SEQ ID NO: 1051 - protein, 574 aa, Unknown
  Description of Unknown: Integrase B1052 sequence
  SM00857,G3DSA:1.10.10.2600,IPR036162,PF13408,IPR025827, G3DSA:3.40.50.1390,PS51737,IPR006119,IPR038109,PF07508, SSF53041,IPR011109,PF00239,PTHR30461,PS51736, Coil,cd00338
MNAVIYARYSSHNQTEQSIEGQLRDCYEYAKRNDLAIIGEYIDRAISGKTDERPDFQRMIKDASKRQFERILVWKLDRFARNRYDSATYKHKLKQYGVKVISAMENVGEGDESVLLEALLEASAEYYSLDLKKKIARGMRESALRGKFVGGTLPWWCRVDDEQKLTVIDERAAIVREAFMRYDSGEGSKSIVSDFAKRGLRSNRGVPVTLSWLLSILKNRKTIGEYTYNGIEIPGGLPAVVDKPLFDRVQDRIARNRRTGGGEARAKTEYLLQGKLFCGLCGSPITAECGQNHKGVVYNYYACSLKKKKHQCKKANERKDFLEWYVVEQTLDYVLTPARTEYIASAIVAEYEREFDKSGIRVLEQKIALTEGEIQKTMDLCIQATTDAMRDRFMKRCEELDAKKADMEIDLSKLRVAASIVYTKDEVCAWLRQFCTGDCFDPAFRRRIIDVFINTVYLYDEKLIIYYNLRDSRQVSYIEAIGASSEIENLLPVPDNKKSAAECSTADGDGGAWQAAYEPFSLFCAVNLVEGDGARLTGIVIGDLDASIVVNENGIDEGLHEALLTLPVLNVQIP

SEQ ID NO: 1052 - protein, 574 aa, Unknown
  Description of Unknown: Integrase B1053 sequence
  PTHR30461:SF3,SM00857,G3DSA:1.10.10.2600,IPR036162,PF13408, IPR025827,G3DSA:3.40.50.1390,PS51737,IPR006119,IPR038109, PF07508,SSF53041,IPR011109,PTHR30461,Coil, PS51736,cd00338,PF00239
MNVYRTREILKTCSIFDLKLKVAFYARVSTESEDQQVSIHHQDEYYRNFIAKNKNWVFVGAYIDNGISGIRTEKRDEFQRMMADAKTGKIDMIVTKEITRFARNTLDSIRYTRELLMYGVCVWFQNDNINTIDEDSELRLTIMSGIAQDESRKLSNRIKFGHAQSIKNGVVLGARIYGYIKKDGKLTVDPKTAPMVKEIFEKYSTGEWSTSTIEKYLYKKGYRNYKGGKLSRDNIKKIIKNPKYKGYYCGGKVKVVDMFTKKQEFLPEDEWTMYKDDGNHVPQIVDESVWNKANVIMQTRSDAIKSHRTSFKQNNLFTGYIFCGNDGAPYWMKQHTIRGREDARWVCSYRIKNGAQSCNSFGIREKELRAMLADLINKSGDIQIAIEKYISLAERNIDFSNDGAEISRLKNMVLQLEKKKDKLLDLNLDGIITNSEYLEKNEKFKNEIQDISNKLSELESKEEANKDSHLKLKEIGKILNDLQGIGPEDITKTVLGEFLDKIVINPKHPQECEILFFLKTGDVKKKSIIERDKQSCSEYFFLNKFSERHAVFYRKINYVDGCEKEFNYTYAFAI

SEQ ID NO: 1053 - protein, 574 aa, Unknown
  Description of Unknown: Integrase B1054 sequence
  PTHR30461:SF3,IPR036162,PS51737,IPR011109,PTHR30461, PS00397,PF00239,G3DSA:1.10.10.2600,IPR006119,SSF53041, cd00338,SM00857,IPR025827,IPR038109,PS51736, IPR006118,PF13408,G3DSA:3.40.50.1390,PF07508
MRKKKIDAPKEKPQRAAIYLRVSTAYQVDRDSLPMQRKDLVGYCEYALNISDYTIFEDAGYSGKNTDRPAFQKMMMQIRNGMYSHLLVWKIDRISRNLLDFAQMYEELKMLGVTFISRNEQFDTSTAMGEAMLKMVLIFAELERKTTAERVTATMISRANDGTWNGGRVPFGYDYNKETQTFSVNGDESFIVLEMYDLYEKTDSLVHTARELNDRGYVSRQHNPFSPVSVWTILRNPWYIGTYRYNYYKIPGRKAIKDESEWVVIQDHHTPLVSKERFGRVQKMLDSNARYRNTPGRSATQKNVNIFSGLIWCACCGAAFTASPGKLHASGYRSAKYGCPNVRKTKTCNAKYTSDTVLGEFLLNFILNVINAQKSFDQIKSPADLEARLLRGDTFKNVAGIDSASVAALYEMLAEYSPADSVLLKKPTVKKNLDPELRKLRADKRKTERALTRLDHIYLYSNKQMSDKEYLIKKNDLMNDLKEQDKSIGLLTSESWAQSLSDDDFLEQASSFIMSQRLQEREYIYFQGLAECTEPSVLRSFFLSIVDSVRMRNGHVEMLTFKNGISHKFTYKAI

SEQ ID NO: 1054 - protein, 574 aa, Unknown
  Description of Unknown: Integrase B1055 sequence
  PTHR30461:SF3,IPR036162,PS51737,IPR011109,PTHR30461, PS00397,PF00239,G3DSA:1.10.10.2600,IPR006119,SSF53041, cd00338,SM00857,IPR025827,IPR038109,PS51736, IPR006118,PF13408,G3DSA:3.40.50.1390,PF07508,Coil
MRKAKENLQKEKPQRAAIYLRVSTSYQADRDSLPMQRKDLVGYCEYALNISDYTVFEDAGYSGKNTDRPAFQKMMMQIRNGMYSHLLVWKIDRISRNLLDFAQMYEELKTLGVTFISRNEQFDTSTAMGEAMLKMVLIFAELERKTTAERVTATMISRANDGTWNGGRVPFGYDYNKETQTFSINGDESYIVLQMYDLYEKTDSLVRTARELNKLGYVSRQHNPFSPVSIWIILRNPWYVGTYRYNYYKIPGRRAVKEESEWVVIENHHSPLVSKERFDHVQKMLDSNARYRNTPGRSSKQKNVNIFSGLIWCSCCGAAFTASPGKLHASGYRPTKYGCPNVRKTKTCNAKYTSDPVIGEFLLNFILNVINAQKGFEKINSPADLESRLLRGDAFRDVAKIDSASVAALYEMLSSFSPADSVLLKKPTIKKNLDPELRKLRADKRKTERALARLDHIYLYSNKQMSDKEYLVKKNDLMTDLKELDKSIGLLTSESWAQSLSDDDFLEQASSFIISQRLQEREYIYFQGLAESTDPAVLRAFFVSIIDSVRMRNGLVEILTFKNGISHTFTYKAI

SEQ ID NO: 1055 - protein, 574 aa, Unknown
  Description of Unknown: Integrase B1056 sequence
  PTHR30461:SF3,SM00857,G3DSA:1.10.10.2600,IPR036162,PF13408, IPR025827,PS51737,G3DSA:3.40.50.1390,IPR006119,IPR038109, PF07508,IPR011109,SSF53041,PF00239,PTHR30461, PS51736,Coil,cd00338
MNVYRTREILKTCSIFDLKLKVAFYARVSTESEDQQVSIHHQDEYYRNFIAQNKNWVFVGAYIDNGISGIRTEKRDEFQRMMADAKAGKIDMIVTKEITRFARNTLDSIRYTRELLMYGVCVWFQNDNINTIDEDSELRLTIMSGIAQDESRKLSNRIKFGHAQSIKNGVVLGSRIYGYIKKDGKLTVDPKTAPMIKEIFEKYSTGEWSTSTIEKYLYKKGYRNYKGGKLSRDNIKKIIKNPKYKGYYCGGKVKVVDMFTKKQEFLPEDEWTMYKDDGNHVPQIVDESVWNKANVIMQTRSDAIKSHRTSFKQNNLFTGYIFCGNDGAPYWMKQRTARGREDVRWVCSYRIKNGAQSCNSFGIHEKELKIMLADLINKSGDIQAAIERYISLVEKNIDFSNDGAEINRLKNMILQLEKKKDKLLDLNLDGIITNSEYLEKNEKFKNEIQDISNKLSELESKEEANKDSHLKLKEIGKTLNGLQGIDPEDITKSVLGEFLDKIIVNPKRPQECEILFFLKTGDVKKKSIIERDKQSCSEYFFLNKFSERHAVFYRKINYVDGCEKEFNYTYAFAI

SEQ ID NO: 1056 - protein, 574 aa, Unknown
  Description of Unknown: Integrase B1057 sequence
  PTHR30461:SF3,SM00857,G3DSA:1.10.10.2600,IPR036162,PF13408, PS51737,G3DSA:3.40.50.1390,IPR025827,IPR006119,IPR038109, PF07508,SSF53041,IPR011109,PTHR30461,Coil, PS51736,cd00338,PF00239
MNVYRTREILKTCSIFDLKLKVAFYARVSTESEDQQVSIHHQDEYYRNFIAQNKNWVFVGAYIDNGISGIRTEKRDEFQRMMADAKTGKIDMIVTKEITRFARNTLDSIRYTRELLMYGVCVWFQNDNINTIDEDSELRLTIMSGIAQDESRKLSNRIKFGHAQSIKNGVVLGARIYGYIKKDGKLTIDPKTAPMVKEIFEKYSTGEWSTSTIEKYLYKKGYRNYKGGKLSRDNIKKIIKNPKYKGYYCGGKVKVVDMFTKKQEFLPEDEWTMYKDDGNHVPQIVDESVWNKANVIMQTRSDAIKSHRTSFKQNNLFTGYIFCGNDGAPYWMKQRTSRGREDVRWVCSYRIKNGAQSCNSFGIREKELRVMLADLINKSGDIQTAIEKYISLVEKNIDFSNDGAEINRLKNMILQIERKKDRLLDLNLDGIITNSEYLEKNEKFKNEIQDINNKLFELESKEEANKDSHLKLKEIGKILNDLQGVGPEDITKTVLGEFLDKIVINPKRPQECEILFFLKTGDVKKKSIIERDRQGCSEYFFLNKFSERHAVFYRKINYVDGCEKEFNYTYAFAI

SEQ ID NO: 1057 - protein, 574 aa, Unknown
  Description of Unknown: Integrase B1058 sequence
  PTHR30461:SF3,SM00857,G3DSA:1.10.10.2600,IPR036162,PF13408, IPR025827,G3DSA:3.40.50.1390,PS51737,IPR006119,IPR038109, PF07508,SSF53041,IPR011109,PTHR30461,Coil, PS51736,cd00338,PF00239
MNVYRTREILKTCSIFDLKLKVAFYARVSTESEDQQVSIHHQDEYYRNFIAQNKNWVFVGAYIDNGISGIRAEKRDEFQRMMADAKAGKIDMIVTKEITRFARNTLDSIRYTRELLMYGVCVWFQNDNINTIDEDSELRLTIMSGIAQDESRKLSNRIKFGHAQSIKNGVVLGSRIYGYIKKDGKLTIDPKTAPMVKEIFEKYSTGEWSTSTIEKYLYKKGYRNYKGGKLSRDNIKKIIKNPKYKGYYCGGKVKIVDMFTKKQEFLPEDEWTMYKDDGNHVPQIVDESVWNKANTIMQTRSDAIKSHRTSFKQNNLFTGYIFCGNDGAPYWMKQHTIRGREDARWVCSYRIKNGAQSCNSFGIREKELKVMLADLINKSGDIQTAIEKYISLVEKNIEFSNDGAEINRLKNMILQLEKKKDKLLDLNLDGIITNSEYIEKSEKFKDEIESINNKLSELESKEEASKDFHLKLKEIGMILNDLQGVGPEDITKTVLGEFLDKIVINPKRPQECEILFFLKTGDVKKKSIIERDKPGCSEYFFLNKFSERHAVFYRKINYVDGCEKEFNYTYAFAI

SEQ ID NO: 1058 - protein, 574 aa, Unknown
  Description of Unknown: Integrase B1059 sequence
  PTHR30461:SF3,IPR036162,PS51737,IPR011109,PTHR30461, PS00397,PF00239,G3DSA:1.10.10.2600,IPR006119,SSF53041, cd00338,SM00857,IPR025827,IPR038109,PS51736, IPR006118,PF13408,G3DSA:3.40.50.1390,PF07508,Coil
MRKKKIDAPKEKPQRAAIYLRVSTAYQVDRDSLPMQRKDLVGYCEYALNISDYTIFEDAGYSGKNTDRPAFQKMMMQIRNGMYSHLLVWKIDRISRNLLDFAQMYEELKMLGVTFISRNEQFDTSTAMGEAMLKMVLIFAELERKTTAERVTATMISRANDGTWNGGRVPFGYDYNKETQTFSVNGDESFIVLEMYDLYEKTDSLVHTARELNDRGYVSRQHNPFSPVSVWTILRNPWYIGTYRYNYYKIPGRKAIKDESEWVVIPDHHTPLVSKERFDRVQKMLDSNARYRNTPGRSATQKNVNIFSGLIWCACCGAAFTASPGKLHASGYRSAKYGCPNVRKTKTCNAKYTSDTVLGEFLLNFILNVINAQKSFDQIKSPADLEARLLRGDTFKNVAGIDSASVAALYEMLAEYSPADSVLLKKPTVKKNLDPELRKLRADKRKTERALARLDHIYLYSNKQMSDKEYLIKKNDLMNDLKEQDKSIGLLTSESWAQSLSDDDFLEQASSFIMSQRLQEREYIYFQGLAECTEPSVLRSFFLSIVDSVRMRNGHVETLTFKNGISHKFTYLAI

SEQ ID NO: 1059 - protein, 574 aa, Unknown
  Description of Unknown: Integrase B1060 sequence
  PTHR30461:SF3,SM00857,G3DSA:1.10.10.2600,IPR036162,PF13408, PS51737,G3DSA:3.40.50.1390,IPR025827,IPR006119,IPR038109, PF07508,IPR011109,SSF53041,PTHR30461,Coil, PS51736,cd00338,PF00239
MNVYRTREILKTCSIFDLKLKVAFYARVSTESEDQQVSIHHQDEYYRNFIAQNKNWVFVGAYIDNGISGIRTEKRDEFQRMMADAKTGKIDMIVTKEITRFARNTLDSIKYTRELLMYGVCVWFQNDNINTIDEDSELRLTIMSGIAQDESRKLSNRIKFGHAQSIKNGVVLGSRIYGYIKKDGKLTVDPKTAPMIKEIFEKYSTGEWSTSTIERYLYKKGYRNYKGGKLSRDNIKKIIKNPKYKGYYCGGKVKVVDMFTKKQEFLPEDEWTMYKDDGNHVPQIVDESVWNKANVIMQTRSDAIKSHRTSFKQNNLFTGYIFCGNDGAPYWMKQRTARGREDVRWVCSYRIKNGAQSCNSFGIHEKELKIMLADLINKSGDIQAAIEKYISLVEKNIDFSNDRAEINRLKNMILQLEKKKDKLLDLNLDGIITNSEYLEKNEKFKNEIQDISNKLSELESKEEANKDSHLKLKEIGKILNDLQGIGPEDITKAVLGEFLDKIIVNPKRPQECEILFFLKTGDVKKKSIIERDEQSCSEYFFLNKFSERHAVFYRKINYVDGCEKEFNYTYAFAI

SEQ ID NO: 1060 - protein, 574 aa, Unknown
  Description of Unknown: Integrase B1061 sequence
  PTHR30461:SF3,SM00857,G3DSA:1.10.10.2600,IPR036162,PF13408, IPR025827,PS51737,G3DSA:3.40.50.1390,IPR006119,IPR038109, PF07508,IPR011109,SSF53041,PTHR30461,Coil, PS51736,cd00338,PF00239
MARKKNIAAGLDAVIYARYSSHNQREVSIEQQIAECTKHAAALGLRIVGTYEDRAISGKTDNRPRFQQMMRDAEKGKFQAVVAWKSNRIGRNMLQAMVNEAKLDDYGVKVFYAEEDFDDTAAGRFALRNMMNVNQFYSENMAEDITRGLYDNANKCMANGRQPLGYKRGADGKVMLDEPAAVVVREIFTRVAAGDLFVDIARDLNAKGIKTSKGATWNKGSFQSICQNERYKGIYIYGNVRIVDGIPRIVSDELWYKVQEAMRMKKNPVGTRHRVGAEDYLLTGKLRCGHCGSYMTGVSGTSRNGELHYYYTCQKRRTEHACNKKNVRRDVIELAIAQAIKMYCLTDDVIEWVANRTVEYWEKHDNDLHIEALEQQLEENKKATSNMLKAIEMGIITDATRSRMIELETEQSKLAVQLNAAKADVVKIDRDDLIDELQIFRDMDVNNRSVQAELFKDFLVAAYIYDDNRLKLVFSFMGKDNSIEIPLETGEDPPDGEDSPDAKMFVLTPDCSTKKALYFVGSMVLFFFSAAKNGGCTALSASFSDVLQAVQCSPRVIGASAGQRMPVQLTISSI

SEQ ID NO: 1061 - protein, 574 aa, Unknown
  Description of Unknown: Integrase B1062 sequence
  PTHR30461:SF3,SM00857,G3DSA:1.10.10.2600,IPR036162,PF13408, PS51737,G3DSA:3.40.50.1390,IPR025827,IPR006119,IPR038109, PF07508,IPR011109,SSF53041,PTHR30461,Coil, PS51736,cd00338,PF00239
MNVYRTREVLRTCSIFDLKLKVAFYARVSTESEDQQVSIHHQDEYYRNFIAQNKNWVFVGAYIDNGISGIRTEKRDEFQRMMADAKTGKIDMIVTKEITRFARNTLDSIKYTRELLMYGVCVWFQNDNINTIDEDSELRLTIMSGIAQDESRKLSNRIKFGHAQSIKNGVVLGSRIYGYIKKDGKLTIDPKTAPMVKEIFEKYSTGEWSTSTIERYLYKKGYRNYKGGKLSRDNIKKIIKNPKYKGYYCGGKVKVVDMFTKKQEFLPEDEWTMYKDDGNHVPQIVDESVWNKANVIMQTRSDAIKSHRTSFKQNNLFTGYIFCGNDGAPYWMKQRTARGREDVRWVCSYRIKNGAQSCNSFGIHEKELKIMLADLINKSGDIQAAIERYISLVEKNIDFSNDGAEISRLKNMILQIEKKKDRLLDLNLDGIITNSEYLEKNERFKDEIQNINNKLSELELKEEANKDSHLKLKEIGKILNDLQGVGPEDITKTVLGEFLDKIVINPKHPQECEILFFLKTGDVKKKSIIERDKQGCSEYFFLNKFSERHAVFYRKINYVDGCEKEFNYTYAFAI

SEQ ID NO: 1062 - protein, 574 aa, Unknown
  Description of Unknown: Integrase B1063 sequence
  PTHR30461:SF3,SM00857,G3DSA:1.10.10.2600,IPR036162,PF13408, IPR025827,G3DSA:3.40.50.1390,PS51737,IPR006119,IPR038109, PF07508,IPR011109,SSF53041,PTHR30461,Coil, PS51736,cd00338,PF00239
MNVYRTREILKTCSIFDLKLKVAFYARVSTESEDQQVSIHHQDEYYRNFIAQNKNWVFVGAYIDNGISGIRTEKRDEFQRMMADAKAGKIDMIVTKEITRFARNTLDSIKYTRELLMYGVCVWFQNDNINTIDEDSELRLTIMSGIAQDESRKLSNRIKFGHAQSIKNGVVLGSRIYGYIKKDGKLTIDPKTAPMVKEIFEKYSTGEWSTSTIEKYLYKKGYRNYKGGKLSRDNIKKIIKNPKYKGYYCGGKVKVVDMFTKKQEFLPEDEWTMYKDDGNHVPQIVDESVWNKANVIMQTRSDAIKSHRTSFKQNNLFTGYIFCGNDGAPYWMKQRTSRGREDVRWVCSYRIKNGAQSCNSFGIHEKELRIMLADLINKSGDIQTAIEKYISLVEKNIDFSNDGAEINRLKNMILQLEKKKDKLLDLNLDGIITNSEYLEKNEIFKDEIQNINNKLSELESKEEANKDSHLKLKEIGKTLNGLQGIGPEDITKTVLGEFLDKIIVNPKRPQECEILFFLKTGDVKKKSIIERDEQSCSEYFFLNKFSERHAVFYRKINYVDGCEKEFNYTYAFAI

SEQ ID NO: 1063 - protein, 574 aa, Unknown
  Description of Unknown: Integrase B1064 sequence
  PTHR30461:SF3,SM00857,G3DSA:1.10.10.2600,IPR036162,PF13408, IPR025827,PS51737,G3DSA:3.40.50.1390,IPR006119,IPR038109, PF07508,SSF53041,IPR011109,PTHR30461,Coil, PS51736,cd00338,PF00239
MNVYRTREILKTCSIFDLKLKVAFYARVSTESEDQQVSIHHQDEYYRNFIAQNKNWVFVGAYIDNGISGIRTEKRDEFQRMMADAKTGKIDMIVTKEITRFARNTLDSIRYTRELLMYGVCVWFQNDNINTIDEDSELRLTIMSGIAQDESRKLSNRIKFGHAQSIKNGVVLGARIYGYIKKDGKLTIDPKTAPMVKEIFEKYSTGEWSTSTIEKYLYKKGYRNYKGGKLSRDNIKKIIKNPKYKGYYCGGKVKVVDMFTKKQEFLPEDEWTMYKDDGNHVPQIVDESVWNKANVIMQTRSDAIKSHRTSFKQNNLFTGYIFCGNDGAPYWMKQHTIRGREDARWVCSYRIKNGAQSCNSFGIRERELRVMLADLINKSGDIQTAIEKYISLVEKNIDFSNDGAEISRLKNMILQIEKKKDKLLDLNLDGIITNSEYIEKSEKFKDEIESINNKLSELESKEEANKDSHLKLKEIGKILNDLQGVGPEDITKTVLGEFLDKIVVNPKCPQECEILFFLKTGDVKKKSIIEQDKQGCSEYFFLNKFSERHAVFYRKINYVDGCEKEFNYTYAFAI

SEQ ID NO: 1064 - protein, 574 aa, Unknown
  Description of Unknown: Integrase B1065 sequence
  PTHR30461:SF3,SM00857,G3DSA:1.10.10.2600,IPR036162,PF13408, PS51737,IPR025827,G3DSA:3.40.50.1390,IPR006119,IPR038109, PF07508,IPR011109,SSF53041,PTHR30461,Coil, PS51736,cd00338,PF00239
MNVYRTREILKTCSIFDLKLKVAFYARVSTESEDQQVSIHHQDEYYRNFIAQNKNWVFVGAYIDNGISGIRTEKRDEFQRMMADAKTGKIDMIVTKEITRFARNTLDSIKYTRELLMYGVCVWFQNDNINTIDEDSELRLTIMSGIAQDESRKLSNRIKFGHAQSIKNGVVLGSRIYGYIKKDGKLTIDPKTAPMVKEIFEKYSTGEWSTSTIEKYLYKKGYRNYKGGKLSRDNIKKIIKNPKYKGYYCGGKVKIVDMFTKKQEFLPEDEWTMYKDDGNHVPQIVDESVWDKANVIMQTRSDAIKSHRTSFKQNNLFTGYIFCGNDGAPYWMKQHTIRGREDARWVCSYRIKNGAQSCNSFGIRERELRVMLADLINKSGDIQTAIEKYISLVEKNIDFSNDGAEISRLKNMILQIEKKKDKLLDLNLDGIITNSEYIEKSEKFKDEIESINNKLSELESKEEASKDFHLRLKEIGMILNDLQGVGPEDITKTVLGEFLDKIVINPKRPQECEILFFLKTGDVKKKSITERGKQSCSEYFFLNKFSERHAVFYRKINYVDGCEKEFNYTYAFAI

SEQ ID NO: 1065 - protein, 574 aa, Unknown
  Description of Unknown: Integrase B1066 sequence
  PTHR30461:SF3,SM00857,G3DSA:1.10.10.2600,IPR036162,PF13408, IPR025827,PS51737,G3DSA:3.40.50.1390,IPR006119,IPR038109, PF07508,IPR011109,SSF53041,PTHR30461,Coil, PS51736,cd00338,PF00239
MNVYRTREILKTCSIFDLKLKVAFYARVSTESEDQQVSIHHQDEYYRNFIAQNKNWVFVGAYIDNGISGIRTEKRDEFQRMMADAKTGKIDMIVTKEITRFARNTLDSIRYTRELLMYGVCVWFQNDNINTIDEDSELRLTIMSGIAQDESRKLSNRIKFGHAQSIKNGVVLGARIYGYIKKDGKLTIDPKTAPMVKEIFEKYSTGEWSTSTIEKYLYKKGYRNYKGGKLSRDNIKKIIKNPKYKGYYCGGKVKVVDMFTKKQEFLPDDEWTMYKDDGNHVPQIVDESVWNKANVIMQTRSDAIKSHRTSFKQNNLFTGYIFCGNDGAPYWMKQRTARGREDVRWVCSYRIKNGAQSCNSFGIHEKELRIMLADLINKSGDIQTAIEKYISLVEKNIDFSNDGAEINRLKNMILQLEKKKDKLLDLNLDGIITNSEYLEKNERFKDEIQNINNKLSELESKEEANKDSHLKLKEIGKTLNGLQGIGPEDITKAVLGEFLDKIIVNPKRPQECEILFFLKTGDVKKKSIIERGKQSCSEYFFLNKFSERHAVFYRKINYVDGCEKEFNYTYAFAI

SEQ ID NO: 1066 - protein, 574 aa, Unknown
  Description of Unknown: Integrase B1067 sequence
  SM00857,G3DSA:1.10.10.2600,IPR036162,PF13408,IPR025827, PS51737,G3DSA:3.40.50.1390,IPR006119,IPR038109,PF07508, SSF53041,IPR011109,PTHR30461,Coil,PS51736, cd00338,PF00239
MAYRKVISLLDTIGLRAVFYARVSTAEEEQLNAIELQIEENRNCISKNKWKKVDEYIDRSKSGTMVKGRDEYQRLYEDLLTDKFDIVVIKDQERLMRNTKDWYLFIDRLVQTGKLLYMYLDNRFYNPDDALITGIRAIIAEEFSRNLSKKLHNYHDGRIEKARQGKEIDLQGSGNVFGWDKKDGKYYINPEQAKVRRLMCEGIMARKGSTQIAKELNDAGYRNTVGKEWKPMDIPKFVYDCKNVGTMVINKERHDFESKQTIKLPEEEWVYVKNALPPIVTEEEWELICKIHDERVVATGSDKRGKGKKVSGYSFSGKLVCGVCGAPYWRKQRSTKEEYWVCSTKQQKGRKTRKRDSVNGKAGELNEAGCDNTNISYNSLMEIMSIISERLQANTELVKADMINKLNSWRKRIIEANRGATEEDLQKELSRKDKLLDALLDGILTKEEYTRKAESIENKIAELKQEIEANKTQFEDIAEIDRVLANIDEEVAIYLNENKQLKVEYILEHLEKVEIYPDKVIVIVPLFDVGFIVDKEQYVSREKRYKIGTEKVIHYLENYRYWNKDIGLYVQLVA

SEQ ID NO: 1067 - protein, 574 aa, Unknown
  Description of Unknown: Integrase B1068 sequence
  PTHR30461:SF3,IPR036162,PS51737,IPR011109,PTHR30461, PS00397,PF00239,G3DSA:1.10.10.2600,IPR006119,SSF53041, SM00857,IPR025827,IPR038109,PS51736,cd03768, IPR006118,PF13408,G3DSA:3.40.50.1390,PF07508,Coil
MAYNKLSLPGHIRVAIYVRVSTLHQIDRDSLPMQKQDLLAYAKIMLGTDDCVIFEDAGYSGKNTDRPKFQEMMSQIRAGGFTHLLVWKIDRISRNLLDFATMYNELKDLGVVFVSKNEQFDTSTAMGEAMLKIILVFAELERNMTSERVTATMISRANNGLWNGGRVPFGYDWDSEQQIFSINSEECNIVHMIHDLYEDERSLVREARILNAKGYRTRHGNEWSPVSLHIILRNVWYCGDYRYNVLKEGNRQKVKDESEWITVENHHPAIISREQKQRIVSILDSNSRINKKKNNYKSGKYTHIFSGLIFCGSCGSPMGAAPASLRADGWRYSKYSCPTRRKSSTSCVGKSTSDPIVGEFVFNYILNMLNVQRDFQEIASADEMQGRLLTGNTFNYIDRIQEDGLLDLYDVLAKGKVQGAVYGKGANIQPKQENGSEIASLRVEKQKTERALDRLRSLYLYSEDAMSEKEYILERTKLTDKLEELNEEIGIMQSDEWQQSVSDEMFIARASEFIIAQKLTDRNYINYKRLAQSVDAEVLRSFVTSIIDSIFIQDGKVQRITFKNGLSHAFIFKS

SEQ ID NO: 1068 - protein, 574 aa, Unknown
  Description of Unknown: Integrase B1069 sequence
  PTHR30461:SF3,SM00857,G3DSA:1.10.10.2600,IPR036162,PF13408, PS51737,G3DSA:3.40.50.1390,IPR025827,IPR006119,IPR038109, PF07508,SSF53041,IPR011109,PTHR30461,Coil, PS51736,cd00338,PF00239
MNVYRTREILKTCSIFDLKLKVAFYARVSTESEDQQVSIHHQDEYYRNFIAKNKNWVFVGAYIDNGISGIRTEKRDEFQRMMADAKTGKIDMIVTKEITRFARNTLDSIRYTRELLMYGVCVWFQNDNINTIDEDSELRLTIMSGIAQDESRKLSNRIKFGHAQSIKNGVVLGARIYGYIKKDGKLTVDPKTAPMVKEIFEKYSTGEWSTSTIEKYLYKKGYRNYKGGKLSRDNIKKIIKNPKYKGYYCGGKVKVVDMFTKKQEFLPEDEWTMYKDDGNHVPQIVDESVWNKANVIMQTRSNAIKSHRTSFKQNNLFTGYIFCGNDGAPYWMKQHTIRGREDARWVCSYRIKNGAQSCNSFGIREKELRVMLADLINKSGDIQAAIEKYISLVEKNIDFSNDGAEISRLKNMVLQLEKKKEKLLDLNLDGIITNAEYLDKSEKFKDEIQNINNKLSELESKEEADKDSHLKLKEIGKILNDLQGIGPEDITKTVLGEFLDKIVINPKRPQECEILFFLKTGDVKKKSIIERDKQGCSEYFFLNKFSERHAVFYRKINYVDGCEKEFNYTYAFAI

SEQ ID NO: 1069 - protein, 574 aa, Unknown
  Description of Unknown: Integrase B1070 sequence
  PTHR30461:SF3,cd00338,SM00857,G3DSA:1.10.10.2600,IPR036162, PF13408,IPR025827,G3DSA:3.40.50.1390,PS51737,IPR006119, IPR038109,PF07508,SSF53041,IPR011109,PTHR30461, PS51736,Coil,PF00239
MARKKNIAAGLDAVIYARYSSHNQREVSIEQQIAECTKHAAALGLRIVGTYEDRAISGKTDNRPRFQQMMRDAEKGKFQAVVAWKSNRIGRNMLQAMVNEAKLDDYGVKVFYAEEDFDDTAAGRFALRNMMNVNQFYSENMAEDITRGLYDNANKCMANGRQPLGYKRGADGKVMLDEPAAAVVREIFTRVAAGDLFVDIARDLNAKGIKTSKGATWNKGSFQSICQNERYKGIYIYGNVRIVDGIPRIVSDELWYKVQEAMRMKKNPVGTRHRVGAEDYLLTGKLRCGHCGSYMTGVSGTSRNGELHYYYTCQKRRTEHACNKKNVRRDVIEPAIAQAIKMYCLTDDVIEWVANRTVEYWEKHDNDLHIEALEQQLEENKKATSNMLKAIEMGIITDATRSRMIELETEQSKLAVQLNAAKADVVKIDRDDLIDELQIFRDMDVNNRSVQAELFKDFLVAAYIYDDNRLKLVFSFMGKDNSVEIPLETGEDPPDGGDSPDAKMFVLTPDCSTKKALYFVGSMVLFFLLKLVFGGLHCFACTVFRLLQAVELRPRDFARWSNLLFYGTAACKKS

SEQ ID NO: 1070 - protein, 574 aa, Unknown
  Description of Unknown: Integrase B1071 sequence
  PTHR30461:SF3,SM00857,G3DSA:1.10.10.2600,IPR036162,PF13408, PS51737,IPR025827,G3DSA:3.40.50.1390,IPR006119,IPR038109, PF07508,IPR011109,SSF53041,PTHR30461,PS51736, cd00338,PF00239
MSKRESKSGQKCLAAEQIGVIYARYSSHNQKEESIEQQIAECSDFAAKNGIRIVGIYADKAVSGRSDRRPNFQRMMRDAEKRHFQIVVAYKSNRIARNMLNALQYEARLDLFGIKTLYAKEEFGNTAAGRFALRTMMNVNQFYSENMGEDIKRGMVDNANECKVNGMLPLGYVKSKEGKYAVAPDEAAVVREIFDSFLKDVPVAEIARSLNQRGIRTKLGREWNKNSFHIMLKNDNYIGVYRHSGVVVEDGIPPILEREVFAAVQEKLANKKKTAGRRSANGEYLLTGKLFCGYCGAYMIGVSGTGENGTVHNYYQCQKRHAENRCEKKNVRRDFIEKLIARLTQDYILQDETIEWIADSTMSFQAVARRQSGITQLERDLADNRKIAKNIMAAIEQGIITETTKARLLEVEGTIRDLERSLSMAKAASQPIERERVVFSLEQMREGNVGSKEHQKKLIDTFVKSVTLWDDRIQIDYYHTPGKHKFSYSLEELTSKVENESNAADVRAESLEVHHCRRELHRFTTAFLLTAAPSRLYGTIKKTQESNSCVFFACIDGCVPQCPARLGIVWSSKR

SEQ ID NO: 1071 - protein, 574 aa, Unknown
  Description of Unknown: Integrase B1072 sequence
  PTHR30461:SF3,SM00857,G3DSA:1.10.10.2600,IPR036162,PF13408, IPR025827,G3DSA:3.40.50.1390,PS51737,IPR006119,IPR038109, PF07508,IPR011109,SSF53041,PTHR30461,Coil, PS51736,cd00338,PF00239
MNVYRTREILKTCSIFDLKLKVAFYARVSTESEDQQVSIHHQDEYYRNFIAQNKNWVFVGAYIDNGISGIRTEKRDEFQRMMADAKTGKIDMIVTKEITRFARNTLDSIKYTRELLMYGVCVWFQNDNINTIDEDSELRLTIMSGIAQDESRKLSNRIKFGHAQSIKNGVVLGARIYGYIKKDGKLTIDPKTAPMVKEIFEKYSTGEWSTSTIEKYLYKKGYRNYKGGKLSRDNIKKIIKNPKYKGYYCGGKVKVVDMFTKKQEFLPEDEWTMYKDDGNHVPQIVDESVWNKANVIMQTRSDAIKSHRTSFKQSNLFTGYIFCGNDGAPYWMKQRTARGREDVRWVCSYRIKNGAQSCNSFGIHEKELRIMLADLINKSGDIQTAIEKYISLVEKNIDFSNDGAEINRLKNMILQLEKKKDKLLDLNLDGIITNSEYLEKNERFKDEIQNINNKLSELESKEEANKDSHLKLKEIGKTLNDLQGIGPEDITKAVLGEFLDKIIVNPKRPQECEILFFLKTGDVKKKSIIERGKQSCSEYFFLNKFSERHAVFYRKINYVDGCEKEFNYTYAFAI

SEQ ID NO: 1072 - protein, 574 aa, Unknown
  Description of Unknown: Integrase B1073 sequence
  PTHR30461:SF3,SM00857,G3DSA:1.10.10.2600,IPR036162,PF13408, PS51737,G3DSA:3.40.50.1390,IPR025827,IPR006119,IPR038109, PF07508,SSF53041,IPR011109,PTHR30461,Coil, PS51736,cd00338,PF00239
MNVYRTREVLKTCSIFDLKLKVAFYARVSTESEDQQVSIHHQDEYYRNFIAKNKNWVFVGAYIDNGISGIRTEKRDEFQRMMADAKTGKIDMIVTKEITRFARNTLDSIRYTRELLMYGVCVWFQNDNINTIDEDSELRLTIMSGIAQDESRKLSNRIKFGHAQSIKNGVVLGARIYGYIKKDGKLTVDPKTAPMVKEIFEKYSTGEWSTSTIEEYLYKKGYRNYKGGKLSRDNIKKIIKNPKYKGYYCGGKVKVVDMFTKKQEFLPEDEWTMYKDDGNHVPQIVDESVWDKANVIMQTRSDAIKSHRTAFKQNNLFTGYIFCGNDGAPYWMKQHTIRGREDARWVCSYRIKNGAQSCNSFGIREKELRVMLADLINKSGDIQTAIEKYISLVEKNIDFSNDGAEINRLKNMILQLEKKKDKLLDLNLDGIITNSEYLEKNEKFKNEIQDISNKLSELESKEEANKDSHLKLKEIGKILNDLQGVGPEDITKTVLGEFLDKIVINPKRPQECEILFFLKTGDVKKKSIIERDKKSCSEYFFLNKFSERHAVFYRKINYVDGCEKEFNYTYAFAI

SEQ ID NO: 1073 - protein, 574 aa, Unknown
  Description of Unknown: Integrase B1074 sequence
  PTHR30461:SF3,SM00857,G3DSA:1.10.10.2600,IPR036162,PF13408, PS51737,G3DSA:3.40.50.1390,IPR025827,IPR006119,IPR038109, PF07508,IPR011109,SSF53041,PF00239,PTHR30461, PS51736,Coil,cd00338
MNVYRTREILKTCSIFDLKLKVAFYARVSTESEDQQVSIHHQDEYYRNFIAKNKNWAFVGAYIDNGISGIRTEKRDEFQRMMADAKTGKIDMIVTKEITRFARNTLDSIRYTRELLMYGVCVWFQNDNINTIDEDSELRLTIMSGIAQDESRKLSNRIKFGHAQSIKNGVVLGARIYGYIKKDGKLTVDPKTAPMVKEIFEKYSTGEWSTSTIEKYLYKKGYRNYKGGKLSRDNIKKIIKNPKYKGYYCGGKVKVVDMFTKKQEFLPEDEWTMYKDDGNHVPQIVDESVWNKANVIMQTRSDAIKSHRTSFKQNNLFTGYIFCGNDGAPYWMKQHTIRGREDARWVCSYRIKNGAQSCNSFGIREKELRVMLADLINKSGDIQTAIEKYISLVEKNIDFSSDGAEINRLKNMILQLEKKKDKLLDLNLDGIITNSEYLEKNEKFKNEIQDISNKLSELESKEEANKDSHLKLKEIGKILNDLQGVGPEDITKTVLGEFLDKIVINPKRPQECEILFFLKTGDVKKKSIIERDKKSCSEYFFLNKFSERHAVFYRKINYVDGCEKEFNYTYAFAI

SEQ ID NO: 1074 - protein, 574 aa, Unknown
  Description of Unknown: Integrase B1075 sequence
  PTHR30461:SF3,SM00857,G3DSA:1.10.10.2600,IPR036162,PF13408, IPR025827,PS51737,G3DSA:3.40.50.1390,IPR006119,IPR038109, PF07508,IPR011109,SSF53041,PTHR30461,Coil, PS51736,cd00338,PF00239
MNVYRTREILKTCSIFDLKLKVAFYARVSTESEDQQVSIHHQDEYYRNFIAQNKNWVFVGAYIDNGISGIRTEKRDEFQRMMADAKAGKIDMIVTKEITRFARNTLDSIKYTRELLMYGVCVWFQNDNINTIDEDSELRLTIMSGIAQDESRKLSNRIKFGHAQSIKNGVVLGSRIYGYIKKDGKLTVDPKTAPMIKEIFEKYSTGEWSTSTIEKYLYKKGYRNYKGGKLSRDNIKKIIKNPKYKGYYCGGKVKIVDMFTKKQEFLPEDEWTMYKDDGNHVPQIVDESVWEKANVIMQTRSNAIKSHRTSFKQNNLFTGYIFCGNDGAPYWMKQRTARGREDVRWVCSYRIKNGAQSCNSFGIHEKELRIMLADLINKSGDIQTAIERYIGLVEKNIDFSNDGAEINRLKNMIFQIEKKKDRLLDLNLDGIITNSEYLEKSEKFKGEIQNINNKIYELESKEEANKDSHLKLKEIGKTLNDLQGIGPEDITKAVLGEFLDKIIVNPKCPQECEILFFLKTGDVKKKSIIERDKQGCSEYFFLNKFSERHAVFYRKINYVDGCEKEFNYTYAFAI

SEQ ID NO: 1075 - protein, 574 aa, Unknown
  Description of Unknown: Integrase B1076 sequence
  PTHR30461:SF3,SM00857,G3DSA:1.10.10.2600,IPR036162,PF13408, IPR025827,G3DSA:3.40.50.1390,PS51737,IPR006119,IPR038109, PF07508,IPR011109,SSF53041,PTHR30461,Coil, PS51736,cd00338,PF00239
MNVYRTREVLKTCSIFDLKLKVAFYARVSTESEDQQVSIHHQDEYYRNFIAKNKNWAFVGAYIDNGISGIRTEKRDEFQRMMADAKTGKIDMIVTKEITRFARNTLDSIRYTRELLMYGVCVWFQNDNINTIDEDSELRLTIMSGIAQDESRKLSNRIKFGHAQSIKNGVVLGARIYGYIKKDGKLTIDPKTAPMVKEIFEKYSTGEWSTSTIEKYLYKKGYRNYKGGKLSRDNIKKIIKNPKYKGYYCGGKVKVVDMFTKKQEFLPEDEWTMYKDDGRHVPQIVDESVWNKANVIMQTRSDAIKSHRTSFKQNNLFTGYIFCGNDGAPYWMKQHTIRGREDARWVCSYRIKNGAQSCNSFGVREKELRVMLADLINKSGDIQAAIEKYISLVEKNIDFSDDGAEISRLKNMVLQLEKKKEKLLDLNLDGIITNSEYLDKSEKFKDEIQNINNKLSELESKEEANKDSHLKLKEIGKILNDLQGIGPEDITKTVLGEFLDKIVINPKRPQECEILFFLKTGDVKKKSIIERDKQGCSEYFFLNKFSERHAVFYRKINYVDGCEKEFNYTYAFAI

SEQ ID NO: 1076 - protein, 574 aa, Unknown
  Description of Unknown: Integrase B1077 sequence
  PTHR30461:SF3,SM00857,G3DSA:1.10.10.2600,IPR036162,PF13408, IPR025827,G3DSA:3.40.50.1390,PS51737,IPR006119,IPR038109, PF07508,SSF53041,IPR011109,PTHR30461,Coil, PS51736,cd00338,PF00239
MNVYRTREILKTCSIFDLKLKVAFYARVSTESEDQQVSIHHQDEYYRNFIAQNKNWVFVGAYIDNGISGIRTEKRDEFQRMMADAKTGKIDMIVTKEITRFARNTLDSIRYTRELLMYGVCVWFQNDNINTIDEDSELRLTIMSGIAQDESRKLSNRIKFGHAQSIKNGVVLGARIYGYIKKDGKLTIDPKTAPMIKEIFEKYSTGEWSTSTIEKYLYKKGYRNYKGGKLSRDNIKKIIKNPKYKGYYCGGKVKVVDMFTKKQEFLPEDEWTMYKDDGNHVPQIVDESVWNKANVIMQTRSDAIKSHRTSFKQNNLFTGYIFCGNDGAPYWMKQHTIRGREDARWVCSYRIKNGAQSCNSFGIREKELRIMLADLINESGDIQTAIEKYISLVEKNMDFSNDGVEISRLKNMILQIEKKKDRLLDLNLDGIITNSEYLEKNEKFKNEIQDISNKLSELESKEEANKDSHLKLKEIGKILNDLQGVGPEDITKTVLGEFLDKIVINPKHPQECEILFFLKTGDVKKKSIIERDKQSCSEYFFLNKFSERHAVFYRKINYVDGCEKEFNYTYAFAI

SEQ ID NO: 1077 - protein, 574 aa, Unknown
  Description of Unknown: Integrase B1078 sequence
  PTHR30461:SF3,cd00338,SM00857,G3DSA:1.10.10.2600,IPR036162, PS51737,G3DSA:3.40.50.1390,IPR006119,IPR038109,PF07508, SSF53041,IPR011109,PTHR30461,PS51736,Coil, PF00239
MKKKIAIYARVSTEHEAQISALENQIQYYDEILKKHPEWELYERYIDEGITGTSIGKRDSFLRMMSDAKDKCFDLIVTREVSRFARNIVDTLQQTRTLKQYGVEVYFTDDNIWTMNDEDGELRLSIMATLAQNESKKTSMRVKAGQMISFKNGVFYGNGNILGYDREGKNLVINPTQALTVKRIFELYLQGNGIRKIQFIMEQEKRKTSLGKTKWSASNIARILKNPFYCGRIEYRKQYVPDYLTQKKINNHGEIERVITKGTHDPIVSEEDFDKVQEIFKTKTTKKDNKKYGKPLADNVWVRKLKCKCGHGMNRKINYVSKITGVKTYSFQCHDQIHTGTIKTRLKKGLSIDGICDNKSFPEWKLEVQADFIFRKLLLNKQEIYETAIEMLESSIAVDTHIQDKKQKIENHIQSIDKLRARNDMLLDMCTDGDISRETFKKKTELNNQNIHELEEKIKLIRKQIKENDTQEDLNKRIECLSAFLKMKCFSKKEKIPESIIEKYVEKIIFYKDDFEWYLRPTIGNVNFLSIDAKNMKKGTHELEKTMCYVPSSTGSDCGKEEIGIDNHIFTSVR

SEQ ID NO: 1078 - protein, 574 aa, Unknown
  Description of Unknown: Integrase B1079 sequence
  PTHR30461:SF3,IPR036162,PS51737,IPR011109,PTHR30461, PS00397,PF00239,G3DSA:1.10.10.2600,IPR006119,SSF53041, cd00338,SM00857,IPR025827,IPR038109,PS51736, IPR006118,PF13408,G3DSA:3.40.50.1390,PF07508,Coil
MRKKKIDAPKEKPQRAAIYLRVSTAYQVDRDSLPMQRKDLVGDCEYALNISDYTIFEDAGYSGKNTDRPAFQKMMMQIRNGMYSHLLVWKIDRISRNLLDFAQMYEELKMLGVTFISRNEQFDTSTAMGEAMLKMVLIFAELERKTTAERVTATMISRANDGTWNGGRVPFGYDYNKETQTFSVNGDESFIVLEMYDLYEKTDSLVHTARELNDRGYVSRQHNPFSPVSVWTILRNPWYIGTYRYNYYKIPGRKAIKDESEWVVIPDHHTPLVSKERFDRVQKMLDSNARYRNTPGRSATQKNVNIFSGLIWCACCGAAFTASPGKLHASGYRSAKYGCPNVRKTKTCNAKYTSDTVLGEFLLNFILNVINAQKSFDQIKSPADLEARLLRGDTFKNVAGIDSASVAALYEMLAEYSPADSVLLKKPTVKKNLDPELRKLRADKRKTERALARLDHIYLYSNKQMSDKEYLIKKNDLMNDLKEQDKSIGLLTSESWAQSLSDDDFLEQASSFIMSQRLQEREYIYFQGLAECTEPSVLRSFFLSIVDSVRMRNGHVETLTFKNGISHKFTYLAI

SEQ ID NO: 1079 - protein, 574 aa, Unknown
  Description of Unknown: Integrase B1080 sequence
  PTHR30461:SF3,SM00857,G3DSA:1.10.10.2600,IPR036162,PF13408, IPR025827,G3DSA:3.40.50.1390,PS51737,IPR006119,IPR038109, PF07508,IPR011109,SSF53041,PF00239,PTHR30461, PS51736,Coil,cd00338
MNVYRTREILKTCSIFDLKLKVAFYARVSTESEDQQVSIHHQDEYYRNFIAKNKNWAFVGAYIDNGISGIRTEKRDEFQRMMADAKTGKIDMIVTKEITRFARNTLDSIRYTRELLMYGVCVWFQNDNINTIDEDSELRLTIMSGIAQDESRKLSNRIKFGHAQSIKNGVVLGSRIYGYIKKDGKLTVDPKTAPMIKEIFEKYSTGEWSTSTIEKYLYKKGYRNYKGGKLSRDNIKKIIKNPKYKGYYCGGKVKVIDMFTKQQEFLPENEWTMYKDDGNHVPQIVDESVWDKANVIMQTRSDAIKSHRTSFKQNNLFTGYIFCGNDGAPYWMKQHTIRGREDARWVCSYRIKNGAQSCNSFGIREKELRVMLADLINKSGDIQTAIEKYISLVEKNMDFSNDGAEISRLKNMILQIEKKKDRLLDLNLDGIITNSEYLEKNDKFKDEIQNINNKIYELESKEEANKDSHLKLKEIGKTLNGLQGIGPEDITKTVLGEFLDKIVINPKRPQECEILFFLKTGDVKKKSIIERDKQGCSEYFSLNKFSERHAVFYRKINYVEGYEKEFNYTYAFAI

SEQ ID NO: 1080 - protein, 574 aa, Unknown
  Description of Unknown: Integrase B1081 sequence
  PTHR30461:SF3,IPR036162,PS51737,IPR011109,PTHR30461, PS00397,PF00239,G3DSA:1.10.10.2600,IPR006119,SSF53041, cd00338,SM00857,IPR025827,IPR038109,PS51736, IPR006118,PF13408,G3DSA:3.40.50.1390,PF07508,Coil
MRKAKENPQKEKPQRAAIYLRVSTSYQADRDSLPMQRKDLVGYCEYALNISDYTVFEDAGYSGKNTDRPAFQKMMMQIRNGMYSHLLVWKIDRISRNLLDFAQMYEELKTLGVTFISRNEQFDTSTAMGEAMLKMVLIFAELERKTTAERVTATMISRANDGTWNGGRVPFGYDYNKETQTFSINGDESYIVLQMYDLYEKTDSLVRTARELNKLGYVSRQHNPFSPVSIWIILRNPWYVGTYRYNYYKIPGRRAVKEESEWVVIENHHSPLVSKERFDHVQKMLDSNARYRNTPGRSSKQKNVNIFSGLIWCSCCGAAFTASPGKLHASGYRPTKYGCPNVRKTKTCNAKYTSDPVIGEFLLNFILNVINAQKGFEKINSPADLESRLLRGDAFRDVAKIDSASVAALYEMLSSFSPADSVLLKKPTVKKDLDPELRKLRADKRKTERALARLDHIYLYSNKQMSDKEYLVKKNDLMTDLKELDKSIGLLTSESWAQSLSDDDFLEQASSFIISQRLQEREYIYFQGLAESTDPAVLRAFFVSIIDSVRMRNGVVEILTFKNGISHTFTYKAI

SEQ ID NO: 1081 - protein, 574 aa, Unknown
  Description of Unknown: Integrase B1082 sequence
  PTHR30461:SF3,IPR036162,PS51737,IPR011109,PTHR30461, PS00397,PF00239,G3DSA:1.10.10.2600,IPR006119,SSF53041, cd00338,SM00857,IPR025827,IPR038109,PS51736, IPR006118,PF13408,G3DSA:3.40.50.1390,PF07508,Coil
MRKKKIDAPKEKPQRAAIYLRVSTAYQIDRDSLPMQRKDLVGYCEYALNISDYTIFEDAGYSGKNTDRPAFQKMMMQIRNGMYSHLLVWKIDRISRNLLDFAQMYEELKMLGVTFISRNEQFDTSTAMGEAMLKMVLIFAELERKTTAERVTATMISRANDGTWNGGRVPFGYDYNKETQTFSVNGDESFIVLEMYDLYEKTDSLVHTARELNDRGYVSRQHNPFSPVSVWTILRNPWYIGTYRYNYYKIPGRKAIKDESEWVVIPDHHTPLVSKERFDRVQKMLDSNARYRNTPGRSATQKNVNIFSGLIWCACCGAAFTASPGKLHASGYRSAKYGCPNVRKTKTCNAKYTSDTVLGEFLLNFILNVINAQKSFDQIKSPADLEARLLRGDTFKNVAGIDSASVAALYEMLAEYSPADSVLLKKPTVKKNLDPELRKLRADKRKTERALARLDHIYLYSNKQMSDKEYLIKKNDLMNDLKEQDKSIGLLTSESWAQSLSDDDFLEQASSFIMSQRLQEREYIYFQGLAECTEPSVLRSFFLSIVDSVRMRNGHVEMLTFKNGISHKFTYKAI

SEQ ID NO: 1082 - protein, 574 aa, Unknown
  Description of Unknown: Integrase B1083 sequence
  PTHR30461:SF3,IPR036162,PS51737,IPR011109,PTHR30461, PS00397,PF00239,G3DSA:1.10.10.2600,IPR006119,SSF53041, cd00338,SM00857,IPR025827,IPR038109,PS51736, IPR006118,PF13408,G3DSA:3.40.50.1390,PF07508,Coil
MRKKKIDAPKEKPQRAAIYLRVSTAYQVDRDSLPMQRKDLVGYCEYALNISDYTIFEDAGYSGKNTDRPAFQKMMMQIRNGMYSHLLVWKIDRISRNLLDFAQMYEELKTLGVTFISRNEQFDTSTAMGEAMLKMVLIFAELERKTTAERVTATMISRANDGTWNGGRVPFGYDYNKETQTFSVNGDESFIVLEMYDLYEKTDSLVHTARELNDRGYVSRQHNPFSPVSVWTILRNPWYIGTYRYNYYKIPGRKAIKDESEWVVIPDHHTPLVSKERFDRVQKMLDSNARYRNTPGRSATQKNVNIFSGLIWCACCGAAFTASPGKLHASGYRSAKYGCPNVRKTKTCNAKYTSDTVLGEFLLNFILNVINAQKRFDQIKSPADLEAQLLRGDTFKNVAGIDSASVAALYEMLAEYSPADSVLLKKPTVKKNLDPELRKLRADKRKTERALARLDHIYLYSNKQMSDKEYLIKKNDLMNDLKEQDKSIGLLTSESWAQSLSDDDFLEQASSFIMSQRLQEREYIYFQGLAECTEPSVLRSFFLSIVDSVRMRNGHVETLTFKNGISHKFTYLAI

SEQ ID NO: 1083 - protein, 574 aa, Unknown
  Description of Unknown: Integrase B1084 sequence
  PTHR30461:SF3,SM00857,G3DSA:1.10.10.2600,IPR036162,PF13408, IPR025827,G3DSA:3.40.50.1390,PS51737,IPR006119,IPR038109, PF07508,IPR011109,SSF53041,PTHR30461,Coil, PS51736,cd00338,PF00239
MNVYRTREILKTCSIFDLKLKVAFYARVSTESEDQQVSIHHQDEYYRNFIAQNKNWVFVGAYIDNGISGIRTEKRDEFQRMMADAKTGKIDMIVTKEITRFARNTLDSIKYTRELLMYGVCVWFQNDNINTIDEDSELRLTIMSGIAQDESRKLSNRIKFGHAQSIKNGVVLGSRIYGYIKKDGKLTIDPKTAPMVKEIFEKYSTGEWSTSTIEKYLYKKGYRNYKGGKLSRDNIKKIIKNPKYKGYYCGGKVKVVDMFTKKQEFLPEDEWTMYKDDGNHVPQIVDESVWNKANVIMQTRSDAIKSHRTSFKQNNLFTGYIFCGNDGAPYWMKQRTARGREDVRWVCSYRIKNGAQSCNSFGIHEKELRIMLADLINKSGDIQTAIEKYISLVEKNIDFSNDGAEINRLKNMILQLEKKKDKLLDLNLDGIITNSEYLEKNERFKDEIQNINNKLSELESKEEANKDSHLKLKEIGKILNDLQGIGPEDITKTVLGEFLDKIVINPKRPQECEILFFLKTGDVKKKSIIERGKQSCSEYFFLNKFSERHAVFYRKINYVDGCEKEFNYTYAFAI

SEQ ID NO: 1084 - protein, 574 aa, Unknown
  Description of Unknown: Integrase B1085 sequence
  PTHR30461:SF3,IPR036162,PS51737,IPR011109,PTHR30461, PS00397,PF00239,G3DSA:1.10.10.2600,IPR006119,SSF53041, cd00338,SM00857,IPR025827,IPR038109,PS51736, IPR006118,PF13408,G3DSA:3.40.50.1390,PF07508,Coil
MRKKKIDAPKEKPQRAAIYLRVSTAYQVDRDSLPMQRKDLVGYCEYALNISDYTIFEDAGYSGKNTDRPAFQKMMMQIRNGMYSHLLVWKIDRISRNLLDFAQMYEELKTLGVTFISRNEQFDTSTAMGEAMLKMVLIFAELERKTTAERVTATMISRANDGTWNGGRVPFGYDYNKETQTFSVNGDESFIVLEMYDLYEKTDSLVHTARELNDRGYVSRQHNPFSPVSVWTILRNPWYIGTYRYNYYKIPGRKAIKDESEWVVIPDHHTPLVSKERFDRVQKMLDSNARYRNTPGRSATQKNVNIFSGLIWCACCGAAFTASPGKLHASGYRSAKYGCPNVRKTKTCNAKYTSDTVLGEFLLNFILNVINAQKRFDQIKSPADLEAQLLRGDTFKNVAGIDSASVDALYEMLAEYSPADSVLLKKPTVKKNLDPELRKLRADKRKTERALARLDHIYLYSNKQMSDKEYLIKKNDLMNDLKEQDKSIGLLTSESWAQSLSDDDFLEQASSFIMSQRLQEREYIYFQGLAECTEPSVLRSFFLSIVDSVRMRNGHVEMLTFKNGISHKFTYKAI

SEQ ID NO: 1085 - protein, 574 aa, Unknown
  Description of Unknown: Integrase B1086 sequence
  PTHR30461:SF3,SM00857,G3DSA:1.10.10.2600,IPR036162,PF13408, IPR025827,G3DSA:3.40.50.1390,PS51737,IPR006119,IPR038109, PF07508,IPR011109,SSF53041,PTHR30461,Coil, PS51736,cd00338,PF00239
MNVYRTREILKTCSIFDLKLKVAFYARVSTESEDQQVSIHHQDEYYRNFIAQNKNWVFVGAYIDNGISGIRTEKRDEFQRMMADAKAGKIDMIVTKEITRFARNTLDSIRYTRELLMYGVCVWFQNDNINTIDEDSELRLTIMSGIAQDESRKLSNRIKFGHAQSIKNGVVLGSRIYGYIKKDGKLTVDPKTAPMIKEIFEKYSTGEWSTSTIEKYLYKKGYRNYKGGKLSRDNIKKIIKNPKYKGYYCGGKVKVVDMFTKKQEFLPEDEWTMYKDDGNHVPQIVDESVWNKANVIMQTRSDAIKSHRTSFKQNNLFTGYIFCGNDGAPYWMKQHTIRGREDARWVCSYRIKNGAQSCNSFGIREKELRAMLADLINKSGDIQTAIEKYISLVEKNIDFSNDGAEINRLKNMVLQIEKKKDKLLDLNLDGIITNSEYLEKSEKFKDEIQDISNKLSELESKEEANKDSHLKLKEIGKILNDLQGVGPEDITKTVLGEFLDKIVINPKRPQECEILFFLKTGDVKKKSIIERDKQGCSEYFFLNKFSERHAVFYRKINYVDGCEKEFNYTYAFAI

SEQ ID NO: 1086 - protein, 574 aa, Unknown
  Description of Unknown: Integrase B1087 sequence
  PTHR30461:SF3,SM00857,G3DSA:1.10.10.2600,IPR036162,PF13408, IPR025827,G3DSA:3.40.50.1390,PS51737,IPR006119,IPR038109, PF07508,SSF53041,IPR011109,PTHR30461,Coil, PS51736,cd00338,PF00239
MNVYRTREILKTCSIFDLKLKVAFYARVSTESEDQQVSIHHQDEYYRNFIAKNKNWVFVGAYIDNGISGIRTEKRDEFQRMMADAKTGKIDMIVTKEITRFARNTLDSIRYTRELLMYGVCVWFQNDNINTIDEDSELRLTIMSGIAQDESRKLSNRIKFGHAQSIKNGVVLGARIYGYIKKDGKLTVDPKTAPMVKEIFEKYSTGEWSTSTIEKYLYKKGYRNYKGGKLSRDNIKKIIKNPKYKGYYCGGKVKVVDMFTKKQEFLPEDEWTMYKDDGNHVPQIVDESVWDKANVIMQTRSDAIKSHRTSFKQNNLFTGYIFCGNDGAPYWMKQHTIRGREDARWVCSYRIKNGAQSCNSFGIREKELRAMLADLINKSGDIQIAIEKYISLAERNIDFSNDGAEISRLKNMVLQLEKKKDKLLDLNLDGIITNSEYLDKSEKFKDEIQNINNKLSELESKEEANKDSHLKLKEIGKILNDLQGIGPEDITKTVLGEFLDKIVINPKRPQECEILFFLKTGDVKKKSIIERDKQGCSEYFFLNKFSERHAVFYRKINYVDGCEKEFNYTYAFAI

SEQ ID NO: 1087 - protein, 574 aa, Unknown
  Description of Unknown: Integrase B1088 sequence
  PTHR30461:SF3,SM00857,G3DSA:1.10.10.2600,IPR036162,PF13408, PS51737,G3DSA:3.40.50.1390,IPR025827,IPR006119,IPR038109, PF07508,SSF53041,IPR011109,PTHR30461,Coil, PS51736,cd00338,PF00239
MNVYRTREILKTCSIFDLKLKVAFYARVSTESEDQQVSIHHQDEYYRNFIAQNKNWVFVGAYIDNGISGIRTEKRDEFQRMMADAKTGKIDMIVTKEITRFARNTLDSIRYTRELLMYGVCVWFQNDNINTIDEDSELRLTIMSGIAQDESRKLSNRIKFGHAQSIKNGVVLGARIYGYIKKDGKLTIDPKTAPMIKEIFEKYSTGEWSTSTIEKYLYKKGYRNYKGGKLSRDNIKKIIKNPKYKGYYCGGKVKVVDMFTKKQEFLPEDEWTMYKDDGNHVPQIVDESVWNKANVIMQTRSDAIKSHRTSFKQNNLFTGYIFCGNDGAPYWMKQRTARGREDVRWVCSYRIKNGAQSCNSFGIHEKELKIMLADLINKSGDIQAAIERYISLVEKNIDFSNDGAEINRLKNMILQLEKKKDKLLDLNLDGIITNSEYLEKNEKFKNEIQDISNKLSELESKEEANKDSHLKLKEIGKTLNGLQGIDPEDITKSVLGEFLDKIIVNPKRPQECEILFFLKTGDVKKKSIIERDKQSCSEYFFLNKFSERHAVFYRKINYVDGCEKEFNYTYAFAI

SEQ ID NO: 1088 - protein, 574 aa, Unknown
  Description of Unknown: Integrase B1089 sequence
  PTHR30461:SF3,IPR036162,PS51737,IPR011109,PTHR30461, PS00397,PF00239,G3DSA:1.10.10.2600,IPR006119,SSF53041, cd00338,SM00857,IPR025827,IPR038109,PS51736, IPR006118,PF13408,G3DSA:3.40.50.1390,PF07508,Coil
MRKAKENLQKEKPQRAAIYLRVSTSYQADRDSLPMQRKDLVGYCEYALNISDYTVFEDAGYSGKNTDRPAFQKMMMQIRNGMYSHLLVWKIDRISRNLLDFAQMYEELKTLGVTFISRNEQFDTSTAMGEAMLKMVLIFAELERKTTAERVTATMISRANDGTWNGGRVPFGYDYNKETQTFSINGDESYIVLQMYDLYEKTDSLVRTARELNKLGYVSRQHNPFSPVSIWIILRNPWYVGTYRYNYYKIPGRRAVKEESEWVVIENHHSPLVSKERFDRVQKMLDSNARYRNTPGRSSKQKNVNIFSGLIWCSCCGAAFTASPGKLHASGYRPTKYGCPNVRKTKTCNAKYTSDPVIGEFLLNFILNVINAQKGFEKINSPADLESRLLRGDAFRDVAKIDSASVAALYEMLSSFSPADSVLLKKPTVKKDLDPELRKLRADKRKTERALARLDHIYLYSNKQMSDKEYLVKKNDLMTDLKELDKSIGLLTSESWAQSLSDDDFLEQASSFIISQRLQEREYIYFQGLAESTDPAVLRAFFVSIIDSVRMRNGLVETLTFKNGISHTFTYKAI

SEQ ID NO: 1089 - protein, 574 aa, Unknown
  Description of Unknown: Integrase B1090 sequence
  PTHR30461:SF3,IPR036162,PS51737,IPR011109,PTHR30461, PS00397,PF00239,G3DSA:1.10.10.2600,IPR006119,SSF53041, cd00338,SM00857,IPR025827,IPR038109,PS51736, IPR006118,PF13408,G3DSA:3.40.50.1390,PF07508,Coil
MRKAKENLQKEKPQRAAIYLRVSTSYQADRDSLPMQRKDLVGYCEYALNISDYTVFEDAGYSGKNTDRPAFQKMMMQIRNGMYSHLLVWKIDRISRNLLDFAQMYEELKTLGVTFISRNEQFDTSTAMGEAMLKMVLIFAELERKTTAERVTATMISRANDGTWNGGRVPFGYDYNKETQTFSINGDESYIVLQMYDLYEKTDSLVRTARELNKLGYVSRQHNPFSPVSIWIILRNPWYVGTYRYNYYKIPGRRAVKEESEWVVIENHHSPLVSKERFDHVQKMLDSNARYRNTPGRSSKQKNVNIFSGLIWCSCCGAAFTASPGKLHASGYRPTKYGCPNVRKTKTCNAKYTSDPVIGEFLLNFILNVINAQKGFEKINSPADLESRLLRGDAFRDVAKIDSASVAALYEMLSSFSPADSVLLKKPTVKKDLDPELRKLRADKRKTERALARLDHIYLYSNKQMSDKEYLVKKNDLMTDLKELDKSIGLLTSESWAQSLSDDDFLEQASSFIISQRLQEREYIYFQGLAESTDPAVLRAFFVSIIDSVRMRNGVVETLTFKNGISHTFTYKAI

SEQ ID NO: 1090 - protein, 574 aa, Unknown
  Description of Unknown: Integrase B1091 sequence
  PTHR30461:SF3,SM00857,G3DSA:1.10.10.2600,IPR036162,PF13408, PS51737,G3DSA:3.40.50.1390,IPR025827,IPR006119,IPR038109, PF07508,IPR011109,SSF53041,PTHR30461,Coil, PS51736,cd00338,PF00239
MNVYRTREILKTCSIFDLKLKVAFYARVSTESEDQQVSIHHQDEYYRNFIAQNKNWVFVGAYIDNGISGIRTEKRDEFQRMMADAKTGKIDMIVTKEITRFARNTLDSIRYTRELLMYGVCVWFQNDNINTIDEDSELRLTIMSGIAQDESRKLSNRIKFGHAQSIKNGVVLGSRIYGYIKKDGKLTIDPKTAPMVKEIFEKYSTGEWSTSTIERYLYKKGYRNYKGGKLSRDNIKKIIKNPKYKGYYCGGKVKVVDMFTKKQEFLPEDEWTMYKDDGNHVPQIVDESVWNKANVIMQTRSDAIKSHRTSFKQNNLFTGYIFCGDDGAPYWMKQRTARGREDARWVCSYRIKNGAQSCNSFGIREKELRVMLADLINKSGDIQTAIEKYISLAEKNIDFSNDGAEINRLKNMILQLEKKKDKLLDLNLDGIITNSEYLEKNEKFKNEIQNISNKLSELESKEEANKDSHLKLKEIGKILNDLQGVGPEDITKTVLGEFLDKIVINPKRPQECEILFFLKTGDVKKKSIIGRDKQGCSEYFFLNKFSERHAVFYRKINYVDGCEKEFNYTYAFAI

SEQ ID NO: 1091 - protein, 574 aa, Unknown
  Description of Unknown: Integrase B1092 sequence
  PTHR30461:SF3,SM00857,G3DSA:1.10.10.2600,IPR036162,PF13408, IPR025827,PS51737,G3DSA:3.40.50.1390,IPR006119,IPR038109, PF07508,IPR011109,SSF53041,PTHR30461,Coil, PS51736,cd00338,PF00239
MNVYRTREILKTCSIFDLKLKVAFYARVSTESEDQQVSIHHQDEYYRNFIAQNKNWVFVGAYIDNGISGIRTEKRDEFQRMMADAKTGKIDMIVTKEITRFARNTLDSIKYTRELLMYGVCVWFQNDNINTIDEDSELRLTIMSGIAQDESRKLSNRIKFGHAQSIKNGVVLGSRIYGYIKKDGKLTVDPKTAPMIKEIFEKYSTGEWSTSTIEKYLYKKGYRNYKGGKLSRDNIKKIIKNPKYKGYYCGGKVKVVDMFTKKQEFLPEDEWTMYKDDGNHVPQIVDESVWNKANVIMQTRSDAIKSHRTSFKQNNLFTGYIFCGDDGAPYWMKQRTARGREDVRWVCSYRIKNGAQSCNSFGIHEKELKIMLADLINKSGDIQAAIERYISLVEKNIDFSNDGAEINRLKNMILQLEKKKDKLLDLNLDGIITNSEYLEKNEKFKNEIQDISNKLSELESKEEANKDSHLKLKEIGKILNDLQGIGPEDITKAVLGEFLDKIIVNPKRPQECEILFFLKTGDVKKKSIIERDEQSCSEYFFLNKFSERHAVFYRKINYVDGCEKEFNYTYAFAI

SEQ ID NO: 1092 - protein, 574 aa, Unknown
  Description of Unknown: Integrase B1093 sequence
  PTHR30461:SF3,SM00857,G3DSA:1.10.10.2600,IPR036162,PF13408, IPR025827,G3DSA:3.40.50.1390,PS51737,IPR006119,IPR038109, PF07508,SSF53041,IPR011109,PTHR30461,Coil, PS51736,cd00338,PF00239
MNVYRTREVLKTCSIFDLKLKVAFYARVSTESEDQQVSIHHQDEYYRNFIAKNKNWVFVGAYIDNGISGIRTEKRDEFQRMMADAKTGKIDMIVTKEITRFARNTLDSIRYTRELLMYGVCVWFQNDNINTIDEDSELRLTIMSGIAQDESRKLSNRIKFGHAQSIKNGVVLGARIYGYIKKDGKLTIDPKTAPMVKEIFEKYSTGEWSTSTIEKYLYKKGYRNYKGGKLSRDNIKKIIKNPKYKGYYCGGKVKVVDMFTKKQEFLPEDEWTMYKDDGNHVPQIVDESVWDKANVIMQTRSDAIKSHRTSFKQNNLFTGYIFCGNDGAPYWMKQHTIRGREDARWVCSYRIKNGAQSCNSFGIREKELRAMLADLINKSGDIQIAIEKYISLAERNIDFSNDGAEISRLKNMVLQLEKKKDKLLDLNLDGIITNSEYLEKNEKFKNEIQDISNKLSELESKEEANKDSHLKLKKIGKILNDLQGVGPEDITKTVLGEFLDKIVINPKRPQECEILFFLKTGDVKKKSIIEQDKQGCSEYFFLNKFSERHAVFYRKINYVDGCEKEFNYTYAFAI

SEQ ID NO: 1093 - protein, 574 aa, Unknown
  Description of Unknown: Integrase B1094 sequence
  PTHR30461:SF3,IPR036162,PS51737,IPR011109,PTHR30461, PS00397,PF00239,G3DSA:1.10.10.2600,IPR006119,SSF53041, cd00338,SM00857,IPR025827,IPR038109,PS51736, IPR006118,PF13408,G3DSA:3.40.50.1390,PF07508
MRKKKIDAPKEKPQRAAIYLRVSTAYQVDRDSLPMQRKDLVGYCEYALNISDYTIFEDAGYSGKNTDRPAFQKMMMQIRNGMYSHLLVWKIDRISRNLLDFAQMYEELKMLGVTFISRNEQFDTSTAMGEAMLKMVLIFAELERKTTAERVTATMISRANDGTWNGGRVPFGYDYNKETQTFSVNGDESFIVLEMYDLYEKTDSLVHTARELNERGYVSRQHNPFSPVSVWTILRNPWYIGTYRYNYYKIPGRKAIKDESEWIVIPDHHTPLVSKERFDRVQKMLDSNARYRNTPGRSATQKNVNIFSGLIWCACCGAAFTASPGKLHASGYRSAKYGCPNVRKTKTCNAKYTSDTVLGEFLLNFILNVTNAQKSFDQIKSPADLESRLLRGDTFKNVAGIDSASVAALYEMLVEYSPADSVLLKKPTVKKNLDPELRKLRADKRKTERALTRLDHIYLYSNKQMSDKEYLIKKNDLMNDLKEQDKSIGLLTSESWAQSLSDDDFLEQASSFIMSQRLQEREYIYFQGLAECTEPSVLRSFFLSIVDSVRMRNGHVEMLTFKNGISHKFTYKAI

SEQ ID NO: 1094 - protein, 574 aa, Unknown
  Description of Unknown: Integrase B1095 sequence
  PTHR30461:SF3,cd00338,SM00857,G3DSA:1.10.10.2600,IPR036162, PF13408,IPR025827,G3DSA:3.40.50.1390,PS51737,IPR006119, IPR038109,PF07508,SSF53041,IPR011109,PTHR30461, PS51736,Coil,PF00239
MGKKQKTNGGDAVIYARYSSHNQRDVSIEQQVEACRKHAAELGLTVTATYEDRAISGKTDKRPSFQRMMRDAEQHKFAYVLAWKSNRIGRNMMQALVNESRLVDCGVKVFYAEEDFDDNAAGRFALRSMMNVNQFYIENMAEDVKRGLYDNAKKGLVNGSLPLGYKRGADGKPEIDEPKAAIVREIYTRVAAGELFASIAADLNARGIRTARGREWNKGSFHVLCHNDRYRGIYMYGDIRIPGGMPRIISDELFYDAQEAYGMKKDNRYGRARHGAENYLLTGKLYCGHCGSYMVGISGTSKTGEMHYYYACQKHRLEHTCEKKAIRRDVIENAVARVIMMYCLDDETIDFIVDSTIAYFKQKDHELHIEAMENELAAVHQAISNLMKAIEAGIITPTTRTRLLDLEEQQAKLSAKINTAKAERVEIDRDDLIAGLQLFRTGDIKNKKFLAKLFNTFLLAVYLYDDNRLKIVFSFTGNHNNIEIPLELDNDCPDSESGPYETEVRMSHLECRKNSGTPPSSGGAEKGDGCSGGRFVRTAPLPPHSKCTVRTLGSNVTIQMVGSVFVLYCEIPTR

SEQ ID NO: 1095 - protein, 574 aa, Unknown
  Description of Unknown: Integrase B1096 sequence
  PTHR30461:SF3,SM00857,G3DSA:1.10.10.2600,IPR036162,PF13408, IPR025827,PS51737,G3DSA:3.40.50.1390,IPR006119,IPR038109, PF07508,IPR011109,SSF53041,PTHR30461,Coil, PS51736,cd00338,PF00239
MNVYRTREILKTCSIFDLKLKVAFYARVSTESEDQQVSIHHQDEYYRNFIAQNKNWVFVGAYIDNGISGIRTEKRDEFQRMMADAKTGKIDMIVTKEITRFARNTLDSIKYTRELLMYGVCVWFQNDNINTIDEDSELRLTIMSGIAQDESRKLSNRIKFGHAQSIKNGVVLGARIYGYIKKDGKLTIDPKTAPMVKEIFEKYSTGEWSTSTIEKYLYKKGYRNYKGGKLSRDNIKKIIKNPKYKGYYCGGKVKVVDMFTKKQEFLPEDEWTMYKDDGNHVPQIVDESVWNKANVIMQTRSDAIKSHRTSFKQNNLFTGYIFCGNDGAPYWMKQRTSRGREDVRWVCSYRIKNGAQSCNSFGIHEKELRIMLADLINKSGDIQTAIEKYISLVEKNIDFSNDGAEINRLKNMILQLEKKKDKLLDLNLDGIITNSEYIEKSEKFKDEIESINNKLSELESKEEANKDSHLKLKEIGKILNDLQGVGPEDITKTVLGEFLDKIVINPKRPQECEILFFLKTGDVKKKSIIERDKQGCSEYFFLNKFSERHAVFYRKINYVDGCEKEFNYTYAFAI

SEQ ID NO: 1096 - protein, 574 aa, Unknown
  Description of Unknown: Integrase B1097 sequence
  PTHR30461:SF3,IPR036162,PS51737,IPR011109,PTHR30461, PF00239,G3DSA:1.10.10.2600,IPR006119,SSF53041,cd00338, SM00857,IPR025827,IPR038109,PS51736,mobidb-lite, PF13408,G3DSA:3.40.50.1390,PF07508,Coil
MGKKQKTNGGDAVIYARYSSHNQRDVSIEQQVEACRKHAAELGLTVTATYEDRAISGKTDKRPSFQRMMRDAEQHKFAYVLAWKSNRIGRNMMQALVNESRLVDCGVKVFYAEEDFDDNAAGRFALRSMMNVNQFYIENMAEDVKRGLYDNAKKGLVNGSLPLGYKRGADGKPEIDEPKAAIVREIYTRVAAGELFASIADDLNARGIKTARGREWNKGSFHVLCHNDRYRGIYMYGDIRIPGGMPRIISDELFYDAQEAYSMKKDNRYGRARHGAENYLLTGKLYCGHCGGYMVGISGTSKTGEMHYYYACQKHRLEHTCEKKAIRRDVIENAVARAIMMYCLDDETIDFIVDSTIAYFKQKDHELHIEAMENELAAVQQAISNLMKAIEAGIITPTTRTRLLDLEEQQAKLSAKINTAKAERVEIDRDDLIAGLQLFRTGDIKNKKFLAKLFNTFLIAVYLYDDNRLKIVFSFTGNHNSVEIPLELDNDCPDSEIVSDETEVRMSHLECGGSGAVRTNLPPEQPSPFSAPPDEGGVPESFRHSKCTVRTLGSNVTIQMVGSVFVLYCEIPTR

SEQ ID NO: 1097 - protein, 574 aa, Unknown
  Description of Unknown: Integrase B1098 sequence
  PTHR30461:SF3,SM00857,G3DSA:1.10.10.2600,IPR036162,PF13408, IPR025827,PS51737,G3DSA:3.40.50.1390,IPR006119,IPR038109, PF07508,SSF53041,IPR011109,PF00239,PTHR30461, PS51736,Coil,cd00338
MNVYRTREILKTCSIFDLKLKVAFYARVSTESEDQQVSIHHQDEYYRNFIAKNKNWVFVGAYIDNGISGIRTEKRDEFQRMMADAKTGKIDMIVTKEITRFARNTLDSIRYTRELLMYGVCVWFQNDNINTIDEDSELRLTIMSGIAQDESRKLSNRIKFGHAQSIKNGVVLGSRIYGYIKKDGKLTVDPKTAPMIKEIFEKYSTGEWSTSTIEKYLYKKGYRNYKGGKLSRDNIKKIIKNPKYKGYYCGGKVKIVDMFTKKQEFLPEDEWTMYKDDGNHVPQIVDESVWEKANVIMQTRSNAIKSHRTSFKQNNLFTGYIFCGNDGAPYWMKQRTARGREDVRWVCSYRIKNGAQSCNSFGIHEKELRIMLADLINKSGDIQTAIERYIGLVEKNIDFSNDGAEINRLKNMIFQIEKKKDRLLDLNLDGIITNSEYLEKSEKFKGEIQNINNKIYELESKEEANKDSNLKLKEIGKTLNDLQGIGPEDITKAVLGEFLDKIIVNPKCPQECEILFFLKTGDVKKKSIIERDKQGCSEYFFLNKFSERHAVFYRKINYVDGCEKEFNYTYAFAI

SEQ ID NO: 1098 - protein, 573 aa, Unknown
  Description of Unknown: Integrase B1099 sequence
  PTHR30461:SF3,IPR036162,PS51737,IPR011109,PTHR30461, PS00397,PF00239,G3DSA:1.10.10.2600,IPR006119,SSF53041, SM00857,IPR025827,IPR038109,PS51736,cd03768, IPR006118,PF13408,G3DSA:3.40.50.1390,PF07508,Coil
MAYNAQNKTGAKVAIYVRVSTLHQIDRDSLPMQKQDLLAYAKLMLNTDDCVIFEDAGYSGKNTDRPKFQEMMSQMRARAFTHLLVWKIDRISRNLLDFATMYNELKALGVTFVSKNEQFDTSTAMGEAMLKIILVFAELERNMTSERVTATMISRANNGLWNGGRIPYGYNYDYETHEFSINEEESKVVILMHDMYEQERSLVRVVRELNERGYRSRAGNLWSPVSLLIILRNVFYCGDYRYNMLKEGDRQKVKDESEWVTVPNHHVGIVPREQKERIMATLDSNSKLCKQRNLYKSAKHTHVFGGLIYCGSCGKPLGSTPGNLTRDGWHYSKYTCPTRRKSVTLCTGKSTSDPIIGEFVFNYILNMLNAQNDFDKISSPEELEKLLLIGDTFAYIDHIEPNGLNDLFNVLSSGAVKGAVFGKGASLPTKKATVEPEVARLRNEKQKTERALDRLRSLYLYADEAMSEAEYMIQKNKLEETLEDINDQIGMMNTDSWQQSVSDEEFIQRASEFIIAQKLSGRKYVNYKRLAMSVDSEVLKNFVVSIIDSITIQDGLVSNIVFKNGLCHTFIFR

SEQ ID NO: 1099 - protein, 573 aa, Unknown
  Description of Unknown: Integrase B1100 sequence
  PTHR30461:SF3,SM00857,G3DSA:1.10.10.2600,IPR036162,PF13408, IPR025827,G3DSA:3.40.50.1390,PS51737,IPR006119,IPR038109, PF07508,SSF53041,IPR011109,PF00239,PTHR30461, PS51736,Coil,cd00338
MAKVKLPDKPRVAIYTRVSTLHQIDKDSLPMQRQDLINYARLILNTEDYVVYEDAGYSGKNTDRPKFQEMMQQVRLGMFTHILVWKIDRISRNLLDFATMYSELKQLGVVFVSKNEQFDTSSAMGEAMLKIILIFAELERNMTSERVTAAMLSRAANGQWNGGRVPLGYDYDPETKTFTINESEAAVVKIIHDKYEQERSLVSLARYLNGHGYRTRTGCTYSPSTLLIILRNVFYCGDYRYNVLKDGDRQKRKKESEWITVKDHHPAIISREQKEEIARILKENRRLECERRGIYSKKKNVHVFGGLVICGNCGHAMTSTIRPADQDGIRWSVYVCPTKRRSEYLCKGRATSEVVLGEFVFNYILNMLNVQKNFDSINSVEDMEKMLLSGSTFRDVDGIERAGLDDLYNMLASGLTEKAPFDSSVEVRKKPVVSDIELENLNTEKTRIERAAERLQNLYLYSDDSISQKDYIIQREKLMSQLAEVNEQIGMVMSNADEKDVSDEEFVHAASKFILTQKLEGRTYIYYKRLATTVSREVLRSFVMSIIENITIYDGQVQTIVFKNGLSHTFILK

SEQ ID NO: 1100 - protein, 573 aa, Unknown
  Description of Unknown: Integrase B1101 sequence
  PTHR30461:SF3,IPR036162,PS51737,IPR011109,PTHR30461, PS00397,PF00239,G3DSA:1.10.10.2600,IPR006119,SSF53041, SM00857,IPR025827,IPR038109,PS51736,cd03768, IPR006118,PF13408,G3DSA:3.40.50.1390,PF07508,Coil
MVLNNIKPAMKIRVAIYIRVSTLHQIDKDSLPMQRKDLIAYSKLILNTDDYVIFEDAGYSGKNTIRPRYQDMMDQIRTGAFTHLLVWKIDRISRNLLDFAQMYQELKELNVTFVSKSEQFDTSTAMGEAMLKIILVFAELERNMTSERVTATMISRANTGKWNGGRVPYGYKYDQEEEDFLIIASESNVVKLIHDKYEELQSLVYLARYMNEHGYRTRSGNEWSPPSLAIILKSWWYCGCYEYNKRKAGNRQKLKDESEWIMIEDHHIAIISYEQKERVLAILKGNKRFATEHNLYVKGIHVHVFGGLCWCKNCGKKMTSTSSNKNRSWQYSKYLCSTRRRSLTKCRGRSTSDPVLGEFIFNYILNMLNAQKGFDSIHSPADLQDALLTGDAFSDIKSIDQEELNDLYNILSSSVVGNIYGRSFNVNKAKKNDEVQSSLTILKAEKKKLDRALDRLTNLYLYDDMAISEKDYMTKKTEIETKIAEIDEKIGIVNKNSVDNSITDEEFVDKASTFIITQKLTNRNYISYKRLATSVDPKILYMFTHDVIDYIDIYNGKVQRIVFRNGLSQTFIR

SEQ ID NO: 1101 - protein, 573 aa, Unknown
  Description of Unknown: Integrase B1102 sequence
  PTHR30461:SF3,SM00857,G3DSA:1.10.10.2600,IPR036162,PF13408, PS51737,IPR025827,G3DSA:3.40.50.1390,IPR006119,IPR038109, PF07508,SSF53041,IPR011109,PTHR30461,PS51736, cd00338,PF00239
MAKRSAKKNEYQSAEQIGVIYARYSSHNQKEESIEQQIAECSDFAAKNGIRIVGIYADKAVSGRSDRRPNFQRMMRDAEKRQFQIVVAYKSNRIARNMLNALQYEARLDLLGIKTLYAKEEFGNTAAGRFALRTMMNVNQFYSENMGEDIKRGMVDNANECKVNGMLPLGYVKSKEGKYAIAPDEAAVVREIFDSVLKDVPVAEIARSLNQRGIHTKLGREWNKNSFHIMLKNDNYIGVYRHSGVVVEDGIPPILEKEVFTAVQEKLANKKKTAGRRSANGEYLLTGKLFCGYCGSYMIGVSGTGENGTVHNYYQCQKRHAEGRCEKKNVRRDFIEKLIARLTQDYILQDDTIEWIADSTMSFQAMARRESGVAQLERDLADNRKVAKNIMAAIEQGIITETTKARLLEVEGTIRDLERSLSVAKAAMQPIERERVVFSLEQMREGNVGSKEHQKKLIDTFVKSVTLWDDRIQIDYYHTPGKHKFSYSLEELTSKAENESNASDVRTDSLELHHCRRELHRFTTAFLLAAAPSRLHGTIKKTQESNSCVFFACIDGCVPQCPARLGIVWSSKR

SEQ ID NO: 1102 - protein, 573 aa, Unknown
  Description of Unknown: Integrase B1103 sequence
  PTHR30461:SF3,cd00338,SM00857,G3DSA:1.10.10.2600,IPR036162, PF13408,PS51737,G3DSA:3.40.50.1390,IPR025827,IPR006119, IPR038109,PF07508,SSF53041,IPR011109,PTHR30461, PS51736,Coil,PF00239
MSSVDKIAVVYARYSSHGQTEQSIEGQIAAAQKYAEQHGYTIIHVYADRAMTGRNDDREQFQKMLSDTAMHQFGVILLWKIDRFGRNREEIAFNRYRCKKNGVRVERVAEDVPDGPEGVILDSVLEGMAEYYSLQLAQNVRRGQRESAKKSMSIGGNKMLGYIVNPETKRYESDPKTASYVTEIFKRYANGETISEIVAWLNAQGIRTTRGSEFTVNSLHRLLKNEKYTGVYIFHDIRNEGGMPALTDRTTFDKVQEMLKVNRRAPARVWSKTEYLLTDKLFCGHCGAMMVGESGHGRNGIKHSYYTCLNRKKKKSCDKKPVRQDVIESLVLRAIGKLLENPATLENIADQVWAAYERSDTSGDAIKALDKQIADVDRALSNVMKAIEMGIINEMTKTRMDELTNQKQALSTARAEAGLAEGFKLTRDMILFFLQEISALDMADRDSQKRLIKTFVNAIYLYDDHFDIAFNYTDNGNVVVRMREINDAARGEMFGRCAQCPTKKDPQLRLRVLFCAGAGRIRTGRPSADGKKQSCGLFFRPRLANPPAPTKKLWQRYCRSFFLCCIAQNRQRR

SEQ ID NO: 1103 - protein, 573 aa, Unknown
  Description of Unknown: Integrase B1104 sequence
  PTHR30461:SF3,SM00857,G3DSA:1.10.10.2600,IPR036162,PF13408, IPR025827,PS51737,G3DSA:3.40.50.1390,IPR006119,IPR038109, PF07508,SSF53041,IPR011109,PF00239,PTHR30461, PS51736,Coil,cd00338
MDLYTVRNNIMKGVPLQELNLRVCFYARVSTDKDEQLHSLSNQISFFNDYISKVPNWEFIGSYIDEGISGTQVKKREEFLRMIEDAKRHKFDLILTKEISRFSRSTLDSIMYTQELLSNGVGVYFLNDNINTILPDSELRLTMMSSIAQDEVRKLSERVSFGMKRSIDNGVVLGCSNIYGYVKDKGKLVIDDEQAKMIKIIFDRYANTTDGLSKVSRYLYSLGYKSKTGKRIDTTILTRIIENPKYKGYYCGHKSKVLDYRTKQKKRLNESDWIIYKDYDNVPPIVSEELWERANIKLKQRQDSFTNRAVNKKVFQNRYTYSGKIYCGCHNLTYHRSSAGKRKNNPVWECQVYRKESLKGCSNPRVFEIELEEVFKDVFNKLLKKRNTIFDEIINECKNYLETNNSESDIKSLESKILVLNNKKDKLLELVMEEYLSKEDYKKQIDLINEDLNTYHNKINELKNNKKDKNYIENKINEIKNALEKCLEDNECYSDIFNELIDKIIVHKQNDKQIKLDIFIKTGESINTLSDSLGKKFHLLDSYTTSNSGIRCCQWGKTISTIHIKKYLRKRNG

SEQ ID NO: 1104 - protein, 573 aa, Unknown
  Description of Unknown: Integrase B1105 sequence
  PTHR30461:SF3,IPR036162,PS51737,IPR011109,PTHR30461, PS00397,PF00239,G3DSA:1.10.10.2600,IPR006119,SSF53041, SM00857,IPR025827,IPR038109,PS51736,cd03768, IPR006118,PF13408,G3DSA:3.40.50.1390,PF07508,Coil
MAYNAQNKTGARVAIYVRVSTLHQIDRDSLPMQKQDLLAYAKLMLNTDDCVIFEDAGYSGKNTDRPKFQEMMSQMRAGAFTHLLVWKIDRISRNLLDFATMYNELKALGVTFVSKNEQFDTSTAMGEAMLKIILVFAELERNMTSERVTATMISRANNGLWNGGRIPFGYDYDYETHEFSVNEEESKVVILMHDMYEQERSLVRVVRELNERGYRSRAGNLWSPVSLLIILRNVFYCGDYRYNMLKEGDRQKVKDESEWVTVENHHVAIIPKDQKERIMATLDSNSKLCKQRNIYKSSKHTHVFGGLIYCGSCGKPLGSTPGNLTRDGWHYSKYTCPTRRKSVTLCTGKSTSDPIIGEFVFNYILNMLNAQNDFEKISSPEELEKLLLIGDTFAYIDHIEPNGLNDLFNVLSSGAVKGAVFGKGASLPTKKATVEPEVARLRNEKQKTERALDRLRSLYLYADEAMSEAEYMIQKNKLEETLEDINDQIGMMNTDSWQQSVSDEEFIQRASEFIIAQKLSGRKYVNYKRLAMSVDSEVLKNFVVSIIDSITIQDGLVSNIVFKNGLCHTFIFR

SEQ ID NO: 1105 - protein, 573 aa, Unknown
  Description of Unknown: Integrase B1106 sequence
  PTHR30461:SF3,SM00857,G3DSA:1.10.10.2600,IPR036162,PS51737, G3DSA:3.40.50.1390,IPR006119,IPR038109,PF07508,IPR011109, SSF53041,PTHR30461,Coil,PS51736,cd00338, PF00239
MYDIYNQKPTSRKVVIYARVSTEHEAQLSALENQKDWYKPILQQHPEWDIVKMYVDEGITGTSAKKRPQFMQMIQDASSGNFDLILTREVSRFARNTVDTLQYTRELKSKGVEVFFLNDNIKTFDGDGELRLTIMATLAQDESRKTSVRVKSGQQTSMENGVFYGNGNILGYDRVGKDMVINPEQAKTVRMIFDWYLDGWGMRKIQFELEKAGRLTAMGKSNWHVSNISKILRNSFYCGIITYHKEFTPDFLEQKKIRNFGDMEFTQVRGNHKPIITEEEYDQAQKRINSRRKTLSVDTSGQRMYGEKPPSDVWVKLLECECGHKFNRKMWHNTTKGKQYGYQCYSSIRTGTVRTRLNKGLPIDGICQTPMIAGWKLQMMAKYIFKNYLSDTDQVLSLAESMLEKHIDDEEEVCDNTDIINQKKEELQKLSKRLDNLIEMRADGELTRDIFILKKESTENSISQLKKELAELEPSEIESEIDEVTSKEKITILKYALDQYTNFDSDADIPESVIEAFVEKIIARKDGFDWYLRFNPEESPMGCLVDGKRKRGAKVSSFCSPQHRQLSLRRMHN

SEQ ID NO: 1106 - protein, 573 aa, Unknown
  Description of Unknown: Integrase B1107 sequence
  PTHR30461:SF3,cd00338,SM00857,G3DSA:1.10.10.2600,IPR036162, PF13408,PS51737,G3DSA:3.40.50.1390,IPR025827,IPR006119, IPR038109,PF07508,SSF53041,IPR011109,PTHR30461, PS51736,Coil,PF00239
MAKVKLPDKPRVAIYTRVSTLHQIDKDSLPMQRQDLINYARLILNTEDYVVYEDAGYSGKNTDRPKFQEMMQQVRLGMFTHILVWKIDRISRNLLDFATMYSELKQLGVVFVSKNEQFDTSSAMGEAMLKIILIFAELERNMTSERVTAAMLSRAANGQWNGGRVPLGYDYDPETKTFTINESEAAVVKIIHDKYEQERSLVSLARYLNGHGYRTRTGCTYSPSTLLIILRNVFYCGDYRYNVLKDGDRQKRKKESEWITVKDHHPAIISREQKDEIERILKENRRLECERRGIYSKKKNVHVFGGLVICGNCGHAMTSTIRPADQDGIRWSVYVCPTKRRSEYLCKGRATSEVVLGEFVFNYILNMLNVQKNFDSINSVEDMEKMLLSGSTFRDVDGIERSGLDDLYNMLASGLTEKAPFDSSVEVRKKPVVSDIELENLNMEKSKIERAAERLQNLYLYSDDSISQKDYIVQREKLMSQLAEVNEQIGMVMSNADEKDVSDEEFVHAASKFILTQKLEGRTYIYYKRLATTVSREVLRSFVMSIIENITIYDGRVQTIVFKNGLSHTFILK

SEQ ID NO: 1107 - protein, 573 aa, Unknown
  Description of Unknown: Integrase B1108 sequence
  PTHR30461:SF3,IPR036162,PS51737,IPR011109,PTHR30461, PS00397,PF00239,G3DSA:1.10.10.2600,IPR006119,SSF53041, SM00857,IPR025827,IPR038109,PS51736,cd03768, IPR006118,PF13408,G3DSA:3.40.50.1390,PF07508,Coil
MAYNTQNKTGARVAIYVRVSTLHQIDRDSLPMQKQDLLAYAKLMLNTDDCVIFEDAGYSGKNTDRPKFQEMMSQMRAGAFTHLLVWKIDRISRNLLDFATMYNELKALGVTFVSKNEQFDTSTAMGEAMLKIILVFAELERNMTSERVTATMISRANNGLWNGGRIPYGYDYDYETHEFSVNEEESKVVILMHDMYEQERSLVRVVRELNERGYRSRAGNLWSPVSLLIILRNVFYCGDYRYNMLKEGDRQKVKDESEWVTVENHHVAIIPKDQKERIMATLDSNSKLCKQRNIYKSSKHTHVFGGLIYCGSCGKPLGSTPGNLTRDGWHYSKYTCPTRRKSVTLCTGKSTSDPIIGEFVFNYILNMLNAQNDFDKISSPEELEKLLLIGDTFAYIDHIESNGLNDLFNVLSSGTVKGAVFGKGASLPTKKATVEPEVARLRNEKQKTERALDRLRSLYLYADEAMSEAEYMIQKNKLEETLEDINDQIGMMNTDSWQQSVSDEEFIQRASEFIIAQKLSGRKYVNYKRLAMSVDSEVLKNFVVSIIDSITIQDGLVSNIVFKNGLCHTFIFR

SEQ ID NO: 1108 - protein, 573 aa, Unknown
  Description of Unknown: Integrase B1109 sequence
  PTHR30461:SF3,IPR036162,PS51737,IPR011109,PTHR30461, PS00397,PF00239,G3DSA:1.10.10.2600,IPR006119,SSF53041, SM00857,IPR025827,IPR038109,PS51736,cd03768, IPR006118,PF13408,G3DSA:3.40.50.1390,PF07508,Coil
MAYNAQNKTGARVAIYVRVSTLHQIDRDSLPMQKQDLLAYAKLMLNTDDCVIFEDAGYSGKNTDRPKFQEMMSQMRAGAFTHLLVWKIDRISRNLLDFATMYNELKALGVTFVSKNEQFDTSTAMGEAMLKIILVFAELERNMTSERVTATMISRANNGLWNGGRIPYGYDYDYETHEFSVNEEESKVVILMHDMYEQERSLVRVVRELNERGYRSRAGNLWSPVSLLIILRNVFYCGDYRYNMLKEGDRQKVKDESEWVTVENHHVAIIPKDQKERIMATLDSNSKLCKQRNIYKSSKHTHVFGGLIYCGSCGKPLGSTPGNLTRDGWHYSKYTCPTRRKSVTLCTGKSTSDPIIGEFVFNYILNMLNAQNDFDKISSPEELEKLLLIGDTFAYIDHIESNGLNDLFNVLSSGTVKGAVFGKGASLPTKKATVEPEVARLRNEKQKTERALDRLRSLYLYADEAMSEAEYMIQKNKLEETLEDINDQIGMMNTDSWQQSVSDEEFIQRASEFIIAQKLSGRKYVNYKRLAMSVDSEVLKNFVVSIIDSITIQDGLVSNIVFKNGLCHTFIFR

SEQ ID NO: 1109 - protein, 573 aa, Unknown
  Description of Unknown: Integrase B1110 sequence
  PTHR30461:SF3,cd00338,SM00857,G3DSA:1.10.10.2600,IPR036162, PF13408,IPR025827,PS51737,G3DSA:3.40.50.1390,IPR006119, IPR038109,PF07508,SSF53041,IPR011109,PTHR30461, PS51736,Coil,PF00239
MPHPAVALDKKPVCGYYSRKRVFCEVVLMHGAYILARYSTDRQNEDSIEVQVSACRKWCDERSLPVLDVFADEATSGMKDTRPQYARMMRQLDRGGADTVVIYDQSRMFRKMSAWFDFRDRLARQGVRVVSVTQPMIGGDLRDPANFVAEGSMALFNQMWVLQTRQKVVAKMRYMAEQGLHTGGTPPLGYKVVDGRLAIDTAEAETVRLIFGLYASGMTYREIIRRLNAEGRHTKRGGNFGVNSLHDLLKNPKYVGDLIYGKVAKRPDGSRNSHTAAEDAIVVKDVLPAIVDRETWEKVQLKMQENKRSAAGRPASAREYPLKGKVFCRECKSAMLVTASNRGAKRYYYYACAAKHRKGLCDNTPISAGTLETLVADAVRQRLGQPGNVEGLIRILREQRSKLSGSAVQRLRELQKRDKEISKQLDAAVAAVLAGLHSPTLTAKVNALEAERAKIAHDMQQLRAQVSGAEIDEPHLRELLALAMQDDAAVLSIVVRVEVGKDEIAVWTLLDADPNGDFDFAEDGVPITPSEVAPSYNNSGCPATGTTNYYNIVTPAGLLLFYIARPRQRDRRS

SEQ ID NO: 1110 - protein, 573 aa, Unknown
  Description of Unknown: Integrase B1111 sequence
  PTHR30461:SF3,IPR036162,PS51737,IPR011109,PTHR30461, PS00397,PF00239,G3DSA:1.10.10.2600,IPR006119,SSF53041, SM00857,IPR025827,IPR038109,PS51736,cd03768, IPR006118,PF13408,G3DSA:3.40.50.1390,PF07508,Coil
MAYNAQNKTGARVAIYVRVSTLHQIDRDSLPMQKQDLLAYAKLMLNTDDCVIFEDAGYSGKNTDRPKFQEMMSQMRAGAFTHLLVWKIDRISRNLLDFATMYNELKALGVTFVSKNEQFDTSTAMGEAMLKIILVFAELERNMTSERVTATMISRANNGLWNGGRIPYGYDYDYETHEFSVNEEESKVVILMHDMYEQERSLVRVVRELNERGYRSRAGNLWSPVSLLIILRNVFYCGDYRYNMLKEGDRQKVKDESEWVTVENHHVAIIPKDQKERIMATLDSNSKLCKQRNIYKSSKHTHVFGGLIYCGSCGKPLGSTPGNLTRDGWHYSKYTCPTRRKSVTLCTGKSTSDPIIGEFVFNYILNMLNAQNDFDKINSPEELEKLLLIGDTFAYIDHIESNGLNDLFNVLSSGTVKGAVFGKGASLPTKKATVEPEVARLRNEKQKTERALDRLRSLYLYADEAMSEAEYMIQKNKLEETLEDINDQIGMMNTDSWQQSVSDEEFIQRASEFIIAQKLSGRKYVNYKRLAMSVDSEVLKNFVVSIIDSITIQDGLVSNIVFKNGLCHTFIFR

SEQ ID NO: 1111 - protein, 573 aa, Unknown
  Description of Unknown: Integrase B1112 sequence
  PTHR30461:SF3,IPR036162,PS51737,IPR011109,PTHR30461, PS00397,PF00239,G3DSA:1.10.10.2600,IPR006119,SSF53041, SM00857,IPR025827,IPR038109,PS51736,cd03768, IPR006118,PF13408,G3DSA:3.40.50.1390,PF07508,Coil
MAYNAQNKTGARVAIYVRVSTLHQIDRDSLPMQKQDLLAYAKLMLNTDDCVIFEDAGYSGKNTDRPKFQEMMSQMRAGAFTHLLVWKIDRISRNLLDFATMYNELKALGVTFVSKNEQFDTSTAMGEAMLKIILVFAELERNMTSERVTATMISRANNGLWNGGRIPYGYDYDYETHEFSVNEEESKVVILMHDMYEQERSLVRVVRELNERGYRSRAGNLWSPVSLLIILRNVFYCGDYRYNMLKEGDRQKVKDESEWVTVENHHVAIIPKDQKERIMATLDSNSKLCKQRNIYKSSKHTHVFGGLIYCGSCGKPLGSTPGNLTRDGWHYSKYTCPTRRKSVTLCTGKSTSDPIIGEFVFNYILNMLNAQNDFDKISSPEELEKLLLIGDTFAYIDHIEPNGLNDLFNVLSSGTVKGAVFGKGASLPTKKATVEPEVARLRNEKQKTERALDRLRNLYLYADEAMSEAEYMIQKNKLEETLEDINDQIGMMNTDSWQQSVSDEEFIQRASEFIIAQKLSGRKYVNYKRLAMSVDSEVLKNFVVSIIDSITIQDGLVSNIVFKNGLCHTFIFR

SEQ ID NO: 1112 - protein, 573 aa, Unknown
  Description of Unknown: Integrase B1113 sequence
  PTHR30461:SF3,IPR036162,PS51737,IPR011109,PTHR30461, PS00397,PF00239,G3DSA:1.10.10.2600,IPR006119,SSF53041, SM00857,IPR025827,IPR038109,PS51736,cd03768, IPR006118,PF13408,G3DSA:3.40.50.1390,PF07508,Coil
MAYNAQSKTGARVAIYVRVSTLHQIDRDSLPMQKQDLLAYAKLMLNTDDCVIFEDAGYSGKNTDRPKFQEMMSQMRAGAFTHLLVWKIDRISRNLLDFATMYNELKALGVTFVSKNEQFDTSTAMGEAMLKIILVFAELERNMTSERVTATMISRANNGLWNGGRIPFGYDYDYETHEFSVNEEESKVVILMHDMYEQERSLVRVVRELNERGYRSRAGNLWSPVSLLIILRNVFYCGDYRYNMLKEGDRQKVKDESEWVTVENHHVAIIPKDQKERIVATLDSNSKLCKQRNIYKSSKHTHVFGGLIYCGSCGKPLGSTPGNLTRDGWHYSKYTCPTRRKSVTLCTGKSTSDPIIGEFVFNYILNMLNAQNDFEKISSPEELEKLLLIGDTFAYIDHIEPNGLNDLFNVLSSGAVKGAVFGKGASLPTKKATVEPEVARLRNEKQKTERALDRLRSLYLYADEAMSEAEYMIQKNKLEETLEDINDQIGMMNTDSWQQSVSDEEFIQRASEFIIAQKLSGRKYVNYKRLAMSVDSEVLKNFVVSIIDSITIQDGLVSNIVFKNGLCHTFIFR

SEQ ID NO: 1113 - protein, 573 aa, Unknown
  Description of Unknown: Integrase B1114 sequence
  PTHR30461:SF3,SM00857,G3DSA:1.10.10.2600,IPR036162,PF13408, IPR025827,PS51737,G3DSA:3.40.50.1390,IPR006119,IPR038109, PF07508,IPR011109,SSF53041,PF00239,PTHR30461, PS51736,Coil,cd00338
MAKVKLPDKPRVAIYTRVSTLHQIDKDSLPMQRQDLINYARLILNTEDYVVYEDAGYSGKNTDRPKFQEMMQQVRLGMFTHILVWKIDRISRNLLDFATMYSELKQLGVVFVSKNEQFDTSSAMGEAMLKIILIFAELERNMTSERVTAAMLSRAANGQWNGGRVPLGYDYDPETKTFTINESEAAVVKIIHDKYEQERSLVSLARYLNGHGYRTRTGCTYSPSTLLIILRNIFYCGDYRYNVLKDGDRQKRKKESEWITVKDHHPAIISREQKEEIARILKENRRLECERRGIYSKKKNVHVFGGLVICGNCGHAMTSTIRPADQDGIRWSVYVCPTKRRSEYLCKGRATSEVVLGEFVFNYILNMLNVQKNFDSINSVEDMEKMLLSGSTFRDVDGIERAGLDDLYNMLASGLTEKAPFDSSVEVRKKPVVSDIELENLNTEKTRIERAAERLQNLYLYSDDSISQKDYIIQREKLMSQLAEVNEQIGMVMSNADEKDVSDEEFVHAASKFILTQKLEGRTYIYYKRLATTVSREVLRSFVMSIIENITIYDGRVQTIVFKNGLSHTFILK

SEQ ID NO: 1114 - protein, 573 aa, Unknown
  Description of Unknown: Integrase B1115 sequence
  PTHR30461:SF3,cd00338,SM00857,G3DSA:1.10.10.2600,IPR036162, PF13408,PS51737,IPR025827,G3DSA:3.40.50.1390,IPR006119, IPR038109,PF07508,IPR011109,SSF53041,PTHR30461, PS51736,Coil,PF00239
MAKVKLPDKPRVAIYTRVSTLHQIDKDSLPMQRQDLINYARLILNTEDYVVYEDAGYSGKNTDRPKFQEMMQQVRLGMFTHILVWKIDRISRNLLDFATMYSELKQLGVVFVSKNEQFDTSSAMGEAMLKIILIFAELERNMTSERVTAAMLSRAANGQWNGGRVPLGYDYDPETKTFTVNESEAAVVKIIHDKYEQERSLVSLARYLNGHGYRTRTGCTYSPSTLLIILRNVFYCGDYRYNVLKDGDRQKRKKESEWITVKDHHPAIISREQKDEIARILKENRRLECERRGIYSKKKNVHVFGGLVICGNCGHAMTSTIRPADQDGIRWSVYVCPTKRRSEYLCKGRATSEVVLGEFVFNYILNMLNVQKNFDSINSVEDMEKMLLSGSTFRDVDGIERAGLDDLYNMLASGLTEKAPFDSSVEVRKKPVVSDIELENLNTEKTKIERAAERLQSLYLYSDDSISQKDYIIQREKLMSQLAEVNEQIGMVMSNADEKDVSDEEFVHAASKFILTQKLEGRTYIYYKRLATTVSREVLRSFVMSIIENITIYDGRVQTIVFKNGLSHTFILK

SEQ ID NO: 1115 - protein, 573 aa, Unknown
  Description of Unknown: Integrase B1116 sequence
  PTHR30461:SF3,SM00857,G3DSA:1.10.10.2600,IPR036162,PF13408, PS51737,G3DSA:3.40.50.1390,IPR025827,IPR006119,IPR038109, PF07508,IPR011109,SSF53041,PTHR30461,PS51736, cd00338,PF00239
MAKRSAKKNEYQSAEQVGVIYARYSSHNQKEESIEQQISECSDFAAKNGIRIVGIYADKAVSGRSDRRPNFQRMMRDAEKRQFQIVIAYKSNRIARNMLNALQYEARLDLLGIKTLYAKEEFGNTAAGRFALRTMMNVNQFYSENMGEDIKRGMVDNANECKVNGMLPLGYVKSKEGKYAIAPDEAAVVREIFDSVLKDVPVAEIARSLNQRGIHTKLGREWNKNSFHIMLTNDNYIGVYRHSGVVVEDGIPPILEKEVFAAVQEKLANKKKTAGRRSANGEYLLTGKLFCGYCGSYMIGVSGTGENGTVHNYYQCQKRHAEGRCEKKNVRRDFIEKLIARLTQDYILQDDTIEWIADSTMSFQAMARRESGVAQLERDLADNRKVAKNIMAAIEQGIITETTKARLLEVEGTIHDLERSLSIAKAASQPIERERVVFSLEQMREGNVGSKEHQKKLIDTFVKSVTLWDDRIQIDYYHTPGKHKFSYSLEELTSKAENESNASDVRTDSLELHHCRRELHRFTTAFLLTAAPSRLYGTIKKTQESNSCVFFACIDGCVPQCPARLGIVWSSKR

SEQ ID NO: 1116 - protein, 573 aa, Unknown
  Description of Unknown: Integrase B1117 sequence
  PTHR30461:SF3,IPR036162,PS51737,IPR011109,PTHR30461, PF00239,G3DSA:1.10.10.2600,IPR006119,SSF53041,SM00857, IPR025827,IPR038109,PS51736,mobidb-lite,cd03768, PF13408,G3DSA:3.40.50.1390,PF07508,Coil
MKAVIYSRKSKFKEEGESIENQINMCKEYAERVLGIEEFDIYQDEGFSGGNTNRPQYKIMMKKIKEKKYTHLICYRLDRISRNVADFATTLEVLNKYNVSFISIKEQFDTSNAMGRAMMNISATFAQLERETIAERIKDNLRELSKTGRWLGGPAPLGYKSIEVENNDKAGKSRKKHILEINKDEEHIVKTVFSLFEEYKSFQKVSRMLEARKIYSRSNKVFSRELVKQMIINPTYAIADKNILNYLKQQGAEVYGYENINNFNGIMAYNRRKENGSFAPVDNWIISVGAHEGIIKSSSWIKCNELVKSIRINSSNRKGTGEKALLSGLVVCGKCNCGMAPRTNSSGKYMYRYYSCNLRNKASGRCKNDALNAYDAEEFVVNALKNLTKEEMIENYSYIKNKNLIKINNKISINNYKKEIENNKKIIKGLVVKMALLENDIEILDIFKNNIKAITEKNKELEQKILKLKQENDEIIDINETVDEMLLRLDNFKKFFDYTEDFEEKKNMIKNLIKFIIWNSDTRKLELVLIGSDKERPLPYYLPLSKVNRGNGTCRNNSHNGTSAYGKRFNKRT

SEQ ID NO: 1117 - protein, 573 aa, Unknown
  Description of Unknown: Integrase B1118 sequence
  PTHR30461:SF3,SM00857,G3DSA:1.10.10.2600,IPR036162,PS51737, G3DSA:3.40.50.1390,IPR006119,IPR038109,PF07508,IPR011109, SSF53041,PTHR30461,Coil,PS51736,cd00338, PF00239
MYDIYNQKPTSRKVVIYARVSTEHEAQLSALENQKDWYKPILQQHPEWDIVKMYVDEGITGTSAKKRPQFMQMIQDASSGNFDLILTREVSRFARNTVDTLQYTRELKSKGVEVFFLNDNIKTFDGDGELRLTIMATLAQDESRKTSVRVKSGQQTSMENGVFYGNGNILGYDRVGKDMVINPEQAKTVRMIFDWYLDGWGMRKIQFELEKAGRLTAMGKSNWHVSNISKILRNSFYCGIITYHKEFTPDFLEQKKIRNFGDMEFTQVRGNHKPIITEEEYDQAQKRINSRRKTLSVDTSGQRMYGEKPPSDVWVKLLECECGHKFNRKMWHNTTEGKQYGYQCYSSIRTGTVRTRLNKGLPIDGICQTPMIAGWKLQMMAKYIFKNYLSDTDQVLSLAESMLEKHIDDEEEVCDNTDIINQKKEELQKLLKRLDNLIEMRADGELARDIFILKKESTENSISQLKKELAELEPSEIESEIDEVTSKEKITILKYALDQYTNFDSDADIPESVIEAFVEKIIARKDGFDWYLRFNPEESPMGCLVDGKRKRGAKVSAFCSPQHRQLSLRRMHN

SEQ ID NO: 1118 - protein, 573 aa, Unknown
  Description of Unknown: Integrase B1119 sequence
  PTHR30461:SF3,SM00857,G3DSA:1.10.10.2600,IPR036162,PF13408, IPR025827,PS51737,G3DSA:3.40.50.1390,IPR006119,IPR038109, PF07508,SSF53041,IPR011109,PF00239,PTHR30461, PS51736,Coil,cd00338
MAKVKLPDKPRVAIYTRVSTLHQIDKDSLPMQRQDLINYARLILNTEDYVVYEDAGYSGKNTDRPKFQEMMQQVRLGMFTHILVWKIDRISRNLLDFATMYSELKQLGVVFVSKNEQFDTSSAMGEAMLKIILIFAELERNMTSERVTAAMLSRAANGQWNGGRVPLGYDYDPETKTFTVNESEAAVVKIIHDKYEQERSLVSLARYLNGHGYRTRTGCTYSPSTLLIILRNVFYCGDYRYNVLKDGDRQKRKKESEWITVKDHHPAIISREQKDEIARILKENRRLECERRGIYSKKKNVHVFGGLVICGNCGHAMTSTIRPADQDGIRWSVYVCPTKRRSEYLCKGRATSEVVLGEFVFNYILNMLNVQKNFDSINSVEDMEKMLLSGSTFRDVDGIERAGLDDLYNMLASGLTEKAPFDSSVEVRKKPVVSDIELENLNTEKTRIERAAERLQNLYLYSDDSISQKDYIIQREKLMSQLAEVNEQIGMVMSNADEKDVSDEEFVHAASKFILTQKLEGRTYIYYKRLATTVSREVLRSFVMSIIENITIYDGRVQTIVFKNGLSHTFILK

SEQ ID NO: 1119 - protein, 573 aa, Unknown
  Description of Unknown: Integrase B1120 sequence
  PTHR30461:SF3,SM00857,G3DSA:1.10.10.2600,IPR036162,PF13408, PS51737,G3DSA:3.40.50.1390,IPR025827,IPR006119,IPR038109, PF07508,IPR011109,SSF53041,PF00239,PTHR30461, PS51736,Coil,cd00338
MKKKTRCYIYTRVSTAIQVDGYSLDAQKDKLRKYAEFQDMEIVGEYSDEGHSGKNIKGRQEFMRMLNDIEDGKDGVDFVLVFKLSRFGRNAADVLSSLQLMQDYGVNLICVEDGIDSSKEAGKLLISIIAAVAEMKRENIRVQTMAGREQKAREGKWNGGFAPYGYKLENGELVIAEDEMEIIQMIFDRYIHTNDGINGVANYLNNHGYTKKLRQNGTIPGFSSSFLKKIIDNPVYMGKIAYGRRRTEKKTGTRNETHVVKQLEFPVYEGIHEAIISEEDWNLAQEKRSKNNYRREKIHDPEHAHILSGILKCPCCGKGMYGNIAKAGRKDKKTRYYYYCKNTVNATGHKCTFRCNIEQSQIDDVLAKLITAMTREGKFKDAIQDRIGATVDTSDLEKQLSVLNANLHQAETIKTRLEQQMDNLDVTDIHYDKKNSDLQRRLDTQYDKIDEVEEAIADLKSQVYELKKNQIDADSIYGFLNAFNELYAECTDAEKKQFMQVFIERIDIFPERREDGNWIRNIKFQFPVPVLRDGKEVVRVDSISLDKEQSGEHTVTLEKFPTLETVVLLSQLK

SEQ ID NO: 1120 - protein, 573 aa, Unknown
  Description of Unknown: Integrase B1121 sequence
  PTHR30461:SF3,IPR036162,PS51737,IPR011109,PTHR30461, PS00397,PF00239,G3DSA:1.10.10.2600,IPR006119,SSF53041, SM00857,IPR025827,IPR038109,PS51736,cd03768, IPR006118,PF13408,G3DSA:3.40.50.1390,PF07508,Coil
MAYNAQNKTGARVAIYVRVSTLHQIDRDSLPMQKQDLLAYAKLMLNTDDCVIFEDAGYSGKNTDRPKFQEMMSQMRAGAFTHLLVWKIDRISRNLLDFATMYNELKALGVTFVSKNEQFDTSTAMGEAMLKIILVFAELERNMTSERVTATMISRANNGLWNGGRIPYGYDYDYETHEFSVNEEESKVVILMHDMYEQERSLVRVVRELNERGYRSRAGNLWSPVSLLIILRNVFYCGDYRYNMLKEGDRQKVKDESEWVTVENHHVAIIPKDQKERIMATLDSNSKLCKQRNIYKSSKHTHVFGGLIYCGSCGKPLGSTPGNLTRDGWYYSKYTCPTRRKSVTLCTGKSTSDPIIGEFVFNYILNMLNAQNDFDKISSPEELEKLLLIGDTFAYIDHIESNGLNDLFNVLSSGTVKGAVFGKGASLPTKKATVEPEVARLRNEKQKTERALDRLCSLYLYADEAMSEAEYMIQKNKLEETLEDINDQIGMMNTDSWQQSVSDEEFIQRASEFIIAQKLSGRKYVNYKRLAMSVDSEVLKNFVVSIIDSITIQDGLVSNIVFKNGLCHTFIFR

SEQ ID NO: 1121 - protein, 573 aa, Unknown
  Description of Unknown: Integrase B1122 sequence
  PTHR30461:SF3,SM00857,G3DSA:1.10.10.2600,IPR036162,PS51737, G3DSA:3.40.50.1390,IPR006119,IPR038109,PF07508,SSF53041, IPR011109,PF00239,PTHR30461,PS51736,Coil, cd00338
MYDIYNQKPTSRKVVIYARVSTEHEAQLSALENQKDWYKPILQQHPEWDIVKMYVDEGITGTSAKKRPQFMQMIQDASSGNFDLILTREVSRFARNTVDTLQYTRELKSKGVEVFFLNDNIKTFDGDGELRLTIMATLAQDESRKTSVRVKSGQQTSMENGVFYGNGNILGYDRVGKDMVINPEQAKTVRMIFDWYLDGWGMRKIQFELEKAGRLTAMGKSNWHVSNISKILRNSFYCGIITYHKEFTPDFLEQKKIRNFGDMEFTQVRGNHKPIITEEEYDQAQKRINSRRKTLSVDTSGQRMYGEKPPSDVWVKLLECECGHKFNRKMWHNTTEGKQYGYQCYSSIRTGTVRTRLNKGLPIDGICQTPMIAGWKLQMMAKYIFKNYLSDTDQVLSLAESMLEKHIDDEEEVCDNTDIINQKKEELQKLLKRLDNLIEMRADGELARDIFILKKESTENSISQLKKELAELEPSEIESEIDEVTSKEKITILKYALDQYTNFDSDADIPESVIEAFVEKIIARKDGFDWYLRFNPEESPMGCLVDGKRKRGAKVSSFCSPQHRQLSQRRMHN

SEQ ID NO: 1122 - protein, 573 aa, Unknown
  Description of Unknown: Integrase B1123 sequence
  PTHR30461:SF3,IPR036162,PS51737,IPR011109,PTHR30461, PS00397,PF00239,G3DSA:1.10.10.2600,IPR006119,SSF53041, cd00338,SM00857,IPR025827,IPR038109,PS51736, IPR006118,PF13408,G3DSA:3.40.50.1390,PF07508,Coil
MQKNQTKKAALYIRVSTHYQIDKDSLPFQRNELINYAKYALGIDDYAIFEDAGYSGKNTDRPAYQDMMRRIRAKEFSHLCVWKIDRISRNLLDFAAMYEELKKFNCTFVSKNEQFDTSSAIGEAMLRIILVFAELERKLTAERVTSIMYSRANKGLWNGAPIPLGYKWDAKGKYPVIDEDTAVVVRYIYDQYERIHSTMKLSDKLNRENIKSARGGEWTGTTVKGILRNPFYKGTYRYNYKTQTGRIKPVEEQIVHEDNHPGIIDKEQWDRVNKILDENSTRSVAQLRSNVKYTHIFSKLLRCGQCGHTMGGGLDRARSDGYRPSRYYCTSHTRKAGCTNGVYSDVYLGPFVFNYIANLVRAQRALTDSQKPRDLERMLLRGKFFDSVAGIEQQGLLDTYNTILYGSGEDVMLQPSPEIAAQSASELELLDRDQKKYERALERIEQLYLYSEESMPEKDYVLKRNELKAMLDNIAERRAEVNSRLGLAPASSDFLEKATYFYLTNSLNQKRSLDFRKMVDTFEPKMLQDFLCSVIDHITVVDGHVASISFKNGLTNKFIYKATKPPKNASTKP

SEQ ID NO: 1123 - protein, 573 aa, Unknown
  Description of Unknown: Integrase B1124 sequence
  PTHR30461:SF3,IPR036162,PS51737,IPR011109,PTHR30461, PS00397,PF00239,G3DSA:1.10.10.2600,IPR006119,SSF53041, SM00857,IPR025827,IPR038109,PS51736,cd03768, IPR006118,PF13408,G3DSA:3.40.50.1390,PF07508,Coil
MAEQNEKIVALYVRVSTGYQVDKDSLPFQKKELKAYCEHVLHIDKNRIEIFEDAGKSGKNTKRPAFERMMGKVKSGQISHVIVYKIDRISRNLVDFSLMYDDFKYNNVTFISLNEQFDTSSAIGEAILKIILVFAELERKLTSERVTDVMIGRAQNGQWNGARVPYGWDWDEEKQCPVHSKKEAQYAIAMYEMYLKAKSTGKIRDYNNSHNIPTKRGGEWTSKTVTDFLRNPINKGAYRYNYRESARGRKKPNEEVVFIENAFPPLVAPEIWEKVNKILDINRDKRNMGGLHPIEKNCNVFAGLIQCGICGTGYIVDKKDRRRKNGFTPSMYHCGAKTKAIHCQNPNVSDVKIGPFIINYIAAMVRVSKSKRKIKTPEALEEMLLTDKVVFGDIAGLSTDSLNYTFEMITGKYTTDNAVWRANPVSTSNKESNPEEIEKLKNEIKKYSRAKERLEDAYYFSDDGMSEKEYLEKKNKFDSMRVSAENKIKELTEASISSGIDEDSFIKSATSFLLAHKIYNESHIVYSDLAGAIEEETLKEFFNLILDYIVVVDRRIVEIVFSNGLSHQFIYRK

SEQ ID NO: 1124 - protein, 573 aa, Unknown
  Description of Unknown: Integrase B1125 sequence
  PTHR30461:SF3,IPR036162,PS51737,IPR011109,PTHR30461, PS00397,PF00239,G3DSA:1.10.10.2600,IPR006119,SSF53041, SM00857,IPR025827,IPR038109,PS51736,cd03768, IPR006118,PF13408,G3DSA:3.40.50.1390,PF07508,Coil
MPISISEKLAAKKAAIYIRVSTHWQIDKDSLKVQRRELIAYVEIVLGIKDYVIFTDPGYSAKNTDRPDYQAMMDRIRTGEFTHLVVWKIDRISRNLLDFASMYDELKRLGVTFVSKNEQFDTSSAIGEAMLKIILVFAELERNMTSERVTAVMLSRANNGQWNGGRVPYGYSWDKESRTFSVVEQEAKVIRRMAELYEQYQSLLYVAKYMNEAGITTKTGKQWTPTTVRTMLTNPWYIGNYVYNVHSDGKGTEKRSEDEWITVEDHHPAILDERLFYRIKFLLTRNKRGGVPASQTYVRKNIHIFGGLLRCAKCGSNMIANQDRRRANGIRPSIYACGSRRRKQTSCTNKYISDMVLGPFVLNYIANIIRAAKSYDGSSSTDALSKKLLRGEAFSMVESINQDALASLMDAFASAGDADEYRPQLALSGSDGTITEFDTLRSKKQRIENAISRLNTLYLYDENAMPEKDFVMQRSDLSNQLEQVNARLDEIRSRDEQGQDLSDKFILKASYYIMAEKLIEDSYIDYEKYIRSIDHAVPKSFLSSVIDHIDADDGRVAAITFKNGIEHRFTYKA

SEQ ID NO: 1125 - protein, 573 aa, Unknown
  Description of Unknown: Integrase B1126 sequence
  PTHR30461:SF3,SM00857,G3DSA:1.10.10.2600,IPR036162,PF13408, IPR025827,PS51737,G3DSA:3.40.50.1390,IPR006119,IPR038109, PF07508,IPR011109,SSF53041,PF00239,PTHR30461, PS51736,Coil,cd00338
MAKVKLPDKPRVAIYTRVSTLHQIDKDSLPMQRQDLINYARLILNTEDYVVYEDAGYSGKNTDRPKFQEMMQQVRLGMFTHILVWKIDRISRNLLDFATMYSELKQLGVVFVSKNEQFDTSSAMGEAMLKIILIFAELERNMTSERVTAAMLSRAANGQWNGGRVPLGYDYDPETKTFTINESEAAVVKIIHDKYEQERSLVSLARYLNGHGYRTRTGCTYSPSTLLIILRNVFYCGDYRYNVLKDGDRQKRKKESEWITVKDHHPAIISREQKDEIARILKENRRLECERRGIYSKKKNVHVFGGLVICGNCGHAMTSTIRPADQDGIRWSVYVCPTKRRSEYLCKGRATSEVVLGEFVFNYILNMLNVQKNFDSINSVEDMEKMLLSGSTFRDVDGIERAGLDDLYNMLASGLTEKAPFDSSVEVRKKPVVSDIELENLNTEKTRIERAAERLQNLYLYSDDSISQKDYIIQREKLMSQLAEVNEQIGMVMSNADEKDVSDEEFVHAASKFILTQKLEGRTYIYYKRLATTVSREVLRSFVMSIIENITIYDGRVQTIVFKNGLSHTFILK

SEQ ID NO: 1126 - protein, 573 aa, Unknown
  Description of Unknown: Integrase B1127 sequence
  PTHR30461:SF3,IPR036162,PS51737,IPR011109,PTHR30461, PS00397,PF00239,G3DSA:1.10.10.2600,IPR006119,SSF53041, cd00338,SM00857,IPR025827,IPR038109,PS51736, IPR006118,PF13408,G3DSA:3.40.50.1390,PF07508,Coil
MSERLKRAALYVRVSTAYQIDKESLPVQREELQNYCQYALGINSFEIFEDAGYSAKNTSRPSYQQMMSRIRSGEFTHLVVWKIDRISRNLMDFTAMYSELKDLHVTFISKNEQFDTSSAIGEAMLKIILVFAELERKMTGERVSAVALSRANDGKWNGGRCPYGYTHAKGTSVFTVNPEEAKIVAWIFQTYSESGTVLSITKELNRQGLKTHYGAWNTNSVWTILTNPFYYGAMRYNYRNESKGLSSWSFRPPEDVIIVPGHHEAIITKEMFDICQSKLDRNNLKKRGTFKTYKRKNVHVFAGLITCGLCGSQYSATVDRKRSDGWRPSVYLCSKRRKSDSCTNKFVSEITLGPFVLNYIANIVRAQASFGKSTSSAVLQKKLLRGPEFADIDHIEQPGLDAMREFFMSEKYGVSEFEPSEVQISTEATERDLLDKEKRRIERAITRLSQLYLYEDDPMPQTEYFIERKKLNDQLDQIDQRIQELDDQATADRNMSDADFIAKASYYALTQEILNSRHVDYIRMIKSTDPQITKEFVNSVCSNFCILDGKVTSIRFRNGIEHRFVYKQIEPAE

SEQ ID NO: 1127 - protein, 573 aa, Unknown
  Description of Unknown: Integrase B1128 sequence
  PTHR30461:SF3,IPR036162,PS51737,IPR011109,PTHR30461, PS00397,PF00239,G3DSA:1.10.10.2600,IPR006119,SSF53041, SM00857,IPR025827,IPR038109,PS51736,cd03768, IPR006118,PF13408,G3DSA:3.40.50.1390,PF07508,Coil
MVLNNIKPAMKIRVAIYIRVSTLHQVDKDSLPMQRKDLIAYSKLILNTDDYVIFEDAGYSGKNTIRPRYQDMMEQIRTGAFTHLLVWKIDRISRNLLDFAQMYQELKELNVTFVSKNEQFNTSTAMGEAMLKIILVFAELERNMTSERVTATMISRANTGKWNGGRVPYGYKYDPEEEDFLIVANESNTVKLIHDKYEELQSLVYLARYMNEHGYRTRSGNEWSPPSLAIILKSWWYCGCYEYNKRKAGNRQKLKNESEWIMIEDHHIAIISYDQKERVLAILKGNKRFATEHNLYVKGIHVHVFGGLCWCKNCGKKMTSTSSNKNRSWQYSKYLCSTRRRSLTKCRGRSTSDPVLGEFIFNYILNMLNAQKGFDSIHSPADLQDALLTGDAFSDIKSIDQEELNDLYNILSSSVVGNIYGRSFNVNKAKKNDEVQSSLTILKAEKKKLDRALDRLINLYLYDDMAISEKDYMTKKTEIETKIAEIDEKIGIVNKNSVDNSITDEEFVDKASTFIITQKLTNRNYISYKRLATSVDPKILYMFTHDVIDYIDIYNGKVQRIVFRNGLSQTFIR

SEQ ID NO: 1128 - protein, 573 aa, Unknown
  Description of Unknown: Integrase B1129 sequence
  SM00857,G3DSA:1.10.10.2600,IPR036162,PF13408,IPR025827, G3DSA:3.40.50.1390,PS51737,IPR006119,IPR038109,PF07508, SSF53041,IPR011109,PTHR30461,Coil,cd00338, PF00239
MAYRKITDIRDTIGMRAVFYARVSTAEEEQLNAIELQIEENRGCIKDHGWKLVGEYIDRSKSGTMVKGRDDYQRLYEDLYEDLFDIVVIKDQERLQRNTLDWYLFINRVVQTGKLLFMYMDGKFYSPDDALITGVRAIIAEEFSRNLSKKLHNYHDHRIEKARQGQEIALQGSGNVYGWDKKDGKYYINPEQAKVRRLMCEGIMARKGSTLIAKELNDAGYRNTVGKPWKPMDIPKFVYDCKNVGTMIINKERHDFESKQTIKLPKEEWVYVENALPPIVTQEEWDLICKIHEERVIATGSDRRGKKTSGYSFSGKLVCGICGAPYWRKQRVSKDEYWVCSTKQTKGRRTRKRDSTMGKAGEINPLGCDNENISYNSLMEIMGVVSERLQANTDTIKQDMINWLTKLRKQLLEANGGHTEADLQRELSRKSKLLDAYLDGILNKQEYQKKAEELDERIIQLKAETEKNKANSGDIAEIDKVLANIDEEVSRYVDGNEKLKVEYLLEHLEQVQIFPDKVIVIVPILSEGIVVEKAQYVSREKWSRKIDIAETAVKSNGTNQRKHWNEWPCGIYA

SEQ ID NO: 1129 - protein, 573 aa, Unknown
  Description of Unknown: Integrase B1130 sequence
  PTHR30461:SF3,IPR036162,PS51737,IPR011109,PTHR30461, PS00397,PF00239,G3DSA:1.10.10.2600,IPR006119,SSF53041, cd00338,SM00857,IPR025827,IPR038109,PS51736, IPR006118,PF13408,G3DSA:3.40.50.1390,PF07508,Coil
MQKNQTKKAALYIRVSTHYQIDKDSLPFQRNELINYAKYALGIDDYAIFEDAGYSGKNTDRPAYQDMMRRIRAKEFSHLCVWKIDRISRNLLDFAAMYEELKKFNCTFVSKNEQFDTSSAIGEAMLRIILVFAELERKLTAERVTSIMYSRANKGLWNGAPIPLGYKWDAKGKYPVIDEDTAVVVRYIYDQYEKIHSTMKLSDKLNRENIKSARGGEWTGTTVKGILRNPFYKGTYRYNYKTQTGRIKPVEEQIIHEDNHPGIIDKEQWDRVNKILDENSTRSVAQLRSNVKYTHIFSKLLRCGQCGHTMGGGLDRARSDGYRPSRYYCTSHTSKSGCTNGVYSDVYLGPFVFNYIANLVRAQRALTDSQKPRDLERMLLRGKFFDNVAGIEQQGLLDTYNTILYGSGEDVMLQPSPEIAAQSASELELLDRDQKKYERALERIEQLYLYSEESMPEKDYVLKRNELKAMLDNIAERRAEVNSRLGLAPASSDFLEKATYFYLTNSLNQKRSLDFRKMVDTFEPKMLQDFLCSVIDHITVVDGHVASISFKNGLTNKFIYKATKPPKNASTKP

SEQ ID NO: 1130 - protein, 573 aa, Unknown
  Description of Unknown: Integrase B1131 sequence
  PTHR30461:SF3,SM00857,G3DSA:1.10.10.2600,IPR036162,PF13408, IPR025827,G3DSA:3.40.50.1390,PS51737,IPR006119,IPR038109, PF07508,SSF53041,IPR011109,PF00239,PTHR30461, PS51736,Coil,cd00338
MAKVKLPDKPRVAIYTRVSTLHQIDKDSLPMQRQDLINYARLILNTEDYVVYEDAGYSGKNTDRPKFQEMMQQVRLGMFTHILVWKIDRISRNLLDFATMYSELKQLGVVFVSKNEQFDTSSAMGEAMLKIILIFAELERNMTSERVTAAMLSRAANGQWNGGRVPLGYDYDPETKTFTVNESEAAVVKIIHDKYEQERSLVSLARYLNGHGYRTRTGCTYSPSTLLIILRNVFYCGDYRYNVLKDGDRQKRKKESEWITVKDHHPAIISREQKDEIARILKENRRLECERRGIYSKKKNVHVFGGLVICGNCGHAMTSTIRPADQDGIRWSVYVCPTKRRSEYLCKGRATSEVVLGEFVFNYILNMLNVQKNFDSISSLEDMEKMLLSGSTFRDVDGIERAGLDDLYNMLASGLTEKAPFDSSVEVRKKPVVSDIELENLNMEKTKIERAAERLQNLYLYSDDSISQKDYIIQREKLMSQLAEVNEQIGMVMSNADEKDVSDEEFVHAASKFILTQKLEGRTYIYYKRLATTVSREVLRSFVMSIIENITIYDGRVQTIVFKNGLSHTFILK

SEQ ID NO: 1131 - protein, 573 aa, Unknown
  Description of Unknown: Integrase B1132 sequence
  SM00857,G3DSA:1.10.10.2600,IPR036162,PF13408,PS51737, G3DSA:3.40.50.1390,IPR025827,IPR006119,IPR038109,PF07508, SSF53041,IPR011109,PTHR30461,Coil,cd00338, PF00239
MAYRRITDIRDTIGMRAVFYARVSTAEEEQLNAIELQIEENRGCIKDHGWKLVGEYIDRSKSGTMVKGRDDYQRLYEDLYEDLFDIVVIKDQERLQRNTLDWYLFINRVVQTGKLLFMYMDGKFYSPDDALITGVRAIIAEEFSRNLSKKLHNYHDHRIEKARQGQEIALQGSGNVYGWDKKDGKYYINPEQAKVRRLMCEGIMARKGSTLIAKELNDAGYRNTVGKPWKPMDIPKFVYDCKNVGTMIINKERHDFESKQTIKLPKEEWVYVENALPPIVTQEEWDLICKIHEERVIATGSDRRGKKTSGYSFSGKLVCGICGAPYWRKQRVSKDEYWVCSTKQTKGRRTRKRDSTMGKAGEINPLGCDNENISYNSLMEIMGVVSERLQANTDTIKHDMINWLTKLRKQLLEANGGHTEADLQRELSRKSKLLDAYLDGILNKQEYQKKAEELDERIIQLKAETEKNKANSGDIAEIDKVLANIDEEVARYVDGNEKLKVEYLLEHLEQVQIFPDKVIVIVPILSEGIVVEKTQYVSREKRSRKNYYHENAVGLNKSDFRGGQNLGKTLAGE

SEQ ID NO: 1132 - protein, 573 aa, Unknown
  Description of Unknown: Integrase B1133 sequence
  PTHR30461:SF3,IPR036162,PS51737,IPR011109,PTHR30461, PS00397,PF00239,G3DSA:1.10.10.2600,IPR006119,SSF53041, SM00857,IPR025827,IPR038109,PS51736,cd03768, IPR006118,PF13408,G3DSA:3.40.50.1390,PF07508,Coil
MAEQNEKIVALYVRVSTGYQVDKDSLPFQKKELKAYCEHVLHIDKNRIEIFEDAGKSGKNTKRPAFERMMGKVKSGQVSHVIVYKIDRISRNLVDFSLMYDDFKYNNVTFISLNEQFDTSSAIGEAILKIILVFAELERKLTSERVTDVMIGRAQNGQWNGARVPYGWDWDEEKQCPVHSKKEAQYAIAMYEMYLKVKSTGKIRDYNNSHNIPTKRGGEWTSKTVTDFLRNPINKGAYRYNYRESARGRKKPNEEVVFIENAFPPLVEPETWEKVNKILDINRDKRNMGGLHPIEKNCNVFAGLIQCGICGTGYIVDKKDRRRKNGFTPSMYHCGAKTKAIHCQNPNVSDVKIGPFIINYIAAMVRVSKSKRKIKTPEALEEMLLADKVVFGDIAGLSTDSLNYTFEMITGKYTTDNAVWRTNPVNQSNKESNPEEIEKLKNEIKKYSRAKERLEDAYYFSDDGMSEKEYLEKKNKFDSMRVSAENKIKELTEASISSGIDEDSFIKSATSFLLAHKIYNESHIVYSDLAGVIEEETLKEFFNLILDYIVVVDRRIVEIVFSNGLSHQFIYRK

SEQ ID NO: 1133 - protein, 573 aa, Unknown
  Description of Unknown: Integrase B1134 sequence
  PTHR30461:SF3,IPR036162,PS51737,IPR011109,PTHR30461, PS00397,PF00239,G3DSA:1.10.10.2600,IPR006119,SSF53041, cd00338,SM00857,IPR025827,IPR038109,PS51736, IPR006118,PF13408,G3DSA:3.40.50.1390,PF07508,Coil
MQKNQTKKAALYIRVSTHYQIDKDSLPFQRNELINYAKYALGIDDYAIFEDAGYSGKNTDRPAYQDMMRRIRAKEFSHLCVWKIDRISRNLLDFAAMYEELKKFNCTFVSKNEQFDTSSAIGEAMLRIILVFAELERKLTAERVTSIMYSRANKGLWNGAPIPLGYKWDAKGKYPVIDEDTAVVVRYIYDQYEKIHSTMKLSDKLNRENIKSARGGEWTGTTVKGILRNPFYKGTYRYNYKTQTGRIKPVEEQIIHEDNHPGIIDKEQWDRVNKILDENSTRSVAQLRSNVKYTHIFSKLLRCGQCGHTMGGGLDRARSDGYRPSRYYCTSHTSKSGCTNGVYSDVYLGPFVFNYIANLVRAQRALTDSQKPRDLERMLLRGKFFDNVAGIEQQGLLDTYNTILYGSGEDVMLQPSPEIAAQSASELELLDRDQKKYERALERIEQLYLYSEESMPEKDYVLKRNELKTMLDNIAERRAEVNSRLGLAPASSDFLEKATYFYLTNSLNQKRSLDFRKMVDTFEPKMLQDFLCSVIDHIVVVDGHVASISFKNGLTNKFIYKATKPPKSASTKP

SEQ ID NO: 1134 - protein, 573 aa, Unknown
  Description of Unknown: Integrase B1135 sequence
  PTHR30461:SF3,cd00338,SM00857,G3DSA:1.10.10.2600,IPR036162, PF13408,IPR025827,PS51737,G3DSA:3.40.50.1390,IPR006119, IPR038109,PF07508,SSF53041,IPR011109,PTHR30461, PS51736,Coil,PF00239
MAKVKLPDKPRVAIYTRVSTLHQIDKDSLPMQRQDLINYARLILNTEDYVVYEDAGYSGKNTDRPKFQEMMQQVRLGMFTHILVWKIDRISRNLLDFATMYSELKQLGVVFVSKNEQFDTSSAMGEAMLKIILIFAELERNMTSERVTAAMLSRAANGQWNGGRVPLGYDYDPETKTFTINESEAAVVKIIHDKYEQERSLVSLARYLNGHGYRTRTGCTYSPSTLLIILRNVFYCGDYRYNVLKDGDRQKRKKESEWITVKDHHPAIISREQKEEIARILKENRRLECERRGIYSKKKNVHVFGGLVICGNCGHAMTSTIRPADQDGIRWSVYVCPTKRRSEYLCKGRATSEVVLGEFVFNYILNMLNVQKNFDSISSLEDMEKMLLSGSTFRDVDGIERAGLDDLYNMLASGLTEKAPFDSSVEVRKKPVVSDIELENLNMEKTKIERAAERLQNLYLYSDDSISQKDYIVQREKLMSQLAEVNEQIGMVMSNADEKDVSDEEFVHAASKFILTQKLEGRTYIYYKRLATTVSREVLRSFVMSIIENITIYDGRVQTIVFKNGLSHTFILK

SEQ ID NO: 1135 - protein, 573 aa, Unknown
  Description of Unknown: Integrase B1136 sequence
  SM00857,G3DSA:1.10.10.2600,PS51737,IPR006119,IPR038109, PF07508,IPR011109,PF00239,PTHR30461,Coil, cd00338
MPTMNTKTFCVIYARQSFGLEQDSTSISVQQEACRKWAVAHGMQIVGEYSDANCSSELYPLCDEGIEASRIDRGFQRWLKEQRTQGRKQYKQGLGEAFRRIAQGGVTHLLVYTRNRLGRTADGSYLEKFLTNYLLEHKVSLVTVQDGTVMDFSDDFMSLVMSIKDTLSYRELREKAKASLASIDKRINSFTKWSNANGVIMKDGQVTFYPEYAEVIRYIYNALVEGATYGTILHKLNTDYRHLVRGKQWYITNVRSILRNPVYCGYMRNREGVLGKAVNIPEPVVSYSIWQRAQEVMEYKRVNGQKYNGKNHHFLPLSGYLMCPCGRRMTLFVDRGKIAYHCLNGGEHKTAIYVNEDALLTIQNVLMIGLTTSHKRLQSLKTASNMVDDLRAEILRLKASQAAKMRLVETEEDVAVYKPVIDSIKATIRGKQEELTRLEGELSADSSEAQRRLEDDFHSIMEGELLPEDTYMRLMQDCISTITVHADHIDIVTKTGVTIPVPRLEGRHHSKRLMRCSLICDTADGTLEGLVHYQLHLYDKEVAIVGGESIYQDDTMSVSVHWPEQYLMRRIPA

SEQ ID NO: 1136 - protein, 573 aa, Unknown
  Description of Unknown: Integrase B1137 sequence
  PTHR30461:SF3,SM00857,G3DSA:1.10.10.2600,IPR036162,PS51737,G3DSA: 3.40.50.1390,IPR006119,IPR038109,PF07508,IPR011109,SSF53041, PTHR30461,Coil,PS51736,cd00338,PF00239
MYDIYNQKPTSRKVVIYARVSTEHEAQLSALENQKDWYKPILQQHPEWDIVKMYVDEGITGTSAKKRPQFMQMIQDASSGNFDLILTREVSRFARNTVDTLQYTRELKSKGVEVFFLNDNIKTFDGDGELRLTIMATLAQDESRKTSVRVKSGQQTSMENGVFYGNGNILGYDRVGKDMVINPEQAKTVRMIFDWYLDGWGMRKIQFELEKTGRLTAMGKSNWHVSNISKILRNSFYCGIITYHKEFTPDFLEQKKIRNFGDMEFTQVRGNHKPIITEEEYDQAQKRINSRRKTLSVDTSGQRMYGEKPPSDVWVKLLECECGHKFNRKMWHNTTEGKQYGYQCYSSIRTGTVRTRLNKGLPIDGICQTPMIAGWKLQMMAKYIFKNYLSDTDQVLSLAESMLEKHIDDEEEVCDNTDIINQKKEELQKLLKRLDNLIEMRADGELTRDIFILKKESTENSISQLKKELAELEPSEIESEIDEVTSKEKITILKYALDQYTNFDSDADIPESVIEAFVEKIIARKDGFDWYLRFNPEESPMGCLVDGKRKRGAKVSSFCSPQHRQLSLRRMHN

SEQ ID NO: 1137 - protein, 573 aa, Unknown
  Description of Unknown: Integrase B1138 sequence
  PTHR30461:SF3,cd00338,SM00857,G3DSA:1.10.10.2600,IPR036162, PF13408,PS51737,G3DSA:3.40.50.1390,IPR025827,IPR006119, IPR038109,PF07508,SSF53041,IPR011109,PTHR30461, PS51736,Coil,PF00239
MYEDIKTACLYVRFSSHNQTEQSIEGQTRVCRDFCKRHNIRIVEIYADRATSASKDIEKRVQFLKMIKDSEKGLFDAVIVYKLDRFARSRYDSATYKYRLKRNGVQLISATENISNDPEGIILESVLEGMAEFYSAELSQKINRGMRESAYKHNSIGGAVPLGYKIEDKKLVIDPKTAPIVKEAFEKYADGETVAEICRQFNARGYKTSKGTAFGKSSFTKIFRNERYIGVYTFHDYRAEDAIPAIIDKDLWERVQLRVGKIKNAPARNKAKVVYLLSGKIFCGHCGSKMNGNCNAGNYCYYQCYGKKNGNVDCKKKNIRKEFIERLVAQDALSLLTDEYIEQIATIACEKNQHEIELDSALPTIRDRIHQVDLSLNHLLKAIESGSAPDMLVKRMGELEKEKKDLQAQAKKESEDIVELDKAQVIYWLEQFRGGSIEDEEFCRMLINLFVNSVTVWDEDDNTYKVTVAYNLTSLPTKTYRLNKGGTLSDFTSNAPCRQRRSLRSSCVRRSPAVSSWTPRPSFTATRSGKGMFSGRRTSPNWWHCWRSCASRRRNCMTSGTSYRRKQPRRHNG

SEQ ID NO: 1138 - protein, 573 aa, Unknown
  Description of Unknown: Integrase B1139 sequence
  PTHR30461:SF3,IPR036162,PS51737,IPR011109,PTHR30461, PS00397,PF00239,G3DSA:1.10.10.2600,IPR006119,SSF53041, SM00857,IPR025827,IPR038109,PS51736,cd03768, IPR006118,PF13408,G3DSA:3.40.50.1390,PF07508,Coil
MAYNAQNKTGARVAIYVRVSTLHQIDRDSLPMQKQDLLAYAKLMLNTDDCVIFEDAGYSGKNTDRPKFQEMMSQMRAGAFTHLLVWKIDRISRNLLDFATMYNELKALGVTFVSKNEQFDTSTAMGEAMLKIILVFAELERNMTSERVTATMISRANNGLWNGGRIPFGYNYDYETHEFSVNEEESKVVILMHDMYEQERSLVRVVRELNERGYRSRAGNLWSPVSLLIILRNVFYCGDYRYNMLKEGDRQKVKDESEWVTVENHHVAIIPKDQKERIMATLDSNSKLCKQRNIYKSSKHTHVFGGLIYCGSCGKPLGSTPGNLTRDGWHYSKYTCPTRRKSVTLCTGKSTSDPIIGEFVFNYILNMLNAQNDFEKISSPEELEKLLLIGDTFAYIDHIEPNGLNDLFNVLSSGAVKGAVFGKGASLPTKKATVEPEVARLRNEKQKTERALDRLRSLYLYADEAMSEAEYMIQKNKLEETLEDINDQIGMMNTDSWQQSVSDEEFIQRASEFIIAQKLSGRKYVNYKRLAMSVDSEVLKNFVVSIIDSITIQDGLVSNIVFKNGLCHTFIFR

SEQ ID NO: 1139 - protein, 573 aa, Unknown
  Description of Unknown: Integrase B1140 sequence
  PTHR30461:SF3,IPR036162,PS51737,IPR011109,PTHR30461, PS00397,PF00239,G3DSA:1.10.10.2600,IPR006119,SSF53041, SM00857,IPR025827,IPR038109,PS51736,cd03768, IPR006118,PF13408,G3DSA:3.40.50.1390,PF07508,Coil
MPINISEKLAAKKAAIYIRVSTHWQIDKDSLKVQRRELIAYVELVLGITDYEVFEDPGYSAKNTDRPDYQAMMERIRTGEFTHLVVWKIDRISRNLLDFAYMYDELKRLGVTFVSKNEQFDTSTAIGEAMLKIILVFAELERNMTSERVTAVMLSRANNGQWNGGRVPYGYSWDKESGTFAVVEQEAKVANRMAELYEQYQSLLYVVKYMNDAGITTRNGKAWTPTAVRKILTNPWNIGHYVYNVHSGGKGTEKRSEDEWITVEDHHPAILDERLFYRIKFLLTRNKRGGVPASKTYVRKNIHIFGGLLRCAKCGSNMIANQDRRRANGIRPSIYACGSRRRKQTSCTNKYISDMVLGPFVLNYVANIIRAAKSYDGSSDTELLSKKLLAGEAFSDVDSINEDALVELISAFNAADGAEEYRPQLALSGADGTITEADTLKSRKNRIENALSRLNALYLYDENAMPQKDFVMQRADLSKQLEQVNSRLSEIQGRGEDAEVTSDSFIMKASYYIMANKLIEGGYIDYEKYIRAIDPAVPKSFLASVIDHIDADDGRVTAITFKNGIEHRFTYKT

SEQ ID NO: 1140 - protein, 573 aa, Unknown
  Description of Unknown: Integrase B1141 sequence
  PTHR30461:SF3,SM00857,G3DSA:1.10.10.2600,IPR036162,PF13408, IPR025827,G3DSA:3.40.50.1390,PS51737,IPR006119,IPR038109, PF07508,SSF53041,IPR011109,PF00239,PTHR30461, PS51736,Coil,cd00338
MAKVKLPDKPRVAIYTRVSTLHQIDKDSLPMQRQDLINYARLILNTEDYVVYEDAGYSGKNTDRPKFQEMMQQVRLGMFTHILVWKIDRISRNLLDFATMYSELKQLGVVFVSKNEQFDTSSAMGEAMLKIILIFAELERNMTSERVTAAMLSRAANGQWNGGRVPLGYDYDPETKTFTVNESEAAVVKIIHDKYEQERSLVSLARYLNGHGYRTRTGCTYSPSTLLIILRNVFYCGDYRYNVLKDGDRQKRKKESEWITVKDHHPAIISREQKDEIARILKENRRLECERRGIYSKKKNVHVFGGLVICGNCGHAMTSTIRPADQDGIRWSVYVCPTKRRSEYLCKGRATSEVVLGEFVFNYVLNMLNVQKNFDSINSVEDMEKMLLSGGTFRDVDGIERAGLDDLYNMLASGLTEKAPFDSSVEVRKKPVVSDIELENLNTEKTKIERAAERLQSLYLYSDDSISQKDYIIQREKLMSQLAEVNEQIGMVMSNADEKDVSDEEFVHAASKFILTQKLEGRTYIYYKRLATTVSREVLRSFVMSIIENITIYDGRVQTIVFKNGLSHTFILK

SEQ ID NO: 1141 - protein, 573 aa, Unknown
  Description of Unknown: Integrase B1142 sequence
  PTHR30461:SF3,IPR036162,PS51737,IPR011109,PTHR30461, PS00397,PF00239,G3DSA:1.10.10.2600,IPR006119,SSF53041, SM00857,IPR025827,IPR038109,PS51736,cd03768, IPR006118,PF13408,G3DSA:3.40.50.1390,PF07508,Coil
MAYNAQNKTGARVAIYVRVSTLHQIDRDSLPMQKQDLLAYAKLMLNTDDCVVFEDAGYSGKNTDRPKFQEMMSQMRAGAFTHLLVWKIDRISRNLLDFATMYNELKALGVTFVSKNEQFDTSTAMGEAMLKIILVFAELERNMTSERVTATMISRANNGLWNGGRIPYGYDYDYETHEFSVNEEESKVVILMHDMYEQERSLVRVVRELNERGYRSRAGNLWSPVSLLIILRNVFYCGDYRYNMLKEGDRQKVKDESEWVTVENHHVAIIPKDQKERIMATLDSNSKLCKQRNIYKSSKHTHVFGGLIYCGSCGKPLGSTPGNLTRDGWHYSKYTCPTRRKSVTLCTGKSTSDPIIGEFVFNYILNMLNAQNGFDKISSPEELEKLLLIGDTFTYIDHIEPNGLNDLFNVLSSGAVKGAVFGKGASLPTKKATVEPEVARLRNEKQKTERALDRLRSLYLYADEAMSEAEYMIQKNKLEETLEDINDQIGMMNTDSWQQSVSDEEFIQRASEFIIAQKLSGRKYVNYKRLAMSVDSEVLKNFVVSIIDSITIQDGLVSNIVFKNGLCHTFIFR

SEQ ID NO: 1142 - protein, 573 aa, Unknown
  Description of Unknown: Integrase B1143 sequence
  PTHR30461:SF3,IPR036162,PS51737,IPR011109,PTHR30461, PS00397,PF00239,G3DSA:1.10.10.2600,IPR006119,SSF53041, SM00857,IPR025827,IPR038109,PS51736,cd03768, IPR006118,PF13408,G3DSA:3.40.50.1390,PF07508
MAIIEQIRKQKAAIYVRVSTQWQVDKDSLLVQKRELIAYCQLVFGIQDYEVFEDPGYSAKNTDRPAYQEMLSRIRTGEFSHLMVWKIDRISRNLLDFTQMYTELKNLGIIFVSKNEQFDTSTAIGEAMLKIILVFAELERKMTAERVTAVMLSRANNGQWNGGRIPYGYNYDKGTKEFTVNPKEAKVYNLVCDLYEEKQSLIYVARYLNETGYRSRQGSLWTPATIRKLLTNVFYTGAYRYNVHKEGSGYKRREEDEWITIENHHPALIDDVRYDRFCFLLSRNVRGGVRPGDTYIRKNVHIFGGLLRCGICGANMSATLDRIRANGWRPSIYGCSTRRKSSNGCSNKYITDVYLGPFVFNFLANILRTSNSVTEGTTPDSLEKRLLSGPAFADVSHIHPDDLNSLLAQLRSGMTGMEYKSAATKAADVDTQANERQILEDRRRHDENALNRLKSLYLFGEDTISEKDYIIERQKIIDDMNRIDAKLFKFVEASADALKSDLAFLEQASYLVMVDQLLSNRTIDFEKYIRSIDPTIPRAFLHSVISKIEVADGRVTSIQFTNELIVRFIYDRR

SEQ ID NO: 1143 - protein, 573 aa, Unknown
  Description of Unknown: Integrase B1144 sequence
  PTHR30461:SF3,IPR036162,PS51737,IPR011109,PTHR30461, PS00397,PF00239,G3DSA:1.10.10.2600,IPR006119,SSF53041, SM00857,IPR025827,IPR038109,PS51736,cd03768, IPR006118,PF13408,G3DSA:3.40.50.1390,PF07508,Coil
MAYNAQNKTGARVAIYVRVSTLHQIDRDSLPMQKQDLLAYAKLMLNTDDCVIFEDAGYSGKNTDRPKFQEMMSQMRAGAFTHLLVWKIDRISRNLLDFATMYNELKALGVTFVSKNEQFDTSTAMGEAMLKIILVFAELERNMTSERVTATMISRANNGLWNGGRIPFGYDYDYETHEFSVNEEESKVVILMHDMYEQERSLVRVVRELNERGYRSRAGNLWSPVSLLIILRNVFYCGDYRYNMLKEGDRQKVKDESEWVTVENHHVAIIPKDQKERIMATLDSNSKLCKQRNIYKSSKHTHVFGGLIYCGSCGKPLGSTPGNLTRDGWHYSKYTCPTRRKSVTLCTGKSTSDPIIGEFVFNYILNMLNAQNDFEKISSPEELEKLLLIGDTFAYIDHIEPNGLNDLFNVLSSGAAKGAVFGKGASLPTKKATVEPEVARLRNEKQKTERALDRLRSLYLYADEAMSEAEYMIQKNKLEETLEDINDQIGMMNTDSWQQSVSDEEFIQRASEFIIAQKLSGRKYVNYKRLAMSVDSEVLKNFVVSIIDSITIQDGLVSNIVFKNGLCHTFIFR

SEQ ID NO: 1144 - protein, 573 aa, Unknown
  Description of Unknown: Integrase B1145 sequence
  PTHR30461:SF3,SM00857,G3DSA:1.10.10.2600,IPR036162,PF13408, IPR025827,G3DSA:3.40.50.1390,PS51737,IPR006119,IPR038109, PF07508,IPR011109,SSF53041,PF00239,PTHR30461, PS51736,Coil,cd00338
MAKVKLPDKPSVAIYTRVSTLHQIDKDSLPMQRQDLINYARLILNTEDYVVYEDAGYSGKNTDRPKFQEMMQQVRLGMFTHILVWKIDRISRNLLDFATMYSELKQLGVVFVSKNEQFDTSSAMGEAMLKIILIFAELERNMTSERVTAAMLSRAANGQWNGGRVPLGYDYDPETKTFTVNESEAAVVKIIHDKYEQERSLVSLARYLNGHGYRTRTGCTYSPSTLLIILRNVFYCGDYRYNVLKDGDRQKRKKESEWITVKDHHPAIISREQKEEIARILKENRRLECERRGIYSKKKNVHVFGGLVICGNCGHAMTSTIRPADQDGIRWSVYVCPTKRRSEYLCKGRATSEVVLGEFVFNYILNMLNVQKNFDSINSVEDMEKMLLSGSTFRDVDGIERAGLDDLYNMLASGLTEKAPFDSSVEVRKKPVVSDIELENLNTEKTKIERAAERLQSLYLYSDDSISQKDYIIQREKLMSQLAEVNEQIGMVMSNADEKDVSDEEFVHAASKFILTQKLEGRTYIYYKRLATTVSREVLRSFVMSIIENITIYDGRVQTIVFKNGLSHTFILK

SEQ ID NO: 1145 - protein, 573 aa, Unknown
  Description of Unknown: Integrase B1146 sequence
  PTHR30461:SF3,cd00338,SM00857,G3DSA:1.10.10.2600,IPR036162, PF13408,IPR025827,G3DSA:3.40.50.1390,PS51737,IPR006119, IPR038109,PF07508,SSF53041,IPR011109,PTHR30461, PS51736,Coil,PF00239
MAKVKLPDKPRVAIYTRVSTLHQIDKDSLPMQRQDLINYARLILNTEDYVVYEDAGYSGKNTDRPKFQEMMQQVRLGMFTHILVWKIDRISRNLLDFATMYSELKQLGVIFVSKNEQFDTSSAMGEAMLKIILIFAELERNMTSERVTAAMLSRAANGQWNGGRVPLGYDYDPETKTFTVNESEAAVVKIIHDKYEQERSLVSLARYLNGHGYRTRTGCTYSPSTLLIILRNIFYCGDYRYNVLKDGDRQKRKKESEWITVKDHHPAIISREQKEEIARILKENRRLECERRGIYSKKKNVHVFGGLVICGNCGHAMTSTIRPADQDGIRWSVYVCPTKRRSEYLCKGRATSEVVLGEFVFNYILNMLNVQKNFDSINSVEDMEKMLLSGSTFRDVDGIERAGLDDLYNMLASGLTEKAPFDSSVEVRKKPVVSDIELENLNTEKTRIERAAERLQNLYLYSDDSISQKDYIIQREKLMSQLAEVNEQIGMVMSNADEKDVSDEEFVHAASKFILTQKLEGRTYIYYKRLATTVSREVLRSFVMSIIENITIYDGRVQTIVFKNGLSHTFILK

SEQ ID NO: 1146 - protein, 573 aa, Unknown
  Description of Unknown: Integrase B1147 sequence
  PTHR30461:SF3,IPR036162,PS51737,IPR011109,PTHR30461, PS00397,PF00239,G3DSA:1.10.10.2600,IPR006119,SSF53041, SM00857,IPR025827,IPR038109,PS51736,cd03768, IPR006118,PF13408,G3DSA:3.40.50.1390,PF07508,Coil
MVLNNIKPAMKIRVAIYIRVSTLHQVDKDSLPMQRKDLIAYSKLILNTDDYVIFEDAGYSGKNTIRPRYQDMMEQIRTGAFTHLLVWKIDRISRNLLDFAQMYQELKELNVTFVSKNEQFNTSTAMGEAMLKIILVFAELERNMTSERVTATMISRANTGKWNGGRVPYGYKYDPEEEDFLIVANESNTVKLIHDKYEELQSLVYLARYMNEHGYRTRSGNEWSPPSLAIILKSWWYCGCYEYNKRKAGNRQKLKNESEWIMIEDHHIAIISYDQKERVLAILKGNKRFATEHNLYVKGIHVHVFGGLCWCKNCGKKMTSTSSNKNRSWQYSKYLCSTRRRSLTKCRGRSTSDPVLGEFIFNYILNMLNAQKGFDSIHSPADLQDALLTGDAFSDIKSIDQEELNDLYNILSSSVVGNIYGRSFNVNKAKKNDEVQSSLTILKAEKKKLDRALDRLTNLYLYDDMAISEKDYMTKKTEIETKIAEIDEKIGIVNKNSVDNSITDEEFVDKASTFIITQKLTNRNYISYKRLATSVDPKILYMFTHDVIDYIDIYNGKVQRIVFRNGLSQTFIR

SEQ ID NO: 1147 - protein, 573 aa, Unknown
  Description of Unknown: Integrase B1148 sequence
  PTHR30461:SF3,IPR036162,PS51737,IPR011109,PTHR30461, PS00397,PF00239,G3DSA:1.10.10.2600,IPR006119,SSF53041, SM00857,IPR025827,IPR038109,PS51736,cd03768, IPR006118,PF13408,G3DSA:3.40.50.1390,PF07508,Coil
MAYNAQNKTGARVAIYVRVSTLHQIDRDSLPMQKQDLLAYAKLMLNTDDCVIFEDAGYSGKNTDRPKFQEMMSQMRAGAFTHLLVWKIDRISRNLLDFATMYNELKALGVTFVSKNEQFDTSTAMGEAMLKIILVFAELERNMTSERVTATMISRANNGLWNGGRIPFGYDYDYETHEFSVNEKESKVVILMHDMYEQERSLVRVVRELNERGYRSRAGNLWSPVSLLIILRNVFYCGDYRYNMLKEGDRQKVKDESEWVTVENHHVAIIPKDQKERIMATLDSNSKLCKQRNIYKSSKHTHVFGGLIYCGSCGKPLGSTPGNLTRDGWHYSKYTCPTRRKSVTLCTGKSTSDPIIGEFVFNYILNMLNAQNGFDKISSPEELEKLLLIGDTFAYIDHIEPNGLNDLFNVLSSGAVKGAVFGKGASLPTKKATVEPEVARLRNEKQKTERALDRLRSLYLYADEAMSEAEYMIQKNKLEETLEDINDQIGMMNTDSWQQSVSDEEFIQRASEFIIAQKLSGRKYVNYKRLAMSVDSEVLKNFVVSIIDSITIQDGLVSNIVFKNGLCHTFIFR

SEQ ID NO: 1148 - protein, 573 aa, Unknown
  Description of Unknown: Integrase B1149 sequence
  PTHR30461:SF3,IPR036162,PS51737,IPR011109,PTHR30461, PS00397,PF00239,G3DSA:1.10.10.2600,IPR006119,SSF53041, SM00857,IPR025827,IPR038109,PS51736,cd03768, IPR006118,PF13408,G3DSA:3.40.50.1390,PF07508,Coil
MAYNAQNKTGARVAIYVRVSTLHQIDRDSLPMQKQDLLAYAKLMLNTDDCVIFEDAGYSGKNTDRPKFQEMMSQMRAGAFTHLLVWKIDRISRNLLDFATMYNELKALGVTFVSKNEQFDTSTAMGEAMLKIILVFAELERNMTSERVTATMISRANNGLWNGGRIPYGYNYDYETHEFSVNEEESKVVILMHDMYEQERSLVRVVRELNERGYRSRAGNLWSPVSLLIILRNVFYCGDYRYNMLKEGDRQKVKDESEWVTVQNHHVGIIPREQKERIMATLDSNSKLCKQRNLYKSAKHTHVFGGLIYCGSCGKPLGSTPGNLTRDGWHYSKYTCPTRRKSVTLCTGKSTSDPIIGEFVFNYILNMLNAQSGFDKISSPEELERLLLIGDTFAYIDHIEPNGLNDLFNVLSSGAVKGAVFGKGASLPTKKATVEPEVARLRNEKQKTERALDRLRSLYLYADEAMSEAEYMIQKNKLEETLEDINDQIGMMNTDSWQQSVSDEEFIQRASEFIIAQKLSGRKYVNYKRLAMSVDSEVLKNFVVSIIDSITIQDGLVSNIVFKNGLCHTFIFR

SEQ ID NO: 1149 - protein, 573 aa, Unknown
  Description of Unknown: Integrase B1150 sequence
  PTHR30461:SF3,IPR036162,PS51737,IPR011109,PTHR30461, PS00397,PF00239,G3DSA:1.10.10.2600,IPR006119,SSF53041, SM00857,IPR025827,IPR038109,PS51736,cd03768, IPR006118,PF13408,G3DSA:3.40.50.1390,PF07508,Coil
MAYNAQNKTGARVAIYVRVSTLHQIDRDSLPMQKQDLLAYAKLMLNTDDCVIFEDAGYSGKNTDRPKFQEMMSQMRAGAFTHLLVWKIDRISRNLLDFATMYNELKTLGVTFVSKNEQFDTSTAMGEAMLKIILVFAELERNMTSERVTATMISRANNGLWNGGRIPYGYDYDYETHEFSVNEEESKVVILMHDMYEQERSLVRVVRELNERGYRSRAGNLWSPVSLLTILRNVFYCGDYRYNMLKEGDRQKVKDESEWVTVENHHVAIIPKDQKERIMATLDSNSKLCKQRNIYKSSKHTHVFGGLIYCGSCGKPLGSTPGNLTRDGWHYSKYTCPTRRKSVTLCTGKSTSDPIIGEFVFNYILNMLNAQNDFDKISSPEELEKLLLIGDTFAYIDHIESNGLNDLFNVLSSGTVKGAVFGKGASLPTKKATVEPEVARLRNEKQKTERALDRLRSLYLYADEAMSEAEYMIQKNKLEETLEDINDQIGMMNTDSWQQSVSDEEFIQRASEFIIAQKLSGRKYVNYKRLAMSVDSEVLKNFVVSIIDSITIQDGLVSNIVFKNGLCHTFIFR

SEQ ID NO: 1150 - protein, 573 aa, Unknown
  Description of Unknown: Integrase B1151 sequence
  PTHR30461:SF3,IPR036162,PS51737,IPR011109,PTHR30461, PS00397,PF00239,G3DSA:1.10.10.2600,IPR006119,SSF53041, SM00857,IPR025827,IPR038109,PS51736,cd03768, IPR006118,PF13408,G3DSA:3.40.50.1390,PF07508,Coil
MAYNAQNKTGARVAIYVRVSTLHQIDRDSLPMQKQDLLAYAKLMLNTDDCVIFEDAGYSGKNTDRPKFQEMMSQMRAGAFTHLLVWKIDRISRNLLDFATMYNELKALGVTFVSKNEQFDTSTAMGEAMLKIILVFAELERNMASERVTATMISRANNGLWNGGRIPFGYNYDYETHEFSVNEEESKVVILMHDMYEQERSLVRVVRELNERGYRSRAGNLWSPVSLLIILRNVFYCGDYRYNMLKEGDRQKVKDESEWVTVENHHVAIIPKDQKERIMATLDSNSKLCKQRNIYKSSKHTHVFGGLIYCGSCGKPLGSTPGNLTRDGWHYSKYTCPTRRKSVTLCTGKSTSDPIIGEFVFNYILNMLNAQNDFEKISSPEELEKLLLIGDTFAYIDHIEPNGLNDLFNVLSSGAVKGAVFGKGASLPTKKATVEPEVARLRNEKQKTERALDRLRSLYLYADEAMSEAEYMIQKNKLEETLEDINDQIGMMNTDSWQQSVSDEEFIQRASEFIIAQKLSGRKYVNYKRLAMSVDSEVLKNFVVSIIDSITIQDGLVSNIVFKNGLCHTFIFR

SEQ ID NO: 1151 - protein, 573 aa, Unknown
  Description of Unknown: Integrase B1152 sequence
  PTHR30461:SF3,SM00857,G3DSA:1.10.10.2600,IPR036162,PF13408, IPR025827,PS51737,G3DSA:3.40.50.1390,IPR006119,IPR038109, PF07508,IPR011109,SSF53041,PF00239,PTHR30461, PS51736,Coil,cd00338
MAKVKLPDKPRVAIYTRVSTLHQIDKDSLPMQRQDLINYARLILNTEDYVVYEDAGYSGKNTDRPKFQEMMQQVRLGMFTHILVWKIDRISRNLLDFATMYSELKQLGVVFVSKNEQFDTSSAMGEAMLKIILIFAELERNMTSERVTAAMLSRAANGQWNGGRVPLGYDYDPETKTFTINESEAAVVKIIHDKYEQERSLVSLARYLNGHGYRTRTGCTYSPSTLLIILRNIFYCGDYRYNVLKDGDRQKRKKESEWITVKDHHPAIISREQKEEIARILKENRRLECERRGIYSKKKNVHVFGGLVICGNCGHAMTSTIRPADQDGIRWSVYVCPTKRRSEYLCKGRATSEVVLGEFVFNYILNMLNVQKNFDSINSVEDMEKMLLSGSTFRDVDGIERAGLDDLYNMLASGLTEKAPFDSSVEVRKKPVVSDIELENLNTEKTRIERAAERLQNLYLYSDDSISQKDYIIQREKLMSQLAEVNEQIGMVMSNADEKDVSDEEFVHAASKFILTQKLEGRTYIYYKRLATTVSREVLRSFVMSIIENITIYDGRVQTIVFKNGLSHTFIMK

SEQ ID NO: 1152 - protein, 573 aa, Unknown
  Description of Unknown: Integrase B1153 sequence
  PTHR30461:SF3,SM00857,G3DSA:1.10.10.2600,IPR036162,PF13408, PS51737,IPR025827,G3DSA:3.40.50.1390,IPR006119,IPR038109, PF07508,IPR011109,SSF53041,PF00239,PTHR30461, PS51736,Coil,cd00338
MAKIKLPDKPRVAIYTRVSTLHQIDKDSLPMQRQDLINYARLILNTEDYVVYEDAGYSGKNTDRPKFQEMMQQVRLGMFTHILVWKIDRISRNLLDFATMYSELKQLGVVFVSKNEQFDTSSAMGEAMLKIILIFAELERNMTSERVTAAMLSRAANGQWNGGRVPLGYDYDPETKTFTVNESEAAVVKIIHDKYEQERSLVSLARYLNGHGYRTRTGCTYSPSTLLIILRNVFYCGDYRYNVLKDGDRQKRKKESEWITITDHHPAIISREQKEEIARILKENRRLECERRGIYSKKKNVHVFGGLVICGNCGHAMTSTIRPADQDGIRWSVYVCPTKRRSEYLCKGRATSEVVLGEFVFNYILNMLNVQKNFDSISSLEDMEKMLLSGSTFRDVDSIERAGLDDLYNMLASGLTEKAPFDSSFEVRKKPVVSDIELENLNTEKTRIERAAERLQNLYLYSDDSISQKDYIIQREKLMSQLAEVNEQIGMVMSNADEKDVSDEEFVHAASKFILTQKLEGRTYIYYKRLATTVSREVLRSFVMSIIENITIYDGRVQTIVFKNGLSHTFILK

SEQ ID NO: 1153 - protein, 573 aa, Unknown
  Description of Unknown: Integrase B1154 sequence
  PTHR30461:SF3,IPR036162,PS51737,IPR011109,PTHR30461, PS00397,PF00239,G3DSA:1.10.10.2600,IPR006119,SSF53041, SM00857,IPR025827,IPR038109,PS51736,cd03768, IPR006118,PF13408,G3DSA:3.40.50.1390,PF07508,Coil
MTEQNEKIVALYVRVSTGYQVDKDSLPFQKKELKAYCEHVLHIDKNRIEIFEDAGKSGKNTKRPAFERMMGKVKSGQVSHVIVYKIDRISRNLVDFSLMYDDFKYNNVTFISLNEQFDTSSAIGEAILKIILVFAELERKLTSERVTDVMIGRAQNGQWNGARVPYGWDWDEEKQCPVHSEKEAQYAIAMYEMYLKVKSTGKIRDYNNSHNIPTKRGGEWTSKTVGDFLRNPMNKGAYRYNYRESARGRKKPNEEVVFIENVFPPLVEPETWEKVNKILDINRDKRNMGGLHPIEKNCNVFAGLIQCGICGTGYIVDKKDRRRKNGFTPSMYHCGAKTKAIHCQNPNVSDVKIGPFIINYIAAMVRVSKSKRKIKTPEALEEMLLADKVVFGDIAGLSTDSLNYTFEMIIGKYTTDNAVWHTNPVNQSNKESNPDEIEKLKNEIKKYSRAKERLEDAYYFSDDGMSEKEYLEKKNKFDSMRVSAENKIKELTEASISSGIDEDSFIKSATSFLLAHKIYNESHIVYSDLAGVIEEETLKEFFNLILDYIVVVDRRIVEIVFSNGLSHQFIYRK

SEQ ID NO: 1154 - protein, 573 aa, Unknown
  Description of Unknown: Integrase B1155 sequence
  PTHR30461:SF3,IPR036162,PS51737,IPR011109,PTHR30461, PS00397,PF00239,G3DSA:1.10.10.2600,IPR006119,SSF53041, cd00338,SM00857,IPR025827,IPR038109,PS51736, IPR006118,PF13408,G3DSA:3.40.50.1390,PF07508,Coil
MNKNQERPKKAALYVRVSTNYQIDKDSLPMQRQDLVNYAKLMFGIDDYVIFEDAGYSGKNTDRPEFQNMMKRIRNGEFTHLLCWKIDRISRNLLDFAAMYQELKDLNVTFVSKNEQFDTSTAIGEAMLKIILIFAELERNMTSERVTATMLSRAQNGLWNGGKVPYGYSYDKEQKEFSANPEEAEIVKKIFDAYSNHHSIVTVARALNEDGYSSRAGNDWSPVSIFIILTNPFYKGTYRYNHYKIPGLKVEKDPSEWIEVPDHHPRIISDEQFEYVNSILKENSRSKRLPGKQHATNNTHIFGGLLYCSSCGSIYVSSPARMQACGYRPSKYACPNLRKRKACTSKSISDPVIGEFLMNYVLNMMRAKDSFSSIHNSDDLEHALLRGSTFDSVDHIGKDGVESYFYMLTTVPINGKRMRKPKKVVTIDPELKRLRAEKRKTERALERLMNLYLYSEDSISKKDYTIRKSALEDYLKEITENLNMIDRSNNHEIISDENFIKRASYFILNKELADKNYIYFKKLAMDMDPEILKNFFHEIIDSVVMEQNRIMEIVFRNGLTHTFYYKDVEKPEA

SEQ ID NO: 1155 - protein, 573 aa, Unknown
  Description of Unknown: Integrase B1156 sequence
  PTHR30461:SF3,SM00857,G3DSA:1.10.10.2600,IPR036162,PF13408, IPR025827,PS51737,G3DSA:3.40.50.1390,IPR006119,IPR038109, PF07508,SSF53041,IPR011109,PTHR30461,PS51736, cd00338,PF00239
MAKRSAKKNEYSSAEQIGVIYARYSSHNQKEESIEQQIAECSDFAAKNGIRIVGIYADKAVSGRSDRRPNFQRMMRDAEKRQFQIVVAYKSNRIARNMLNALQYEARLDLLGIKTLYAKEEFGNTAAGRFALRTMMNVNQFYSENMGEDIKRGMVDNANECKVNGMLPLGYVKSKEGKYAIAPDEAAVVREIFDSVLKDVPVAEIARSLNQRGIHTKLGREWNKNSFHIMLKNDNYIGVYRHSGVVVEDGIPPILEKEVFTAVQEKLANKKKTAGRRSANGEYLLTGKLFCGYCGSYMIGVSGTGENGTVHNYYQCQKRHAEGRCEKKNVRRDFIEKLIARLTQDYILQDDTIEWIADSTMSFQAMARRESGVAQLERDLADNRKVAKNIMAAIEQGIITETTKARLLEVEGTIHDLERSLSIAKAASQPIERERVVFSLEQMREGNVGSKEHQKKLIDTFVKSVTLWDDRIQIDYYHTPGKHKFSYSLEELTSKAENESNASDVRTDSLELHHCRRELHRFTTAFLLAAAPSRLHGTIKKTQESNSCVFFACIDGCVPQCPARLGIVWSSKR

SEQ ID NO: 1156 - protein, 573 aa, Unknown
  Description of Unknown: Integrase B1157 sequence
  PTHR30461:SF3,SM00857,G3DSA:1.10.10.2600,IPR036162,PF13408, IPR025827,PS51737,G3DSA:3.40.50.1390,IPR006119,IPR038109, PF07508,IPR011109,SSF53041,PF00239,PTHR30461, PS51736,Coil,cd00338
MAKVKLPDKPRVAIYTRVSTLHQIDKDSLPMQRQDLINYARLILNTEDYVVYEDAGYSGKNTDRPKFQEMMQQVRLGMFTHILVWKIDRISRNLLDFATMYSELKQLGVVFVSKNEQFDTSSAMGEAMLKIILIFAELERNMTSERVTAAMLSRAANGQWNGGRVPLGYDYDPETKTFTINESEAAVVKIIHDKYEQERSLVSLARYLNGHGYRTRTGCTYSPSTLLIILRNIFYCGDYRYNVLKDGDRQKRKKESEWITVKDHHPAIISREQKEEIARILKENRRLECERRGIYSKKKNVHVFGGLVICGNCGHAMTSTIRPADQDGIRWSVYVCPTKRRSEYLCKGRATSEVVLGEFVFNYILNMLNVQKNFDSINSVEDMEKMLLSGSTFRDVDGIERAGLDDLYNMLASGLTEKAPFDSSVEVRKKPIVSDIELENLNTEKTRIERAAERLQNLYLYSDDSISQKDYIIQREKLMSQLAEVNEQIGMVMSNADEKDVSDEEFVHAASKFILTQKLEGRTYIYYKRLATTVSREVLRSFVMSIIENITIYDGRVQTIVFKNGLSHTFILK

SEQ ID NO: 1157 - protein, 573 aa, Unknown
  Description of Unknown: Integrase B1158 sequence
  PTHR30461:SF3,IPR036162,PS51737,IPR011109,PTHR30461, PS00397,PF00239,G3DSA:1.10.10.2600,IPR006119,SSF53041, SM00857,IPR025827,IPR038109,PS51736,cd03768, IPR006118,PF13408,G3DSA:3.40.50.1390,PF07508,Coil
MVLNNIKPAMKIRVAIYIRVSTLHQIDKDSLPMQRKDLIAYSKLILNTDDYVIFEDAGYSGKNTIRPRYQDMMDQIRTGAFTHLLVWKIDRISRNLLDFAQMYQELKELNVTFVSKSEQFDTSTAMGEAMLKIILVFAELERNMTSERVTATMISRANTGKWNGGRVPYGYKYDQEEEDFLIIANESNTVKLIHDKYEELQSLVYLARYMNEHGYRTRSGNEWSPPSLAIILKSWWYCGCYEYNKRKAGNRQKLKNESEWIMIEDHHIAIISYDQKERVLAILKGNKRFATEHNLYVKGIHVHVFGGLCWCKNCGKKMTSTSSNKNRSWQYSKYLCSTRRRSLTKCRGRSTSDPVLGEFIFNYILNMLNAQKGFDSIHSPADLQDALLTGDAFSDIKSIDQEELNDLYNILSSSVVGNIYGRSFNVNKAKKNDEVQSSLTILKAEKKKLDRALDRLTNLYLYDDMAISEKDYMTKKTEIETKIAEIDEKIGIVNKNSVDNSITDEEFVDKASTFIITQKLTNRNYISYKRLATSVDPKILYMFTHDVIDYIDIYNGKVQRIVFRNGLSQTFIR

SEQ ID NO: 1158 - protein, 573 aa, Unknown
  Description of Unknown: Integrase B1159 sequence
  cd00338,SM00857,G3DSA:1.10.10.2600,IPR036162,PF13408, IPR025827,G3DSA:3.40.50.1390,IPR006119,IPR038109,PF07508, SSF53041,IPR011109,PTHR30461,PS51736,Coil, PF00239
MAYRKVKDLFETIGLRAVFYARVSTAEEEQLNAIELQIEENRNIILKNKWKKVDEYIDRSKTGTMVKGRDEYQRLYEDMLEDKFDIIVIKDQDRLQRNTKDWYLFIDRLVQTGKLLYMYLDGKFYSPDDALITGIRAIIAEEFSRNLSKKLHNYHANRIEKARQGLEIDLQGSGNVFGWDKKDGKYYINPDQAKVRRLMCEGIMARKGSTQIADELNKAGYRNTVGNLWKPMDIPKFVYDCKNVGTMIINKEKHDFESKQIIKLPEEEWVYVKGALPPIVTEEEWDLICKIHDERVLSVGADHRGRGKKVSGYSFSGKIVCGICGAPYWRKQKTSKEEYWVCSTKQTKGRKTRKRDSVLGKAGEINELGCDNENISYNALMKVMSIISERLQANTEVIKADMVNWLTSLKKQLQRANGGSTEADLKREELRKDRLLDALLDGVLTKEEYSKKALTIDLKITEIKKEMLANRNSIEDIAEIDRVLANIDAEVATYLDENNQLKIDFILEHLESVEIYPDKVVVMIPLFSEGMVVYKTQYVSGEKWCKIHTENIHYLSSYKYWNKKIDLYVRLVA

SEQ ID NO: 1159 - protein, 573 aa, Unknown
  Description of Unknown: Integrase B1160 sequence
  PTHR30461:SF3,IPR036162,PS51737,IPR011109,PTHR30461, PS00397,PF00239,G3DSA:1.10.10.2600,IPR006119,SSF53041, SM00857,IPR025827,IPR038109,PS51736,cd03768, IPR006118,PF13408,G3DSA:3.40.50.1390,PF07508,Coil
MAYNAQNKTGARVAIYVRVSTLHQIDRDSLPMQKQDLLAYAKLMLNTDDCVIFEDAGYSGKNTDRPKFQEMMSQMRAGAFTHLLVWKIDRISRNLLDFATMYNELKALGVTFVSKNEQFDTSTAMGEAMLKIILVFAELERNMTSERVTATMISRANNGLWNGGRIPYGYDYDYETHEFSVNEEESKVVILMHDMYEQERSLVRVVRELNERGYRSRAGNLWSPVSLLIILRNVFYCGDYRYNMLKEGDRQKVKDESEWVTVENHHVAIIPKDQKERIMATLDSNSKLCKQRNIYKSSKHTHVFGGLIYCGSCGKPLGSTPGNLTRDGWYYSKYTCPTRRKSVTLCTGKSTSDPIIGEFVFNYILNMLNAQNDFDKISSPEELEKLLLIGDTFAYIDHIEPNGLNDLFNVLSSGTVKGAVFGKGASLPTKKATVEPEVARLRNEKQKTERALDRLRNLYLYADEAMSEAEYMIQKNKLEETLEDINDQIGMMNTDSWQQSVSDEEFIQRASEFIIAQKLSGRKYVNYKRLAMSVDSEVLKNFVVSIIDSITIQDGLVSNIVFKNGLCHTFIFR

SEQ ID NO: 1160 - protein, 573 aa, Unknown
  Description of Unknown: Integrase B1161 sequence
  PTHR30461:SF3,SM00857,G3DSA:1.10.10.2600,IPR036162,PS51737, G3DSA:3.40.50.1390,IPR006119,IPR038109,PF07508,IPR011109, SSF53041,PTHR30461,Coil,PS51736,cd00338, PF00239
MYDIYNQKPTSRKVVIYARVSTEHEAQLSALENQKDWYKPILQQHPEWDIVKMYVDEGITGTSAKKRPQFMQMIQDASSGNFDLILTREVSRFARNTVDTLQYTRELKSKGVEVFFLNDNIKTFDGDGELRLTIMATLAQDESRKTSVRVKSGQQTSMENGVFYGNGNILGYDRVGKDMVINPEQAKTVRMIFDWYLDGWGMRKIQFELEKAGRLTAMGKSNWHVSNISKILRNSFYCGIITYHKEFTPDFLEQKKIRNFGDMEFTQVRGNHKPIITEEEYDQAQKRINSRRKTLSVDTSGQRMYGEKPPSDVWVKLLECECGHKFNRKMWHNTTEGKQYGYQCYSSIRTGTVRTRLNKGLPIDGICQTPMIAGWKLQMMAKYIFKNYLSDTDQVLSLAESMLEKHIDDEEEVCDNTDIINQKKEELQKLLKRLDNLIEMRADGELARDIFILKKESTENSISQLKKELAELEPSEIESEIDEVTSKEKITILKYALDQYTNFDSDADIPESVIEAFVEKIIARKDGFDWYLRFNPEESPMGCLVDGKRKRGAKVSAFCSPQHRQLSQRRMHN

SEQ ID NO: 1161 - protein, 573 aa, Unknown
  Description of Unknown: Integrase B1162 sequence
  PTHR30461:SF3,IPR036162,PS51737,IPR011109,PTHR30461, PS00397,PF00239,G3DSA:1.10.10.2600,IPR006119,SSF53041, SM00857,IPR025827,IPR038109,PS51736,cd03768, IPR006118,PF13408,G3DSA:3.40.50.1390,PF07508,Coil
MAYNAQNKTGARVAIYVRVSTLHQIDRDSLPMQKQDLLAYAKLMLNTDDCVIFEDAGYSGKNTDRPKFQEMMSQMRAGAFTHLLVWKIDRISRNLLDFATMYNELKALGVTFVSKNEQFDTSTAMGEAMLKIILVFAELERNMTSERVTATMISRANNGLWNGGRIPFGYDYDYETHEFSVNEEESKVVILMHDMYEQEHSLVRVVRELNERGYRSRAGNLWSPVSLLIILRNVFYCGDYRYNMLKEGDRQKVKDESEWVTVENHHVAIIPKDQKERIMAALDSNSKLCKQRNIYKSSKHTHVFGGLIYCGSCGKPLGSTPGNLTRDGWHYSKYTCPTRRKSVTLCTGKSTSDPIIGEFVFNYILNMLNAQNDFEKISSPEELEKLLLIGDTFAYIDHIEPNGLNDLFNVLSSGAVKGAVFGKGASLPTKKATVEPEVARLRNEKQKTERALDRLRSLYLYADEAMSEAEYMIQKNKLEETLEDINDQIGMMNTDSWQQSVSDEEFIQRASEFIIAQKLSGRKYVNYKRLAMSVDSEVLKNFVVSIIDSITIQDGLVSNIVFKNGLCHTFIFR

SEQ ID NO: 1162 - protein, 573 aa, Unknown
  Description of Unknown: Integrase B1163 sequence
  PTHR30461:SF3,SM00857,G3DSA:1.10.10.2600,IPR036162,PF13408, IPR025827,G3DSA:3.40.50.1390,PS51737,IPR006119,IPR038109, PF07508,IPR011109,SSF53041,PF00239,PTHR30461, PS51736,Coil,cd00338
MPHPAVALDKKPVCGYYSRKRVFCEVVLMHGAYILARYSTDRQNEDSIEVQVSACRKWCDERSLPVLDVFADEATSGMKDTRPEYARMMWQLEHGGADTVVIYDQSRMFRKLTAWFDFRDQLARLGVDVVSVTQPMIGGDLRDPANFLTEGSMALFNQMWVLQTRQKVVAKMRYMAEQGLHTGGTPPLGYKVVDGRLVIDAAEAETVRLIFGLYASGMTYREIIRRLNAEERRTKSGGNFGVNSLHDLLKNPKYVGDLVYGKVAKRPDGSRNSHAVAEDAIVVKDVLPAIVDRETWEKVQLKMQENKRSAAGRPASAREYPLKGKVFCRECKSAMLVTGTNRGQRRHYYYICGAKQRKGLCDNSPIPVGGLEALVADAVRQRLGQPDSVEGLIRILREERSKLSGSAVQRLRELQKRDCEIAKQLDAAVNAVLGGLHSPTLTAKVNALEAERAKIAHDMQQLRAQVSGAEIDEPHLRELLALAMQDDTAVLSIVVRVEVGKDEIAVWTLLDADPNGDFDFAEDGVPITPSEVSPSYNNSGCPVTGTTNYYNIVTPAGLLLFYIARPRQRDRRS

SEQ ID NO: 1163 - protein, 573 aa, Unknown
  Description of Unknown: Integrase B1164 sequence
  PTHR30461:SF3,IPR036162,PS51737,IPR011109,PTHR30461, PS00397,PF00239,G3DSA:1.10.10.2600,IPR006119,SSF53041, cd00338,SM00857,IPR025827,IPR038109,PS51736, IPR006118,PF13408,G3DSA:3.40.50.1390,PF07508,Coil
MNKNQERPKKAALYVRVSTNYQIDKDSLPMQRQDLVNYAKLMFGIDDYVIFEDAGYSGKNTDRPEFQNMMKRIRNGEFTHLLCWKIDRISRNLLDFAAMYQELKDLNVTFVSKNEQFDTSTAIGEAMLKIILIFAELERNMTSERVTATMLSRAQNGLWNGGKVPYGYSYDKEQKEFSVNPEEAEIVKKIFDAYSNHHSIVTVARALNEDGYSSRAGNDWSPVSIFIILTNPFYKGTYRYNHYKIPGLKVEKDPSEWIEVPDHHPRIISDEQFEYVNSILKENSRSKRLPGKQHATNNTHIFGGLLYCSSCGSIYVSSPARMQACGYRPSKYACPNLRKRKACTSKSISDPVIGEFLMNYVLNMMRAKDSFSSIHNSDDLEHALLRGSTFDSVDHIGKDGVESYFYMLTTVPINGKRMRKPKKVVTIDPELKRLRAEKRKTERALERLMNLYLYSEDSISEKDYTIRKSALEDYLKEINENLNMIDRSNNHEIISDENFIKRASYFILNKELADKNYIYFKKLAMDMDPEILKNFFHEIIDSVVMEQNRIMEIVFRNGLTHTFYYKDAEKPEA

SEQ ID NO: 1164 - protein, 573 aa, Unknown
  Description of Unknown: Integrase B1165 sequence
  PTHR30461:SF3,IPR036162,PS51737,IPR011109,PTHR30461, PS00397,PF00239,G3DSA:1.10.10.2600,IPR006119,SSF53041, SM00857,IPR025827,IPR038109,PS51736,cd03768, IPR006118,PF13408,G3DSA:3.40.50.1390,PF07508,Coil
MAYNAQNKTGARVAIYVRVSTLHQIDRDSLPMQKQDLLAYAKLMLNTDDCVIFEDAGYSGKNTDRPKFQEMMSQMRAGAFTHLLVWKIDRISRNLLDFATMYNELKALGVTFVSKNEQFDTSTAMGEAMLKIILVFAELERNMTSERVTATMISRANNGLWNGGRIPFGYNYDYETHEFSVNEEESKVVILMHDMYEQERSLVRVVRELNERGYRSRAGNLWSPVSLLIILRNVFYCGDYRYNMLKEGDRQKVKDESEWVTVENHHVAIIPKDQKERIMATLDSNSKLCKQRNIYKSSKHTHVFGGLIYCGSCGKPLGSTPGNLTRDGWHYSKYTCPTRRKSVTLCTGKSTSDPIIGEFVFNYILNMLNAQNDFEKISSPEELEKLLLIGDTFAYIDHIEPNGLNDLFNVLSSGAVNGAVFGKGASLPTKKATVEPEVARLRNEKQKTERALDRLRSLYLYADEAMSEAEYMIQKNKLEETLEDINDQIGMMNTDSWQQSVSDEEFIQRASEFIIAQKLSGRKYVNYKRLAMSVDSEVLKNFVVSIIDSITIQDGLVSNIVFKNGLCHTFIFR

SEQ ID NO: 1165 - protein, 573 aa, Unknown
  Description of Unknown: Integrase B1166 sequence
  PTHR30461:SF3,IPR036162,PS51737,IPR011109,PTHR30461, PS00397,PF00239,G3DSA:1.10.10.2600,IPR006119,SSF53041, SM00857,IPR025827,IPR038109,PS51736,cd03768, IPR006118,PF13408,G3DSA:3.40.50.1390,PF07508,Coil
MAVTPSISKKITAPKAAIYIRVSTHWQVDKDSLQVQRRELIAYCQLVLGINDYVIFEDAGYSAKNTDRPDFQKMMTQIRSGDFSHVLVWKIDRVSRNLLDFASMYAELQNLGVTFISKNEQFDTSTAIGEAMLKIILVFAELERNMTSERVTAVMLSRANNGQWNGGRVPYGYAHQKGSGSFSIDDTEGEVVKRIFQLYEERQSVLYIANTLNDEKILTRAGGTWNPASIHRILTNPFYYGAYRYNIRKGTNGPKRSDSEWVVVEDHHPSLISKERFDVMQYRLKRNKRGGNQRGISVEKKNVHIFSGLLVCGHCSEIMTATPGNRRADGWTPSNYACMNRRKGSSLCEGRYVSDVIVAPFVLTLISNILTAKDKVGARTEPATLEKRLLSGAVFCDVKHIKPDGLNQLLSILKSGISGLEYSPEFKNSQPNDMASEVESLKDQRRKKEIALRRLKSLFLYGSEEIPETEFILEQRKLIDDLNAIDAKLLKLDVDNAGLQSLDDAFVEKASYFIMVERIMNGDRDDPASFIRNVDLSVVKSFLNTIIRKIVILSGKVSSIEFKNGITLEFSYE

SEQ ID NO: 1166 - protein, 573 aa, Unknown
  Description of Unknown: Integrase B1167 sequence
  PTHR30461:SF3,cd00338,SM00857,G3DSA:1.10.10.2600,IPR036162, PF13408,IPR025827,PS51737,G3DSA:3.40.50.1390,IPR006119, IPR038109,PF07508,IPR011109,SSF53041,PTHR30461, PS51736,Coil,PF00239
MAKVKLPDKPRVAIYTRVSTLHQIDKDSLPMQRQDLINYARLILNTEDYVIYEDAGYSGKNTDRPKFQEMMQQVRLGMFTHILVWKIDRISRNLLDFATMYSELKQLGVVFVSKNEQFDTSSAMGEAMLKIILIFAELERNMTSERVTAAMLSRAANGQWNGGRVPLGYDYDPETKTFTINESEAAVVKIIHDKYEQERSLVSLARYLNGHGYRTRTGCTYSPSTLLIILRNIFYCGDYRYNVLKDGDRQKRKKESEWITVKDHHPAIISREQKEEIARILKENRRLECERRGIYSKKKNVHVFGGLVICGNCGHAMTSTIRPADQDGIRWSVYVCPTKRRSEYLCKGRATSEVVLGEFVFNYILNMLNVQKNFDSINSVEDMEKMLLSGSTFRDVDGIERAGLDDLYNMLASGLTEKAPFDSSVEVRKKPVVSDIELENLNTEKTKIERAAERLQNLYLYSDDSISQKDYIIQREKLMSQLAEVNEQIGMVMSNADEKDVSDEEFVHAASKFILTQKLEGRTYIYYKRLATTVSREVLRSFVMSIIENITIYDGRVQTIVFKNGLSHTFILK

SEQ ID NO: 1167 - protein, 573 aa, Unknown
  Description of Unknown: Integrase B1168 sequence
  PTHR30461:SF3,IPR036162,PS51737,IPR011109,PTHR30461, PS00397,PF00239,G3DSA:1.10.10.2600,IPR006119,SSF53041, cd00338,SM00857,IPR025827,IPR038109,PS51736, IPR006118,PF13408,G3DSA:3.40.50.1390,PF07508,Coil
MQKNQTKKAALYIRVSTHYQIDKDSLPFQRNELINYAKYALGIDDYAIFEDAGYSGKNTDRPAYQDMMRRIRAKEFSHLCVWKIDRISRNLLDFAAMYEELKKFNCTFVSKNEQFDTSSAIGEAMLRIILVFAELERKLTAERVTSIMYSRANKGLWNGAPIPLGYKWDAKGKYPVIDEDTAVVVRYIYDQYEKIHSTMKLSDKLNRENIKSARGGEWTGTTVKGILRNPFYKGTYRYNYKTQTGRIKPVEEQIVHEDNHPGIIDKEQWDRVNKILDENSTRSVAQLRSNVKYTHIFSKLLRCGQCGHTMGGGLDRARSDGYRPSRYYCTSHTRKAGCTNGVYSDVYLGPFVFNYIANLVRAQRALTDSQKPRDLERMLLRGKFFDNVAGIEQQGLLDTYNTILYGSGEDVMLQPSPEIAAQSASELELLDRDQKKYERALERIEQLYLYSEESMPEKDYVLKRNELKTMLDNIAERRAEVNSRLGLAPASSDFLEKATYFYLTNSLNQKRSLDFRKMVDTFEPKMLQDFLCSVIDHITVVDGHVASISFKNGLTNKFIYKATKPPKNASTKP

SEQ ID NO: 1168 - protein, 573 aa, Unknown
  Description of Unknown: Integrase B1169 sequence
  PTHR30461:SF3,IPR036162,PS51737,IPR011109,PTHR30461, PS00397,PF00239,G3DSA:1.10.10.2600,IPR006119,SSF53041, cd00338,SM00857,IPR025827,IPR038109,PS51736, IPR006118,PF13408,G3DSA:3.40.50.1390,PF07508,Coil
MQKNQTKKAALYIRVSTHYQIDKDSLPFQRNELINYAKYALGIDDYAIFEDAGYSGKNTDRPAYQDMMRRIRAKEFSHLCVWKIDRISRNLLDFAAMYEELKKFNCTFVSKNEQFDTSSAIGEAMLRIILVFAELERKLTAERVTSIMYSRANKGLWNGAPIPLGYKWDAKGKYPVIDEDTAVVVRYIYDQYERIHSTMKLSDKLNRENIKSARGGEWTGTTVKGILRNPFYKGTYRYNYKTQTGRIKPVEEQIVHEDNHPGIIDKEQWDRVNKILDENSTRSVAQLRSNVKYTHIFSKLLRCGQCGHTMGGGLDRARSDGYRPSRYYCTSHTRKAGCTNGVYSDVYLGPFVFNYIANLVRAQRALTDSQKPRDLERMLLRGKFFDSVAGIEQQGLLDTYNTILYGSGEDVMLQPSPEIAAQSASELELLDRDQKKYERALERIEQLYLYSEESMPEKDYVLKRNELKAMLDNIAERRAEVNSRLGLAPASSDFLEKATYFYLTNSLNQKRSLDFRKMVDTFEPKMLQDFLCSVIDHIVVVDGHVASISFKNGLTNKFIYKATKPPKSASTKP

SEQ ID NO: 1169 - protein, 573 aa, Unknown
  Description of Unknown: Integrase B1170 sequence
  PTHR30461:SF3,IPR036162,PS51737,IPR011109,PTHR30461, PS00397,PF00239,G3DSA:1.10.10.2600,IPR006119,SSF53041, SM00857,IPR025827,IPR038109,PS51736,cd03768, IPR006118,PF13408,G3DSA:3.40.50.1390,PF07508,Coil
MTEQNEKIVALYVRVSTGYQVDKDSLPFQKKELKAYCEHVLHIDKNRIEIFEDAGKSGKNTKRPAFERMMGKVKSGQVSHVIVYKIDRISRNLVDFSLMYDDFKYNNVTFISLNEQFDTSSAIGEAILKIILVFAELERKLTSERVTDVMIGRAQNGQWNGARVPYGWDWDEEKQCPVHSKKEAQYAIAMYEMYLKVKSTGKIRDYNNSHNIPTKRGGEWTSKTVTDFLRNPINKGAYRYNYRESARGRKKPNEEVVFIENAFPPLVEPETWEKVNKILDINRDKRNMGGLHPIEKNCNVFAGLIQCGICGTGYIVDKKDRRRKNGFTPSMYHCGAKTKAIHCQNPNVSDVKIGPFIINYIAAMVRVSKSKRKIKTPEALEEMLLADKVVFGDIAGLSTDSLNYTFEMITGKYTTDNAVWRTNPVNQSNKESNPEEIEKLKNEIKKYSRAKERLEDAYYFSDDGMSEKEYLEKKNKFDSMRVSAENKIKELTEASISSGIDEDSFIKSATSFLLAHKIYNESHIVYSDLAGVIEEETLKEFFNLILDYIVVVDRRIVEIVFSNGLSHQFIYRK

SEQ ID NO: 1170 - protein, 573 aa, Unknown
  Description of Unknown: Integrase B1171 sequence
  PTHR30461:SF3,SM00857,G3DSA:1.10.10.2600,IPR036162,PS51737, G3DSA:3.40.50.1390,IPR006119,IPR038109,PF07508,IPR011109, SSF53041,PTHR30461,Coil,PS51736,cd00338, PF00239
MYDIYNQKPTSRKVVIYARVSTEHEAQLSALENQKDWYKPILQQHPEWDIVKMYVDEGITGTSAKKRPQFMQMIQDASSGNFDLILTREVSRFARNTVDTLQYTRELKSKGVEVFFLNDNIKTFDGDGELRLTIMATLAQDESRKTSVRVKSGQQTSMENGVFYGNGNILGYDRVGKDMVINPEQAKTVRMIFDWYLDGWGMRKIQFELEKAGRLTAMGKSNWHVSNISKILRNSFYCGIITYHKEFTPDFLEQKKIRNFGDMEFTQVRGNHKPIITEEEYDQAQKRINSRRKTLSVDTSGQRMYGEKPPSDVWVKLLECECGHKFNRKMWHNTTEGKQYGYQCYSSIRTGTVRTRLNKGLPIDGICQTPMIAGWKLQMMAKYIFKNYLSDTDQVLSLAESMLEKHIDDEEEVCDNTDIINQKKEELQKLSKRLDNLIEMRADGELTRDIFILKKESTENSISQLKKELAELEPSEIESEIDEVTSKEKITILKYALDQYTNFDSDADIPESVIEAFVEKIIARKDGFDWYLRFNPEESPMGCLVDGKRKRGAKVSSFCSPQHRQLSLRRMHN

SEQ ID NO: 1171 - protein, 573 aa, Unknown
  Description of Unknown: Integrase B1172 sequence
  cd03768,SM00857,IPR006118,G3DSA:1.10.10.2600,IPR036162, PS51737,G3DSA:3.40.50.1390,IPR006119,IPR038109,PF07508, IPR011109,SSF53041,PTHR30461,PS00397,PS51736, Coil,PF00239
MTKKAAIYLRVSSIDQNYERQEIELKALAKCLGYEVKYIFEEKRSAVLKMDTRDELTQMRKLTKNEIDRIFIWDITRLSRRAIDFITLINEFTDKGICLHFKDKNIITLDEDGKQDMFVSMYLYILGLFAQMDAENLKAKMRSGRERGLAIGHAYTGCAPYGYKLINKQLYIDEKEAETVRAIFNNYVDGKSIQHIIDILNSNKIPTRTGILWTRNSIYAIITNPVYKGKPELTSITKRDENKKPLEKITRVFKAPVIIESPIWDEAQVQRKKHKSFIDKSKEREALLRGILQCGNCGKAYCTAINGSGVPTYICSDNRANINQKLNCKNGGVACYFLDSICWQTIKDIYAYKNFQDTFTKEKAKNQQLLQENQTQINNFIDKQIELDKENERVNKGYRIGIYTDSEAIRAKGEINNNKARYEKMIEELKAQNSILTAKIKQDFSHYKIPTVELSYEEKKAVCKELIETAKIYSYPPNNRIVQLQLKMGLIFNIVLNPKRRLYYIIDNSTVTFNNPQSAPIFLREELKDKDFTVTCDNNDYFNEEIFGEYSFAQMWNIMDKYGYIQDHPKVKK

SEQ ID NO: 1172 - protein, 573 aa, Unknown
  Description of Unknown: Integrase B1173 sequence
  cd03768,SM00857,G3DSA:1.10.10.2600,IPR036162,PF13408, IPR025827,G3DSA:3.40.50.1390,PS51737,IPR006119,IPR038109, PF07508,SSF53041,IPR011109,PTHR30461,PS51736, Coil,PF00239
MKKAVIYSRVSTLEQDYTSQTAELKKEAERMGYEVTHIYEEKESGFVDDRPELAKVLALTNADTDAVFVWEISRLSRRTVMVLSTIEDIEKKGILIYAKNENYRSWNEKGVKDSTSKLVLTLYASIAEAEALKFKERVKRGKRYRVLVEKKSYCNTSVFGYMKDENGRLVINEEEAEIVRDIFNKALEGYSGRRLKLYLKSKWGLDWSANTLNYLLHNTAYMGQKKVGGKTYYKAEKKKLEEGTKIRFFNPETDVVETPAIINSELFNKVQTAITNRKTRSSAKEARNAKPKLLKGLVLCGRCGKVYTNTGRMYTCTSGTNEYSERCGSTSVATASLDSAVWNVTKEIFSEAMAKELAAQKSEPIAAEIARLKEEIEGYNEAISNLKKQVGNLLRIASKADDVADDIIEKINILKKEQQMAKAEIADREAKIALLQKRLDAPAEMTEITDEDEKFEYLHKVIEAVFVYGEHKHKILAIQYLNGITAYCIRLWKDWYWFLDKGELVITDAVALQKNSPVDLKLKDSILIEVTDSNNAYYSGEDTDKEIFGQYTTEGFYAAMMQNKQLKPVAVKK

SEQ ID NO: 1173 - protein, 573 aa, Unknown
  Description of Unknown: Integrase B1174 sequence
  PTHR30461:SF3,IPR036162,PS51737,IPR011109,PTHR30461, PS00397,PF00239,G3DSA:1.10.10.2600,IPR006119,SSF53041, cd00338,SM00857,IPR025827,IPR038109,PS51736, IPR006118,PF13408,G3DSA:3.40.50.1390,PF07508,Coil
MNKNQERPKKAALYVRVSTNYQIDKDSLPMQRQDLVNYAKLMFGIDDYVIFEDAGYSGKNTDRPEFQNMMKRIRNGEFTHLLCWKIDRISRNLLDFAAMYQELKDLNVTFVSKNEQFDTSTAIGEAMLKIILIFAELERNMTSERVTATMLSRAQNGLWNGGKVPYGYSYDKEQKEFSVNPEEAEIVKKIFDAYSNHHSIVTVARALNEDGYSSRAGNDWSPVSIFIILTNPFYKGTYRYNHYKIPGLKVEKDPSEWIEVPDHHPRIISDEKFEYVNSILKENSRSKRLPGKQHATNNTHIFGGLLYCSSCGSIYVSSPARMQSCGYRPSKYACPNLRKRKACTSKSISDPVIGEFLMNYVLNMMRAKDSFSSIHNSDDLEHALLRGSTFDSVDHIGKDGVESYFYMLTTVPINGKRMRKPKKVVTIDPELKRLRAEKRKTERALERLMNLYLYSEDSISKKDYTIRKSALEDYLKEITENLNMIDRSNNHEIISDENFIKRASYFILNKELADKNYIYFKKLAMDMDPEILKNFFHEIIDSVVMEQNRVMEIVFRNGLTHTFYYKDTEKPEA

SEQ ID NO: 1174 - protein, 573 aa, Unknown
  Description of Unknown: Integrase B1175 sequence
  PTHR30461:SF3,IPR036162,PS51737,IPR011109,PTHR30461, PF00239,G3DSA:1.10.10.2600,IPR006119,SSF53041,cd00338, SM00857,IPR025827,IPR038109,PS51736,mobidb-lite, PF13408,G3DSA:3.40.50.1390,PF07508,Coil
MAKKKKPAGGNAIIYARYSSHNQRDVSIEQQIEACRKHAAELGLTITDTYEDRAISGRTDNRPAFQRMMRDAEDGKFQYVLAWKSNRMGRNMMQAMVNESRLMDCGVKVFYAEEDFDDSAAGRFALRSMMNVNQFYSDNLAEDVRRGLMDNASKCMANGRQPLGYKRGEGGKVVVDEPAAAIVREIYTRIASGEMFMDIARDLNRRGIKTQSGSEWNKSSFNVLCRNERYRGIYIYGDTRIEGGIPPIVDDVLWYKVQEVLKVKKSKNRHHCPSDEDYLLTGKLRCGKCGGYMIGMSGRSKTGDVHHYYACQNRRVGHTCDKKNIRRDVVEPAVAQAIKQYCLTDDAIEWITDQTIAYWEDEDRKLQIDSIENDLSAVQSSISNVMKAIEMGVITETTRDRLIELERQQTDLKSKLALAKEEIVHVDRKDLISSLLAFRHGNVHDRAYQEKLFNAFLIAVYVYDDDHLKLVFNSFGKDDTVNIALDLGENDDNSGLSDVSKSSPILSNGQPEQSHLRKLRWLFCLHYSARRNHSECPPLCSGHFQRKDYFNISRLSHSAECSKRYFHRRGRNG

SEQ ID NO: 1175 - protein, 573 aa, Unknown
  Description of Unknown: Integrase B1176 sequence
  PTHR30461:SF3,SM00857,G3DSA:1.10.10.2600,IPR036162,PF13408, PS51737,G3DSA:3.40.50.1390,IPR025827,IPR006119,IPR038109, PF07508,IPR011109,SSF53041,PTHR30461,PS51736, cd00338,PF00239
MAKRSAKKNEYQSAEQIGVIYARYSSHNQKEESIEQQIAECSDFAAKNGIRIVGIYADKAVSGRSDRRPNFQRMMRDAEKRQFQIVIAYKSNRIARNMLNALQYEARLDLLGIKTLYAKEEFGNTAAGRFALRTMMNVNQFYSENMGEDIKRGMVDNANECKVNGMLPLGYVKSKEGKYAIAPDEAAVVREIFDSVLKDVPVAEIARSLNQRGIHTKLGREWNKNSFHIMLKNDNYIGVYRHSGVVVEDGIPPILEKEVFTAVQEKLANKKKTAGRRSANGEYLLTGKLFCGYCGSYMIGVSGTGENGTVHNYYQCQKRHAEGRCEKKNVRRDFIEKLIARLTQDYILQDDTIEWIADSTMSFQAMARRESGVAQLERDLADNRKVAKNIMAAIEQGIITETTKARLLEVEGTIHDLERSLSIAKAASQPIERERVVFSLEQMREGNVGSKDHQKKLIDTFVKSVTLWDDRIQIDYYHTPGKHKFSYSLEELTSKAENESNASDVRTDSLELHHCRRELHRFTTAFLLAAAPSRLYGTIKKTQESNSCVFFACIDGCVPQCSARLGIVWSSKR

SEQ ID NO: 1176 - protein, 573 aa, Unknown
  Description of Unknown: Integrase B1177 sequence
  PTHR30461:SF3,IPR036162,PS51737,IPR011109,PTHR30461, PS00397,PF00239,G3DSA:1.10.10.2600,IPR006119,SSF53041, cd00338,SM00857,IPR025827,IPR038109,PS51736, IPR006118,PF13408,G3DSA:3.40.50.1390,PF07508,Coil
MQKNQTKKAALYIRVSTHYQIDKDSLPFQRNELINYAKYALGIDDYAIFEDAGYSGKNTDRPAYQDMMRRIRAKEFSHLCVWKIDRISRNLLDFAAMYDELKKFNCTFVSKNEQFDTSSAIGEAMLRIILVFAELERKLTAERVTSIMYSRANKGLWNGAPIPLGYKWDAKGKYPVIDEDTAVVVRYIYDQYEKIHSTMKLSDKLNRENIKSARGGEWTGTTVKGILRNPFYKGTYRYNYKTQTGRIKPVEEQIIHEDNHPGIIDKEQWDRVNKILDENSTRSVAQLRSNVKYTHIFSKLLRCGQCGHTMGGGLDRARSDGYRPSRYYCTSHTRKAGCTNGVYSDVYLGPFVFNYIANLVRAQRALTDSQKPRDLERMLLRGKFFDNIAGIEQQGLLDTYNTILYGSGEDVMLQPSPEIAAQSASELELLDRDQKKYERALERIEQLYLYSEESMPEKDYVLKRNELKAMLDNIAERRAEVNSRLGLAPASSDFLEKATYFYLTNSLNQKRSLDFRKMVDTFEPKMLQDFLCSVIDHITVVDGHVASISFKNGLTNKFIYKATKPPKNASTKP

SEQ ID NO: 1177 - protein, 573 aa, Unknown
  Description of Unknown: Integrase B1178 sequence
  PTHR30461:SF3,IPR036162,PS51737,IPR011109,PTHR30461, PS00397,PF00239,G3DSA:1.10.10.2600,IPR006119,SSF53041, cd00338,SM00857,IPR025827,IPR038109,PS51736, IPR006118,PF13408,G3DSA:3.40.50.1390,PF07508,Coil
MQKNQTKKAALYIRVSTHYQIDKDSLPFQRNELINYAKYALGIDDYAIFEDAGYSGKNTDRPAYQDMMRRIRAKEFSHLCVWKIDRISRNLLDFAAMYEELKKFNCTFVSKNEQFDTSSAIGEAMLRIILVFAELERKLTAERVTSIMYSRANKGLWNGAPIPLGYKWDAKGKYPVIDEDTAVVVRYIYDQYERIHSTMKLSDKLNRENIKSARGGEWTGTTVKGILRNPFYKGTYRYNYKTQTGRIKPVEEQIVHEDNHPGIIDKEQWDRVNKILDENSTRSVAQLRSNVKYTHIFSKLLRCGQCGHTMGGGLDRARSDGYRPSRYYCTSHTRKAGCTNGVYSDVYLGPFVFNYIANLVRAQRALTDSQKPRDLERMLLRGKFFDSVAGIEQQGLLDTYNTILYGSGEDVMLQPSPEIAAQSASELELLDRDQKKYERALERIEQLYLYSEESMPEKDYVLKRNELKDMLDNIAERRAEVNSRLGLAPASSDFLEKATYFYLTNSLNQKHSLDFRKMVDTFEPKMLQDFLCSVIDHITVVDGHVASISFKNGLTNKFIYKATKPPKNASTKP

SEQ ID NO: 1178 - protein, 572 aa, Unknown
  Description of Unknown: Integrase B1179 sequence
  cd03768,PTHR30461:SF3,SM00857,IPR006118,G3DSA:1.10.10.2600, IPR036162,PS51737,G3DSA:3.40.50.1390,IPR006119,IPR038109, PF07508,IPR011109,SSF53041,PTHR30461,PS00397, PS51736,Coil,PF00239
MRKRIVGYARVSTEKQDLERQKILIREYCSNNNYDLVKIISEKVSGAKKDRESINELLAVTKDTADMVVVSELSRISREKECLTVLNTINDILENGLDVLFLDDTSKVYSAYTELNVIDIITLTVKAHSAAEERDKITARMRTGKITKLNINPYMYTGSLVPYGFKVIDNPDYKGQKCNIPARKLMVIDESKTKDVQFIYQLVLNGTTLRDAAEEVNKLGLRTQLNKPFCETSISKMIKNPIYNGRRRFKGLNLPLMDKIISDNDWNRAQICVSQNQLFKGKTTKNFNPLKGLVFCPCGYALMLHKMIRKDGSGYFVMTCCKKNDKEYRKKCRNSGIVSHVLLPTVWKCVKDTLLLSEYTTKTTSEVHRINGIIEGLEDRISGLIDEIDSHKKEMARLSKAITLVTVKGLITQYENEYVTEEAKVTEIEAKINNIRDEISNYKANITKINSITYNSQLTNLTDQEKASVYQKVLSKVVYYSIDYFRGFIVISYKNGLENIIAINKTTTGYISPLPSSFSFNAETRKIRVTIGKKQTSIKEFSLSDIENIEYSFKELEANFNPQQWDIQSQIL

SEQ ID NO: 1179 - protein, 572 aa, Unknown
  Description of Unknown: Integrase B1180 sequence
  SM00857,G3DSA:1.10.10.2600,IPR036162,PF13408,PS51737, IPR025827,G3DSA:3.40.50.1390,IPR006119,IPR038109,PF07508, SSF53041,IPR011109,PTHR30461,Coil,cd00338, PF00239
MAYRKITDIRDTIGMRAVFYARVSTAEEEQLNAIELQIEENRGCIKDHGWKLVGEYIDRSKSGTMVKGRDDYQRLYEDLYEDLFDIVVIKDQERLQRNTLDWYLFINRVVQTGKLLFMYMDGKFYSPDDALITGVRAIIAEEFSRNLSKKLHNYHDHRIEKARQGQEIALQGSGNVYGWDKKDGKYYINPEQAKVRRLMCEGIMARKGSTLIAKELNEAGYRNTVGKLWKPMDIPKFVYDCKNVGTMIINKERHDFESKQTIKLPKEEWVYVENALPPIVTQEEWDLICKIHEERVIATGSDRRGKKTSGYSFSGKLVCGICGAPYWRKQRVSKDEYWVCSTKQTKGRRTRKRDSTMGKAGEINPLGCDNENISYNSLMEIMGVVSERLQANTDTIKQDMINWLTKLRKQLLEANGGHTEADLQRELSRKSKLLDAYLDGILNKQEYQTKAEELDERIIQLKAETEKNKANSGDIAEIDKVLANIDEEVSRYVDGNEKLKVEYLLEHLEQVQIFPDKVIVIVPILSEGIVVEKTQYVSREKCSKIHTESMIHYLEDYMYCTRKLGLYVQLVA

SEQ ID NO: 1180 - protein, 572 aa, Unknown
  Description of Unknown: Integrase B1181 sequence
  PTHR30461:SF3,IPR036162,PS51737,IPR011109,PTHR30461, PS00397,PF00239,G3DSA:1.10.10.2600,IPR006119,SSF53041, cd00338,SM00857,IPR025827,IPR038109,PS51736, IPR006118,PF13408,G3DSA:3.40.50.1390,PF07508,Coil
MASRIAEKLAAKKAAIYIRVSTHWQVDKDSLKVQRRELIAYVTLVLGITDYVVFEDPGYSAKNTDRPEYQAMMDRIRTGEFTHLVVWKIDRISRNLIDFAAMHDELQSLGVTFVSKNEQFDTSSAIGEAMMRIILIFAELERKTTAERVTAVMLSRASDGQWNGGRVPFGYSWSKEAKTFSIVPEEAKAIRRMAELYEQYQSLLYVAKYLNDAGIVTKTGGQWTPTTVRTILTNPWYIGQYVYNVHSDGKGIEKRDSDEWITVENHHEPILNEDVFCRMKFLLTRNKRGGVPSHKTYVRKNIHVFAGLLRCGQCGSNMTANLDRRRANGFRPSQYACGSRRRKGTSCTNKYISDTTLGPFVLNYVANIIRASKNSSEATTPEVLERKLLRGEAFEDVASVSTDALGQLLDAFRSAGDAVEYRPQIAFSGDDNSIREIDTLRARRRKLDNALARLNALYLYDDEAMPEKDFVMQRGQITKQLEEVNARIEELQNQESSEELGDDFIGKASYYIMANKLIEDRYIDYEKYIRAIDPSIPHSFLQQIIDHIVVNDGRVISITFKNGSTHTFTYKT

SEQ ID NO: 1181 - protein, 572 aa, Unknown
  Description of Unknown: Integrase B1182 sequence
  PTHR30461:SF3,IPR036162,PS51737,IPR011109,PTHR30461, PS00397,PF00239,G3DSA:1.10.10.2600,IPR006119,SSF53041, cd00338,SM00857,IPR025827,IPR038109,PS51736, IPR006118,PF13408,G3DSA:3.40.50.1390,PF07508,Coil
MASRIAEKLAAKKAAIYIRVSTHWQVDKDSLKVQRRELIAYVTLVLGITDYVVFEDPGYSAKNTDRPEYQAMMDRIRTGEFTHLVVWKIDRISRNLIDFAAMHDELQSLGVTFVSKNEQFDTSSAIGEAMMRIILIFAELERKTTAERVTAVMLSRASDGQWNGGRVPFGYSWSKETKTFSIVPEEAKAIRRMAELYEQYQSLLYVAKYLNDAGIVTKTGGQWTPTTVRTILTNPWYIGQYVYNVHSDGKGIEKRDSDEWITVENHHEPILNEDVFCRMKFLLTRNKRGGVPSHKTYVRKNIHIFAGLLRCGQCGSNMTANLDRRRANGFRPSQYACGSRRRKGTSCTNKYISDTTLGPFVLNYVANIIRASKNSSEATTPEVLERKLLRGEAFEDVASVSTDALGQLLDAFRSAGDAVEYRPQIAFSGDDNSIREIDTLRARRRKLDNALARLNALYLYDDEAMPEKDFVMQRGQITKQLEEVNARIEELQNQESSEELGDDFIGKASYYIMANKLIEDRYIDYEKYIRAIDPSIPRSFLQQIIDHIVVNDGRVTSITFKNGATHTFTYKT

SEQ ID NO: 1182 - protein, 572 aa, Unknown
  Description of Unknown: Integrase B1183 sequence
  PTHR30461:SF3,IPR036162,PS51737,IPR011109,PTHR30461, PS00397,PF00239,G3DSA:1.10.10.2600,IPR006119,SSF53041, cd00338,SM00857,IPR025827,IPR038109,PS51736, IPR006118,PF13408,G3DSA:3.40.50.1390,PF07508,Coil
MASRIAEKLAAKKAAIYIRVSTHWQVDKDSLKVQRRELIAYVTLVLGITDYVVFEDPGYSAKNTDRPEYQAMMDRIRTGEFTHLVVWKIDRISRNLIDFAAMHDELQSLGVTFVSKNEQFDTSSAIGEAMMRIILIFAELERKTTAERVTAVMLSRASDGQWNGGRVPFGYSWSKETKTFSIVPEEAKAIRRMAELYEQYQSLLYVAKYLNDAGIVTKTGGQWTPTTVRTILTNPWYIGQYVYNVHSDGKGIEKRDSDEWITVENHHEPILNEDVFCRMKFLLTRNKRGGVPSHKTYVRKNIHVFAGLLRCGQCGSNMTANLDRRRANGFRPSQYACGSRRRKGTSCTNKYISDTTLGPFVLNYVANIIRASKNSSEATTPEVLERKLLRGEAFEDVASVSTDALGQLLDAFRSAGDAVEYRPQIAFSGDDNSIREIDTLRARRRKLDNALARLNALYLYDDEAMPEKDFVMQRGQITKQLEEVNARIEELQNQESSEGLGDDFIGKASYYIMANKLIEDRYIDYEKYIRAIDPSIPRSFLQQIIDHIVVNDGRVISITFKNGSTHTFTYKT

SEQ ID NO: 1183 - protein, 572 aa, Unknown
  Description of Unknown: Integrase B1184 sequence
  PTHR30461:SF3,IPR036162,PS51737,IPR011109,PTHR30461, PS00397,PF00239,G3DSA:1.10.10.2600,IPR006119,SSF53041, cd00338,SM00857,IPR025827,IPR038109,PS51736, IPR006118,PF13408,G3DSA:3.40.50.1390,PF07508,Coil
MASRIAEKLAAKKAAIYIRVSTHWQVDKDSLKVQRRELIAYVTLVLGITDYVVFEDPGYSAKNTDRPEYQAMMDRIRTGEFTHLVVWKIDRISRNLIDFAAMHDELQSLGVTFVSKNEQFDTSSAIGEAMMRIILIFAELERKTTAERVTAVMLSRASDGQWNGGRVPFGYSWSKETKTFSIVPEEAKAIRRMAELYEQYQSLLYVAKYLNDAGIVTKTGGQWTPTTVRTILTNPWYIGQYVYNVHSDGKGIEKRDSDEWITVENHHEPILNEDVFCRMKFLLTRNKRGGVPSHKTYVRKNIHVFAGLLRCGQCGSNMTANLDRRRANGFRPSQYACGSRRRKGTSCTNKYISDTTLGPFVLNYVANIIRASKNSSEATTPEVLERKLLRGEAFEDVASVSTDALGQLLDAFRSAGDAVEYRPQIAFSGDDNSIREIDTLRARRRKLDNALARLNALYLYDDEAMPEKDFVMQRGQITKQLEEVNARIEELQNQESSEELGDDFIGKASYYIMANKLIEDRYIDYEKYIRAIDPSIPRSFLQQIIDHIVVNDGRVISITFKNGSTHTFTYKT

SEQ ID NO: 1184 - protein, 572 aa, Unknown
  Description of Unknown: Integrase B1185 sequence
  SM00857,G3DSA:1.10.10.2600,IPR036162,PF13408,IPR025827, G3DSA:3.40.50.1390,PS51737,IPR006119,IPR038109,PF07508, SSF53041,IPR011109,PTHR30461,Coil,PS51736, cd00338,PF00239
MAYRKITDIKDTIGMRAVFYARVSTAEEEQLNAIELQIEENRNCIHKNKWKKVDEYIDRSKSGTMVKGRDEYQRLYEDLYEDLFDIVVIKDQERLQRNTLDWYLFINRVVQTGKLLFMYMDGKFYSPDDALITGVRAIIAEEFSRNLSKKLHNYHDHRIEKARQGQEIALQGSGNVYGWDKKDGKYYINPEQAKVRRLMCEGIMARKGSTLIAKELNDAGYRNTVGKPWKPMDIPKFVYDCKNVGTMIINKERHDFESKQTIKLPKEEWVYVENALPPIVTQEEWDLICKIHEERVIATGSDRRGKKTSGYSFSGKLVCGICGAPYWRKQRVSKDEYWVCSTKQTKGRRTRKRDSTMGKAGEINPLGCDNENISYNSLMEIMGVVSERLQANTDTIKHDMINWLTKLRKQLLEANGGHAEADLQRELSRKSKLLDAYLDGILNKQEYQKKAEELDERIIQLKAETEKNKANSGDIAEIDKVLANIDEEVSRYVDGNEKLKVEYLLEHLEQVQIFPDKVIVIVPILSEGIVVEKAQYVSREKCSKIHTESMIHYLEDYMYCTRKLGLYVQLVA

SEQ ID NO: 1185 - protein, 572 aa, Unknown
  Description of Unknown: Integrase B1186 sequence
  SM00857,G3DSA:1.10.10.2600,IPR036162,PF13408,IPR025827, G3DSA:3.40.50.1390,PS51737,IPR006119,IPR038109,PF07508, SSF53041,IPR011109,PTHR30461,Coil,cd00338, PF00239
MAYRKITDIRDTIGMRAVFYARVSTAEEEQLNAIELQIEENRGCIKDHGWKLVGEYIDRSKSGTMVKGRDDYQRLYEDLYEDLFDIVVIKDQERLQRNTLDWYLFINRVVQTGKLLFMYMDGKFYSPDDALITGVRAIIAEEFSRNLSKKLHNYHDHRIEKARQGQEIALQGSGNVYGWDKKDGKYYINPEQAKVRRIMCEGIMARKGSTLIAKELNDAGYRNTVGKPWKPMDIPKFVYDCKNVGTMIINKERHDFESKQTIKLPKEEWVYVENALPPIVTQEEWDLICKIHEERVIATGSDRRGKKTSGYSFSGKLVCGICGAPYWRKQRVSKDEYWVCSTKQTKGRRTRKRDSTMGKAGEINPLGCDNENISYNSLMEIMGVVSERLQANTDTIKHDMINWLAKLRKQLLEANGGHTEADLQRELSRKSKLLDAYLDGILNKQEYQKKAEELDERIIQLKAETEKNKANSGDIAEIDKVLANIDEEVSRYVDGNEKLKVEYLLEHLEQVQIFPDKVIVIVPILSDGIVVEKTQYLSREKCSEIHTESMIHYLEDYMYCTRKLGLYVQLVA

SEQ ID NO: 1186 - protein, 572 aa, Unknown
  Description of Unknown: Integrase B1187 sequence
  SM00857,G3DSA:1.10.10.2600,IPR036162,PF13408,IPR025827, G3DSA:3.40.50.1390,PS51737,IPR006119,IPR038109,PF07508, SSF53041,IPR011109,PTHR30461,Coil,cd00338, PF00239
MAYRKITDIKDTIGMRAVFYARVSTAEEEQLNAIELQIEENRGCIKDHGWKLVGEYIDRSKSGTMVKGRDDYQRLYEDLYEDLFDIVVIKDQERLQRNTLDWYLFINRVVQTGKLLFMYMDGKFYSPDDALITGVRAIIAEEFSRNLSKKLHNYHDHRIEKARQGQEIALQGSGNVYGWDKKDGKYYINPEQAKVRRLMCEGIMARKGSTLIAKELNDAGYRNTVGKPWKPMDIPKFVYDCKNVGTMIINKERHDFESKQTIKLPKEEWVYVENALPPIVTQEEWDLICKIHEERVIATGSDRRGKKTSGYSFSGKLVCGICGAPYWRKQRVSKDEYWVCSTKQTKGRRTRKRDSTMGKAGEINPLGCDNENISYNSLMEIMGVVSERLQANTDTIKQDMINWLTKLRKQLLEANGGHTEADLQREISRKSKLLDAYLDGILNKQEYQKKAEELDERIIQLKAETEKNKANSGDIAEIDKVLANIDEEVARYIDGNEKLKVEYLLEHLEQVQIFPDKVIVIVPILSEGIVVEKTQYVSREKCSKIHTESMIHYLEDYMYCTRKLGLYVQLVA

SEQ ID NO: 1187 - protein, 572 aa, Unknown
  Description of Unknown: Integrase B1188 sequence
  SM00857,G3DSA:1.10.10.2600,IPR036162,PF13408,PS51737, G3DSA:3.40.50.1390,IPR025827,IPR006119,IPR038109,PF07508, IPR011109,SSF53041,PF00239,PTHR30461,Coil, cd00338
MAYRKITDIRDTIGMRAVFYARVSTAEEEQLNAIELQIEENRGCIKDHGWKLVGEYIDRSKSGTMVKGRDDYQRLYEDLYEDLFDIVVIKDQERLQRNTLDWYLFINRVVQTGKLLFMYMDGKFYSPDDALITGVRAIIAEEFSRNLSKKLHNYHDHRIEKARQGQEIALQGSGNVYGWDKKDGKYYINPEQAKVRRLMCEGIMARKGSTLIAKELNDAGYRNTVGKPWKPMDIPKFVYDCKNVGTMIINKERHDFESKQTIKLPKEEWVYVENALPPIVTQEEWDLICKIHEERVIATGSDRRGKKTSGYSFSGKLVCGICGAPYWRKQRVSKDEYWVCSTKQTKGRRTRKRDSTMGKAGEINPLGCDNENISYNSLMEIMGVVSERLQANTDTIKQDMINWLTKLRKQLLEANGGHTEADLQRELSRKSKLLDAYLDGILNKQEYQKKAEELDDRIIQLKAETEKNKANSGDIAEIDKVLANIDEEVSRYVDGNEKLKVEYLLEHLEQVQIFPDKVIVIVPILSEGIVVEKAQYVSREKCSKIHTESMIHYLEDYMYCTRKLGLYVQLVA

SEQ ID NO: 1188 - protein, 572 aa, Unknown
  Description of Unknown: Integrase B1189 sequence
  cd03768,SM00857,G3DSA:1.10.10.2600,IPR036162,PS51737, G3DSA:3.40.50.1390,IPR006119,IPR038109,PF07508,IPR011109, SSF53041,PTHR30461,PS51736,Coil,PF00239
MNEQKIVALYTRVSTGYQIDKDSLPFQKKELSAYCKHILHAEKMELFEDAGKSGKNTDRPAFLRMMKKIRAGEISHVVVYKIDRISRNLVDFSVMYDEFKKYRVTFISLNEQFDTSSAIGEAVLKIILVFAELERKLTSERVIGVMLDRAMSGKWNGARMPFGWKWNPETEFPEHDPVELEKALTLYRVYDETHSTAKVRDYCYDNDIQTKRGGKWTTTTILNFLKNPMNKGDYRYNYRGSARGTKKPENEVVYLPGVFPPLVDPDLWDRVNAIIKDNAEKHDIHKNPHIKKHVHIFTGGILKCAYCGASFQVSRLDKKRLNGFQPSLYVCTSRRTYRACDASGASDVVIGAFFFNYVRNLVQATKSRAKIGTPADLEQILLSGDEFSRIRYIDPSDLDIIYQAIRGTIAPGSGVTYIPAPPDSDKKDAPELSGLRTEAARLSRALDRLKKAYLFDDDAMSEAEYLSTRSELTEQLTRINNKIADALTDESYSAAAELSFVNSASSFLLSYRLQGADHIVYSDFAASVDALVLKNFVNMIVDHITIKDGDPVEIVFKNGLRNRFVYQDDATV

SEQ ID NO: 1189 - protein, 572 aa, Unknown
  Description of Unknown: Integrase B1190 sequence
  PTHR30461:SF3,IPR036162,PS51737,IPR011109,PTHR30461, PS00397,PF00239,G3DSA:1.10.10.2600,IPR006119,SSF53041, cd00338,SM00857,IPR025827,IPR038109, PS51736,IPR006118,PF13408,G3DSA:3.40.50.1390,PF07508,Coil
MASRIAEKLAAKKAAIYIRVSTHWQVDKDSLKVQRRELIAYVTLVLGITDYVVFEDPGYSAKNTDRPEYQAMMDRIRTGEFTHLVVWKIDRISRNLIDFAAMHDELQSLGVTFVSKNEQFDTSSAIGEAMMRIILIFAELERKTTAERVTAVMLSRASDGQWNGGRVPFGYSWSKETKTFSIVPEEAKAIRRMAELYEQYQSLLYVAKYLNDAGIVTKTGGQWTPTTVRTILTNPWYIGQYVYNVHSDGKGIEKRDSDEWITVENHHEPILNDDVFYRMKFLLTRNKRGGVPSHKTYVRKNIHVFAGLLRCGQCGSNMTANLDRRRANGFRPSQYACGSRRRKGTSCTNKYISDTTLGPFVLNYVANIIRASKNSSEATTPEVLERKLLRGEAFEDVASVSTDALGQLLDAFRSAGDAVEYRPQIAFSGDDNSIREIDTLRARRRKLDNALARLNALYLYDDEAMPEKDFVMQRGQITKQLEEVNARIEELQNQESSEELGDDFIGKASYYIMANKLIEDRYIDYEKYIRAIDPSIPRSFLQQIIDHIVVNDGRVISITFKNGSTHTFTYKT

SEQ ID NO: 1190 - protein, 572 aa, Unknown
  Description of Unknown: Integrase B1191 sequence
  cd03768,SM00857,IPR006118,G3DSA:1.10.10.2600,IPR036162, PS51737,G3DSA:3.40.50.1390,IPR006119,IPR038109,PF07508, IPR011109,SSF53041,PTHR30461,PS00397,PS51736, Coil,PF00239
MRKRIVGYARVSTEKQDLERQKILIREYCSNNNYDLVKIISEKVSGAKKDRESINELLAVTKDTADMVIVSELSRISREKECLTVLNTINDILENGLDVLFLDDTSKVYSAYTELNVIDIITLTVKAHSAAEERDKITARMRTGKITKLNINPYMYTGSLVPYGFKVIDNPDYKGQKCNIPARKLMVIDESKTKDVQFIYQLVLNGTTLRDAAEEVNKLGLRTQLNKPFCETSISKMIKNPIYNGRRRFKGLNLPLMDKIISDNDWNRAQICVSQNQLFKGKTTKNFNPLKGLVFCPCGYALMLHKMIRRDGSGYFVMTCCKKNDKEYRKKCRNSGIVSHVLLPTVWKCVKDTLLLSEYTTKTTSEVHRINGIIEGLEDRISGLIDEIDSHKKEMARLSKAITLVTVKGLITQYENEYVTEEAKVTEIEAKINNIRDEISNYKANITKINSITYNSQLINLTDQEKASVYQKVLSKVVYYSIDYFRGFIVISYKNGLENIIAINKTTTGYISPLPSSFSFNAETRKIRVTIAKKQTSIKEFSLSDIENIEYSFKELEANFNPQQWDIQSQIL

SEQ ID NO: 1191 - protein, 572 aa, Unknown
  Description of Unknown: Integrase B1192 sequence
  SM00857,G3DSA:1.10.10.2600,IPR036162,PF13408,IPR025827, G3DSA:3.40.50.1390,PS51737,IPR006119,IPR038109,PF07508, SSF53041,IPR011109,PTHR30461,Coil,cd00338, PF00239
MAYRKITDIRDTIGMRAVFYARVSTAEEEQLNAIELQIEENRGCIKDHGWKLVGEYIDRSKSGTMVKGRDDYQRLYEDLYEDLFDIVVIKDQERLQRNTLDWYLFINRVVQTGKLLFMYMDGKFYSPDDALITGVRAIIAEEFSRNLSKKLHNYHDHRIEKARQGQEIALQGSGNVYGWDKKDGKYYINPEQAKVRRLMCEGIMARKGSTLIAKELNDAGYRNTVGKPWKPMDIPKFVYDCKNVGTMIINKERHDFESKQTIKLPKEEWVYVENALPPIVTQEEWDLICKIHEERVIATGSDRRGKKTSGYSFSGKLVCGICGAPYWRKQRVSKDEYWVCSTKQTKGRRTRKRDSTMGKAGEINPLGCDNENISYNSLMEIMGVVSERLQANTDTIKQDMINWLTKLRKQLIEANGGHTEADLQRELSRKSKLLDAYLDGILNKQEYQTKAEELDERIIQLKAETEKNKANSGDIAEIDKVLANIDEEVSRYVDGNEKLKVEYLLEHLEQVQIFPDKVIVIVPILSEGIVVEKTQYVSREKCSKIHTESMIHYLEDYMYCTRKLGLYVQLVA

SEQ ID NO: 1192 - protein, 572 aa, Unknown
  Description of Unknown: Integrase B1193 sequence
  SM00857,G3DSA:1.10.10.2600,IPR036162,PF13408,IPR025827, G3DSA:3.40.50.1390,PS51737,IPR006119,IPR038109,PF07508, SSF53041,IPR011109,PTHR30461,Coil,cd00338, PF00239
MAYRKITDIKDTIGMRAVFYARVSTAEEEQLNAIELQIEENRGCIKDHGWKLVGEYIDRSKSGTMVKGRDDYQRLYEDLYEDLFDIVVIKDQERLQRNTLDWYLFINRVVQTGKLLFMYMDGKFYSPDDALITGVRAIIAEEFSRNLSKKLHNYHDHRIEKARQGQEIALQGSGNVYGWDKKDGKYYINPEQAKVRRLMCEGIMARKGSTLIAKELNDAGYRNTVGKPWKPMDIPKFVYDCKNVGTMIINKERHDFESKQTIKLPKEEWVYVENALPPIVTQEEWDLICKIHEERVIATGSDRRGKKTSGYSFSGKLVCGICGAPYWRKQRVSKDEYWVCSTKQTKGRRTRKRDSTMGKAGEINPLGCDNENISYNSLMEIMGVVSERLQANTDTIKQDMINWLTKLRKQLLEANGGHTEADLQRELSRKSKLLDAYLDGILNKQEYQKKAEELDDRIIQLKAETEKNKANSGDIEEIDKVLANIDEEVSRYVDGNEKLKVEYLLEHLEQVQIFPDKVIVIVPILSEGIVVEKAQYVSREKCSKIHTESMIHYLEDYMYCTRKLGLYVQLVA

SEQ ID NO: 1193 - protein, 572 aa, Unknown
  Description of Unknown: Integrase B1194 sequence
  PTHR30461:SF3,IPR036162,PS51737,IPR011109,PTHR30461, PS00397,PF00239,G3DSA:1.10.10.2600,IPR006119,SSF53041, cd00338,SM00857,IPR025827,IPR038109,PS51736, IPR006118,PF13408,G3DSA:3.40.50.1390,PF07508,Coil
MASRIAEKLAAKKAAIYIRVSTHWQVDKDSLKVQRRELIAYVTLVLGITDYVVFEDPGYSAKNTDRPEYQAMMDRIRTGEFTHLVVWKIDRISRNLIDFAAMHNELQSLGVTFVSKNEQFDTSSAIGEAMMRIILIFAELERKTTAERVTAVMLSRASDGQWNGGRVPFGYSWSKEAKTFSIVPEEAKAIRRMAELYEQYQSLLYVAKYLNDAGIVTKTGGQWTPTTVRTILTNPWYIGQYVYNVHSDGKGIEKRDSDEWITVENHHEPILNEDVFCRMKFLLTRNKRGGVPSHKTYVRKNIHVFAGLLRCGQCGSNMTANLDRRRANGFRPSQYACGSRRRKGTSCTNKYISDTTLGPFVLNYVANIIRASKNSSEATTPEVLERKLLRGEAFEGVASVSADALSQLLDAFRSAGDAVEYRPQIAFSGDDNSIREIDALRARRRKLDNALARLNSLYLYDDEAMPEKDFVMQRGQITKQLEEVNARIEELQNQESSEELGDDFIGKASYYIMANKLIEDRYIDYEKYIRAIDPSIPRSFLQQIIDHIVVNDGRVISITFKNGSTHTFAYKT

SEQ ID NO: 1194 - protein, 572 aa, Unknown
  Description of Unknown: Integrase B1195 sequence
  SM00857,G3DSA:1.10.10.2600,IPR036162,PF13408,IPR025827, G3DSA:3.40.50.1390,PS51737,IPR006119,IPR038109,PF07508, SSF53041,IPR011109,PTHR30461,Coil,cd00338, PF00239
MAYRKITDIRDTIGMRAVFYARVSTAEEEQLNAIELQIEENRGCIKEHGWKLVGEYIDRSKSGTMVKGRDDYQRLYEDLYEDLFDIVVIKDQERLQRNTLDWYLFINRVVQTGKLLFMYMDGKFYSPDDALITGVRAIIAEEFSRNLSKKLHNYHDHRIEKARQGQEIALQGSGNVYGWDKKDGKYYINPEQAKVRRLMCEGIMARKGSTLIAKELNDAGYRNTVGKPWKPMDIPKFVYDCKNVGTMIINKERHDFESKQTIKLPKEEWVYVENALPPIVTQEEWDLICKIHEERVIATGSDRRGKKTSGYSFSGKLVCGICGAPYWRKQRVSKDEYWVCSTKQTKGRRTRKRDSTMGKAGEINPLGCDNENISYNSLMEIMGVVSERLQANTDTIKQDMINWLTKLRKQLLEANGGHTEADLQRELSRKSKLLDAYLDGILNKQEYQKKAEELDERIIQLKAETEKNKANSGDIAEIDKVLANIDEEVARYVDGNEKLKVEYLLEHLEQVQIFPDKVIVIVPILSEGIVVEKAQYVSREKCSKIHTESMIHYLEDYMYCTRKLGLYVQLVA

SEQ ID NO: 1195 - protein, 572 aa, Unknown
  Description of Unknown: Integrase B1196 sequence
  SM00857,G3DSA:1.10.10.2600,IPR036162,PF13408,IPR025827, G3DSA:3.40.50.1390,PS51737,IPR006119,IPR038109,PF07508, SSF53041,IPR011109,PTHR30461,Coil,cd00338, PF00239
MAYRKITDIRDTIGMRAVFYARVSTAEEEQLNAIELQIEENRGCIKDHGWKLVGEYIDRSKSGTMVKGRDDYQRLYEDLYEDLFDIVVIKDQERLQRNTLDWYLFINRVVQTGKLLFMYMDGKFYSPDDALITGVRAIIAEEFSRNLSKKLHNYHDHRIEKARQGQEIALQGSGNVYGWDKKDGKYYINPEQAKVRRLMCEGIMARKGSTLIAKELNDAGYRNTVGKPWKPMDIPKFVYDCKNVGTMIINKERHDFESKQTIKLPKEEWVYVENALPPIVTQEEWDLICKIHEERVIATGSDRRGKKTSGYSFSGKLVCGICGAHYWRKQRVSKDEYWVCSTKQTKGRRTRKRDSTMGKAGEINPLGCDNENISYNSLMEIMGIVSERLQANTDTIKQDMINWLTKLRKQLLEANGGHTEADLQRELSRKSKLLDAYLDGILNKQEYQKKAEELDERIIQLKAETEKNKDNSGDIAEIDKVLANIDEEVSRYVDGNEKLKVEYLLEHLEQVQIFPDKVIVIVPILSEGIVVEKTQYVSREKCSEIHTESMIHYLEDYMYCTRKLGLYVQLVA

SEQ ID NO: 1196 - protein, 572 aa, Unknown
  Description of Unknown: Integrase B1197 sequence
  PTHR30461:SF3,IPR036162,PS51737,IPR011109,PTHR30461, PS00397,PF00239,G3DSA:1.10.10.2600,IPR006119,SSF53041, cd00338,SM00857,IPR025827,IPR038109,PS51736, IPR006118,PF13408,G3DSA:3.40.50.1390,PF07508,Coil
MASRIAEKLAAKKAAIYIRVSTHWQVDKDSLKVQRRELIAYVTLVLGITDYVVFEDPGYSAKNTDRPEYQAMMDRIRTGEFTHLVVWKIDRISRNLIDFAAMHDELQSLGVTFVSKNEQFDTSSAIGEAMMRIILIFAELERKTTAERVTAVMLSRASDGQWNGGRVPFGYSWSKETKTFSIVPEEAKAIRRMAELYEQYQSLLYVAKYLNDVGIVTKTGGQWTPTTVRTILTNPWYIGQYVYNVHSDGKGIEKRDSDEWITVENHHEPILNEDVFCRMKFLLTRNKRGGVPSHKTYVRKNIHIFAGLLRCGQCGSNMTANLDRRRANGFRPSQYACGSRRRKGTSCTNKYISDTTLGPFVLNYVANIIRASKNSSEATTPEVLERKLLRGEAFEDVASVSTDSLGQLLDAFRSAGDAVEYRPQIAFSGDDNSIREIDTLRARRRKLDNALARLNALYLYDDEAMPEKDFVMQRGQITKQLEEVNARIEELQNQESSEELGDGFIGKASYYIMANKLIEDRYIDYEKYIRAIDPSIPRSFLQQIIDHIVVNDGRVISITFKNGSTHTFTYKA

SEQ ID NO: 1197 - protein, 572 aa, Unknown
  Description of Unknown: Integrase B1198 sequence
  PTHR30461:SF3,IPR036162,PS51737,IPR011109,PTHR30461, PS00397,PF00239,G3DSA:1.10.10.2600,IPR006119,SSF53041, cd00338,SM00857,IPR025827,IPR038109,PS51736, IPR006118,PF13408,G3DSA:3.40.50.1390,PF07508,Coil
MASRIAEKLAAKKAAIYIRVSTHWQVDKDSLKVQRRELIAYVTLVLGITDYVVFEDPGYSAKNTDRPEYQAMMDRIRTGEFTHLVVWKIDRISRNLIDFAAMHDELQSLGVTFVSKNEQFDTSSAIGEAMMRIILIFAELERKTTAERVTAVMLSRASDGQWNGGRVPFGYSWSKETKTFSIVPEEAKAIRRMAELYEQYQSLLYVAKYLNDAGIVTKTGGQWTPTTVRTILTNPWYIGQYVYNVHSDGKGIEKRDSDEWITVENHHEPILNEDVFCRMKFLLTRNKRGGVPSHKTYVRKNIHVFAGLLRCGQCGSNMTANLDRRRANGFRPSQYACGSRRRKGTSCTNKYISDTTLGPFVLNYVANIIRASKNSSEATTPEVLERKLLRGEAFEDVASVSTDSLSQLLDAFRSAGDAVEYRPQIAFSGDDNSIREIDTLRARRRKLDNALARLNALYLYDDEAMPEKDFVMQRGQITKQLEEVNARIEELQNQESSEELGDGFIGKASYYIMANKLIEDRYIDYEKYIRAIDPSIPHSFLQQIIDHIVVNDGRVTSITFKNGATHTFTYKT

SEQ ID NO: 1198 - protein, 572 aa, Unknown
  Description of Unknown: Integrase B1199 sequence
  PTHR30461:SF3,IPR036162,PS51737,IPR011109,PTHR30461, PS00397,PF00239,G3DSA:1.10.10.2600,IPR006119,SSF53041, cd00338,SM00857,IPR025827,IPR038109,PS51736, IPR006118,PF13408,G3DSA:3.40.50.1390,PF07508,Coil
MASRIAEKLAAKKAAIYIRVSTHWQVDKDSLKVQRRELIAYVTLVLGITDYVVFEDPGYSAKNTDRPEYQAMMDRIRTGEFTHLVVWKIDRISRNLIDFAAMHDELQSLGVTFVSKNEQFDTSSAIGEAMMRIILIFAELERKTTAERVTAVMLSRASDGQWNGGRVPFGYSWSKETKTFSIVPEEAKAIRRMAELYEQYQSLLYVAKYLNDAGIVTKTGGQWTPTTVRTILTNPWYIGQYVYNVHSDGKGIEKRDSDEWITVENHHEPILSEDVFYRMKFLLTRNKRGGVPSHKTYVRKNIHIFAGLLRCGQCGSNMTANLDRRRANGFRPSQYACGSRRRKGTSCTNKYISDTTLGPFVLNYVANIIRASKNSSEATTPEVLERKLLRGEAFEDVASVSTDALDQLLDAFRSAGDAVEYRPQIAFSGDDNSIREIDTLRARSRKLDNALARLNALYLYDDEAMPEKDFVMQRGQITKQLEEVNARIEELQNQESSEELGDDFIGKASYYIMANKLIEDRYIDYEKYIRAIDPSIPRSFLQQIIDHIVVNDGRVISITFKNGSTHTFTYKT

SEQ ID NO: 1199 - protein, 572 aa, Unknown
  Description of Unknown: Integrase B1200 sequence
  SM00857,G3DSA:1.10.10.2600,IPR036162,PF13408,IPR025827, G3DSA:3.40.50.1390,PS51737,IPR006119,IPR038109,PF07508, SSF53041,IPR011109,PTHR30461,Coil,cd00338, PF00239
MAYRKITDIKATIGMRAVFYARVSTAEEEQLNAIELQIEENRGCIKDHGWKLVGEYIDRSKSGTMVKGRDDYQRLYEDLYEDLFDIVVIKDQERLQRNTLDWYLFINRVVQTGKLLFMYMDGKFYSPDDALITGVRAIIAEEFSRNLSKKLHNYHDHRIEKARQGQEIALQGSGNVYGWDKKDGKYYINPEQAKVRRLMCEGIMARKGSTLIAKELNEAGYRNTVGKPWKPMDIPKFVYDCKNVGTMIINKERHDFESKQTIKLPKEEWVYVENALPPIVTQEEWDLICKIHEERVIATGSDKRGKKTSGYSFSGKLVCGICGAPYWRKQRVSKDEYWVCSTKQTKGRKTRKRDSTMGKAGEINPLGCDNENISYNSLMEIMEVVSERLQANTDTIKQDMINWLTKLKKQLLEANGGHTEADLQRELSRKSKLLDAYLDGILNKQEYQKKAEELDERIIQLKAETEKNKANSGDIAEIDKVLANIDEEVARYVDGNEKLKVEYLLEHLEQVQIFPDKVIVIVPILSEGIVVEKTQYVSREKCSEIHTESMIHYLEDYMYCTRKLGLYVQLVA

SEQ ID NO: 1200 - protein, 572 aa, Unknown
  Description of Unknown: Integrase B1201 sequence
  PTHR30461:SF3,IPR036162,PS51737,IPR011109,PTHR30461, PS00397,PF00239,G3DSA:1.10.10.2600,IPR006119,SSF53041, SM00857,IPR025827,IPR038109,PS51736,cd03768, IPR006118,PF13408,G3DSA:3.40.50.1390,PF07508,Coil
MTSISERLKKFRVAIYIRVSTRYQVDKDSLQVQRRELITYSEMVLGVSDYVIFEDAGYSAKNTDRPDYLRMMDRLRTGEFTHLLVWKIDRISRNLLDFASMYQELKTLGIAFVSKNEQFDTSNAVGEAMLKIILVFAELERQMTSERVTAVMLSRAGNGQWNGGRIPYGYSYDQTEKKFSLDPAENRVYNLICDTYEEFQSTLYVSRYLNNKGLRTRQGKEWSATAVHKILSNVFYVGDYLYNVHDDGRGSSTRGEDEWVRIEHHHVPSISRDRFDRIQFILKRNKRGGNARGETHIRKNIHIFSGLVRCGKCGSNMSATLDRRRANGWRPSIYACSKHRNNSSVCQNKYISDVTLGPFVINYIANIIRAKGNVSASTSLETLERKLLRGDTFLNVEHIEHDGLADMMDVLISGKTGMEYRPLVVSGEQTSQLSEREILEERRRKKETALSRLKSLYLYGDEETPEKDFIIERERIMGELTEIESRLAEIQQQESIRPVTSDEFIQKAAYFIMVEKLLDDRYVDYEKYIRKIDPSIPRNFLNNVIDQIEVNDGLITSISFKNGMTHRFIYKA

SEQ ID NO: 1201 - protein, 572 aa, Unknown
  Description of Unknown: Integrase B1202 sequence
  SM00857,G3DSA:1.10.10.2600,IPR036162,PF13408,IPR025827, PS51737,G3DSA:3.40.50.1390,IPR006119,IPR038109,PF07508, SSF53041,IPR011109,PTHR30461,Coil,cd00338, PF00239
MAYRKITDIRDTIGMRAVFYARVSTAEEEQLNAIELQIEENRGCIKDHGWKLVGEYIDRSKSGTMVKGRDDYQRLYEDLYEDLFDIVVIKDQERLQRNTLDWYLFINRVVQTGKLLFMYMDGKFYSPDDALITGVRAIIAEEFSRNLSKKLHNYHDHRIEKARQGQEIALQGSGNVYGWDKKDGKYYINPEQAKVRRLMCEGIMARKGSTLIAKELNEAGYRNTVGKLWKPMDIPKFVYDCKNVGTMIINKERHDFESKQTIKLPKEEWVYVENALPPIVTQEEWDLICKIHEERVIATGSDRRGKKTSGYSFSGKLVCGICGAPYWRKQRVSKDEYWVCSTKQTKGRRTRKRDSTMGKSGEINPLGCDNENISYNSLMEIMGVVSERLQANTDTIKHDMINWLTKLRKQLLEANGGHTEADLQRELSRKSKLLDAYLDGILNKQEYQKKAEELDERIIQLKAETEKNKANSGDIAEIDKVLANIDEEVSRYVDGNEKLKVEYLLEHLEQVQIFPDKVIVIVPILSEGIVVEKTQYVSREKCSEIHTESMIHYLEDYMYCTRKLGLYVQLVA

SEQ ID NO: 1202 - protein, 572 aa, Unknown
  Description of Unknown: Integrase B1203 sequence
  PTHR30461:SF3,IPR036162,PS51737,IPR011109,PTHR30461, PS00397,PF00239,G3DSA:1.10.10.2600,IPR006119,SSF53041, cd00338,SM00857,IPR025827,IPR038109,PS51736, IPR006118,PF13408,G3DSA:3.40.50.1390,PF07508,Coil
MASRIAEKLAAKKAAIYIRVSTHWQVDKDSLKVQRRELIAYVTLVLGITDYVVFEDPGYSAKNTDRPEYQAMMDRIRTGEFTHLVVWKIDRISRNLIDFAAMHDELQSLGVTFVSKNEQFDTSSAIGEAMMRIILIFAELERKTTAERVTAVMLSRASDGQWNGGRVPFGYSWSKETKTFSIVPEEAKAIRRMAELYEQYQSLLYVAKYLNDAGIVTKTGGQWTPTTVRTILTNPWYIGQYVYNVHSDGKGIEKRDSDEWITVENHHEPILNEDVFCRMRFLLTRNKRGGVPSHKTYVRKNIHIFAGLLRCGQCGSNMTANLDRRRANGFRPSQYACGSRRRKGTSCTNKYISDTTLGPFVLNYVANIIRASKNSSEATTPEVLERKLLRGEAFEDVASVSTDALGQLLDAFRSAGDAVEYRPQIAFSGDDNSIHEIDTLRARRRKLDNALARLNALYLYDDEAMPEKDFVMQRGQITKQLEEVNARIEELQNQESSEELGDDFIGKASYYIMANKLIEDRYIDYEKYIRAIDPSIPRSFLQQIIDHIVVNDGRVTSITFKNGATHTFTYKT

SEQ ID NO: 1203 - protein, 572 aa, Unknown
  Description of Unknown: Integrase B1204 sequence
  PTHR30461:SF3,IPR036162,PS51737,IPR011109,PTHR30461, PS00397,PF00239,G3DSA:1.10.10.2600,IPR006119,SSF53041, cd00338,SM00857,IPR025827,IPR038109,PS51736, IPR006118,PF13408,G3DSA:3.40.50.1390,PF07508,Coil
MASRIAEKLAAKKAAIYIRVSTHWQVDKDSLKVQRRELIAYVTLVLGITDYVVFEDPGYSAKNTDRPEYQAMMDRIRTGEFTHLVVWKIDRISRNLIDFATMHDELQSLGVTFVSKNEQFDTSSAIGEAMMRIILIFAELERKTTAERVTAVMLSRASDGQWNGGRVPFGYSWSKETKTFSIVPEEAKAIRRMAELYEQYQSLLYVAKYLNDAGIVTKTGGQWTPTTVRTILTNPWYIGQYVYNVHSDGKGIEKRDSDEWITVESHHEPILNDDVFYRMKFLLTRNKRGGVPSHKTYVRKNIHVFAGLLRCGQCGSNMTANLDRRRANGFRPSQYACGSRRRKGTSCTNKYISDTTLGPFVLNYVANIIRASKNSSEATTPDVLERKLLRGEAFEDVASVSTDALGQLLDAFRSAGDAVEYRPQIAFSGDDNSIREIDTLRARRRKLDNALARLNALYLYDDEAMPEKDFVMQRGQITKQLEEVNARIEELQNQESSEELGDGFIGKASYYIMANKLIEDRYIDYEKYIRAIDPSIPHSFLQQIIDHIVVNDGRVTSITFKNGATHTFTYKT

SEQ ID NO: 1204 - protein, 572 aa, Unknown
  Description of Unknown: Integrase B1205 sequence
  PTHR30461:SF3,IPR036162,PS51737,IPR011109,PTHR30461, PS00397,PF00239,G3DSA:1.10.10.2600,IPR006119,SSF53041, cd00338,SM00857,IPR025827,IPR038109,PS51736, IPR006118,PF13408,G3DSA:3.40.50.1390,PF07508,Coil
MASRIAEKLAAKKAAIYIRVSTHWQVDKDSLKVQRRELIAYVTLVLGITDYVVFEDPGYSAKNTDRPEYQAMMDRIRTGEFTHLVVWKIDRISRNLIDFAAMHDELQSLGVTFVSKNEQFDTSSAIGEAMMRIILIFAELERKTTAERVTAVMLSRASDGQWNGGRVPFGYSWSKEAKTFSIVPEEAKAIRRMAELYEQYQSLLYVAKYLNDAGIVTKTGGQWTPTTVRTILTNPWYIGQYVYNVHSDGKGIEKRDSDEWITVENHHEPILNEDVFCRMKFLLTRNKRGGVPSHKTYVRKNIHVFAGLLRCGQCSSNMTANLDRRRANGFRPSQYACGSRRRKGTSCTNKYISDTTLGPFVLNYVANIIRASKNSSEATTPEVLERKLLRGEAFEDVASVSTDALGQLLDAFRSAGDAVEYRPQIAFSGDDNSIREIDTLRARRRKLDNALARLNALYLYDDEAMPEKDFVMQRGQITKQLEEVNARIEELQNRESSEELGDDFIGKASYYIMANKLIEDRYIDYEKYIRAIDPSIPRSFLQQIIDHIVVNDGRVISITFKNGSTHTFTYKA

SEQ ID NO: 1205 - protein, 572 aa, Unknown
  Description of Unknown: Integrase B1206 sequence
  PTHR30461:SF3,IPR036162,PS51737,IPR011109,PTHR30461, PS00397,PF00239,G3DSA:1.10.10.2600,IPR006119,SSF53041, cd00338,SM00857,IPR025827,IPR038109,PS51736, IPR006118,PF13408,G3DSA:3.40.50.1390,PF07508,Coil
MASRIAEKLAAKKAAIYIRVSTHWQVDKDSLKVQRRELIAYVTLVLGITDYVVFEDPGYSAKNTDRPEYQAMMDRIRTGEFTHLVVWKIDRISRNLIDFAAMHDELQSLGVTFVSKNEQFDTSSAIGEAMMRIILIFAELERKTTAERVTAVMLSRASDGQWNGGRVPFGYSWSKETKTFSIVPEEAKAIRRMAELYEQYQSLLYVAKYLNDAGIVTKTGGQWTPTTVRTILTNPWYIGQYVYNVHSDGKGIEKRDSDEWITVENHHEPILNEDVFCRMKFLLTRNKRGGVPSHKTYVRKNIHVFAGLLRCGQCGSNMTANLDRRRANGFRPSQYACSSRRRKGTSCTNKYISDTTLGPFVLNYVANIIRASKNSSEATTPEVLERKLLRGEAFEDVASVSADALGQLLDAFRSAGDAVEYRPQIAFSGEDNAIREIDTLRARRRKLDNALARLNALYLYDDEAMPEKDFVMQRGQITKQLEEVNARIEELQNQESSEELGDDFIGKASYYIMANKLIEDRYIDYEKYIRAIDPSIPRSFLQQIIDHIVVNDGRVTSITFKNGATHTFTYKT

SEQ ID NO: 1206 - protein, 572 aa, Unknown
  Description of Unknown: Integrase B1207 sequence
  PTHR30461:SF3,IPR036162,PS51737,IPR011109,PTHR30461, PS00397,PF00239,G3DSA:1.10.10.2600,IPR006119,SSF53041, SM00857,IPR025827,IPR038109,PS51736,cd03768, IPR006118,PF13408,G3DSA:3.40.50.1390,PF07508,Coil
MANRKWRPACYCRVSTIHQIDKESIPTQVHLLSNYCAGVLGCKKEDIKFYIDAGYSGKNTKRPEYEKMIEDVKAGRRNVVVAYKLDRISRNLIDFAKFLESLKEHGAEFISLSESFDTSSVMGRGMLKLIALFAEMERGITRERVMAVSKDIISRGGHLGAPTPLGYDYDKATKKYSINEKEAETVRWIFKTAGDGESTTYISNYLNDHNITGKRSGYWTSTTVFHILHNPAYTGKYVWNRRSSGRYKLKDKSEWLTQEKVYPVIIPAAEWQSVQDKLAARRKGKNVKRAVQSHLFLGLLSCALCGHDFRARKDKARADGYRPSVYSCPAYTGHAGCTNGHYYSDMQIAPLVTQYIENVDKLANMQDLVNSRADLARVLLFNMPDVVQISNIDTLYGLYGRTNQEPVPENIAMVRAFADAEKLKADKELEKYYKALDRLKDLYLFGDANMSKEDYVTTRGKIESKIAAVISARDETTREVSPRLDVDAKKYGPILKLLRGNVGYKMIGDKVGFDLLAEFFHDVLSGIVVDKSGIVKIIFKNGVAHCLCNKETGAGVVMEYPRAGRRKSLTTR

SEQ ID NO: 1207 - protein, 572 aa, Unknown
  Description of Unknown: Integrase B1208 sequence
  cd03768,SM00857,G3DSA:1.10.10.2600,IPR036162,PS51737, G3DSA:3.40.50.1390,IPR006119,IPR038109,PF07508,IPR011109, SSF53041,PTHR30461,PS51736,Coil,PF00239
MNEQKIVALYTRVSTGYQIDKDSLPFQKKELSAYCKHILHAEKMELFEDAGKSGKNTDRPAFLRMMKKIRAGEISHVVVYKIDRISRNLVDFSVMYDEFKKYRVTFISLNEQFDTSSAIGEAVLKIILVFAELERKLTSERVIGVMLDRAMSGKWNGARMPFGWKWNPETEFPEHDPVELEKALTLYRVYDETHSTAKVRDYCYDNDIQTKRGGKWTTTTILNFLKNPMNKGDYRYNYRGSARGTKKPENEVVYLPGVFPPLVDPDLWDRVNAIIKDNAEKHDIHKNPHIKKHVHIFTGGILKCAYCGASFQVSRLDKKRLNGFQPSLYVCTSRRTYRACDASGASDVVIGAFFFNYVRNLVQATKSRAKIGTPADLEQILLSGDEFSRIRYIDPSDLDIIYQAIRGTIAPGSGVTYIPAPPDSDKKDAPELSGLRTEAARLSRALERLKKAYLFDDDAMSEAEYLSTRSELTEQLTRINNKIADALTDESYSAAAELSFVNSASSFLLSYRLQGADHIVYSDFAASVDALVLKNFVNMIVDHITVKDGDPVEIVFKNGLRNRFVYQDDATV

SEQ ID NO: 1208 - protein, 572 aa, Unknown
  Description of Unknown: Integrase B1209 sequence
  SM00857,G3DSA:1.10.10.2600,IPR036162,PF13408, IPR025827,PS51737,G3DSA:3.40.50.1390,IPR006119, IPR038109,PF07508,SSF53041,IPR011109, PTHR30461,Coil,cd00338,PF00239
MAYRKITDIKDTIGMRAVFYARVSTAEEEQLNAIELQIEENRGCIKDHGWKLVGEYIDRSKSGTMVKGRDDYQRLYEDLYEDLFDIVVIKDQERLQRNTLDWYLFINRVVQTGKLLFMYMDGKFYSPDDALITGVRAIIAEEFSRNLSKKLHNYHDHRIEKARQGQEIALQGSGNVYGWDKKDGKYYINPEQSKVRRLMCEGIMARKGSTLIAKELNEAGYRNTVGKPWKPMDIPKFVYDCKNVGTMIINKERHDFESKQTIKLPKEEWVYVENALPPIVTQEEWDLICKIHEERVIATGSDKRGKKTSGYSFSGKLVCGICGAPYWRKQRVSKDEYWVCSTKQTKGRRTRKRDSTMGKAGEINPLGCDNENISYNSLMEIMGVVSERLQANTDTIKQDMINWLTKLRKQLLEANGGHTEADLQREISRKSKLLDAYLDGILNKQEYQKKAEELDERIIQLKAETEKNKANSGDIAEIDKVLANIDEEVARYVDGNEKLKVEYLLEHLEQVQIFPDKVIVIVPILSEGIVVEKAQYVSREKCSKIHTESMIHYLEDYMYCTRKLGLYVQLVA

SEQ ID NO: 1209 - protein, 572 aa, Unknown
  Description of Unknown: Integrase B1210 sequence
  PTHR30461:SF3,IPR036162,PS51737,IPR011109,PTHR30461, PS00397,PF00239,G3DSA:1.10.10.2600,IPR006119,SSF53041, cd00338,SM00857,IPR025827,IPR038109,PS51736, IPR006118,PF13408,G3DSA:3.40.50.1390,PF07508,Coil
MASRIAEKLAAKKAAIYIRVSTHWQVDKDSLKVQRRELIAYVTLVLGITDYVVFEDPGYSAKNTDRPEYQAMMDRIRTGEFTHLVVWKIDRISRNLIDFAAMHDELQSLGVTFVSKNEQFDTSSAIGEAMMRIILIFAELERKTTAERVTAVMLSRASDGQWNGGRVPFGYSWSKETKTFSIVPEEAKAIRRMAELYEQYQSLLYVAKYLNDAGIVTKTGGQWTPTTVRTILTNPWYIGQYVYNVHSDGKGIEKRDSDEWITVENHHEPILNEDVFCRMKFLLTRNKRGGVPSHKTYVRKNIHIFAGLLRCGQCGSNMTANLDRRRANGFRPSQYACGSRRRKGTSCTNKYISDTTLGPFVLNYVANIIRASKNSSEATTPEVLERKLLRGEAFEDVASVSTDALGQLLDAFRSAGDAVEYRPQIAFSGDDNSIREIDTLRARRRKLDNALARLNALYLYDDEAMPEKDFVMQRGQITKQLEEVNARIEELQNQESSEELGDDFIGKASYYIMANKLIEDRYIDYEKYIRAIDPSIPRSFLQQIIDHIVVNDGRVISITFKNGSTHTFTYKT

SEQ ID NO: 1210 - protein, 572 aa, Unknown
  Description of Unknown: Integrase B1211 sequence
  PTHR30461:SF3,IPR036162,PS51737,IPR011109,PTHR30461, PS00397,PF00239,G3DSA:1.10.10.2600,IPR006119,SSF53041, cd00338,SM00857,IPR025827,IPR038109,PS51736, IPR006118,PF13408,G3DSA:3.40.50.1390,PF07508,Coil
MASRIAEKLAAKKAAIYIRVSTHWQVDKDSLKVQRRELIAYVTLVLGITDYVVFEDPGYSAKNTDRPEYQAMMDRIRTGEFTHLVVWKIDRISRNLIDFAAMHDELQSLGVTFVSKNEQFDTSSAIGEAMMRIILIFAELERKTTAERVTAVMLSRASDGQWNGGRVPFGYSWSKETKTFSIVPEEAKAIRRMAELYEQYQSLLYVAKYLNDAGIVTKTGGQWTPTTVRTILTNPWYIGQYVYNVHSDGKGIEKRDSDEWITVENHHEPVLNDDVFYRMKFLLTRNKRGGVPSHKTYVRKNIHVFAGLLRCGQCGSNMTANLDRRRANGFRPSQYACGSRRRKGTSCTNKYISDTTLGPFVLNYVANIIRASKNSSEATTPDVLERKLLRGEAFEDVASVSTDALGQLLDAFHSAGDAVEYRPQIAFSGDDNSIREIDTLRARRRKLDNALARLNALYLYDDEAMPEKDFVMQRGQITKQLEEVNTRIEELQNQESSEELGDDFIGKASYYIMANKLIEDRYIDYEKYIRAIDPSIPRSFLQQIIDHIVVNDGRVISITFKNGSTHTFTYKT

SEQ ID NO: 1211 - protein, 572 aa, Unknown
  Description of Unknown: Integrase B1212 sequence
  PTHR30461:SF3,IPR036162,PS51737,IPR011109,PTHR30461, PS00397,PF00239,G3DSA:1.10.10.2600,IPR006119,SSF53041, cd00338,SM00857,IPR025827,IPR038109,PS51736, IPR006118,PF13408,G3DSA:3.40.50.1390,PF07508,Coil
MASRIAEKLAAKKAAIYIRVSTHWQVDKDSLKVQRRELIAYVTLVLGITDYVVFEDPGYSAKNTDRPEYQAMMDRIRTGEFTHLVVWKIDRISRNLIDFAAMHDELQSLGVTFVSKNEQFDTSSAIGEAMMRIILIFAELERKTTAERVTAVMLSRASDGQWNGGRVPFGYSWSKETKTFSIVPAEAKAIRRMAELYEQYQSLLYVAKYLNDAGIVTKTGGQWTPTTVRTILTNPWYIGQYVYNVHSDGKGIEKRDSDEWITVENHHEPILNDDVFYRMKFLLTRNKRGGVPSHKTYVRKNIHVFAGLLRCGQCGSNMTANLDRRRANGFRPSQYACGSRRRKGTSCTNKYISDTTLGPFVLNYVANIIRASKNSSETTTSEVLERKLLRGEAFEDVASVSTDALGQLLDAFRSAGDAVEYRPQMAFSGDDNSIREIDTLRARRRKLDNALARLNALYLYDDEAMPEKDFVMQRGQITKQLEEVNARIEELQNQESSEELGDDFIGKASYYIMANKLIEDRYIDYEKYIRAIDPSIPRSFLQQIIDHIVVNDGRVISITFKNGSTHTFTYKT

SEQ ID NO: 1212 - protein, 572 aa, Unknown
  Description of Unknown: Integrase B1213 sequence
  SM00857,G3DSA:1.10.10.2600,IPR036162,PF13408,IPR025827, G3DSA:3.40.50.1390,PS51737,IPR006119,IPR038109,PF07508, IPR011109,SSF53041,PF00239,PTHR30461,PS51736, Coil,cd00338
MAYRRAQDTKGLRAVFYARVSTAEEEQLNAIELQIEENRNTITKHGWKKVDEYIDRSKSGTMVKGRDEYQRLYEDLLGDAFDVVVIKDQERLMRNTLDWYLFINRLVQTGKILYMYLEDKFYSPDDALITGIKAIIAEEFSRNLSKKLHNYHDGRIEKARKGLEIDLQGSGNVFGWDKVDGKYVINPEQAKVRRLMCEGIMARKGSTQIAKELNDAGYRNTVGKPWKPMDIPKFVYDCKNVGTMIINRERHDFESKQTVKLPESEWVYVKGALPPIVTEEEWALIEKIHEERVVATGCNRRGKKTSGYSFSGKLVCGVCGAPYWRKTKTSNEEYWVCSTKQQKGRKTRARDAVGGKAGEINPEGCDNENISYNALMEIMAIVSERLQADTGFIREFMLGRLDTYEKRITEANRGATEADLQREISRKDKLLDAYLDNLLTKEEYQRKALALDDHILELRREVEANKANLEDLVEIQRVRENIDAEVAQYLDENEQLKVEFVLEHLSQVIIYPDKVLVIFDVFGEGVMVEKSQYVSRQKWLKIQTENIYYLTSYEYGDNYTWRTMDLYVQLVA

SEQ ID NO: 1213 - protein, 572 aa, Unknown
  Description of Unknown: Integrase B1214 sequence
  SM00857,G3DSA:1.10.10.2600,IPR036162,PF13408,IPR025827, G3DSA:3.40.50.1390,PS51737,IPR006119,IPR038109,PF07508, SSF53041,IPR011109,PTHR30461,Coil,cd00338, PF00239
MAYRKITDIRDTIGMRAVFYARVSTAEEEQLNAIELQIEENRGCIKDHGWKLVGEYIDRSKSGTMVKGRDDYQRLYEDLYEDLFDIVVIKDQERLQRNTLDWYLFINRVVQTGKLLFMYMDGKFYSPDDALITGVRAIIAEEFSRNLSKKLHNYHDHRIEKARQGQEIALQGSGNVYGWDKKDGKYYINPEQAKVRRLMCEGIMARKGSTLIAKELNDAGYRNTVGKPWKPMDIPKFVYDCKNVGTMIINKERHDFESKQTIKLPKEEWVYVENALPPIVTQEEWDLICKIHEERVIATGSDRRGKKTSGYSFSGKLVCGICGAPYWRKQRVSKDEYWVCSTKQTKGRRTRKRDSTMGKAGEINPLGCDNENISYNSLMEIMGVVSERLQANTDTIKHDMINWLTKLRKQLLEANGGHTEADLQRELSRKSKLLDAYLDGILNKQEYQKKAEELDERIIQLKAETEKNKANSGDIAEIDKVLANIDEEVSRYVDGNEKLKVEYLLEHLEQVQIFPDKVIVIVPILSEGIVVEKTQYVSREKCSKIHTESMIHYLEDYMYCTRKLGLYVQLVA

SEQ ID NO: 1214 - protein, 572 aa, Unknown
  Description of Unknown: Integrase B1215 sequence
  PTHR30461:SF3,IPR036162,PS51737,IPR011109,PTHR30461, PS00397,PF00239,G3DSA:1.10.10.2600,IPR006119,SSF53041, cd00338,SM00857,IPR025827,IPR038109,PS51736, IPR006118,PF13408,G3DSA:3.40.50.1390,PF07508,Coil
MASRIAEKLAAKKAAIYIRVSTHWQVDKDSLKVQRRELIAYVTLVLGITDYVVFEDPGYSAKNTDRPEYQAMMDRIRTGEFTHLVVWKIDRISRNLIDFAAMHDELQSLGVTFVSKNEQFDTSSAIGEAMMRIILIFAELERKTTAERVTAVMLSRASDGQWNGGRVPFGYSWSKETKTFSIVPEEAKAIRRMAELYEQYQSLLYVAKYLNDAGIVTKTGGQWTPTTVRTILTNPWYIGQYVYNVHSDGKGIEKRDSDEWITVENHHEPILSEDVFYRMKFLLTRNKRGGVPSHKTYVRKNIHVFAGLLRCGQCGSNMTANLDRRRANGFRPSQYACGSRRRKGTSCANKYISDTTLGPFVLNYVANIIRASKNSSEATTPEVLERKLLRGEAFEDVASVSTDALGQLLDAFRSAGDAVEYRPQIAFSGDDNSIREIDTLRARRRKLDNALARLNALYLYDDEAMPEKDFVMQRGQITKQLEEVNTRIEELQSQESSEELGDDFIGKASYYIMANKLIEDRYIDYEKYIRAIDPSIPRSFLQQIIDHIVVNDGRVISITFKNGSTHTFTYKT

SEQ ID NO: 1215 - protein, 572 aa, Unknown
  Description of Unknown: Integrase B1216 sequence
  SM00857,G3DSA:1.10.10.2600,IPR036162,PF13408,IPR025827, G3DSA:3.40.50.1390,PS51737,IPR006119,IPR038109,PF07508, SSF53041,IPR011109,PTHR30461,Coil,cd00338, PF00239
MAYRRITDIRDTIGMRAVFYARVSTAEEEQLNAIELQIEENRGCIKEHGWKLVGEYIDRSKSGTMVKGRDDYQRLYEDLYEDLFDIVVIKDQERLQRNTLDWYLFINRVVQTGKLLFMYMDGKFYSPDDALITGVRAIIAEEFSRNLSKKLHNYHDHRIEKARQGQEIALQGSGNVYGWDKKDGKYYINPEQAKVRRLMCEGIMARKGSTLIAKELNDAGYRNTVGKPWKPMDIPKFVYDCKNVGTMIINKERHDFESKQTIKLPKEEWVYVENALPPIVTQEEWDLICKIHEERVIATGSDRRGKKTSGYSFSGKLVCGICGAPYWRKQRVSKDEYWVCSTKQTKGRKTRKRDSTMGKAGEINPLGCDNENISYNSLMEIMGVVSERLQANTDTIKQDMINWLTKLRKQLLEANGGHTEADLQRELSRKSKLLDAYLDGILNKQEYQKKAEELDERIIQLKAETEKNKANSGDIAEIDKVLANIDEEVARYVDGNEKLKVEYLLEHLEQVQIFPDKVIVIVPILSEGIVVEKTQYVSREKCSKIHTESMIHYLEDYMYCTRKLGLYVQLVA

SEQ ID NO: 1216 - protein, 572 aa, Unknown
  Description of Unknown: Integrase B1217 sequence
  SM00857,G3DSA:1.10.10.2600,IPR036162,PF13408,PS51737, G3DSA:3.40.50.1390,IPR025827,IPR006119,IPR038109,PF07508, SSF53041,IPR011109,PTHR30461,Coil,cd00338, PF00239
MAYRKITDIRDTIGMRAVFYARVSTAEEEQLNAIELQIEENRGCIKDHGWKLVGEYIDRSKSGTMVKGRDDYQRLYEDLYEDLFDIVVIKDQERLQRNTLDWYLFINRVVQTGKLLFMYMDGKFYSPDDALITGVRAIIAEEFSRNLSKKLHNYHDHRIEKARQGQEIALQGSGNVYGWDKKDGKYYINPEQAKVRRLMCEGIMARKGSTLIAKELNDAGYRNTVGKPWKPMDIPKFVYDCKNVGTMIINKERHDFESKQTIKLPKEEWVYVENALPPIVTQEEWDLICKIHEERVIATGSDRRGKKTSGYSFSGKLVCGICGAPYWRKQRVSKDEYWVCSTKQTKGRRTRKIDSTMGKAGEINPLGCDNENISYNSLMEIMGVVSERLQANTDTIKHDMINWLTKLRKQLLEANGGHTEADLQRELSRKSKLLDAYLDGILNKQEYQKKAEELDERIIQLKAETEKNKANSGDIAEIDKVLANIDEEVSRYVDGNEKLKVEYLLEHLEQVQIFPDKVIVIVPILSEGIVVEKAQYVSREKCSKIHTESMIHYLEDYMYCTRKLGLYVQLVA

SEQ ID NO: 1217 - protein, 572 aa, Unknown
  Description of Unknown: Integrase B1218 sequence
  PTHR30461:SF3,IPR036162,PS51737,IPR011109,PTHR30461, PS00397,PF00239,G3DSA:1.10.10.2600,IPR006119,SSF53041, cd00338,SM00857,IPR025827,IPR038109,PS51736, IPR006118,PF13408,G3DSA:3.40.50.1390,PF07508,Coil
MASRIAEKLAAKKAAIYIRVSTHWQVDKDSLKVQRRELIAYVTLVLGITDYVVFEDPGYSAKNTDRPEYQAMMDRIRTGEFTHLVVWKIDRISRNLIDFAAMHDELQSLGVTFVSKNEQFDTSSAIGEAMMRIILIFAELERKTTAERVTAVMLSRASDGQWNGGRVPFGYSWSKETKTFSIVPEEAKAIRRMAELYEQYQSLLYVAKYLNDAGIVTKTGGQWTPTTVRTILTNPWYIGQYVYNVHSDGKGIEKRDSDEWITVENHHEPILNEDVFCRMKFLLTRNKRGGVPSHKTYVRKNIHIFAGLLRCGQCGSNMTANLDRRRANGFRPSQYACGSRRRKGTSCTNKYISDTTLGPFVLNYVANIIRASKNSSEATTPEVLERKLLRGEAFEDVASVSTDSLGQLLDAFRSAGDAVEYRPQIAFSGEDNAIREIDTLRARRRKLDNALARLNALYLYDDEAMPEKDFVMQRGQITKQLEEVNARIEELQNQESSEELGDDFIGKASYYIMANKLIEDRYIDYEKYIRAIDPSIPRSFLQQIIDHIVVNDGRVTSITFKNGATHTFTYKT

SEQ ID NO: 1218 - protein, 572 aa, Unknown
  Description of Unknown: Integrase B1219 sequence
  SM00857,G3DSA:1.10.10.2600,IPR036162,PF13408,IPR025827, G3DSA:3.40.50.1390,PS51737,IPR006119,IPR038109,PF07508, SSF53041,IPR011109,PTHR30461,Coil,cd00338, PF00239
MAYRKITDIRDTIGMRAVFYARVSTAEEEQLNAIELQIEENRGCIKDHGWKLVGEYIDRSKSGTMVKGRDDYQRLYEDLYEDLFDIVVIKDQERLQRNTLDWYLFINRVVQTGKLLFMYMDGKFYSPDDALITGVRAIIAEEFSRNLSKKLHNYHDHRIEKARQGQEIALQGSGNVYGWDKKDGKYYINPEQAKVRRLMCEGIMARKGSTLIAKELNDAGYRNTVGKPWKPMDIPKFVYDCKNVGTMIINKERHDFESKQTIKLPKEEWVYVENALPPIVTQEEWDLICKIHEERVIATGSDRRGKKTSGYSFSGKLVCGICGAPYWRKQRVSKDEYWVCSTKQTKGRRTRKRDSTMGKAGEINPLGCDNENISYNSLMEIMGVVSERLQANTDTIKHDMINWLTKLRKQLLEANGGHTEADLQRELSRKSKLLDAYLDGILNKQEYQKKAEELDERIIQLKAETEKNKANSGDIAEIDKVLANIDEEVSRYVDGNEKLKVEYLLEHLEQVQIFPDKVIVIVPILSEGIVVEKAQYVSREKCSEIHTESMIHYLEDYMYCTRKLGLYVQLVA

SEQ ID NO: 1219 - protein, 572 aa, Unknown
  Description of Unknown: Integrase B1220 sequence
  SM00857,G3DSA:1.10.10.2600,IPR036162,PF13408,IPR025827, G3DSA:3.40.50.1390,PS51737,IPR006119,IPR038109,PF07508, SSF53041,IPR011109,PTHR30461,Coil,cd00338, PF00239
MAYRKITDIKDTIGMRAVFYARVSTAEEEQLNAIELQIEENRGCIKDHGWKLVGEYIDRSKSGTMVKGRDDYQRLYEDLYEDLFDIVVIKDQERLQRNTLDWYLFINRVVQTGKLLFMYMDGKFYSPDDALITGVRAIIAEEFSRNLSKKLHNYHDHRIEKARQGQEIALQGSGNVYGWDKKDGKYYINPEQAKVRRLMCEGIMARKGSTLIAKELNDAGYRNTVGKPWKPMDIPKFVYDCKNVGTMIINKERHDFESKQTIKLPKEEWVYVENALPPIVTQEEWDLICKIHEERVIATGSDRRGKKTSGYSFSGKLVCGICGAPYWRKQRVSKDEYWVCSTKQTKGRRTRKRDSTMGKAGEINPLGCDNENISYNSLMEIMGVVSERLQANTDTIKHDMINWLTKLRKQLLEANGGHTEADLQRELSRKSKLLDAYLDGILNKQEYQKKAEELDERIIQLKAETEKNKANSGDIAEIDKVLANIDEEVSRYVDGNEKLKVEYLLEHLEQVQIFQDKVIVIVPILSEGIVVEKAQYVSREKCSKIHTESMIHYLEDYMYCTRKLGLYVQLVA

SEQ ID NO: 1220 - protein, 572 aa, Unknown
  Description of Unknown: Integrase B1221 sequence
  PTHR30461:SF3,IPR036162,PS51737,IPR011109,PTHR30461, PS00397,PF00239,G3DSA:1.10.10.2600,IPR006119,SSF53041, cd00338,SM00857,IPR025827,IPR038109,PS51736, IPR006118,PF13408,G3DSA:3.40.50.1390,PF07508,Coil
MASRIAEKLAAKKAAIYIRVSTHWQVDKDSLKVQRRELIAYVTLVLGITDYVVFEDPGYSAKNTDRPEYQAMMDRIRTGEFTHLVVWKIDRISRNLIDFAAMHDELQSLGVTFVSKNEQFDTSSAIGEAMMRIILIFAELERKTTAERVTAVMLSRASDGQWNGGRVPFGYSWSKEAKTFSIVPEEAKAIRRMAELYEQYQSLLYVAKYLNDAGIVTKTGGQWTPTTVRTILTNPWYIGQYVYNVHSDGKGIEKRDSDEWITVENHHEPILNEDVFCRMKFLLTRNKRGGVPSHKTYVRKNIHVFAGLLRCGQCGSNMTANLDRRRANGFRPSQYACGSRRRKGTSCTNKYISDTTLGPFVLNYVANIIRASKNSSEATTPEVLERKLLRGEAFEDVASVSTDALGQLLDAFRSAGDAVEYRPQIAFSGDDNSIREIDTLRARRRKLDNALARLNALYLYDDEAMPEKDFVMQRGQITKQLEEVNARIEELQNQESSEELGDGFIGKASYYIMANKLIEDRYIDYEKYIRAIDPSIPHSFLQQIIDHIVVNDGRVTSITFKNGATHTFTYKT

SEQ ID NO: 1221 - protein, 572 aa, Unknown
  Description of Unknown: Integrase B1222 sequence
  PTHR30461:SF3,IPR036162,PS51737,IPR011109,PTHR30461, PS00397,PF00239,G3DSA:1.10.10.2600,IPR006119,SSF53041, cd00338,SM00857,IPR025827,IPR038109,PS51736, IPR006118,PF13408,G3DSA:3.40.50.1390,PF07508,Coil
MASRIAEKLAAKKAAIYIRVSTHWQVDKDSLKVQRRELIAYVTLVLGITDYVVFEDPGYSAKNTDRPEYQAMMDRIRTGEFTHLVVWKIDRISRNLIDFAAMHDELQSLGVTFVSKNEQFDTSSAIGEAMMRIILIFAELERKTTAERVTAVMLSRASDGQWNGGRVPFGYSWSKETKTFSIVPEEAKAIRRMAELYEQYQSLLYVAKYLNDAGIVTKTGGQWTPTTVRTILTNPWYIGQYVYNVHSDGKGIEKRDSDEWITVENHHEPILNEDVFCRMKFLLTRNKRGGVPSHKTYVRKNIHVFAGLLRCGQCGSNMTANLDRRRANGFRPSQYACGSRRRKGTSCTNKYISDTTLGPFVLNYVANIIRASKNSSEATTPEVLERKLLRGEAFEDVASVSTDSLGQLLDAFRSAGDAVEYRPQIAFSGDDNSIREIDTLRARRRKLDNALARLNALYLYDDEAMPEKDFVMQRGQITKQLEEVNARIEELQNQESSEELGDDFIGKASYYIMANKLIEDRYIDYEKYIRAIDPSIPRSFLQQIIDHIVVNDGRVISITFKNGSTHTFTYKA

SEQ ID NO: 1222 - protein, 572 aa, Unknown
  Description of Unknown: Integrase B1223 sequence
  PTHR30461:SF3,IPR036162,PS51737,IPR011109,PTHR30461, PS00397,PF00239,G3DSA:1.10.10.2600,IPR006119,SSF53041, cd00338,SM00857,IPR025827,IPR038109,PS51736, IPR006118,PF13408,G3DSA:3.40.50.1390,PF07508,Coil
MASRIAEKLAAKKAAIYIRVSTHWQVDKDSLKVQRRELIAYVTLVLGITDYVVFEDPGYSAKNTDRPEYQAMMDRIRTGEFTHLVVWKIDRISRNLIDFAAMHDELQSLGVTFVSKNEQFDTSSAIGEAMMRIILIFAELERKTTAERVTAVMLSRASDGQWNGGRVPFGYSWSKETKTFSIVPEEAKAIRRMAELYEQYQSLLYVAKYLNDAGIVTKTGGQWTPTTVRTILTNPWYIGQYVYNVHSDGKGIEKRDSDEWITVENHHEPILNEDVFCRMKFLLTRNKRGGVPSHKTYVRKNIHIFAGLLCCGQCGSNMTANLDRRRANGFRPSQYACGSRRRKGTSCTNKYISDTTLGPFVLNYVANIIRASKNSSEATTPEVLERKLLRGEAFEDVASVSTDALGQLLDAFRSAGDAVEYRPQIAFSGDDNSIHEIDTLRARRRKLDNALARLNALYLYDDEAMPEKDFVMQRGQITKQLEEVNARIEELQNQESSEELGDGFIGKASYYIMANKLIEDRYIDYEKYIRAIDPSIPHSFLQQIIDHIVVNDGRVTSITFKNGATHTFTYKT

SEQ ID NO: 1223 - protein, 572 aa, Unknown
  Description of Unknown: Integrase B1224 sequence
  PTHR30461:SF3,IPR036162,PS51737,IPR011109,PTHR30461, PS00397,PF00239,G3DSA:1.10.10.2600,IPR006119,SSF53041, cd00338,SM00857,IPR025827,IPR038109,PS51736, IPR006118,PF13408,G3DSA:3.40.50.1390,PF07508,Coil
MASRIAEKLAAKKAAIYIRVSTHWQVDKDSLKVQRRELIAYVTLVLGITDYVVFEDPGYSAKNTDRPEYQAMMDRIRTGEFTHLVVWKIDRISRNLIDFAAMHDELQSLGVTFVSKNEQFDTSSAIGEAMMRIILIFAELERKTTAERVTAVMLSRASDGQWNGGRVPFGYSWSKETKTFSIVPEEAKAIRRMAELYEQYQSLLYVAKYLNDAGIVTKTGGQWTPTTVRTILTNPWYIGQYVYNVHSDGKGIEKRDSDEWITVENHHEPILNEDVFCRMKFLLTRNKRGGVPSHKTYVRKNIHVFAGLLRCGQCGSNMTANLDRRRANGFRPSQYACGSRRRKGTSCTNKYISDTTLGPFVLNYVANIIRASKNSSEATTPEVLERKLLRGEAFEDVASVSTDSLGQLLDAFRSAGDAVEYRPQIAFSGEDNAIREIDTLRARRRKLDNALARLNALYLYDDEAMPEKDFVMQRGQITKQLEEVNARIEELQNQESSEELGDDFIGKASYYIMANKLIEDRYIDYEKYIRAIDPSIPHSFLQQIIDHIVVNDGRVTSITFKNGATHTFTYKT

SEQ ID NO: 1224 - protein, 572 aa, Unknown
  Description of Unknown: Integrase B1225 sequence
  SM00857,G3DSA:1.10.10.2600,IPR036162,PF13408,IPR025827, G3DSA:3.40.50.1390,PS51737,IPR006119,IPR038109,PF07508, SSF53041,IPR011109,PTHR30461,Coil,cd00338, PF00239
MAYRKITDIKDTIGMRAVFYARVSTAEEEQLNAIELQIEENRGCIKDHGWKLVGEYIDRSKSGTMVKGRDDYQRLYEDLYEDLFDIVVIKDQERLQRNTLDWYLFINRVVQTGKLLFMYMDGKFYSPDDALITGVRAIIAEEFSRNLSKKLHNYHDHRIEKARQGQEIALQGSGNVYGWDKKDGKYYINPEQAKVRRLMCEGIMARKGSTLIAKELNDAGYRNTVGKPWKPMDIPKFVYDCKNVGTMIINKERHDFESKQTIKLPKEEWVYVENALPPIVTQEEWDLICKIHEERVIATGSDRRGKKTSGYSFSGKLVCGICGAPYWRKQRVSKDEYWVCSTKQTKGRRTRKRDSTMGKAGEINPLGCDNENISYNSLMEIMRVVSERLQANTDTIKQDMINWLTKLRKQLLEANGGHTEADLQRELSRKSKLLDAYLDGILNKQEYQKKAEELDERIIQLKAETEKNKANSGDIAEIDKVLANIDEEVSRYVDGNEKLKVEYLLEHLEQVQIFPDKVIVIVPILSEGIVVEKTQYVSREKCSKIHTESIIHYLEDYMYCTRKLGLYVQLVA

SEQ ID NO: 1225 - protein, 572 aa, Unknown
  Description of Unknown: Integrase B1226 sequence
  PTHR30461:SF3,IPR036162,PS51737,IPR011109,PTHR30461, PS00397,PF00239,G3DSA:1.10.10.2600,IPR006119,SSF53041, cd00338,SM00857,IPR025827,IPR038109,PS51736, IPR006118,PF13408,G3DSA:3.40.50.1390,PF07508,Coil
MASRIAEKLAAKKAAIYIRVSTHWQVDKDSLKVQRRELIAYVTLVLGITDYVVFEDPGYSAKNTDRPEYQAMMDRIRTGEFTHLVVWKIDRISRNLIDFAAMHDELQSLGVTFVSKNEQFDTSSAIGEAMMRIILIFAELERKTTAERVTAVMLSRASDGQWNGGRVPFGYSWSKETKTFSIVPEEAKAIRRMAELYEQYQSLLYVAKYLNDAGIVTKTGGQWTPTTVRTILTNPWYIGQYVYNVHSDGKGIEKRDSDEWITVENHHEPILNEDVFCRMKFLLTRNKRGGVPSHKTYVRKNIHVFAGLLRCGQCGSNMTANLDRRRANGFRPSQYACGSRRRKGTSCTNKYISDTTLGPFVLNYVANIIRASKNSSETTTPEVLERKLLRGEAFEDVASVSTDALGQLLDAFRSAGDAVEYRPQIAFSGDDNSIHEIDTLRARRRKLDNALARLNALYLYDDEAMPEKDFVMQRGQITKQLEEVNARIEELQNQESSEELGDDFIGKASYYIMANKLIEDRYIDYEKYIRAIDPSIPRSFLQQIIDHIVVNDGRVTSITFKNGATHTFTYKT

SEQ ID NO: 1226 - protein, 572 aa, Unknown
  Description of Unknown: Integrase B1227 sequence
  PTHR30461:SF3,IPR036162,PS51737,IPR011109,PTHR30461, PS00397,PF00239,G3DSA:1.10.10.2600,IPR006119,SSF53041, cd00338,SM00857,IPR025827,IPR038109,PS51736, IPR006118,PF13408,G3DSA:3.40.50.1390,PF07508,Coil
MASRIAEKLAAKKAAIYIRVSTHWQVDKDSLKVQRRELIAYVTLVLGITDYVVFEDPGYSAKNTDRPEYQAMMDRIRTGEFTHLVVWKIDRISRNLIDFAAMHDELRSLGVTFVSKNEQFDTSSAIGEAMMRIILIFAELERKTTAERVTAVMLSRASDGQWNGGRVPFGYSWSKETKTFSIVPEEAKAIRRMAELYEQYQSLLYVAKYLNDAGIVTKTGGQWTPTTVRTILTNPWYIGQYVYNVHSDGKGIEKRDSDEWITVENHHEPILNDDVFYRMKFLLTRNKRGGVPSHKTYVRKNIHVFAGLLHCGQCGSNMTANLDRRRANGFRPSQYACGSRRRKGTSCTNKYISDTTLGPFVLNYVANIIRASKNSSETTTPEVLERKLLRGEAFEDVASVSTDALGQLLDAFRSAGDAVEYRPQIAFSGDDNSIREIDTLRARRRKLDNALARLNALYLYDDEAMPEKDFVMQRGQITKQLEEVNSRIEELQNQESSEELGDDFIGKASYYIMANKLIEDRYIDYEKYIRAIDPSIPRSFLQQIIDHIVVNDGRVVSITFKNGSTHTFTYKT

SEQ ID NO: 1227 - protein, 572 aa, Unknown
  Description of Unknown: Integrase B1228 sequence
  PTHR30461:SF3,IPR036162,PS51737,IPR011109,PTHR30461, PS00397,PF00239,G3DSA:1.10.10.2600,IPR006119,SSF53041, cd00338,SM00857,IPR025827,IPR038109,PS51736, IPR006118,PF13408,G3DSA:3.40.50.1390,PF07508,Coil
MASRIAEKLAAKKAAIYIRVSTHWQVDKDSLKVQRRELIAYVTLVLGITDYVVFEDPGYSAKNTDRPEYQAMMDRIRTGEFTHLVVWKIDRISRNLIDFAAMHDELQSLGVTFVSKNEQFDTSSAIGEAMMRIILIFAELERKTTAERVTAVMLSRASDGQWNGGRVPFGYSWSKETKTFSIVPEEAKAIRRMAELYEQYQSLLYVAKYLNDAGIVTKTGGQWTPTTVRTILTNPWYIGQYVYNVHSDGKGIEKRDSDEWITVENHHEPILNDDVFYRMKFLLTRNKRGGVPSHKTYVRKNIHVFAGLLRCGQCGSNMTANLDRRRANGFRPSQYACGSRRRKGTSCTNKYISDTTLGPFVLNYVANIIRASKNSSETTTSEVLERKLLRGEAFEDVASVSTDALGQLLDAFRSAGDAVEYRPQIAFSGDDNSIREIDTLRARRRKLDNALARLNALYLYDDEAMPEKDFVMQRGQITKQLEEVNTRIEELQSQESSEELGDDFIGKASYYIMANKLIEDRYIDYEKYIRAIDPSIPRSFLQQIIDHIVVNDGRVISITFKNGSTHTFTYKT

SEQ ID NO: 1228 - protein, 572 aa, Unknown
  Description of Unknown: Integrase B1229 sequence
  PTHR30461:SF3,IPR036162,PS51737,IPR011109,PTHR30461, PS00397,PF00239,G3DSA:1.10.10.2600,IPR006119,SSF53041, cd00338,SM00857,IPR025827,IPR038109,PS51736, IPR006118,PF13408,G3DSA:3.40.50.1390,PF07508,Coil
MASRIAEKLAAKKAAIYIRVSTHWQVDKDSLKVQRRELIAYVTLVLGITDYVVFEDPGYSAKNTDRPEYQAMMDRIRTGEFTHLVVWKIDRISRNLIDFAAMHDELQSLGVTFVSKNEQFDTSSAIGEAMMRIILIFAELERKTTAERVTAVMLSRASDGQWNGGRVPFGYSWSKETKTFSIVPEEAKAIRRMAELYEQYQSLLYVAKYLNDAGIVTKTGGQWTPTTVRTILTNPWYIGQYVYNVHSDGKGIEKRDSDEWITVENHHEPILNEDVFCRMKFLLTRNKRGGVPSHKTYVRKNIHIFAGLLRCGQCGSNMTANLDRRRANGFRPSQYACGSRRRKGTSCTNKYISDTTLGPFVLNYVANIIRASKNSSEATTPEVLERKLLRGEAFEDVASVSTDALGQLLDAFRSAGDAVEYRPQIAFSGDDNSIREIDTLRARRRKLDNALARLNALYLYDDEAMPEKDFVMQRGQITKQLEEVNARIEELQNQESSEGLGDDFIGKASYYIMANKLIEDRYIDYEKYIRAIDPSIPRSFLQQIIDHIVVNDGRVISITFKNGSTHTFTYKT

SEQ ID NO: 1229 - protein, 572 aa, Unknown
  Description of Unknown: Integrase B1230 sequence
  SM00857,G3DSA:1.10.10.2600,IPR036162,PF13408,IPR025827, G3DSA:3.40.50.1390,PS51737,IPR006119,IPR038109,PF07508, SSF53041,IPR011109,PTHR30461,Coil,cd00338, PF00239
MAYRKITDIKDTIGMRAVFYARVSTAEEEQLNAIELQIEENRGCIKDHGWKLVGEYIDRSKSGTMVKGRDDYQRLYEDLYEDLFDIVVIKDQERLQRNTLDWYLFINRVVQTGKLLFMYMDGKFYSPDDALITGVRAIIAEEFSRNLSKKLHNYHDHRIEKARQGQEIALQGSGNVYGWDKKDGKYYINPEQAKVRRLMCEGIMARKGSTLIAKELNDAGYRNTVGKPWKPMDIPKFVYDCKNVGTMIINKERHDFESKQTIKLPKEEWVYVENALPPIVTQEEWDLICKIHEERVIATGSDRRGKKTSGYSFSGKLVCGICGAPYWRKQRVSKDEYWVCSTKQTKGRRTRKRDSTMGKAGEINPLGCDNENISYNSLMEIMGVVSERLQANTDTIKHDMINWLTKLRKQLLEANGGHTEADLQRELSRKSKLLDAYLDGILNKQEYQKKAEELDERIIQLKAETEKNKANSGDIAEIDKVLANIDEEVSRYVEGNEKLKVEYLLEHLEQVQIFPDKVIVIVPILSEGIVVEKAQYVSREKCSKIHTESMIHYLEDYMYCTRKLGLYVQLVA

SEQ ID NO: 1230 - protein, 572 aa, Unknown
  Description of Unknown: Integrase B1231 sequence
  PTHR30461:SF3,IPR036162,PS51737,IPR011109,PTHR30461, PS00397,PF00239,G3DSA:1.10.10.2600,IPR006119,SSF53041, cd00338,SM00857,IPR025827,IPR038109,PS51736, IPR006118,PF13408,G3DSA:3.40.50.1390,PF07508,Coil
MASRIAEKLAAKKAAIYIRVSTHWQVDKDSLKVQRRELIAYVTLVLGITDYVVFEDPGYSAKNTDRPEYQAMMDRIRAGEFTHLVVWKIDRISRNLIDFAAMHDELQSLGVTFVSKNEQFDTSSAIGEAMMRIILIFAELERKTTAERVTAVMLSRASDGQWNGGRVPFGYSWSKETKTFSIVPEEAKAIRRMAELYEQYQSLLYVAKYLNDAGIVTKTGGQWTPTTVRTILTNPWYIGQYVYNVHSDGKGIEKRDSDEWITVENHHEPILNEDVFCRMKFLLTRNKRGGVPSHKTYVRKNIHVFAGLLRCGQCGSNMTANLDRRRANGFRPSQYACGSRRRKGTSCTNKYISDTTLGPFVLNYVANIIRASKNFSETTTPDVLERKLLRGEAFEDVASVSTDALGQLLDAFRSAGDAVEYRPQIAFSGDDNSIREIDTLRARRRKLDNALARLNALYLYDDEAMPEKDFVMQRGQITKQLEEVNARIEELQNQESSEELGDDFIGKASYYIMANKLIEDRYIDYEKYIRAIDPSIPRSFLQQIIDHIVVNDGRVTSITFKNGATHTFTYKT

SEQ ID NO: 1231 - protein, 572 aa, Unknown
  Description of Unknown: Integrase B1232 sequence
  PTHR30461:SF3,IPR036162,PS51737,IPR011109,PTHR30461, PS00397,PF00239,G3DSA:1.10.10.2600,IPR006119,SSF53041, cd00338,SM00857,IPR025827,IPR038109,PS51736, IPR006118,PF13408,G3DSA:3.40.50.1390,PF07508,Coil
MASRIAEKLAAKKAAIYIRVSTHWQVDKDSLKVQRRELIAYVTLVLGITDYVVFEDPGYSAKNTDRPEYQAMMDRIRTGEFTHLVVWKIDRISRNLIDFAAMHDELQSLGVTFVSKNEQFDTSSAIGEAMMRIILIFAELERKTTAERVTAVMLSRASDGQWNGGRVPFGYSWSKETKTFSIVPEEAKAIRRMAELYEQYQSLLYVAKYLNDAGIVTKTGGQWTPTTVRTILTNPWYIGQYVYNVHSDGKGIEKRDSDEWITVENHHEPILNEDVFCRMKFLLTRNKRGGVPSHKTYVRKNIHVFAGLLRCGQCGSNMTANLDRRRANGFRPSQYACGSRRRKGTSCTNKYISDTTLGPFVLNYVANIIRASKNSSEATTPEVLERKLLRGEAFEDVASVSTDALGQLLDAFRSAGDAVEYRPQIAFSGDDNSIREIDTLRARRRKLDNALARLNALYLYDDEAMPEKDFVMQRGQITKQLEEVNARIEELQNQESSEELGDGFIGKASYYIMANKLIEDRYIDYEKYIRAIDPSIPHSFLQQIIDHIVVNDGRVTSITFKNGATHTFTYKT

SEQ ID NO: 1232 - protein, 572 aa, Unknown
  Description of Unknown: Integrase B1233 sequence
  PTHR30461:SF3,SM00857,G3DSA:1.10.10.2600,IPR036162,PF13408, PS51737,IPR025827,G3DSA:3.40.50.1390,IPR006119,IPR038109, PF07508,IPR011109,SSF53041,PTHR30461,PS51736, cd00338,PF00239
MARSAKKIEYAPAEQIGVIYARYSSHNQKEESIEQQIAECTEFAEKNGIRIIGIYADKAVSGRSDRRPNFQRMMRDAEKRHFQIVVAYKSNRIARNMLNALQYEARLDLFGIKTLYAKEEFGNTAAGRFALRTMMNVNQFYSENMGEDIKRGMVDNANECKVNGMLPLGYVKSNEGKYAVAPDEAAVVREIFDSFLKDVPVAEIARSLNQRGIRTKLGREWNKNSFHIMLKNDNYIGVYRHSGVVVEDGIPPILEREVFAAVQEKLANKKKTAGRRSANGEYLLTGKLFCGYCGSYMIGVSGTGENGTVHHYYQCQKRHAESRCEKKNVRRDFIEKLIARLTQEYILQDDTIEWIADSTMSFQAMARRESGIAQLEHDLADKRKIAKNIMSAIEQGIITETTKARLLEVEAETRDLERSLSVAKAAAQPVERERVVFSLEQMREGNVGSKEHQKKLIDTFVKSVTLWDDRIQIDYYHTPGKHKFSYSLEELTSKVENESNAADVRAESLEVHHCRRELHRFTTAFYWQLHLRGYMARSKRRRNSNSCVFFACIDGCVPQCPARLGIVWSSKR

SEQ ID NO: 1233 - protein, 572 aa, Unknown
  Description of Unknown: Integrase B1234 sequence
  PTHR30461:SF3,IPR036162,PS51737,IPR011109,PTHR30461, PS00397,PF00239,G3DSA:1.10.10.2600,IPR006119,SSF53041, cd00338,SM00857,IPR025827,IPR038109,PS51736, IPR006118,PF13408,G3DSA:3.40.50.1390,PF07508,Coil
MASRIAEKLAAKKAAIYIRVSTHWQVDKDSLKVQRRELIAYVTLVLGITDYVVFEDPGYSAKNTDRPEYQAMMDRIRTGEFTHLVVWKIDRISRNLIDFAAMHDELQSLGVTFVSKNEQFDTSSAIGEAMMRIILIFAELERKTTAERVTAVMLSRASDGQWNGGRVPFGYSWSKEAKTFSIVPEEAKAIRRMAELYEQYQSLLYVAKYLNDAGIVTKTGGQWTPTTVRTILTNPWYIGQYVYNVHSDGKGIEKRDSDEWITVENHHEPILSEDVSYRMKFLLTRNKRGGVPSHKTYVRKNIHIFAGLLRCGQCGSNMTANLDRRRANGFRPSQYACGSRRRKGTSCTNKYISDTTLGPFVLNYVANIIRASKNSSETTTSEVLERKLLRGEAFEDVASVSTDALGQLLDAFRSAGDAVEYRPQIAFSGDDNSIREIDTLRARRRKLDNALARLNALYLYDDEAMPEKDFVMQRGQITKQLEEVNARIEELQNQESSEELGDDFIGKASYYIMANKLIEDRYIDYEKYIRAIDPSIPRSFLQQIIDHIVVNDGRVISITFKNGSTHTFTYKT

SEQ ID NO: 1234 - protein, 572 aa, Unknown
  Description of Unknown: Integrase B1235 sequence
  SM00857,G3DSA:1.10.10.2600,IPR036162,PF13408,IPR025827, G3DSA:3.40.50.1390,PS51737,IPR006119,IPR038109,PF07508, SSF53041,IPR011109,PTHR30461,Coil,cd00338, PF00239
MAYRKITDIKDTIGMRAVFYARVSTAEEEQLNAIELQIEENRGCIKDHGWKLVGEYIDRSKSGTMVKGRDDYQRLYEDLYEDLFDIVVIKDQERLQRNTLDWYLFINRVVQTGKLLFMYMDGKFYSPDDALITGVRAIIAEEFSRNLSKKLHNYHDHRIEKARQGQEIALQGSGNVYGWDKKDGKYYINPEQAKVRRLMCEGIMARKGSTLIAKELNDAGYRNTVGKPWKPMDIPKFVYDCKNVGTMIINKERHDFESKQTIKLPKEEWVYVENALPPIVTQEEWDLICKIHEERVIATGSDRRGKKTSGYSFSGKLVCGICGAPYWRKQRVSKDEYWVCSTKQTKGRRTRKRDSTMGKAGEINPLGCDNENISYNSLMEIMEVVSERLQANTDTIKQDMINWLTKLRKQLLEANGGHTEADLQRELSRKSKLLDAYLDGILNKQEYQTKAEELDERIIQLKAETEKNKANSGDIAEIDKVLANIDEEVSRYVDGNEKLKVEYLLEHLEQVQIFPDKVIVIVPILSEGIVVEKTQYVSREKCSEIHTESMIHYLEDYMYCTRKLGLYVQLVA

SEQ ID NO: 1235 - protein, 572 aa, Unknown
  Description of Unknown: Integrase B1236 sequence
  SM00857,G3DSA:1.10.10.2600,IPR036162,PF13408,PS51737, G3DSA:3.40.50.1390,IPR025827,IPR006119,IPR038109,PF07508, SSF53041,IPR011109,PTHR30461,Coil,cd00338, PF00239
MAYRKITDIKDTIGMRAVFYARVSTAEEEQLNAIELQIEENRGCIKDHGWKLVGEYIDRSKSGTMVKGRDDYQRLYEDLYEDLFDIVVIKDQERLQRNTLDWYLFINRVVQTGKLLFMYMDGKFYSPDDALITGVRAIIAEEFSRNLSKKLHNYHDHRIEKARQGQEIALQGSGNVYGWDKKDGKYYINPEQAKVRRLMCEGIMARKGSTLIAKELNEAGYRNTVGKPWKPMDIPKFVYDCKNVGTMIINKERHDFESKQTIKLPKEEWVYVENALPPIVTQEEWDLICKIHEERVIATGSDKRGKKTSGYSFSGKLVCGICGAPYWRKQRVSKDEYWVCSTKQTKGRKTRKRDSTMGKAGEINPLGCDNENISYNSLMEIMEVVSERLQANTDTIKQDMINWLTKLRKQLLEANGGHTEADLQRELSRKSKLLDAYLDGILNKQEYQKKAEELDERIIQLKAETEKNKANAGDLAEIDKVLANIDEEVARYVDGNEKLKVEYLLEHLEQVQIFPDKVIVIVPILSEGIVVEKTQYVSREKCSKIHTESMIHYLEDYMYCTRKLGLYVQLVA

SEQ ID NO: 1236 - protein, 572 aa, Unknown
  Description of Unknown: Integrase B1237 sequence
  SM00857,G3DSA:1.10.10.2600,IPR036162,PF13408,PS51737, G3DSA:3.40.50.1390,IPR025827,IPR006119,IPR038109,PF07508, SSF53041,IPR011109,PTHR30461,Coil,cd00338, PF00239
MAYRKITDIRDTIGMRAVFYARVSTAEEEQLNAIELQIEENRGCIKDHGWKLVGEYIDRSKSGTMVKGRDDYQRLYEDLYEDLFDIVVIKDQERLQRNTLDWYLFINRVVQTGKLLFMYMDGKFYSPDDALITGVRAIIAEEFSRNLSKKLHNYHDHRIEKARQGQEIALQGSGNVYGWDKKDGKYYINPEQAKVRRLMCEGIMARKGSTLIAKELNDAGYRNTVGKPWKPMDIPKFVYDCKNVGTMIINKERHDFESKQTIKLPKEEWVYVENALPPIVTQEEWDLICKIHEERVIATGSDRRGKKTSGYSFSGKLVCGICGAPYWRKQRVSKDEYWVCSTKQTKGRKTRKRDSTMGKAGEINPLGCDNENISYNSLMEIMGVVSERLQANTDTIKQDMINWLTKLRKQLLEANGGHTEADLQRELSRKSKLLDAYLDGILNKQEYQKKAEELDERIIQLKTETEKNKANSGDIAEIDKVLANIDEEVSRYVDGNEKLKVEYLLEHLEQVQIFPDKVIVIVPILSEGIVVEKTQYVSREKCSEIYTESMIHYLEDYMYCTRKLGLYVQLVA

SEQ ID NO: 1237 - protein, 572 aa, Unknown
  Description of Unknown: Integrase B1238 sequence
  SM00857,G3DSA:1.10.10.2600,IPR036162,PF13408,PS51737, G3DSA:3.40.50.1390,IPR025827,IPR006119,IPR038109,PF07508, SSF53041,IPR011109,PTHR30461,Coil,cd00338, PF00239
MAYRKITDIKDTIGMRAVFYARVSTAEEEQLNAIELQIEENRGCIKDHGWKLVGEYIDRSKSGTMVKGRDDYQRLYEDLYEDLFDIVVIKDQERLQRNTLDWYLFINRVVQTGKLLFMYMDGKFYSPDDALITGVRAIIAEEFSRNLSKKLHNYHDHRIEKARQGQEIALQGSGNVYGWDKKDGKYYINSEQAKVRRLMCEGIMARKGSTLIAKELNDAGYRNTVGKPWKPMDIPKFVYDCKNVGTMIINKERHDFESKQTIKLPKEEWVYVENALPPIVTQEEWDLICKIHEERVIATGSDRRGKKTSGYSFSGKLVCGICGAPYWRKQRVSKDEYWVCSTKQTKGRRTRKRDSTMGKAGEINPLGCDNENISYNSLMEIMGVVSERLQANTDTIKHDMINWLTKLRKQLLEANGGHTEADLQRELSRKSKLLDAYLDGILNKQEYQKKAEELDERIIQLKAETEKNKANSGDIAEIDKVLANIDEEVSRYVDGNEKLKVEYLLEHLEQVQIFPDKVIVIVPILSEGIVVEKTQYVSREKCSKIHTESMIHYLEDYMYCTRKLGLYVQLVA

SEQ ID NO: 1238 - protein, 572 aa, Unknown
  Description of Unknown: Integrase B1239 sequence
  PTHR30461:SF3,IPR036162,PS51737,IPR011109,PTHR30461, PS00397,PF00239,G3DSA:1.10.10.2600,IPR006119,SSF53041, cd00338,SM00857,IPR025827,IPR038109,PS51736, IPR006118,PF13408,G3DSA:3.40.50.1390,PF07508,Coil
MASRIAEKLAAKKAAIYIRVSTHWQVDKDSLKVQRRELIAYVTLVLGITDYVVFEDPGYSAKNTDRPEYQAMMDRIRTGEFTHLVVWKIDRISRNLIDFAAMHDELQSLGVTFVSKNEQFDTSSAIGEAMMRIILIFAELERKTTAERVTAVMLSRASDGQWNGGRVPFGYSWSKEAKTFSIVPEEAKAIRRMAELYEQYQSLLYVAKYLNDAGIVTKTGGQWTPTTVRTILTNPWYIGQYVYNVHSDGKGIEKRDSDEWITVENHHEPILNEDVFCRMKFLLTRNKRGGVPSHKTYVRKNIHVFAGLLRCGQCGSNMTANLDRRRANGFRPSQYACGSRRRKGTSCTNKYISDTTLGPFVLNYVANIIRASKNSSEATTPEVLERKLLRGEAFEDVASVSTDALGQLLDAFRSAGDAVEYRPQIAFSGDDNSIREIDTLRARRRKLDNALARLNALYLYDDEAMPEKDFVMQRGQITKQLEEVNARIEELQNQESSEELGDDFIGKASYYIMANKLIKDRYIDYEKYIRAIDPSIPRSFLQQIIDHIVVNDGRVISITFKNGSTHTFAYKT

SEQ ID NO: 1239 - protein, 572 aa, Unknown
  Description of Unknown: Integrase B1240 sequence
  PTHR30461:SF3,IPR036162,PS51737,IPR011109,PTHR30461, PS00397,PF00239,G3DSA:1.10.10.2600,IPR006119,SSF53041, cd00338,SM00857,IPR025827,IPR038109,PS51736, IPR006118,PF13408,G3DSA:3.40.50.1390,PF07508,Coil
MASRIAEKLAAKKAAIYIRVSTHWQVDKDSLKVQRRELIAYVTLVLGITDYVVFEDPGYSAKNTDRPEYQAMMDRIRTGEFTHLVVWKIDRISRNLIDFAAMHDELQSLGVTFVSKNEQFDTSSAIGEAMMRIILIFAELERKTTAERVTAVMLSRASDGQWNGGRVPFGYSWSKEAKTFSIVPEEAKAIRRMAELYEQYQSLLYVAKYLNDAGIVTKTGGQWTPTTVRTILTNPWYIGQYVYNVHSDGKGIEKRDSDEWITVENHHEPILNEDVFCRMKFLLTRNKRGGVPSHKTYVRKNIHIFAGLLRCGQCGSNMTANLDRRRANGFRPSQYACGSRRRKGTSCTNKYISDTTLGPFVLNYVANIIRASKNSSEATTPEVLERKLLRGEAFEDVASVSTDALGQLLDAFRSAGDAVEYRPQIAFSGDDNSIREIDTLRARRRKLDNALARLNALYLYDDEAMPEKDFVMQRGQITKQLEEVNARIEELQNQESSEGLGDDFIGKASYYIMANKLIEDRYIDYEKYIRAIDPSIPRSFLQQIIDHIVVNDGRVISITFKNGSTHTFTYKT

SEQ ID NO: 1240 - protein, 572 aa, Unknown
  Description of Unknown: Integrase B1241 sequence
  PTHR30461:SF3,IPR036162,PS51737,IPR011109,PTHR30461, PS00397,PF00239,G3DSA:1.10.10.2600,IPR006119,SSF53041, cd00338,SM00857,IPR025827,IPR038109,PS51736, IPR006118,PF13408,G3DSA:3.40.50.1390,PF07508,Coil
MASRIAEKLAAKKAAIYIRVSTHWQVDKDSLKVQRRELIAYVTLVLGITDYVVFEDPGYSAKNTDRPEYQAMMDRIRTGEFTHLVVWKIDRISRNLIDFATMHDELQSLGVTFVSKNEQFDTSSAIGEAMMRIILIFAELERKTTAERVTAVMLSRASDGQWNGGRVPFGYSWSKETKTFSIVPEEAKAIRRMAELYEQYQSLLYVAKYLNDAGIVTKTGGQWTPTTVRTILTNQWYIGQYVYNVHSDGKGIEKRDSDEWITVENHHEPILNEDVFCRMKFLLTRNKRGGVPSHKTYVRKNIHIFAGLLRCGQCGSNMTANLDRRRANGFRPSQYACGSRRRKGTSCTNKYISDTTLGPFVLNYVANIIRASKNSSEATTPEVLERKLLRGEAFEDVASVSTDALGQLLDAFRSAGDAVEYRPQIAFSGDDNSIREIDTLRARRRKLDNALARLNALYLYDDEAMPEKDFVMQRGQITKQLEEVNARIEELQNQESSEELGDDFIGKASYYIMANKLIEDRYIDYEKYIRAIDPSIPRSFLQQIIDHIVVNDGRVISITFKNGSTHTFTYKT

SEQ ID NO: 1241 - protein, 572 aa, Unknown
  Description of Unknown: Integrase B1242 sequence
  PTHR30461:SF3,IPR036162,PS51737,IPR011109,PTHR30461, PS00397,PF00239,G3DSA:1.10.10.2600,IPR006119,SSF53041, cd00338,SM00857,IPR025827,IPR038109,PS51736, IPR006118,PF13408,G3DSA:3.40.50.1390,PF07508,Coil
MASRIAEKLAAKKAAIYIRVSTHWQVDKDSLKVQRRELIAYVTLVLGITDYVVFEDPGYSAKNTDRPEYQAMMDRIRTGEFTHLVVWKIDRISRNLIDFAAMHDELQSLGVTFVSKNEQFDTSSAIGEAMMRIILIFAELERKTTAERVTAVMLSRASDGQWNGGRVPFGYSWSKETKTFSIVPEEAKAIRRMAELYEQYQSLLYVAKYLNDAGIVTKTGGQWTPTTVRTILTNPWYIGQYVYNVHSDGKGIEKRDSDEWITVENHHEPILNEDVFCRMKFLLTRNKRGGVPSHKTYVRKNIHIFAGLLRCGQCGSNMTANLDRRRANGFRPSQYACGSRRRKGTSCTNKYISDTTLGPFVLNYVANIIRASKNSSEATTPEVLERKLLRGEAFEDVASVSTDALGQLLDAFRSAGDAVEYRPQIAFSGDDNSIREIDTLRARRRKLDNALARLNALYLYDDEAMPEKDFVMQRGQITKQLEEVNARIEELQNQESSEELGDGFIGKASYYIMANKLIEDRYIDYEKYIRAIDPSIPRSFLQQIIDHIIVNDGRVTSITFKNGATHTFTYKT

SEQ ID NO: 1242 - protein, 572 aa, Unknown
  Description of Unknown: Integrase B1243 sequence
  SM00857,G3DSA:1.10.10.2600,IPR036162,PF13408,IPR025827, PS51737,G3DSA:3.40.50.1390,IPR006119,IPR038109,PF07508, SSF53041,IPR011109,PTHR30461,Coil,cd00338, PF00239
MAYRKITDIRDTIGMRAVFYARVSTAEEEQLNAIELQIEENRGCIKDHGWKLVGEYIDRSKSGTMVKGRDDYQRLYEDLYEDLFDIVVIKDQERLQRNTLDWYLFINRVVQTGKLLFMYMDGKFYSPDDALITGVRAIIAEEFSRNLSKKLHNYHDHRIEKARQGQEIALQGSGNVYGWDKKDGKYYINPEQAKVRRLMCEGIMARKGSTLIAKELNEAGYRNTVGKLWKPMDIPKFVYDCKNVGTMIINKERHDFESKQTIKLPKEEWVYVENALPPIVTQEEWDLICKIHEERVIATGSDRRGKKTSGYSFSGKLVCGICGAPYWRKQRVSKDEYWVCSTKQTKGRRTRKRDSTMGKAGEINPLGCDNENISYNSLMEIMGVVSERLQANTDTIKHDMINWLTKLRKQLLEANGGHTEADLQRELSRKSKLLDAYLDGILNKQEYQKKAEELDDRIIQLKAETEKNKANSGDIAEIDKVLANIDEEVSKYVDGNEKLKVEYLLEHLEQVQIFPDKVIVIVPILSEGIVVEKAQYVSREKCSEIHTESMIHYLEDYMYCTRKLGLYVQLVA

SEQ ID NO: 1243 - protein, 572 aa, Unknown
  Description of Unknown: Integrase B1244 sequence
  PTHR30461:SF3,SM00857,G3DSA:1.10.10.2600,IPR036162,PF13408, IPR025827,G3DSA:3.40.50.1390,PS51737,IPR006119,IPR038109, PF07508,IPR011109,SSF53041,PTHR30461,PS51736, cd00338,PF00239
MARSAKKIEYAPAEQIGVIYARYSSHNQKEESIEQQIAECTEFAEKNGIRIIGIYADKAVSGRSDRRPNFQRMMRDAEKRHFQIVVAYKSNRIARNMLNALQYEAKLDSFGIKTLYAKEEFGNTAAGRFALRTMMNVNQFYSENMGEDIKRGMVDNAIECKVNGMLPLGYVKGEDGKYAIAADEAAVVREIYDSVLKDIPLAEIARSLNQRGIRTKLGRDWNKNSFHILLKNDNYIGVYRHSGVVVEDGIPPILDKEVFEAVQEKLTNKKKTAGRRSANGEYLLTGKLFCGYCGSYMIGVSGTGENGTVHNYYQCQKRHAEGRCEKKNVRRDFIEKLIARLTQDYILQDDTIEWIADSTMSFQAMARRESGVAQLERDLADNRKVAKNIMAAIEQGIITETTKARLLEVEGTIHDLERSLSIAKAASQPIERERVVFSLEQMREGNVGSKEHQKKLIDTFVKSVTLWDDRIQIDYYHTPGKHKFSYSLEELTSKAENESNASDVRTDSLELHHCRRELHRFTTAFLLTAAPSRLYGTIKKTQESNSCVFFACIDGGVPQCPARLGIVWSSKR

SEQ ID NO: 1244 - protein, 572 aa, Unknown
  Description of Unknown: Integrase B1245 sequence
  PTHR30461:SF3,IPR036162,PS51737,IPR011109,PTHR30461, PS00397,PF00239,G3DSA:1.10.10.2600,IPR006119,SSF53041, cd00338,SM00857,IPR025827,IPR038109,PS51736, IPR006118,PF13408,G3DSA:3.40.50.1390,PF07508,Coil
MASRIAEKLAAKKAAIYIRVSTHWQVDKDSLKVQRRELIAYVTLVLGITDYVVFEDPGYSAKNTDRPEYQAMMDRIRTGEFTHLVVWKIDRISRNLIDFAAMHDELQSLGVTFVSKNEQFDTSSAIGEAMMRIILIFAELERKTTAERVTAVMLSRASDGQWNGGRVPFGYSWSKETKTFSIVPEEAKAIRRMAELYEQYQSLLYVAKYLNDAGIVTKTGGQWTPTTVRTILTNPWYIGQYVYNVHSDGKGIEKRDSDEWITVENHHEPILNDDVFYRMKFLLTRNKRGGVPSHKTYVRKNIHVFAGLLRCGQCGSNMTANLDRRRANGFRPSQYACGSRRRKGTSCTNKYISDTTLGPFVLNYVANIIRASKNSSEATTPEVLERKLLRGEAFEDVASVSTDALGQLLDAFRSAGDAVEYRPQIAFSGDDNSIRELDTLRARRRKLDNALARLNALYLYDDEAMPEKDFVMQRGQITKQLEEVNARIEELQNQESSEELGDDFIGKASYYIMANKLIEDRYIDYEKYIRAIDPSIPRSFLQQIIDHIVVNDGRVTSITFKNGSTHTFTYKT

SEQ ID NO: 1245 - protein, 572 aa, Unknown
  Description of Unknown: Integrase B1246 sequence
  PTHR30461:SF3,IPR036162,PS51737,IPR011109,PTHR30461, PS00397,PF00239,G3DSA:1.10.10.2600,IPR006119,SSF53041, cd00338,SM00857,IPR025827,IPR038109,PS51736, IPR006118,PF13408,G3DSA:3.40.50.1390,PF07508,Coil
MASRIAEKLAAKKAAIYIRVSTHWQVDKDSLKVQRRELIAYVTLVLGITDYVVFEDPGYSAKNTDRPEYQAMMDRIRTGEFTHLVVWKIDRISRNLIDFAAMHDELQSLGVTFVSKNEQFDTSSAIGEAMMRIILIFAELERKTTAERVTAVMLSRASDGQWNGGRVPFGYSWSKEAKTFSIVPEEAKAIRRMAELYEQYQSLLYVAKYLNDAGIVTKTGGQWTPTTVRTILTNPWYIGQYVYNVHSDGKGIEKRDSDEWITVENHHEPILNEDVFCRMKFLLTRNKRGGVPSHKTYVRKNIHVFAGLLRCGQCGSNMTANLDRRRANGFRPSQYACGSRRRKGTSCTNKYISDTTLGPFVLNYVANIIRASKNSSEATTPEVLERKLLRGEAFEDVASVSADSLGQLLDAFRSAGDAVEYRPQIAFSGEDNAIREIDTLRARRRKLDNALARLNALYLYDDEAMPEKDFVMQRGQITKQLEEVNARIEELQNQESSEELGDDFIGKASYYIMANKLIEDRYIDYEKYIRAIDPSIPHSFLQQIIDHIVVNDGRVTSITFKNGATHTFTYKT

SEQ ID NO: 1246 - protein, 572 aa, Unknown
  Description of Unknown: Integrase B1247 sequence
  PTHR30461:SF3,IPR036162,PS51737,IPR011109,PTHR30461, PS00397,PF00239,G3DSA:1.10.10.2600,IPR006119,SSF53041, cd00338,SM00857,IPR025827,IPR038109,PS51736, IPR006118,PF13408,G3DSA:3.40.50.1390,PF07508,Coil
MASRIAEKLAAKKAAIYIRVSTHWQVDKDSLKVQRRELIAYVTLVLGITDYVVFEDPGYSAKNTDRPEYQAMMDRIRTGEFTHLVVWKIDRISRNLIDFAAMHDELQSLGVTFVSKNEQFDTSSAIGEAMMRIILIFAELERKTTAERVTAVMLSRASDGQWNGGRVPFGYSWSKETKTFSIVPEEAKAIRRMAELYEQYQSLLYVAKYLNDAGIVTKTGGQWTPTTVRTILTNPWYIGQYVYNVHSDGKGIEKRDSDEWITVENHHEPILNDDVFYRMKFLLTRNKRGGVPSHKTYVRKNIHVFAGLLRCGQCGSNMTANLDRRRANGFRPSQYACGSRRRKGTSCTNKYISDTTLGPFVLNYVANIIRASKNSSETTTSEVLERKLLRGEAFEDVASVSTDALGQLLNAFRSAGDAVEYRPQIAFSGDDNSIREIDTLRARRRKLDNALARLNALYLYDDEAMPEKDFVMQRGQITKQLEEVNTRIEELQSQESSEELGDDFIGKASYYIMANKLIEDRYIDYEKYIRAIDPSIPRSFLQQIIDHIVVNDGRVISITFKNGSTHTFTYKI

SEQ ID NO: 1247 - protein, 572 aa, Unknown
  Description of Unknown: Integrase B1248 sequence
  SM00857,G3DSA:1.10.10.2600,IPR036162,PF13408,IPR025827, G3DSA:3.40.50.1390,PS51737,IPR006119,IPR038109,PF07508, SSF53041,IPR011109,PTHR30461,Coil,cd00338, PF00239
MAYRKITDIKDTIGMRAVFYARVSTAEEEQLNAIELQIEENRGCIKDHGWKLVGEYIDRSKSGTMVKGRDDYQRLYEDLYEDLFDIVVIKDQERLQRNTLDWYLFINRVVQTGKLLFMYMDGKFYSPDDALITGVRAIIAEEFSRNLSKKLHNYHDHRIEKARQGQEIALQGSGNVYGWDKKDGKYYINPEQAKVRRLMCEGIMARKGSTLIAKELNDAGYRNTVGKPWKPMDIPKFVYDCKNVGTMIINKERHDFESKQTIKLPKEEWVYVENALPPIVTQEEWDLICKIHEERVIATGSDRRGKKTSGYSFSGKLVCGICGAPYWRKQRVSKDEYWVCSTKQTKGRRTRKRDSTMGKAGEINPLGCDNENISYNSLMEIMGVVSERLQANTDTIKQDMINWLTKLRKQLLEANGGHTEADLQRELSRKSKLLDAYLDGILNKQEYQKKAEELDERIIQLKTETEKNKANSGDIAEIDKVLANIDEEVARYVDGNEKLKVEYLLEHLEQVQIFPDKVIVIVPILSEGIVVEKTQYVSREKCSKIHTESMIHYLEDYMYCTRKLGLYVQLVA

SEQ ID NO: 1248 - protein, 572 aa, Unknown
  Description of Unknown: Integrase B1249 sequence
  PTHR30461:SF3,IPR036162,PS51737,IPR011109,PTHR30461, PS00397,PF00239,G3DSA:1.10.10.2600,IPR006119,SSF53041, cd00338,SM00857,IPR025827,IPR038109,PS51736, IPR006118,PF13408,G3DSA:3.40.50.1390,PF07508,Coil
MASRIAEKLAAKKAAIYIRVSTHWQVDKDSLKVQRRELIAYVTLVLGITDYVVFEDPGYSAKNTDRPEYQAMMDRIRTGEFTHLVVWKIDRISRNLIDFAAMHDELQSLGVTFVSKNEQFDTSSAIGEAMMRIILIFAELERKTTAERVTAVMLSRASDGQWNGGRVPFGYSWSKETKTFSIVPEEAKAIRRMAELYEQYQSLLYVAKYLNDAGIVTKTGGQWTPTTVRTILTNPWYIGQYVYNVHSDGKGIEKRDSDEWITVENHHEPILNEDVFCRMRFLLTRNKRGGVPSHKTYVRKNIHIFAGLLRCGQCGSNMTANLDRRRANGFRPSQYACGSRRRKGTSCTNKYISDTTLGPFVLNYVANIIRASKNSSEATTPEVLERKLLRGEAFEDVASVSTDALGQLLDAFRSAGDAVEYRPQIAFSGDDNSIREIDTLRARRRKLDNALARLNALYLYDDEAMPEKDFVMQRGQITKQLEEVNARIEELQNQESSEELGDGFIGKASYYIMANKLIEDRYIDYEKYIRAIDPSIPHSFLQQIIDHIVVNDGRVTSITFKNGATHTFTYKT

SEQ ID NO: 1249 - protein, 572 aa, Unknown
  Description of Unknown: Integrase B1250 sequence
  SM00857,G3DSA:1.10.10.2600,IPR036162,PF13408,IPR025827, G3DSA:3.40.50.1390,PS51737,IPR006119,IPR038109,PF07508, SSF53041,IPR011109,PTHR30461,Coil,cd00338, PF00239
MAYRKITDIRDTIGMRAVFYARVSTAEEEQLNAIELQIEENRGCIKDHGWKLVGEYIDRSKSGTMVKGRDDYQRLYEDLYEDLFDIVVIKDQERLQRNTLDWYLFINRVVQTGKLLFMYMDGKFYSPDDALITGVRAIIAEEFSRNLSKKLHNYHDHRIEKARQGQEIALQGSGNVYGWDKKDGKYYINPEQAKVRRLMCEGIMARKGSTLIAKELNDAGYRNTVGKPWKPMDIPKFVYDCKNVGTMIINKERHDFESKQTIKLPKEEWVYVENALPPIVTQEEWDLICKIHEERVIATGSDRRGKKTSGYSFSGKLVCGICGAPYWRKQRVSKDEYWVCSTKQTKGRKTRKRDSTMGKAGEINPLGCDNENISYNSLMEIMGVVSERLQANTDTIKQDMINWLTKLRKQLLEANGGHTEADLQRELSRKSKLLDAYLDGILNKQEYQKKAEELDERIIQLKTETEKNKANSGDIAEIDKVLANIDEEVARYVDGNEKLKVEYLLEHLEQVQIFPDKVIVIVPILSEGIVVEKTQYVSREKCSKIHTESMIHYLEDYMYCTRKLGLYVQLVA

SEQ ID NO: 1250 - protein, 572 aa, Unknown
  Description of Unknown: Integrase B1251 sequence
  PTHR30461:SF3,SM00857,G3DSA:1.10.10.2600,IPR036162,PS51737, G3DSA:3.40.50.1390,IPR006119,IPR038109,PF07508,SSF53041, IPR011109,PF00239,PTHR30461,mobidb-lite,Coil, cd00338
MKAVILTRVSTKEQEEGHSLPAQSTRLSEYAKRKNLTVIQTFQIIESSTRGKRKEFMQMIDFCKSYPEKIAIIADAVDRVQRSFKESVMLDDLIRQEKIELHFYREGMIIGKNSSSSDIMRWDFSVMGAKSYVLQLSENVRRSIDYKIKNGEMSGAAPTGYENFIDENGKHSIRPKEPDATKIRLLFERYSLGGISIHELARYADSIGLKSRTGKKIVNTTLTTILDNPFYYGEMNSKGRLIRHIYEPIITKELFDQCQMWRGKTTSKPFKHGDIPFLYRGLITCMNSGKTCPNEIKKKKFYYLVCYKQDGTRLYIPEQDITDQIEYILGGIHIPEQALRDLKTHLINSKSAEIEFRNREIGRLNAEITRAQQRLDTLLNMRLDGELSKEQYENKRAELQLNIERTRDKLKVHGKADDDFNETLIGLFEIASASKELFHKSKDISQKRLLMRFIFESLQIKEGTIYYKLNFPFSKMEMNSNSGGNHSEPLSGNGYGEKTGNLKSPENSSIRTAKTQEKTKACDQKSQACTNWLPNSSNVRKNIIDLQIFLEHRSEITAMKDQLALIRQELAA

SEQ ID NO: 1251 - protein, 572 aa, Unknown
  Description of Unknown: Integrase B1252 sequence
  SM00857,G3DSA:1.10.10.2600,IPR036162,PF13408,PS51737, G3DSA:3.40.50.1390,IPR025827,IPR006119,IPR038109,PF07508, SSF53041,IPR011109,PTHR30461,Coil,PS51736, cd00338,PF00239
MAYRKITDIRDTIGMRAVFYARVSTAEEEQLNAIELQIEENRGCIKDHGWKLVGEYIDRSKSGTMIKGRDDYQRLYEDLYEDLFDIVVIKDQERLQRNTLDWYLFINRVVQTGKLLFMYMDGKFYSPDDALITGVRAIIAEEFSRNLSKKLHNYHDHRIEKARQGQEIALQGSGNVYGWDKKDGKYYINPEQAKVRRLMCEGIMARKGSTLIAKELNEAGYRNTVGKLWKPMDIPKFVYDCKNVGTMIINKERHDFESKQTIKLPKEEWVYVENALPPIVTQEEWDLICKIHEERVIATGSDRRGKKTSGYSFSGKLVCGICGAPYWRKQRVSKDEYWVCSTKQTKGRRTRKRDSTMGKAGEINPLGCDNENISYNSLMEIMGVVSERLQANTDTIKHDMINWLTKLRKQLLEANGGHTEADLQRELSRKSKLLDAYLDGILNKQEYQKKAEELDERIIQLKAETEKNKANSGDIAEIDKVLANIDEEVSRYVDGNEKLKVEYLLEHLEQVQIFPDKVIVIVPILSEGIVVEKAQYVSREKCSKIHTESMIHYLEDYMYCTRKLGLYVQLVA

SEQ ID NO: 1252 - protein, 572 aa, Unknown
  Description of Unknown: Integrase B1253 sequence
  PTHR30461:SF3,IPR036162,PS51737,IPR011109,PTHR30461, PS00397,PF00239,G3DSA:1.10.10.2600,IPR006119,SSF53041, cd00338,SM00857,IPR025827,IPR038109,PS51736, IPR006118,PF13408,G3DSA:3.40.50.1390,PF07508,Coil
MASRIAEKLAAKKAAIYIRVSTHWQVDKDSLKVQRRELIAYVTLVLGITDYVVFEDPGYSAKNTDRPEYQAMMDRIRTGEFTHLVVWKIDRISRNLIDFAAMHDELQSLGVTFVSKNEQFDTSSAIGEAMMRIILIFAELERKTTAERVTAVMLSRASDGQWNGGRVPFGYSWSKETKTFSIVPEEAKAIRRMAELYEQYQSLLYVAKYLNDAGIVTKTGGQWTPTTVRTILTNPWYIGQYVYNVHSDGKGIEKRDSDEWITVENHHEPILNDDVFYRMKFLLTRNKRGGVPSHKTYVRKNIHVFAGLLRCGQCGSNMTANLDRRRANGFRPSQYACGSRRRKGTSCTNKYISDTTLGPFVLNYVANIIRASKNSSETTTSEVLERKLLRGEAFEDVASVSTDALGQLLNAFRFAGDAVEYRPQIAFSGDDNSIREIDTLRARRRKLDNALARLNALYLYDDEAMPEKDFVMQRGQITKQLEEVNTRIEELQSQESSEELGDDFIGKASYYIMANKLIEDRYIDYEKYIRAIDPSIPRSFLQQIIDHIVVNDGRVISITFKNGSTHTFTYKT

SEQ ID NO: 1253 - protein, 572 aa, Unknown
  Description of Unknown: Integrase B1254 sequence
  PTHR30461:SF3,IPR036162,PS51737,IPR011109,PTHR30461, PS00397,PF00239,G3DSA:1.10.10.2600,IPR006119,SSF53041, cd00338,SM00857,IPR025827,IPR038109,PS51736, IPR006118,PF13408,G3DSA:3.40.50.1390,PF07508,Coil
MASRIAEKLAAKKAAIYIRVSTHWQVDKDSLKVQRRELIAYVTLVLGITDYVVFEDPGYSAKNTDRPEYQAMMDRIRTGEFTHLVVWKIDRISRNLIDFAAMHDELQSLGVTFVSKNEQFDTSSAIGEAMMRIILIFAELERKTTAERVTAVMLSRASDGQWNGGRVPFGYSWSKEAKTFSIVPEEAKAIRRMAELYEQYQSLLYVAKYLNDAGIVTKTGGQWTPTTVRTILTNPWYIGQYVYNVHSDGKGIEKRDSDEWITVENHHEPILSEDVFYRMKFLLTRNKRGGVPSHKTYVRKNIHVFAGLLRCGQCGSNMTANLDRRRANGFRPSQYACGSRRRKGTSCTNKYISDTTLGPFVLNYVANIIRASKNSSEATTPEVLERKLLRGEAFEDVASVSTDALGQLLDAFRSAGDAVEYRPQIAFSGDDNSIREIDTLRARRRKLDNALARLNALYLYDDEAMPEKDFVMQRGQITKQLEEVNARIEELQNQESSEELGDDFIGKASYYIMANKLIEDRYIDYEKYIRAIDPSIPRSFLQQIIDHIVVNDGRVTSITFKNGSTHTFTYKT

SEQ ID NO: 1254 - protein, 572 aa, Unknown
  Description of Unknown: Integrase B1255 sequence
  PTHR30461:SF3,IPR036162,PS51737,IPR011109,PTHR30461, PS00397,PF00239,G3DSA:1.10.10.2600,IPR006119,SSF53041, SM00857,IPR025827,IPR038109,PS51736,cd03768, IPR006118,PF13408,G3DSA:3.40.50.1390,PF07508,Coil
MTSISERLKKFRVAIYIRVSTRYQVDKDSLQVQRRELITYSEMVLGVSDYVIFEDAGYSAKNTDRPDYLRMMDRLRTGEFTHLLVWKIDRISRNLLDFASMYQELKTLGIAFVSKNEQFDTSNAVGEAMLKIILVFAELERQMTSERVTAVMLSRAGNGQWNGGRIPYGYSYDQTEKKFSLDPAENRVYNLICDTYEEFQSTLYVSRYLNNKGLRTRQGKEWSATAVHKILSNVFYVGDYLYNVHDDGRGSSTRGEDEWVRIEHHHVPSISRDRFDRIQFILKRNKRGGNARGETHIRKNIHIFSGLVRCGKCGSNMSATLDRRRANGWRPSIYACSKHRNNSSVCQNKYISDVTLGPFVINYIANIIRAKGNVSASTSLETLERKLLRGDTFLNVEHIEHDGLADMMDVLISGKTGMEYRPLVVSGEQTSQLSEREILEECRRKKETALSRLKSLYLYGDEETPEKDFIIERERIMGELTEIESRLAEIQQQESIRPVTSDEFIQKAAYFIMVEKLLDDRYVDYEKYIRKIDPSIPRNFLNNVIDQIEVNDGLITSISFKNGMTHRFIYKA

SEQ ID NO: 1255 - protein, 572 aa, Unknown
  Description of Unknown: Integrase B1256 sequence
  PTHR30461:SF3,IPR036162,PS51737,IPR011109,PTHR30461, PS00397,PF00239,G3DSA:1.10.10.2600,IPR006119,SSF53041, cd00338,SM00857,IPR025827,IPR038109,PS51736, IPR006118,PF13408,G3DSA:3.40.50.1390,PF07508,Coil
MASRIAEKLAAKKAAIYIRVSTHWQVDKDSLKVQRRELIAYVTLVLGITDYVVFEDPGYSAKNTDRPEYQAMMDRIRTGEFTHLVVWKIDRISRNLIDFAAMHDELQSLGVTFVSKNEQFDTSSAIGEAMMRIILIFAELERKTTAERVTAVMLSRASDGQWNGGRVPFGYSWSKEAKTFSIVPEEAKAIRRMAELYEQYQSLLYVAKYLNDAGIVTKTGGQWTPTTVRTILTNPWYIGQYVYNVHSDGKGIEKRDSDEWITVENHHEPILNEDVFCRMKFLLTRNKRGGVPSHKTYVRKNIHIFAGLLRCGQCGSNMTANLDRRRANGFRPSQYACGSRRRKGTSCTNKYISDTTLGPFVLNYVANIIRASKNSSEATTPEVLERKLLRGEAFEDVASVSTDALGQLLDAFRSAGDAVEYRPQIAFSGDDNSIREIDTLRARRRKLDNALARLNALYLYDDEAMPEKDFVMQRGQITKQLEEVNARIEELQNQESSEELGDDFIGKASYYIMANKLIEDRYIDYEKYIRAIDPSIPRSFLQQIIDHIVVNDGRVISITFKNGSTHTFTYKT

SEQ ID NO: 1256 - protein, 572 aa, Unknown
  Description of Unknown: Integrase B1257 sequence
  SM00857,G3DSA:1.10.10.2600,IPR036162,PF13408,IPR025827, G3DSA:3.40.50.1390,PS51737,IPR006119,IPR038109,PF07508, SSF53041,IPR011109,PTHR30461,Coil,cd00338, PF00239
MAYRKITDIKDTIGMRAVFYARVSTAEEEQLNAIELQIEENRGCIKDHGWKLVGEYIDRSKSGTMVKGRDDYQRLYEDLYEDLFDIVVIKDQERLQRNTLDWYLFINRVVQTGKLLFMYMDGKFYSPDDALITGVRAIIAEEFSRNLSKKLHNYHDHRIEKARQGQEIALQGSGNVYGWDKKDGKYYINPEQAKVRRLMCEGIMARKGSTLIAKELNEAGYRNTVGKPWKPMDIPKFVYDCKNVGTMIINKERHDFESKQTIKLPKEEWVYVENALPPIVTQEEWDLICKIHEERVIATGSDKRGKKTSGYSFSGKLVCGICGAPYWRKQRVSKDEYWVCSTKQTKGRKTRKRDSTMGKAGEINPLGCDNENISYNSLMEIMEVVSERLQANTDTIKQDMINWLTKLRKQLLEANGGHTEADLQRELSRKSKLLDAYLDGILNKQEYQKKAEELDERIIQLKAETEKNKANSGDIAEIDKVLANIDEEVSRYVDGNEKLKVEYLLEHLEQVQIFPDKVIVIVPILSEGIVVEKTQYVSRKKCSKIHTESMIHYLEDYMYCTRKLGLYVQLVA

SEQ ID NO: 1257 - protein, 572 aa, Unknown
  Description of Unknown: Integrase B1258 sequence
  PTHR30461:SF3,IPR036162,PS51737,IPR011109,PTHR30461, PF00239,G3DSA:1.10.10.2600,IPR006119,PF14287,SSF53041, IPR025378,SM00857,IPR025827,cd03770,IPR038109, PF13408,G3DSA:3.40.50.1390,PF07508,Coil
MAFRRIAIDGILRYNDNIACFICRKGRFNMTDKITALYCRLSQDDMLQGESNSITNQKAILKKYAEDSGFSNLVYYVDDGVSGTTFERDGFKAMMADVEAGKVGTVITKDLSRLGRDYLKTGEYIEIIFPDYDVRYIAINDNVDTLKSENELMAFKNIFNDWYARDTSKKIRAIFKAKGQSGKPLSLPIYGYKASEEDKHKWIIDDEPAAVVRKIYKLCISGYGPTQIARKLTEEGIPNPTAYAISQGRNPANKNSRLDRWCTETVIDILEHPEYIGHTVNFRTRRKSYKNKRKIENPKEDWLIFENTHEPIVTQQEFDLVQEMRKDKRRNQKQETVNPFSGICYCADCGKKLYLCRSKSFSEEQEHLKCSTHSADKNSCSSHYIRTVVLKKLVLNALNKLLDNVKDNEAEFVQTAMDNSASKHSSDVFKAKKALDQAEKRITELDRLFVRLYEDNISGKISDERFAVLSAGYEDEQKKLKAKASELTAFIETAEQKCADVISFIKVVQKYEHITELTPEIMHELIEKIVVYAPEKSDGHRTQQIEIHFRFDVAVATAIADSREYEKKKKAA

SEQ ID NO: 1258 - protein, 572 aa, Unknown
  Description of Unknown: Integrase B1259 sequence
  PTHR30461:SF3,IPR036162,PS51737,IPR011109,PTHR30461, PS00397,PF00239,G3DSA:1.10.10.2600,IPR006119,SSF53041, cd00338,SM00857,IPR025827,IPR038109,PS51736, IPR006118,PF13408,G3DSA:3.40.50.1390,PF07508,Coil
MASRIAEKLAAKKAAIYIRVSTHWQVDKDSLKVQRRELIAYVTLVLGITDYVVFEDPGYSAKNTDRPEYQAMMDRIRTGEFTHLVVWKIDRISRNLIDFATMHDELQSLGVTFVSKNEQFDTSSAIGEAMMRIILIFAELERKTTAERVTAVMLSRASDGQWNGGRVPFGYSWSKETKTFSIVPEEAKAIRRMAELYEQYQSLLYVAKYLNDAGIVTKTGGQWTPTTVRTILTNPWYIGQYVYNVHSDGKGIEKRDSDEWITVESHHEPILSEDVFYRMKFLLTRNKRGGVPSHKTYVRKNIHVFAGLLRCGQCGSNMTANLDRRRANGFRPSQYACGSRRRKGTSCTNKYISDTTLGPFVLNYVANIIRASKNSSETTTSEVLERKLLRGEAFEDVASVSTDALGQLLDAFRSAGDAVEYRPQIAFSGDDNSIREIDTLRVRRRKLDNALARLNALYLYDDEAMPEKDFVMQRGQITKQLEEVNARIEELQSQESSEELGDDFIGKASYYIMANKLIEDRYIDYEKYIRAIDPSIPRSFLQQIIDHIVVNDGRVISITFKNGSTHTFTYKT

SEQ ID NO: 1259 - protein, 572 aa, Unknown
  Description of Unknown: Integrase B1260 sequence
  PTHR30461:SF3,IPR036162,PS51737,IPR011109,PTHR30461, PS00397,PF00239,G3DSA:1.10.10.2600,IPR006119,SSF53041, cd00338,SM00857,IPR025827,IPR038109,PS51736, IPR006118,PF13408,G3DSA:3.40.50.1390,PF07508,Coil
MASRIAEKLAAKKAAIYIRVSTHWQVDKDSLKVQRRELIAYVTLVLGITDYVVFEDPGYSAKNTDRPEYQAMMDRIRTGEFTHLVVWKIDRISRNLIDFAAMHDELQSLGVTFVSKNEQFDTSSAIGEAMMRIILIFAELERKTTAERVTAVMLSRASDGQWNGGRVPFGYSWSKEAKTFSIVPEEAKAIRRMAELYEQYQSLLYVTKYLNDAGIVTKTGGQWTPTTVRTILTNPWYIGQYVYNVHSDGKGIEKRDSDEWITVENHHEPILNEDVFCRMKFLLTRNKRGGVPSHKTYVRKNIHVFAGLLRCGQCGSNMTANLDRRRANGFRPSQYACGSRRRKGTSCTNKYISDTTLGPFVLNYVANIIRASKNSSEATTPEVLERKLLRGEAFEDVASVSTDALGQLLDAFRSAGDAVEYRPQIAFSGDDNSIREIDTLRARRRKLDNALARLNALYLYDDEAMPEKDFVMQRGQITKQLEEVNARIEELQNQESSEELGDGFIGKASYYIMANKLIEDRYIDYEKYIRAIDPSIPHSFLQQIIDHIVVNDGRVISITFKNGSTHTFTYKA

SEQ ID NO: 1260 - protein, 572 aa, Unknown
  Description of Unknown: Integrase B1261 sequence
  cd03768,SM00857,G3DSA:1.10.10.2600,IPR036162,PS51737, G3DSA:3.40.50.1390,IPR006119,IPR038109,PF07508,IPR011109, SSF53041,PTHR30461,PS51736,Coil,PF00239
MNEQKIVALYTRVSTGYQIEKDSLPFQKKELTAYCKHILHADNMELFEDAGKSGKNTERPAFKRMMNKIRAGEVSHVVVYKIDRISRNLVDFSVMYDEFRKYRVTFISLNEQFDTSSAIGEAVLKIILVFAELERKLTSERVTGVMIDRAISGKWNGARMPFGWKWNPETQFPEHDPVESEQARTLYRVYDETHSTAKVRDFCYDNDIQTKRGGKWTTTTILNFLKNPMNKGDYRYNYRNSARGMKKPENEVVYLPGVFPPLVDPDLWERVNAVIKTNGEKSRTSENPHVKKHTHIFAGGILKCADCGASFQVSRLDKPRLNGFQPSLYVCTSRRTYRACNAPGASDVVIGAFLFNYVRNLVQATKSRSKISAPADLERILLSGDEFSGIRCIDSADLDIVYQAIRGTIAPGSGVTYVPAPLASEKTDAPEVAGLRAEAARLSRALERLKNAYLFDDNALPESEYLSTRSDLTEQLTRINNKIADALTDNSYKAAAELSFVNSASSFLLSYRLQGADHIVYSDFAASVDVSVLKNFVNLIVDHITIKGGSVAEIVFKNGLRNRFIYQDNGDA

SEQ ID NO: 1261 - protein, 572 aa, Unknown
  Description of Unknown: Integrase B1262 sequence
  PTHR30461:SF3,IPR036162,PS51737,IPR011109,PTHR30461, PS00397,PF00239,G3DSA:1.10.10.2600,IPR006119,SSF53041, cd00338,SM00857,IPR025827,IPR038109, PS51736,IPR006118,PF13408,G3DSA:3.40.50.1390,PF07508,Coil
MASRIAEKLAAKKAAIYIRVSTHWQVDKDSLKVQRRELIAYVTLVLGITDYVVFEDPGYSAKNTDRPEYQAMMDRIRTGEFTHLVVWKIDRISRNLIDFAAMHDELQSLGVTFVSKNEQFDTSSAIGEAMMRIILIFAELERKTTAERVTAVMLSRASDGQWNGGRVPFGYSWSKETKTFSIVPEEAKAIRRMAELYEQYQSLLYVAKYLNDAGIVTKTGGQWTPTTVRTILTNPWYIGQYVYNVHSDGKGIEKRDSDEWITVENHHEPILNEDVFCRMKFLLTRNKRGGVPSHKTYVRKNIHVFAGLLRCGQCGSNMTANLDRRRANGFRPSQYACGSRRRKGTSCTNKYISDTTLGPFVLNYVANIIRASKNSSEATTPEVLERKLLRGEAFEDVASVSTDALGQLLDAFRSADDAVEYRPQIAFSGDDNSIREIDTLRARRRKLDNALARLNALYLYDDEAMPEKDFVMQRGQITKQLEEVNARIEELQNQESSEELGDGFIGKASYYIMANKLIEDRYIDYEKYIRAIDPSIPHSFLQQIIDHIVVNDGRVTSITFKNGATHTFTYKT

SEQ ID NO: 1262 - protein, 572 aa, Unknown
  Description of Unknown: Integrase B1263 sequence
  PTHR30461:SF3,IPR036162,PS51737,IPR011109,PTHR30461, PS00397,PF00239,G3DSA:1.10.10.2600,IPR006119,SSF53041, cd00338,SM00857,IPR025827,IPR038109,PS51736, IPR006118,PF13408,G3DSA:3.40.50.1390,PF07508,Coil
MASRIAEKLAAKKAAIYIRVSTHWQVDKDSLKVQRRELIAYVTLVLGITDYVVFEDPGYSAKNTDRPEYQAMMDRIRTGEFTHLVVWKIDRISRNLIDFAAMHDELQSLGVTFVSKNEQFDTSSAIGEAMMRIILIFAELERKTTAERVTAVMLSRASDGQWNGGRVPFGYSWSKETKTFSIVPEEAKAIRRMAELYEQYQSLLYVAKYLNDAGIVTKTGGQWTPTTVRTILTNPWYIGQYVYNVHSDGKGIEKRDSDEWITVENHHEPILNEDVFCRMRFLLTRNKRGGVPSHKTYVRKNIHIFAGLLRCGQCGSNMTANLDRRRANGFRPSQYACGSRRRKGTSCTNKYISDTTLGPFVLNYVANIIRASKNSSEATTPEVLERKLLRGEAFEDVASVSTDSLGQLLDAFRSAGDAVEYRPQIAFSGEDNAIREIDTLRARRRKLDNALARLNALYLYDDEAMPEKDFVMQRGQITKQLEEVNARIEELQNQESSEELGDGFIGKASYYIMANKLIEDRYIDYEKYIRAIDPSIPHSFLQQIIDHIVVNDGRVTSITFKNGATHTFTYKT

SEQ ID NO: 1263 - protein, 572 aa, Unknown
  Description of Unknown: Integrase B1264 sequence
  cd03768,PTHR30461:SF3,SM00857,G3DSA:1.10.10.2600,IPR036162, PF13408,PS51737,IPR025827,G3DSA:3.40.50.1390,IPR006119, IPR038109,PF07508,IPR011109,SSF53041,PTHR30461, PS51736,Coil,PF00239
MNEQKTVALYTRVSTGYQIDKDSLPFQKKELTSYCKHILHAEKTELFEDAGKSGKNTDRPAFLRMMKKIRAGEISHVVVYKIDRISRNLVDFSVMYDEFKKYRVTFISLNEQFDTSSAIGEAVLKIILVFAELERKLTSERVTGVMIDRAMSGKWNGARMPFGWKWNCETEFPEHDPIEAEKAQTLYRVYDETHSTAKVRDFCYDNDIQTKRGGKWTTTTILNFLKNPMNKGDYRYNYRGSARGTKKPENEVVYLPGVFPPLVDPELWDRVNAVIKENGTRAQTSANPHIKKHIHVFAGGILKCADCGASFQVSRLDKKRQNGFQPSLYVCTSRRTYRACDAPGASDVIVGAFFFNYVRNLVQATKSRSKIGSPADLERILLSGDEFSRIRYIDPSDLDIVYQAIRGTIAPGSGVTYIPTPPESGKKDAPELSGLRTEAARLSRALDRLKKAYLFDDDAMSEAEYLSTRSDLTEQLTRINNKIADTLTDESYQAAAELSFVNSASSFLLSYRLQGAEHIVYSDFAASVDRSVLKNFVNMIVDHITIKGGDPVEIVFKNGLRNRFVYRDDADA

SEQ ID NO: 1264 - protein, 572 aa, Unknown
  Description of Unknown: Integrase B1265 sequence
  PTHR30461:SF3,IPR036162,PS51737,IPR011109,PTHR30461, PS00397,PF00239,G3DSA:1.10.10.2600,IPR006119,SSF53041, cd00338,SM00857,IPR025827,IPR038109,PS51736, IPR006118,PF13408,G3DSA:3.40.50.1390,PF07508,Coil
MASRIAEKLAAKKAAIYIRVSTHWQVDKDSLKVQRRELIAYVTLVLGITDYVVFEDPGYSAKNTDRPEYQAMMDRIRTGEFTHLVVWKIDRISRNLIDFAAMHDELQSLGVTFVSKNEQFDTSSAIGEAMMRIILIFAELERKTTAERVTAVMLSRASDGQWNGGRVPFGYSWSKETKTFSIVPEEAKAIRRMAELYEQYQSLLYVAKYLNDAGIVTKTGGQWTPTTVRTILTNPWYIGQYVYNVHSDGKGIEKRDSDEWITVENHHEPILNEDVFCRMKFLLTRNKRGGVPSHKTYVRKNIHVFAGLLRCGQCGSNMTANLDRRRANGFRPSQYACGSRRRKGTSCTNKYISDTTLGPFVLNYVANIIRASKNSSEATTPEVLERKLLRGEAFEDVASVSTDSLGQLLDAFRSAGDAVEYRPQIAFSGDDNSIREIDTLRARRRKLDNALARLNALYLYDDEAMPEKDFVMQRGQITKQLEEVNARIEELQSQESSEELGDDFIGKASYYIMANKLIEDRYIDYEKYIRAIDPSIPRSFLQQIIDHIVVNDGRVTSITFKNGATHTFTYKT

SEQ ID NO: 1265 - protein, 572 aa, Unknown
  Description of Unknown: Integrase B1266 sequence
  PTHR30461:SF3,IPR036162,PS51737,IPR011109,PTHR30461, PS00397,PF00239,G3DSA:1.10.10.2600,IPR006119,SSF53041, cd00338,SM00857,IPR025827,IPR038109,PS51736, IPR006118,PF13408,G3DSA:3.40.50.1390,PF07508,Coil
MASRIAEKLAAKKAAIYIRVSTHWQVDKDSLKVQRRELIAYVTLVLGITDYVVFEDPGYSAKNTDRPEYQAMMDRIRTGEFTHLVVWKIDRISRNLIDFAAMHDELQSLGVTFVSKNEQFDTSSAIGEAMMRIILIFAELERKTTAERVTAVMLSRASDGQWNGGRVPFGYSWSKEAKTFSIVPEEAKAIRRMAELYEQYQSLLYVAKYLNDTGIVTKTGGQWTPTTVRTILTNPWYIGQYVYNVHSDGKGIEKRDSDEWITVENHHEPILNEDVFCRMKFLLTRNKRGGVPSHKTYVRKNIHVFAGLLRCGQCGSNMTANLDRRRANGFRPSQYACGSRRRKGTSCTNKYISDTTLGPFVLNYVANIIRASKNSSEATTPEVLERKLLRGEAFEDVASVSTDALGQLLDAFRSAGDAVEYRPQIAFSGDDNSIREIDTLRARRRKLDNALARLNALYLYDDEAMPEKDFVMQRGQITKQLEEVNARIEELQNQESSEELGDGFIGKASYYIMANKLIEDRYIDYEKYIRAIDPSIPHSFLQQIIDHIVVNDGRVTSITFKNGATHTFTYKT

SEQ ID NO: 1266 - protein, 572 aa, Unknown
  Description of Unknown: Integrase B1267 sequence
  SM00857,G3DSA:1.10.10.2600,IPR036162,PF13408,IPR025827, G3DSA:3.40.50.1390,PS51737,IPR006119,IPR038109,PF07508, SSF53041,IPR011109,PTHR30461,Coil,cd00338, PF00239
MAYRKITDIKDTIGMRAVFYARVSTAEEEQLNAIELQIEENRGCIKDHGWKLVGEYIDRSKSGTMVKGRDDYQRLYEDLYEDLFDIVVIKDQERLQRNTLDWYLFINRVVQTGKLLFMYMDGKFYSPDDALITGVRAIIAEEFSRNLSKKLHNYHDHRIEKARQGQEIALQGSGNVYGWDKKDGKYYINPEQAKVRRLMCEGIMARKGSTLIAKELNEAGYRNTVGKLWKPMDIPKFVYDCKNVGTMIINKERHDFESKQTIKLPKEEWVYVENALPPIVTQEEWDLICKIHEERVIATGSDRRGKKTSGYSFSGKLVCGICGAPYWRKQRVSKDEYWVCSTKQTKGRRTRKRDSTMGKAGEINPLGCDNENISYNSLMEIMGVVSERLQANTDTIKQDMINWLTKLRKQLLEANGGYTEADLQREISRKSKLLDAYLDGILNKQEYQKKAEELDERIIQLKAETEKNKANSGDIAEIDKVLANIDEEVARYIDGNEKLKVEYLLEHLEQVQIFPDKVIVIVPILSEGIVVEKTQYVSREKCSEIHTESMIHYLEDYMYCTRKLGLYVQLVA

SEQ ID NO: 1267 - protein, 572 aa, Unknown
  Description of Unknown: Integrase B1268 sequence
  PTHR30461:SF3,IPR036162,PS51737,IPR011109,PTHR30461, PS00397,PF00239,G3DSA:1.10.10.2600,IPR006119,SSF53041, cd00338,SM00857,IPR025827,IPR038109,PS51736, IPR006118,PF13408,G3DSA:3.40.50.1390,PF07508,Coil
MASRIAEKLAAKKAAIYIRVSTHWQVDKDSLKVQRRELIAYVTLVLGITDYVVFEDPGYSAKNTDRPEYQAMMDRIRTGEFTHLVVWKIDRISRNLIDFAAMHDELQSLGVTFVSKNEQFDTSSAIGEAMMRIILIFAELERKTTAERVTAVMLSRASDGQWNGGRVPFGYSWSKETKTFSIVPEEAKAIRRMAELYEQYQSLLYVAKYLNDAGIVTKTGGQWTPTTVRTILTNPWYIGQYVYNVHSDGKGIEKRDSDEWITVENHHEPILNEDVFCRMKFLLTRNKRGGVPSHKTYVRKNIHVFAGLLRCGQCGSNMTANLDRRRANGFRPSQYACGSRRRKGTSCTNKYISDTTLGPFVLNYVANIIRASKNSSEATTPEVLERKLLRGEAFEDVASVSTDALGQLLDAFRSAGDAVEYRPQIAFSGDDNSIREIDTLRARRRKLDNALARLNALYLYDDEAMPEKDFVMQRGQITKQLEEVNARIEELQNQESSEELGDGFIGKASYYIMANKLIEDRYIDYEKYIRAIAPSIPHSFLQQIIDHIVVNDGRVTSITFKNGATHTFTYKT

SEQ ID NO: 1268 - protein, 572 aa, Unknown
  Description of Unknown: Integrase B1269 sequence
  PTHR30461:SF3,IPR036162,PS51737,IPR011109,PTHR30461, PS00397,PF00239,G3DSA:1.10.10.2600,IPR006119,SSF53041, cd00338,SM00857,IPR025827,IPR038109,PS51736, IPR006118,PF13408,G3DSA:3.40.50.1390,PF07508,Coil
MASRIAEKLAAKKAAIYIRVSTHWQVDKDSLKVQRRELIAYVTLVLGITDYVVFEDPGYSAKNTDRPEYQAMMDRIRTGEFTHLVVWKIDRISRNLIDFAAMHDELQSLGVTFVSKNEQFDTSSAIGEAMMRIILIFAELERKTTAERVTAVMLSRASDGQWNGGRVPFGYSWSKETKTFSIVPEEAKAIRRMAELYEQYQSLLYVAKYLNDAGIVTKTGGQWTPTTVRTILTNPWYIGQYVYNVHSDGKGIEKRDSDEWITVENHHEPILNEDVFCRMRFLLTRNKRGGVPSHKTYVRKNIHIFAGLLRCGQCGSNMTANLDRRRANGFRPSQYACGSRRRKGTSCTNKYISDTTLGPFVLNYVANIIRASKNSSEATTPEVLERKLLRGEAFEDVASVSTDALGQLLDAFRSAGDAVEYRPQIAFSGDDNSIHEIDTLRARRRKLDNALARLNALYLYDDEAMPEKDFVMQRGQITKQLEEVNDRIEELQNQESSEELGDDFIGKASYYIMANKLIEDRYIDYEKYIRAIDPSIPRSFLQQIIDHIVVNDGRVTSITFKNGATHTFTYKT

SEQ ID NO: 1269 - protein, 572 aa, Unknown
  Description of Unknown: Integrase B1270 sequence
  PTHR30461:SF3,IPR036162,PS51737,IPR011109,PTHR30461, PS00397,PF00239,G3DSA:1.10.10.2600,IPR006119,SSF53041, cd00338,SM00857,IPR025827,IPR038109,PS51736, IPR006118,PF13408,G3DSA:3.40.50.1390,PF07508,Coil
MASRIAEKLAAKKAAIYIRVSTHWQVDKDSLKVQRRELIAYVTLVLGITDYVVFEDPGYSAKNTDRPEYQAMMDRIRTGEFTHLVVWKIDRISRNLIDFAAMHDELQSLGVTFVSKNEQFDTSSAIGEAMMRIILIFAELERKTTAERVTAVMLSRASDGQWNGGRVPFGYSWSKETKTFSIVPEEAKAIRRMAELYEQYQSLLYVAKYLNDAGIVTKTGGQWTPTTVRTILTNPWYIGQYVYNVHSDGKGIEKRDSDEWITVENHHEPILNEDVFCRMKFLLTRNKRGGVPSHKTYVRKNIHIFAGLLRCGQCGSNMTANLDRRRANGFRPSQYACGSRRRKGTSCTNKYISDTTLGPFVLNYVANIIRASKNSSEATTPEVLERKLLRGEAFEDVASVSTDALGQLLDAFRSAGDAVEYRPQIAFSGDDNSIREIDTLRARRRKLDNALARLNALYLYDDEAMPEKDFVMQRGQITKQLEEVNARIEELQNQESSEELGDGFIGKASYYIMANKLIEDRYIDYEKYIRAIDPSIPHSFLQQIIDHIVVNDGRVTSITFKNGATHTFTYKT

SEQ ID NO: 1270 - protein, 572 aa, Unknown
  Description of Unknown: Integrase B1271 sequence
  PTHR30461:SF3,IPR036162,PS51737,IPR011109,PTHR30461, PS00397,PF00239,G3DSA:1.10.10.2600,IPR006119,SSF53041, cd00338,SM00857,IPR025827,IPR038109,PS51736, IPR006118,PF13408,G3DSA:3.40.50.1390,PF07508,Coil
MASRIAEKLAAKKAAIYIRVSTHWQVDKDSLKVQRRELIAYVTLVLGITDYVVFEDPGYSAKNTDRPEYQAMMDRIRTGEFTHLVVWKIDRISRNLIDFAAMHDELQSLGVTFVSKNEQFDTSSAIGEAMMRIILIFAELERKTTAERVTAVMLSRASDGQWNGGRVPFGYSWSKEAKTFSIVPEEAKAIRRMAELYEQYQSLLYVAKYLNDAGIVTKTGGQWTPTTVRTILTNPWYIGQYVYNVHSDGKGIEKRDSDEWITVENHHEPILNEDVFCRMKFLLTRNKRGGVPSHKTYVRKNIHIFAGLLRCGQCGSNMTANLDRRRANGFRPSQYACGSRRRKGTSCTNKYISDTTLGPFVLNYVANIIRASKNSSEATTPEVLERKLLRGEAFEDVASVSTDALGQLLDAFRSAGDAVEYRPQIAFSGDDNSIREIDTLRARRRKLDNALARLNALYLYDDEAMPEKDFVMQRGQITKQLEEVNARIEELQNQESSEELGDGFIGKASYYIMANKLIEDRYIDYEKYIRAIDPSIPHSFLQQIIDHIVVNDGRVISITFKNGSTHTFTYKT

SEQ ID NO: 1271 - protein, 572 aa, Unknown
  Description of Unknown: Integrase B1272 sequence
  PTHR30461:SF3,IPR036162,PS51737,IPR011109,PTHR30461, PS00397,PF00239,G3DSA:1.10.10.2600,IPR006119,SSF53041, cd00338,SM00857,IPR025827,IPR038109,PS51736, IPR006118,PF13408,G3DSA:3.40.50.1390,PF07508,Coil
MASRIAEKLAAKKAAIYIRVSTHWQVDKDSLKVQRRELIAYVTLVLGITDYVVFEDPGYSAKNTDRPEYQAMMDRIRTGEFTHLVVWKIDRISRNLIDFAAMHDELQSLGVTFVSKNEQFDTSSAIGEAMMRIILIFAELERKTTAERVTAVMLSRASDGQWNGGRVPFGYSWSKETKTFSIVPEEAKAIRRMAELYEQYQSLLYVAKYLNDAGIVTKTGGQWTPTTVRTILTNPWYIGQYVYNVHSDGKGIEKRDSDEWITVENHHEPILNEDVFCRMKFLLTRNKRGGVPSHKTYVRKNIHVFAGLLRCGQCGSNMTANLDRRRVNGFRPSQYACGSRRRKGTSCTNKYISDTTLGPFVLNYVANIIRASKNSSEATTPEVLERKLLRGEAFEDVASVSTDSLGQLLDAFRSAGDAVEYRPQIAFSGEDDAIREIDTLRARRRKLDNALARLNALYLYDDEAMPEKDFVMQRGQITKQLEEVNARIVELQNQESSEELGDDFIGKASYYIMANKLIEDRYIDYEKYIRAIDPSIPHSFLQQIIDHIVVNDGRVTSITFKNGATHTFTYKT

SEQ ID NO: 1272 - protein, 572 aa, Unknown
  Description of Unknown: Integrase B1273 sequence
  PTHR30461:SF3,IPR036162,PS51737,IPR011109,PTHR30461, PS00397,PF00239,G3DSA:1.10.10.2600,IPR006119,SSF53041, cd00338,SM00857,IPR025827,IPR038109,PS51736, IPR006118,PF13408,G3DSA:3.40.50.1390,PF07508,Coil
MASRIAEKLAAKKAAIYIRVSTHWQVDKDSLKVQRRELIAYVTLVLGITDYVVFEDPGYSAKNTDRPEYQAMMDRIRTGEFTHLVVWKIDRISRNLIDFATMHDELQSLGVTFVSKNEQFDTSSAIGEAMMRIILIFAELERKTTAERVTAVMLSRASDGQWNGGRVPFGYSWSKETKTFSIVPEEAKAIRRMAELYEQYQSLLYVAKYLNDAGIVTKTGGQWTPTTVRTILTNPWYIGQYVYNVHSDGKGIEKRDSDEWITVENHHEPILSEDVFYRMKFLLTRNKRGGVPSHKTYVRKNIHVFAGLLRCGQCGSNMTANLDRRRANGFRPSQYACGSRRRKGTSCTNKYISDTTLGPFVLNYVANIIRASKNSSETTTPEVLERKLLRGEAFEDVASVSTDALGQLLDAFRSAGDAVEYRPQIAFSGDDNSIREIDTLRARRRKLDNALARLNALYLYDDEAMPEKDFVMQRGQITKQLEEVNARIEELQNQESSEELGDDFIGKASYYIMANKLIEDRYIDYEKYIRAIDPSIPRSFLQQIIDHIVVNDGRVISITFKNGSTHTFTYKT

SEQ ID NO: 1273 - protein, 572 aa, Unknown
  Description of Unknown: Integrase B1274 sequence
  SM00857,G3DSA:1.10.10.2600,IPR036162,PF13408,IPR025827, G3DSA:3.40.50.1390,PS51737,IPR006119,IPR038109,PF07508, SSF53041,IPR011109,PTHR30461,Coil,cd00338, PF00239
MAYRKITDIRDTIGMRAVFYARVSTAEEEQLNAIELQIEENRGCIKDHGWKLVGEYIDRSKSGTMVKGRDDYQRLYEDLYEDLFDIVVIKDQERLQRNTLDWYLFINRVVQTGKLLFMYMDGKFYSPDDALITGVRAIIAEEFSRNLSKKLHNYHDHRIEKARQGQEIALQGSGNVYGWDKKDGKYYINPEQAKVRRLMCEGIMARKGSTLIAKELNDAGYRNTVGKPWKPMDIPKFVYDCKNVGTMIINKERHDFESKQTIKLPKEEWVYVENALPPIVTQEEWDLICKIHEERVIATGSDRRGKKTSGYSFSGKLVCGICGAPYWRKQRVSKDEYWVCSTKQTKGRRTRKRDSTMGKAGEINPLGCDNENISYNSLMEIMGVVSERLQANTDTIKHDMINWLTKLRKQLLEANGGHTEADLQRELSRKSKLLDAYLDGILNKQEYQKKAEELDERIIQLKAETEKTKANSGDIAEIDKVLANIDEEVSRYVDGNEKLKVEYLLEHLEQVQIFPDKVIVIVPILSEGIVVEKTQYVSREKCSKIHTESMIHYLEDYMYCTRKLGLYVQLVA

SEQ ID NO: 1274 - protein, 572 aa, Unknown
  Description of Unknown: Integrase B1275 sequence
  PTHR30461:SF3,IPR036162,PS51737,IPR011109,PTHR30461, PS00397,PF00239,G3DSA:1.10.10.2600,IPR006119,SSF53041, cd00338,SM00857,IPR025827,IPR038109,PS51736, IPR006118,PF13408,G3DSA:3.40.50.1390,PF07508,Coil
MASRIAEKLAAKKAAIYIRVSTHWQVDKDSLKVQRRELIAYVTLVLGITDYVVFEDPGYSAKNTDRPEYQAMMDRIRTGEFTHLVVWKIDRISRNLIDFAAMHDELQSLGVTFVSKNEQFDTSSAIGEAMMRIILIFAELERKTTAERVTAVMLSRASDGQWNGGRVPFGYSWSKETKTFSIVPEEAKAIRRMAELYEQYQSLLYVAKYLNDAGIVTKTGGQWTPTTVRTILTNPWYIGQYVYNVHSDGKGIEKRDSDEWITVENHHEPILNEDVFCRMKFLLTRNKRGGVPSHITYVRKNIHIFAGLLRCGQCGSNMTANLDRRRANGFRPSQYACGSRRRKGTSCTNKYISDTTLGPFVLNYVANIIRASKNSSEATTPEVLERKLLRGEAFEDVVSVSTDALGQLLDAFRSAGDAVEYRPQIAFSGEDNAIREIDTLRARRRKLDNALARLNALYLYDDEAMPEKDFVMQRGQITKQLEEVNARIEELQNQESSEELGDDFIGKASYYIMANKLIEDRYIDYEKYIRAIDPSIPRSFLQQIIDHIVVNDGRVTSITFKNGATHTFTYKT

SEQ ID NO: 1275 - protein, 572 aa, Unknown
  Description of Unknown: Integrase B1276 sequence
  PTHR30461:SF3,IPR036162,PS51737,IPR011109,PTHR30461, PS00397,PF00239,G3DSA:1.10.10.2600,IPR006119,SSF53041, cd00338,SM00857,IPR025827,IPR038109,PS51736, IPR006118,PF13408,G3DSA:3.40.50.1390,PF07508,Coil
MASRIAEKLAAKKAAIYIRVSTHWQVDKDSLKVQRRELIAYVTLVLGITDYVVFEDPGYSAKNTDRPEYQAMMDRIRTGEFTHLVVWKIDRISRNLIDFAAMHDELQSLGVTFVSKNEQFDTSSAIGEAMMRIILIFAELERKTTAERVTAVMLSRASDGQWNGGRVPFGYSWSKETKTFSIVPEEAKAIRRMAELYEQYQSLLYVAKYLNDAGIVTKTGGQWTPTTVRTILTNPWYIGQYVYNVHSDGKGIEKRDSDEWITVENHHEPILSEDVFYRMKFLLTRNKRGGVPSHKTYVRKNIHVFAGLLRCGQCGSNMTANLDRRRANGFRPSQYACGSRRRKGTSCTNKYISDTTLGPFVLNYVANIIRASKNSSEATTPDVLERKLLRGEAFEDVASVSTDALGQLLDAFRSAGDAVEYRPQIAFSGDDNSIREIDTLRARRRKLDNALARLNALYLYDDEAMPEKDFVMQRGQITKQLEEVNARIEELQNQESSEELGDDFIGKASYYIMANKLIEDRYIDYEKYIRAIDPSIPRSFLQQIIDHIVVNDGRVISITFKNGSTHTFTYKT

SEQ ID NO: 1276 - protein, 572 aa, Unknown
  Description of Unknown: Integrase B1277 sequence
  SM00857,G3DSA:1.10.10.2600,IPR036162,PF13408,IPR025827, PS51737,G3DSA:3.40.50.1390,IPR006119,IPR038109,PF07508, SSF53041,IPR011109,PTHR30461,Coil,cd00338, PF00239
MAYRKITDIRDTIGMRAVFYARVSTAEEEQLNAIELQIEENRGCIKDHGWKLVGEYIDRSKSGTMVKGRDDYQRLYEDLYEDLFDIVVIKDQERLQRNTLDWYLFINRVVQTGKLLFMYMDGKFYSPDDALITGVRAIIAEEFSRNLSKKLHNYHDHRIEKARQGQEIALQGSGNVYGWDKKDGKYYINPEQAKVRRLMCEGIMARKGSTLIAKELNDAGYRNTVGKPWKPMDIPKFVYDCKNVGTMIINKERHDFESKQTIKLPKEEWVYVENALPPIVTQEEWDLICKIHEERVIATGSDRRGKKTSGYSFSGKLVCGICGAPYWRKQRVSKDEYWVCSTKQTKGRRTRKRDSTMGKAGEINPLGCDNENISYNSLMEIMGVVSERLQANTDTIKQDMINWLTKLRKQLIEANGGHTEADLQRELSRKSKLLDAYLDGILNKQEYQKKAEELDDRIIQLKAETEKNKANSGDIAEIDKVLANIDEEVSRYVDGNEKLKVEYLLEHLEQVQIFPDKVIVIVPILSEGIVVEKTQYVSREKCSEIHTERMIHYLEDYMYCTRKLGLYVQLVA

SEQ ID NO: 1277 - protein, 572 aa, Unknown
  Description of Unknown: Integrase B1278 sequence
  PTHR30461:SF3,IPR036162,PS51737,IPR011109,PTHR30461, PS00397,PF00239,G3DSA:1.10.10.2600,IPR006119,SSF53041, cd00338,SM00857,IPR025827,IPR038109,PS51736, IPR006118,PF13408,G3DSA:3.40.50.1390,PF07508,Coil
MTSRIAEKLAAKKAAIYIRVSTHWQVDKDSLKVQRRELIAYVTLVLGITDYVVFEDPGYSAKNTDRPEYQAMMDRIRTGEFTHLVVWKIDRISRNLIDFAAMHDELQSLGVTFVSKNEQFDTSSAIGEAMMRIILIFAELERKTTAERVTAVMLSRASDGQWNGGRVPFGYSWSKETKTFSIVPEEAKAIHRMAELYEQYQSLLYVAKYLNDAGIVTKTGGQWTPTTVRTILTNPWYIGQYVYNVHSDGKGIEKRDSDEWITVENHHEPILNEDVFCRMKFLLTRNKRGGVPSHKTYVRKNIHVFAGLLRCGQCGSNMTANLDRRRANGFRPSQYACGSRRRKGTSCTNKYISDTTLGPFVLNYVANIIRASKNSSEATTPEVLERKLLRGKAFEDVASVSTDSLGQLLDAFRSAGDAVEYRPQIAFSGDDNSIREIDTLRARRRKLDNALARLNALYLYDDEAMPEKDFVMQRGQITKQLEEVNARIEELQNQESSEELGDGFIGKASYYIMANKLIEDRYIDYEKYIRAIDPSIPHSFLQQIIDHIVVNDGRVTSITFKNGATHTFTYKT

SEQ ID NO: 1278 - protein, 572 aa, Unknown
  Description of Unknown: Integrase B1279 sequence
  PTHR30461:SF3,IPR036162,PS51737,IPR011109,PTHR30461, PS00397,PF00239,G3DSA:1.10.10.2600,IPR006119,SSF53041, cd00338,SM00857,IPR025827,IPR038109,PS51736, IPR006118,PF13408,G3DSA:3.40.50.1390,PF07508,Coil
MASRIAEKLAAKKAAIYIRVSTHWQVDKDSLKVQRRELIAYVTLVLGITDYVVFEDPGYSAKNTDRPEYQAMMDRIRTGEFTHLVVWKIDRISRNLIDFAAMHDELQSLGVTFVSKNEQFDTSSAIGEAMMRIILIFAELERKTTAERVTAVMLSRASDGQWNGGRVPFGYSWSKETKTFSIVPEEAKAIRRMAELYEQYQSLLYVAKYLNDAGIVTKTGGQWTPTTVRTILTNPWYIGQYVYNVHSDGKGIEKRDSDEWITVENHHEPILNDDVFYRMKFLLTRNKRGGVPSHKTYVRKNIHVFAGLLRCGQCGSNMTANLDRRRANGFRPSQYACGSRRRKGTSCTNKYISDTTLGPFVLNYVANIIRASKNSSETTTSEVLERKLLRGEAFEDVASVSTDALGQLLNAFRSAGDAVEYRPQIAFSGDDNSIREIDTLRARRRKLDNALARLNALYLYDDEAMPEKDFVMQRGQITKQLEEVNTRIEELQSQESSEELGDDFIGKASYYIMANKLIEDRYIDYEKYIRAIDPSIPRSFLQQIIDHIVVNDGRVISITFKNGSTHTFTYKT

SEQ ID NO: 1279 - protein, 572 aa, Unknown
  Description of Unknown: Integrase B1280 sequence
  SM00857,G3DSA:1.10.10.2600,IPR036162,PF13408,IPR025827, G3DSA:3.40.50.1390,PS51737,IPR006119,IPR038109,PF07508, SSF53041,IPR011109,PTHR30461,Coil,PS51736, cd00338,PF00239
MAYRKITDIKDTIGMRAVFYARVSTAEEEQLNAIELQIEENRGCIKDHGWKLVGEYIDRSKSGTMIKGRDDYQRLYEDLYEDLFDIVVIKDQERLQRNTLDWYLFINRVVQTGKLLFMYMDGKFYSPDDALITGVRAIIAEEFSRNLSKKLHNYHDHRIEKARQGQEIALQGSGNVYGWDKKDGKYYINPEQAKVRRLMCEGIMARKGSTLIAKELNDAGYRNTVGKPWKPMDIPKFVYDCKNVGTMIINKERHDFESKQTIKLPKEEWVYVENALPPIVTQEEWDLICKIHEERVIATGSDRRGKKTSGYSFSGKLVCGICGAPYWRKQRVSKDEYWVCSTKQTKGRRTRKRDSTMGKAGEINPLGCDNENISYNSLMEIMGVVSERLQANTDTIKHDMINWLTKLRKQLLEANGGHTEADLQRELSRKSKLLDAYLDGILNKQEYQKKAEELDERIIQLKAETEKNKANSGDIAEIDKVLANIDEEVSRYVDGNEKLKVEYLLEHLEQVQIFPDKVIVIVPILSEGIVVEKAQYVSRKKCSKIHTESMIHYLEDYMYCTRKLGLYVQLVA

SEQ ID NO: 1280 - protein, 572 aa, Unknown
  Description of Unknown: Integrase B1281 sequence
  PTHR30461:SF3,IPR036162,PS51737,IPR011109,PTHR30461, PF00239,G3DSA:1.10.10.2600,IPR006119,SSF53041,cd00338, SM00857,IPR025827,IPR038109,mobidb-lite,PS51736, PF13408,G3DSA:3.40.50.1390,PF07508,Coil
MGKKQKATGGNAVIYARYSSHNQRDVSIEQQVEACRKHAAELGLTVTATYEDRAISGKTDKRPSFQRMMRDAEQHKFAYVLAWKSNRIGRNMMQALVNESRLVDCGVKVFYAEEDFDDNAAGRFALRSMMNVNQFYIENMAEDVKRGLYDNAKKGLVNGSLPLGYKRGADGKPEIDEPKAAIVREIYTRVAAGELFASIAADLNARGIRTARGREWNKGSFHVLCHNDRYRGIYMYGDIRIPGGMPRIISDELFYDAQEAYGMKKDNRYGRARHGAENYLLTGKLYCGHCGSYMVGISGTSKTGEMHYYYACQKHRLEHTCEKKAIRRDVIENAVARVIMMYCLDDETIDFIVDSTIAYFKQKDHELHIEAMENELAAVQQAISNLMKAIEAGIITPTTRTRLLDLEEQQAKLSAKINTAKAERVEIDRDDLIAGLQLFRTGDIKNKKFLAKLFNTFLLAVYLYDDNRLKIVFSFTGNHNNIEIPLDLDNDCPDSESGPYETEVRMSHLECRKNLGSPPSSGEAEKGDDCSDGRFVRTAPLPPHQLTSGPFRPEVLFIPTPSKGGSHGLHHR

SEQ ID NO: 1281 - protein, 572 aa, Unknown
  Description of Unknown: Integrase B1282 sequence
  PTHR30461:SF3,IPR036162,PS51737,IPR011109,PTHR30461, PS00397,PF00239,G3DSA:1.10.10.2600,IPR006119,SSF53041, cd00338,SM00857,IPR025827,IPR038109,PS51736, IPR006118,PF13408,G3DSA:3.40.50.1390,PF07508,Coil
MASRIAEKLAAKKAAIYIRVSTHWQVDKDSLKVQRRELIAYVTLVLGITDYVVFEDPGYSAKNTDRPEYQAMMDRIRTGEFTHLVVWKIDRISRNLIDFAAMHDELQSLGVTFVSKNEQFDTSSAIGEAMMRIILIFAELERKTTAERVTAVMLSRASDGQWNGGRVPFGYSWSKEAKTFSIVPEEAKAIRRMAELYEQYQSLLYVAKYLNDAGIVTKTGGQWTPTTVRIILTNPWYIGQYVYNVHSDGKGIEKRDSDEWITVENHHEPILNEDVFCRMKFLLARNKRGGVPSHKTYVRKNIHVFAGLLRCGQCGSNMTANLDRRRANGFRPSQYACGSRRRKGTSCTNKYISDTTLGPFVLNYVANIIRASKNSSEATTPEVLERKLLRGEAFEDVASVSTDSLGQLLDAFRSAGDAVEYRPQIAFSGEDNAIREIDTLRARRRKLDNALARLNALYLYDDEAMPEKDFVMQRGQITKQLEEVNARIEELQNQESSEELGDDFIGKASYYIMANKLIEDRYIDYEKYIRAIDPSIPRSFLQQIIDHIVVNDGRVTSITFKNGATHTFTYKT

SEQ ID NO: 1282 - protein, 571 aa, Unknown
  Description of Unknown: Integrase B1283 sequence
  PTHR30461:SF3,IPR036162,PS51737,IPR011109,PTHR30461, PS00397,PF00239,G3DSA:1.10.10.2600,IPR006119,SSF53041, cd00338,SM00857,IPR025827,IPR038109,PS51736, IPR006118,PF13408,G3DSA:3.40.50.1390,PF07508,Coil
MSIRDKLSALKVAIYIRVSTHWQVDKDSLKVQERELIAYCQMVLGINDYVVFTDPGYSAKNTDRPDYQAMMDRIRTGEFSHLLVWKIDRISRNIIDFATMSEELKHLGVAFVSKNEQFDTSTAMGEAMLQIIMVFAQFERKQTSERVTAVMLSRAGNGQWNGGRVPYGYLWDKETASFQLCATEAGYVRRMAQLYEEHQSLLHVVKWLNDAGVKTRRGFAWTPTSIHVILTNPWYIGQYVYNVHSDGKGVERRDESEWVCVEHHHEPILSEDQFYRIKFLLTRNRRGTPTPGKSYARKHTHIFSGLMRCGICGSNMSASADRRRANGFRPSQYACASRRRKGTTCTNKYISDLTVGSFVLNYAANIIRAARNSAADIQPDVLERKLLRGETFKDVEGINSEAIQQLLSSFAEAGEAVEYRPRYAFTSASGEGRDMDNLRARKRKLETAFSRLNALFLYDDEAMPEKDFIVERTNIERQLAEADKRIAELAATGLSSSEDSSDFLKKASYFIMVNKLIEDASVDYEKLVRTLDPTAIRDFVLNIVQEVEATDGRITAITFRNGTAHRFKYKT

SEQ ID NO: 1283 - protein, 571 aa, Unknown
  Description of Unknown: Integrase B1284 sequence
  SM00857,G3DSA:1.10.10.2600,IPR036162,PF13408,IPR025827, G3DSA:3.40.50.1390,PS51737,IPR006119,IPR038109,PF07508, SSF53041,IPR011109,PTHR30461,Coil,cd00338, PF00239
MAYRKITDIRDTIGMRAVFYARVSTAEEEQLNAIELQIEENRGCIKDHGWKLVGEYIDRSKSGTMVKGRDDYQRLYEDLYEDLFDIVVIKDQERLQRNTLDWYLFINRVVQTGKLLFMYMDGKFYSPDDALITGVRAIIAEEFSRNLSKKLHNYHDHRIEKARQGQEIALQGSGNVYGWDKKDGKYYINPEQAKVRRLMCEGIMARKGSTLIAKELNDAGYRNTVGKPWKPMDIPKFVYDCKNVGTMIINKERHDFESKQTIKLPKEEWVYVENALPPIVTQEEWDLICKIHEERVIATGSDRRGKKTSGYSFSGKLVCGICGAPYWRKQRVSKDEYWVCSTKQTKGRRTRKRDSTMGKAGEINPLGCDNENISYNSLMEIMGVVSERLQANTDTIKQDMINWLTKLRKQLLEANGGHTEADLQRELSRKSKLLDAYLDGILNKQEYQKKAEELDERIIQLKAETEKNKANSGDIAEIDKVLANIDEEVSRYVDGNEKLKVEYLLEHLEQVQIFPDKVIVIVPILSEGIVVVEKTQYVSREKWLWKKYINEYYNGQFKSGSGMRLLRWRSD

SEQ ID NO: 1284 - protein, 571 aa, Unknown
  Description of Unknown: Integrase B1285 sequence
  SM00857,G3DSA:1.10.10.2600,IPR036162,PF13408,PS51737, G3DSA:3.40.50.1390,IPR025827,IPR006119,IPR038109,PF07508, IPR011109,SSF53041,PTHR30461,Coil,PS51736, cd00338,PF00239
MNIYHARETLRTCSIYDLKLRVAYYARVSTDRAEQQVSISHQTEYFENLIRSNPNWEFVGAYVDDGISGMHAEKREDFQNMLRDAKAGKIDMIITKEISRFARNTLDSIKYTRELLSCGVCVWFQNDGINTIDEDSELRLTIMAGVAQDELRKLSSRVKFGHARSIQNGVVLGNRIYGYKKKDGKLTIIPEEAEMVRMIFRDYAAGVSTPKIEKKLWDMGYRNSKGSKIDRNVIRHIIKNPKYKGYFCGGKVKIVDMFTKKQEFLPKSEWIMFKDDGSRVPQIIDEETWEKANQYMTMRGDAIKTRRTSFKSENLFTGMIFCSNDNAPYWLKQHYIRGKEDVRWVCSHKIKNGAASCNSFGIKESELKIMVSDLINESSCNIEEVIKKYLELLRRATDNKPDSKAEIDRLQKQIESINKKKEKILEYNLDGNISDEEFIQRNKGYNEQIEKLNSQISDLTPNQDNFVSTEMQFKNIADTLKKFNGVESEDINRQIVEELFEKIVVKSFEGNKATLTFYLKTGEVKKKQVSMSCSEYMLFNIIPERHKRFYRKTCISGASEIAFNYEYRMVI

SEQ ID NO: 1285 - protein, 571 aa, Unknown
  Description of Unknown: Integrase B1286 sequence
  PTHR30461:SF3,IPR036162,PS51737,IPR011109,PTHR30461, PS00397,PF00239,G3DSA:1.10.10.2600,IPR006119,SSF53041, SM00857,IPR025827,IPR038109,PS51736,cd03768, IPR006118,PF13408,G3DSA:3.40.50.1390,PF07508,Coil
MMQNRTAPASTNRVAIYIRVSTTHQIDKDSLPMQRQDLIAYAKLMLNTDDYVIFEDAGYSGKNTDRPKFQEMMSQIRQGAFSHLLVWKIDRISRNLLDFATMYKELKDLGVVFVSKNEQFDTSTAMGEAMLKIILVFAELERNMTSERVTATMISRASNGQWNGGRVPYGYNYDYETKDFSTNPIEAEIVHLIHDKYEEMRSLVRESRYLNEKGLRTRAGNLWNPVSLHIILHNIFYCGDYRYNVLKEGDRQKVKDESEWITVEDHHDSIISREQKERVIAMLDANKRLDRKRNTYQSEKYVHVFAGLLYCGNCGKPMGATPAAAKKDWQYSKYTCPTRRKLASACNGKFTSDPIVGEFVFNYVLNMLNVQKNFAGIHSPEELQAALLIGNTFSYIDHIDEDGLNDLFNMLSSGKIKGTVFGKSAKLKKKKVVSELSKLRNEKQKIERALDRLTKLYLYAEDAMPESEFIIQKSKLTEALDEVNEQIGFSNTDEWNQSVSDEEFVRRASEFIIAQKLTDRNYVSYKRLATSVDTAVIKTFVQSIIDSIIMDAGQVKQIIFKNGLSHTFIFK

SEQ ID NO: 1286 - protein, 571 aa, Unknown
  Description of Unknown: Integrase B1287 sequence
  cd03768,PTHR30461:SF3,SM00857,G3DSA:1.10.10.2600,IPR036162, PF13408,IPR025827,PS51737,G3DSA:3.40.50.1390,IPR006119, IPR038109,PF07508,IPR011109,SSF53041,PTHR30461, PS51736,Coil,PF00239
MLKVAVYSRKSKFTGKGDSIENQIEMCKDYITNTIGKDVEFTIYEDEGFSGGNLDRPNFKKLMSAIKNKKFNILVCYRLDRISRNVADFSSTLEILQSNNCSFISIKEQFDTSSPMGRAMIYIASVFAQLERETIAERVKDNMLEIAKNGKWTGGKIPLGFTSDKVEYIDEKGITRTAPQLIINEKEMEFINFLYNKYLELGSLHKLEVYIHENNIRSRNDVLYEKSSLKTILQNPIYVKANDDVVEYLNNSNWTVYGQPDNIHSLLTYNKTEQTKKDGKYTKVKKDLSERLAAVSSIKGYIDPELWLSVQRQFDKNKDTFPRLGKTHNALLVGKIRCGKCKEYMLISHGRISKTTGEKLFYYTCSLKKKSRKKLCDNGNAKAADLEKLVLLSLKQLSLNKKDFLSKIRDKYKTDENYKNIDLEKLSLNKSLKEKKLQIDNLVTKLSLCNDIEDIILNKIKTLKDECNNIEKTLTELETKTLTLKNNLLNLDLIESLLNKCSMIDKLDRSEQKLIVDNLIDTIYWYSDGPGKGKIKIKFVGTEDNQKEISFTIKEMQQLMLHFCSHSMSSI

SEQ ID NO: 1287 - protein, 571 aa, Unknown
  Description of Unknown: Integrase B1288 sequence
  PTHR30461:SF3,SM00857,G3DSA:1.10.10.2600,IPR036162,PF13408, IPR025827,PS51737,G3DSA:3.40.50.1390,IPR006119,IPR038109, PF07508,IPR011109,SSF53041,PF00239,PTHR30461, PS51736,Coil,cd00338
MQRAVIYARYSPGPNQTEQSIEGQVRECTKYAELHDLRIVGTYVDRKISGKTDNRREFQRMIDDSEKHIFDVIILYHTDRFARNRYDSAIYKHKLKENGVELRYATTDIPKGPEGIILESIMEGWAEYYSAELSRKIKRGMRESALKCHSTGAGRCLGYRTAEDKSLVIEPEGAKAVQTVFDMYIKGKSHADICRYLNDCGFRTAQGKLFNKNSVTHIIRNKRYIGVYTYDDITIEDGIPAIISKDTFHLAQLEAARRKTAKRPKEPKAEYLLSGKAFCGHCQKPLVGVSGTGKSGNKWYYYYCQESRAKRGCTKKPVKRDWLEREVVERTVAEILQPEVIQRIAKKCYDLQMEDRQDNSDVLFYELKLKDVRKAIKNTMHAIESGVKTKTLPARLQELENEEEALEAELAIAKASDFVITTDQIEFLLTQFAEPWECESEEEYHRRIIKCFVHKVFLFDDKLLIYYNVSRDGKTREQSEAELLEEALGEGFDKRSSGSTKAEPDEPRGRLALLLSLQSIWSAESSFWSVRSTRKNKKEATAQDCSCAVASLCFFIAITDFVIIYQNPARF

SEQ ID NO: 1288 - protein, 571 aa, Unknown
  Description of Unknown: Integrase B1289 sequence
  PTHR30461:SF3,IPR036162,PS51737,IPR011109,PTHR30461, PS00397,PF00239,G3DSA:1.10.10.2600,IPR006119,SSF53041, SM00857,IPR025827,IPR038109,PS51736,cd03768, IPR006118,PF13408,G3DSA:3.40.50.1390,PF07508,Coil
MMQDRTAPASTNRVAIYIRVSTTHQIDKDSLPMQRQDLIAYAKLMLNTDDYVIFEDAGYSGKNTDRPKFQEMMSQIRQGAFSHLLVWKIDRISRNLLDFATMYKELKDLGVVFVSKNEQFDTSTAMGEAMLKIILVFAELERNMTSERVTATMISRASNGQWNGGRVPYGYNYDYETKDFSINPIEAEIVRLIHDKYEEMRSLVRESRYLNEKGLRTRAGNLWNPVSLHIILHNIFYCGDYRYNVLKEGDRQKVKDESEWITVEDHHEPIISREQKERVIAMLDTNKRLDRKRNTYQSEKYVHVFAGLLYCGNCGKPMGATPAAAKKDWQYSKYTCPTRRKLASACNGKFTSDPIVGEFVFNYVLNMLNVQKNFADIHSPEELQAALLIGNTFSYIDHIDEDGLNDLFNMLSSGKIKGTVFGKSAKLKKKKVVSELSKLRNEKQKIERALDRLTKLYLYAEDAMPESEFIIQKSKLTEALDEVNEQIGFSNTDEWNQSVSDEEFVRRASEFIIAQKLTDRNYVSYKRLATSVDTAVIKTFVQGIIDSIIMDAGQVKQIIFKNGLSHTFIFK

SEQ ID NO: 1289 - protein, 571 aa, Unknown
  Description of Unknown: Integrase B1290 sequence
  PTHR30461:SF3,IPR036162,PS51737,IPR011109,PTHR30461, PS00397,PF00239,G3DSA:1.10.10.2600,IPR006119,SSF53041, SM00857,IPR025827,IPR038109,PS51736,cd03768, IPR006118,PF13408,G3DSA:3.40.50.1390,PF07508,Coil
MMQDRTAPASTNRVAIYIRVSTTHQIDKDSLPMQRQDLIAYAKLMLNTDDYVIFEDAGYSGKNTDRPKFQEMMSQIRQGAFSHLLVWKIDRISRNLLDFATMYKELKDLGVVFVSKNEQFDTSTAMGEAMLKIILVFAELERNMTSERVTATMISRASNGQWNGGRVPYGYNYDYETKDFSINPIEAEIVRLIHDKYEEMRSLVRESRYLNEKGLRTRAGNLWNPVSLHIILHNIFYCGDYRYNVLKEGDRQKVKDESEWITVEDHHEPIISREQKERVIAMLDANKRLDRKRNTYQSEKYVHVFSGLLYCGNCGKPMGATPAAAKKDWQYSKYTCPTRRKLASACNGKFTSDPIVGEFVFNYVLNMLNVQKNFADIHSPEELQAALLIGNTFSYIDHIDEDGLNDLFNMLSSGKIKGTVFGKSAKLKKKKVVSELSKLRNEKQKIERALDRLTKLYLYAEDAMPESEFIIQKSKLTEALDEVNEQIGFSNTDEWNQSVSDEEFVRRASEFIIAQKLTDRNYVSYKRLATSVDTAVIKTFVQGIIDSIIMDAGQVKQIIFKNGLSHTFIFK

SEQ ID NO: 1290 - protein, 571 aa, Unknown
  Description of Unknown: Integrase B1291 sequence
  SM00857,G3DSA:1.10.10.2600,IPR036162,PF13408,PS51737, IPR025827,G3DSA:3.40.50.1390,IPR006119,IPR038109,PF07508, IPR011109,SSF53041,PF00239,PTHR30461,PS51736, Coil,cd00338
MNIYHAREMLRTHSIYDLKLRVAYYARVSTDRAEQQVSIKHQTEHFENLIRSNQNWDFGEAYIDDGISGMHVEKREEFQNMLRDAKAGKIDMIITKEISRFARNTLDSIKYTRELLSYGVCVWFQNDGINTIDEDSELRLTIMAGVAQDELRKLSSRVKFGHARSIQNGVVLGNRIYGYHKKDGKLTIIPEEAEMVQMIFKDYASGVTTPQIEIKLWKMGYRNSKGGKINRNVIRNIIRNPKYKGYFCGGKVKIVDMFTRKQEFLPESKWVMFKDDGSRVPQIVDEETWEKANQYMSIRGDAIKSRRTSFKKGNLFTGMIFCGNDGAPYWLKQHYVRGKEDVRWVCSYKIKNGASSCNSFGIKESELKIIISELINESSCNIDEIAKKYLELLQKVMNDKLGSKTEIDRIQKQIDSINKKKEKILEYNLDGNISDNEFLQRNKEYNEQILKLNSQITALTSQQNEIKTPEEQLKNIVDTLKKFDGVKPDDINRQIVEELFEKISVKSFEGKKALLTFYLKTGDAKTRKFGMGCSGHVLLNIVPERHKRFYRKNCILNASEIAFDYTYEAVI

SEQ ID NO: 1291 - protein, 571 aa, Unknown
  Description of Unknown: Integrase B1292 sequence
  PTHR30461:SF3,IPR036162,PS51737,IPR011109,PTHR30461, PS00397,PF00239,G3DSA:1.10.10.2600,IPR006119,SSF53041, SM00857,IPR025827,IPR038109,PS51736,cd03768, IPR006118,PF13408,G3DSA:3.40.50.1390,PF07508,Coil
MMQDRTAPASTNRVAIYIRVSTTHQIDKDSLPMQRQDLIAYAKLMLNTDDYVIFEDAGYSGKNTDRPKFQEMMSQIRQGAFSHLLVWKIDRISRNLLDFATMYKELKDLGVVFVSKNEQFDTSTAMGEAMLKIILVFAELERNMTSERVTATMISRASNGQWNGGRVPYGYNYDYETKDFSINPIEAEIVRLIHDKYEEMRSLVRESRYLNEKGLRTRAGNLWNPVSLHIILHNIFYCGDYRYNVLKEGDRQKVKDESEWITVEDHHEPIISREQKERIIAMLDANKRLDRKRNTYKSEKYVHVFAGLLYCGNCGKPMGATPAAAKKDWQYSKYTCPTRRKLASACNGKFTSDPIVGEFVFNYVLNMLNVQKNFADIHSPEELQAALLIGNTFSYIDHIDEDGLNDLFNMLSSGKIKGTVFGKSTKLKKKKVVSELSKLRNEKQKIERALDRLTKLYLYAEDAMPESEFIIQKSKLTEALDEVNEQIGFSNTDEWNQSVSDEEFVRRASEFIIAQKLTDRNYVSYKRLATSVDTAVIKTFVQGIIDSIIMDAGQVKQIIFKNGLSHTFIFK

SEQ ID NO: 1292 - protein, 571 aa, Unknown
  Description of Unknown: Integrase B1293 sequence
  PTHR30461:SF3,SM00857,G3DSA:1.10.10.2600,IPR036162,PF13408, IPR025827,G3DSA:3.40.50.1390,PS51737,IPR006119,IPR038109, PF07508,SSF53041,IPR011109,PF00239,PTHR30461, PS51736,Coil,cd00338
MRDVKEDTKKIVRILLRVSSDQQLEADGDLSIQRQLVVEEVKKHEEWILDSKEYFEGSNSGYKNSVVDRDVLQEALRDAENKEYDILLAYKDDRLGRRMLEIPMYIMSLKQFGVDVYTVKDGLLTPDIGDVMGMLRLTMQYGMAEKSSSDTGIRVKDTAKKLVQQGKFMGGKAPYGYKLEYSGEYSKHQRALKHLVIVPEHAEVVKYIYKLSLYKEYGSGKIATTLNLDNRYKNLAPNDVWKSGTITSILTNPIYTGYTAYRRREHIGGRYRSLSQEDWIIAEKPNDEITIIDRDMWEKVQISRQKRSRKYQKQSWNEKATVISRNDGQLALIDVAYCGYCGRKLTNGTKYDYWTIKGTGERRSSQKSIYKCQNVWQGVPHEKMKQIRADKIEPIVFKKLSEYVGRLQEDENIFEQILENQSFEKKQQEQILVREKRKLQEIEKDMDILNDAIPKAITGTYPLPLEDLAKNIERQKDKAAKQKAVVDELEINIKNLSVSQEDWENLYHNLPTWQDIFMNADVATKRVLVNKLIERIDITDDTVVIHFKVDLDHFCSQPRETINERVSQSGL

SEQ ID NO: 1293 - protein, 571 aa, Unknown
  Description of Unknown: Integrase B1294 sequence
  PTHR30461:SF3,SM00857,G3DSA:1.10.10.2600,IPR036162,PF13408, IPR025827,G3DSA:3.40.50.1390,PS51737,IPR006119,IPR038109, PF07508,SSF53041,IPR011109,PF00239,PTHR30461, PS51736,Coil,cd00338
MSKLYETIEQLCKNKGVNITKMCKDAGTSLGAQENVVHSPFFQCELYHILLQMSRSDNKYMKTAVIYARYSSDKQTEQSIEGQLYDCYNYAKQHGITVVREYIDRAMTGKNDDRPAFQQMLHESAMHKWDSVIVWKLDRFARNTIDSAVNRQILAKNGVKLLSVMESFGDDASGQMMTHIIEAINEYYSADLREKTIRGMRQSAMKAQTTGHIPLGYKVVDKKLVIDDETRIIPETVFRMYAEGERLTDIADHLNAQGYRNRRGRPFTTNSFYNMLANEKYIGIYKYDDIVIEGGIPQMIPNEVFEAVREKLITNRKRAAKNTAKADYYLSGKLYCGHCGEPMSGLSGTGRNGVKHYYYRCNGVQKKSGCHKKLENKYLIEDEVCRAARSAFEQMDKAETAETIYQMYLQTVRNEYAPAELEKELTECTKQAENVVNAIAQTGGNQLLFDKVRELEERKEQLGSALRLSQAMTDNVPSVEQITVFIDDILATDINTTEGKKAIADIMISKVYVYDDKLTAIFKDKDGKSVDIPLSDVSDSSSADCAPSALGSQSTHRRTVGNNQWFAFVIS

SEQ ID NO: 1294 - protein, 571 aa, Unknown
  Description of Unknown: Integrase B1295 sequence
  SM00857,G3DSA:1.10.10.2600,IPR036162,PF13408,IPR025827, PS51737,G3DSA:3.40.50.1390,IPR006119,IPR038109,PF07508, IPR011109,SSF53041,PF00239,PTHR30461,PS51736, Coil,cd00338
MNIYHAREMLRTHSIYDLKLRVAYYARVSTDRAEQQVSIKHQTEHFENLIRSNQNWDFGEAYIDDGISGMHVEKREEFQNMLRDAKAGKIDMIITKEISRFARNTLDSIKYTRELLSYGVCVWFQNDGINTIDEDSELRLTIMAGVAQDELRKLSSRVKFGHARSIQNGVVLGNRIYGYHKKDGKLTIIPEEAAMIQMIFKDYASGVATPQIEKKLWEMGYRNSKGEKINRNVIRNIIKNPKYKGYFCGGKVKIVDMFTRKQEFLPESKWVMFKDDGSRVPQIVDEETWEKANQYMSMRGDAIKSRRTSFKKGNLFTGMIFCGNDGAPYWLKQHYVRGIEDVRWVCSYKIKNGASSCNSFGIKESELKIMISELINESSCNIDEIAKKYLELLQKVMNDKLSSKTEIDRIQEQIDSINKKKEKILEYNLDGNISDNEFLQRNKEYNEQILKLNSQITALTSQQNEIKTPEEQLKNIVDTLKKFDGVKPDDINRQIVEELFEKISVKSFEGKKALLTFYLKTGDAKTRKFGMGCSGHVLLNIVPERHKRFYRKNCILNASEIAFDYTYEAVI

SEQ ID NO: 1295 - protein, 571 aa, Unknown
  Description of Unknown: Integrase B1296 sequence
  PTHR30461:SF3,IPR036162,PS51737,IPR011109,PTHR30461, PS00397,PF00239,G3DSA:1.10.10.2600,IPR006119,SSF53041, cd00338,SM00857,IPR025827,IPR038109,PS51736, IPR006118,PF13408,G3DSA:3.40.50.1390,PF07508,Coil
MSIRDKLSALKVAIYIRVSTHWQVDKDSLKVQERELIAYCQMVLGINDYVVFTDPGYSAKNTDRPDYQAMMDRIRTGEFSHLLVWKIDRISRNIIDFATMSEELKHLGVAFVSKNEQFDTSTAMGEAMLQIIMVFAQFERKQTSERVTAVMLSRAGNGQWNGGRVPYGYLWDKETASFQLCETEAGYVRRMAQLYEEHQSLLHIVKWLNDAGVKTRRGFAWTPTSVHVILTNPWYIGQYVYNVHSDGKGVERRDESEWVCVEHHHEPILSEDQFYRIKFLLTRNRRGTPTPGKSYARKHTHIFSGLMRCGICGSNMSASADRRRANGFRPSQYACASRRRKGTTCTNKYISDLTVGSFVLNYAANIIRAARNSAAGVQPDILERKLLRGETFKDVESINSEAIQQLLSSFAEAGDAVEYRPQYAFTSASGEGRDMDNLRARKRKLETALSRLNALFLYDDEAMPEKDFIVERTNIEHQLAETDKRIAELAATGLSSSEDSSDFLKKASYFIMVNKLIEDASVDYEKLVRTLDPTAIRDFVLNIVQEVEATDGRITAITFRNGTAHRFKYKT

SEQ ID NO: 1296 - protein, 571 aa, Unknown
  Description of Unknown: Integrase B1297 sequence
  SM00857,G3DSA:1.10.10.2600,IPR036162,PF13408,IPR025827, G3DSA:3.40.50.1390,PS51737,IPR006119,IPR038109,PF07508, IPR011109,SSF53041,PF00239,PTHR30461,PS51736, Coil,cd00338
MKDVKEDTKKIVRILLRVSSDQQLEADGDLSIQRKIVVEEVKKHEEWILDSKEYFEGSNSGYKNSVADRDVLQEALRDAENKEYDILLAYKDDRLGRRMLEIPMYIMSLKQFGVDVYTVKDGLLTPDLGDITGMLMLSMRYAMAEKSSSDTGMRVKDTAQKLVQQGKFMGGKAPYGYKLEYSGEYSKHQRALKHLVIAPEQAEVVKYIYELSFYKEFGSGKIASSLNNDSRYKNLAPNDVWKSGTITSILTNPIYAGYTAYKRRETQNGMSHSLDRKDWIIAEKQNKEITIINPELWEKVQISRQKRRTKYQKQPWNEKATIISRNDGNLALIDVAYCGYCGRKLTNGTKYDYWTIKGTGERRSSQKSIYKCQNVWQGVPHEKMKQIRADKIEPIVFKKLSEYVGRLQEDENIFEQILENQSFEKKRQEQILVREKRNLQEIEKNIDILNDAIPNAITGTYPLSLEDLAKSIEKQKDKASKQKTVVEELETNIKNLSVSQEDWENLYHNLPTWQDIFMNADVATKRVLVNKLIERIDITDDTVVIRFKVDLDHFCPQPRMTVNERVSQSGL

SEQ ID NO: 1297 - protein, 571 aa, Unknown
  Description of Unknown: Integrase B1298 sequence
  PTHR30461:SF3,IPR036162,PS51737,IPR011109,PTHR30461, PF00239,G3DSA:1.10.10.2600,IPR006119,SSF53041,cd00338, SM00857,IPR025827,IPR038109,PS51736,mobidb-lite, PF13408,G3DSA:3.40.50.1390,PF07508,Coil
MSLTYVVAYARFSSDNQREESIDAQLRAIRQYCQQHDYILLDTYVDEARSATTDDRPAFQQMVKDSASGDWSAVIVHKLDRFSRNRYDSAIYKKQLKDNGVHVESVLERLDDSPESVILESLLEGMSEYYSKNLAREVLKGKHETALQCKHNGGQPPYGLMVNKDGTYAINEYEAEAVRMMFDLTLSGHSQSAIRNTLSHAGYKTRSGKPFCGSTINNMLHNEKYNGTFVYNRVKPQPKGGKRTNESRPDDEIMRIPNGIPAIIDAQTWNDVQEVLERRSDQASKRSEGGIEVYLLQGLIKCGNCGSAMVGCRRKDGRNKKLRISYECNGRKRKHTDCQMRNINRDYIEDIVIDYIEQCILSDDAMAKVKKMLLDEIDAQQKATGSLDSLQKELASVEAGLNKLIDAIIAGIDALSLKDKIDALEAKKALLNSQISTVKARQATFGQIDIDSLDCYLAHYRNIRSHPRRHQKEIIHKFVKEVLVYDNDTDGDKIVLTLKVPASSITLQSSKSGDTVNGVLSPYSISEIQRASSIISRLSFYSTSSVYGQPISNKHCYIIDMAHCLSLTESI

SEQ ID NO: 1298 - protein, 571 aa, Unknown
  Description of Unknown: Integrase B1299 sequence
  SM00857,G3DSA:1.10.10.2600,IPR036162,PF13408,IPR025827, G3DSA:3.40.50.1390,PS51737,IPR006119,IPR038109,PF07508, IPR011109,SSF53041,PTHR30461,Coil,PS51736, cd00338,PF00239
MNIYHARETLRMCSIYDLKLRVAYYARVSTDRAEQQVSISHQTEYFENLIRSNPNWEFVDAYVDDGISGMHAEKREDFQNMLRDAKAGKIDMIITKEISRFARNTLDSIKYTRELLSCGVCVWFQNDGINTIDEDSELRLTIMAGVAQDELRKLSSRVKFGHARSIQNGVVLGNRIYGYKKKDGKLTIIPEEAEMVRMIFRDYAAGVSTPKIEKKLWDMGYRNSKGSKIDRNVIRHIIKNPKYKGYFCGGKVKIVDMFTKKQEFIPESEWIMFKDDGSRVPQIIDEETWEKANQYMTMRGDAIKTRRTSFKSENLFTGMIFCSNDNAPYWLKQHYIRGKEDVRWVCSHKIKNGAASCNSFGIKESELKIMVSDLINESSCNIEEVIKKYLELLRRAIDNKPDSKAEIDRLQKQIESINKKKEKILEYNLDGNISDEEFIQRNKGYNEQIQKLNSQISDLTPNQDDFVSAEMQFKNIIDTLKKFNGVDSEDINRQIVEELFEKIVVKSFEGNKATLTFYLKTGEVKKKQVSMSCSEYMLFNIIPERHKRFYRKTCISGASEIAFNYEYRMVI

SEQ ID NO: 1299 - protein, 571 aa, Unknown
  Description of Unknown: Integrase B1300 sequence
  SM00857,G3DSA:1.10.10.2600,IPR036162,PF13408,IPR025827, PS51737,G3DSA:3.40.50.1390,IPR006119,IPR038109,PF07508, SSF53041,IPR011109,PTHR30461,Coil,cd00338, PF00239
MAYRKITDIRDTIGMRAVFYARVSTAEEEQLNAIELQIEENRGCIKDHGWKLVGEYIDRSKSGTMVKGRDDYQRLYEDLYEDLFDIVVIKDQERLQRNTLDWYLFINRVVQTGKLLFMYMDGKFYSPDDALITGVRAIIAEEFSRNLSKKLHNYHDHRIEKARQGQEIALQGSGNVYGWDKKDGKYYINPEQAKVRRLMCEGIMARKGSTLIAKELNEAGYRNTVGKLWKPMDIPKFVYDCKNVGTMIINKERHDFESKQTIKLPKEEWVYVENALPPIVTQEEWDLICKIHEERVIATGSDRRGKKTSGYSFSGKLVCGICGAPYWRKQRVSKDEYWVCSTKQTKGRRTRKRDSTMGKAGEINPLGCDNENISYNSLMEIMGVVSERLQANTDTIKHDMINWLTKLRKQLLEANGGHTEADLQRELSRKSKLLDAYLDGILNKQEYQKKAEELDERIIQLKAETEKNKANSGDIAEIDKVLANIDEEVSRYVDGNEKLKVEYLLEHLEQVQIFPDKVIVIVPILSEGIVVEKAQYVSREKWCRQDHYSKTFQWNSASHLRRSADQRRRYQ

SEQ ID NO: 1300 - protein, 571 aa, Unknown
  Description of Unknown: Integrase B1301 sequence
  PTHR30461:SF3,IPR036162,PS51737,IPR011109,PTHR30461, PS00397,PF00239,G3DSA:1.10.10.2600,IPR006119,SSF53041, SM00857,IPR025827,IPR038109,PS51736,cd03768, IPR006118,PF13408,G3DSA:3.40.50.1390,PF07508,Coil
MMQDRTAPASANRVAIYIRVSTTHQIDKDSLPMQRQDLIAYAKLMLNTDDYVIFEDAGYSGKNTDRPRFQEMMSQIRQGAFSHLLVWKIDRISRNLLDFATMYKELKDLGVVFVSKNEQFDTSTAMGEAMLKIILVFAELERNMTSERVTATMISRASNGQWNGGRVPYGYNYDYETKDFSTNPIEAEIVHLIHDKYEEMRSLVRESRYLNEKGLRTRAGNLWNPVSLHIILHNIFYCGDYRYNVLKEGDRQKVKDESEWITVEDHHDSIISREQKERVIAMLDANKRLDRKRNTYQSEKYVHVFAGLLYCGNCGKPMGATPAAAKKDWQYSKYTCPTRRKLASACNGKFTSDPIVGEFVFNYVLNMLNVQKNFADIHSPEELQAALLIGNTFSYIDHIDEDGLNDLFNMLSSGKIKGTVFGKSAKLKKKKVVSELSKLRNEKQKIERALDRLTKLYLYAEDAMPESEFIIQKSKLTEALDEVNEQIGFSNTDEWNQSVSDEEFVRRASEFIIAQKLTDRNYVSYKRLATSVDTAVIKTFVQSIIDSIIMDAGQVKQIIFKNGLSHTFIFK

SEQ ID NO: 1301 - protein, 571 aa, Unknown
  Description of Unknown: Integrase B1302 sequence
  cd00338,SM00857,G3DSA:1.10.10.2600,IPR036162,PF13408, IPR025827,PS51737,G3DSA:3.40.50.1390,IPR006119,IPR038109, PF07508,SSF53041,IPR011109,PTHR30461,PS51736, Coil,PF00239
MICVDQNGQAVEISVADQMWLDDAYFKEKQMRLEPNAPRAALAYRVSTKGQVDHDDIPMQKIDCRKFAQKQGWRVVKEVAEKGVSGSKVSASKRDAIQQLKEEAANGEFDILLVYMFDRLGRIESETPFVLEWFVQHGIQMWSTHEGQQKIETHGDKLMNYIRFWQAAGESEKTSIRTRDRIRQIVSSGHYTGGFVCYGYQLVDQGRRNKRDKPVMDLVINEEESTWVRELFYKVIQEGASGYALAEMLNNRGLRTRAGAKFQSSNIIRIIRHEGYTGYIITKNARSEYIPELQIIDRETFDKANDIINRRKAKSEQERKIAHTSQNPTLLAGIVYCAHCGAKMSGFMHTDRYKLADGSIREKVQPKYNCFQRGQRNKGGRDCDGQALYLAEKVDAIVLQAVSKIFEQIRDTPYSRMAENRIRQESNLQKSKRASVEKKIKTAQHALERFEGEILKCLDGTSNFTEDMIAKQIRRYQQELDDAKAEYAALQNARLNEAAEIRKLRTYYDEFRGWAEEFDAAPLEIKRMIQSQLIERVEVGRKYQVTIKLNMEYQQFLEITEEQKLIPLISA

SEQ ID NO: 1302 - protein, 571 aa, Unknown
  Description of Unknown: Integrase B1303 sequence
  PTHR30461:SF3,IPR036162,PS51737,IPR011109,PTHR30461, PS00397,PF00239,G3DSA:1.10.10.2600,IPR006119,SSF53041, SM00857,IPR025827,IPR038109,PS51736,cd03768, IPR006118,PF13408,G3DSA:3.40.50.1390,PF07508,Coil
MMQDRTAPASTNRVAIYIRVSTTHQIDKDSLPMQRQDLIAYAKLMLNTDDYVIFEDAGYSGKNTDRPKFQEMMSQIRQGAFSHLLVWKIDRISRNLLDFATMYKELKDLGVVFVSKNEQFDTSTAMGEAMLKIILVFAELERNMTSERVTATMISRASNGQWNGGRVPYGYNYDYETKDFSINPIEAEIVRLIHDKYEEMRSLVRESRYLNEKGLRTRAGNLWNPVSLHIILHNIFYCGDYRYNVLKEGDRQKVKDESEWITIEDHHDSIISREQKERVIAMLDANKRLDRKRNTYQSEKYVHVFAGLLYCGNCGKPMGATPAAAKKDWQYSKYTCPTRRKLASACNGKFTSDPIVGEFVFNYVLNMLNVQKNFADIHSPEELQATLLIGNTFSYIDHIDEDGLNDLFNMLSSGKIKGTVFGKSAKLKKKKVVSELSKLRNEKQKIERALDRLTKLYLYAEDAMPESEFIIQKSKLTEALDEVNEQIGFSNTDEWNQSVSDEEFVRRASEFIIAQKLTDRNYVSYKRLATSVDTAVIKTFVQSIIDSIIMDAGQVKQIIFKNGLSHTFIFK

SEQ ID NO: 1303 - protein, 571 aa, Unknown
  Description of Unknown: Integrase B1304 sequence
  SM00857,G3DSA:1.10.10.2600,IPR036162,PF13408,PS51737, IPR025827,G3DSA:3.40.50.1390,IPR006119,IPR038109,PF07508, IPR011109,SSF53041,PF00239,PTHR30461,PS51736, Coil,cd00338
MNIYHAREMLRTHSIYDLKLRVAYYARVSTDRAEQQVSIKHQTEHFENLIRSNQNWDFGEAYIDDGISGMHVEKREEFQNMLRDAKAGKIDMIITKEISRFARNTLDSIKYTRELLSYGVCVWFQNDGINTIDEDSELRLTIMAGVAQDELRKLSSRVKFGHARSIQNGVVLGNRIYGYHKKDGKLTIIPEEAEMVQMIFKDYASGVTTPQIEIKLWKMGYRNSKGGKINRNVIRNIIRNPKYKGYFCGGKVKIVDMFTRKQEFLPESKWVMFKDDGSRVPQIVDEETWEKANQYMSIRGDAIKSRRTSFKKGNLFTGMIFCGNDGAPYWLKQHYVRGKEDVRWVCSYKIKNGASSCNSFGIKESELKIIISELINESSCNIDEIAKKYLELLQKVMNDKLGSKTEIDRIQEQINSINKKKEKILEYNLDGNISDNEFLQRNKEYNEQILKLNSQIAALTSQQNEIKTPEEQLKNIVDTLKKFDGVKPDDINRQIVEELFEKISVKSFEGKKALLTFYLKTGDAKTRKFGMGCSGHVLLNIVPERHKRFYRKNCILNASEIAFDYTYEAVI

SEQ ID NO: 1304 - protein, 571 aa, Unknown
  Description of Unknown: Integrase B1305 sequence
  SM00857,G3DSA:1.10.10.2600,IPR036162,PF13408,IPR025827, PS51737,G3DSA:3.40.50.1390,IPR006119,IPR038109,PF07508, SSF53041,IPR011109,PTHR30461,Coil,PS51736, cd00338,PF00239
MNIYHARETLRTCSIYDLKLRVAYYARVSTDRVEQQVSISHQTEYFENLIRSNPNWEFVGAYVDDGISGMHAEKREDFQNMLRDAKAGKIDMIITKEISRFARNTLDSIKYTRELLSCGVCVWFQNDGINTIDEDSELRLTIMAGVAQDELRKLSSRVKFGHARSIQNGVVLGNRIYGYKKKDGKLTIIPEEAEMVRMIFRDYAAGVSTPKIEKKLWDMGYRNSKGSKIDRNVIRHIIKNPKYKGYFCGGKVKIVDMFTKKQEFIPESEWIMFKDDGSRVPQIIDEETWEKANQYMTMRGDAIKTRRTSFKSENLFTGMIFCSNDNAPYWLKQHYIRGKEDVRWVCSHKIKNGAASCNSFGIKESELKIMVSDLINESSCNIEEVIKKYLELLRRATYNKPDSKAEIDRLQKQIESINKKKEKILEYNLDGNISDEEFIQRNKGYNEQIQKLNSQISDLTPNQDDFVSAEMQFKNIIDTLKKFNGVESEDINRQIVEELFEKIVVKSFEGNKATLTFYLKTGEVKKKQVSMSCSEYMLFNIIPERHKRFYRKTCISGASEIAFNYEYRMVI

SEQ ID NO: 1305 - protein, 571 aa, Unknown
  Description of Unknown: Integrase B1306 sequence
  PTHR30461:SF3,IPR036162,PS51737,IPR011109,PTHR30461, PS00397,PF00239,G3DSA:1.10.10.2600,IPR006119,SSF53041, cd00338,SM00857,IPR025827,IPR038109,PS51736, IPR006118,PF13408,G3DSA:3.40.50.1390,PF07508,Coil
MSIRDKLSALKVAIYIRVSTHWQVDKDSLKVQERELIAYCQMVLGINDYVVFTDPGYSAKNTDRPDYQAMMDRIRTGEFSHLLVWKIDRISRNIIDFATMSEELKHLGVAFVSKNEQFDTSTAMGEAMLQIIMVFAQFERKQTSERVTAVMLSRAGNGQWNGGRVPYGYLWDKETASFQLCETEAGYVRRMAQLYEEHQSLLHIVKWLNDAGVKTRRGFAWTPTSVHVILTNPWYIGQYVYNVHSDGKGVERRDESEWVCVEHHHEPILSEDQFYRIKFLLTRNRRGTPTPGKSYARKHTHIFSGLMRCGICGSNMSASADRRRANGFRPSQYACASRRRKGTTCTNKYISDLTVGSFVLNYAANIIRAARNSAADVQPDILERKLLRGETFKDVESINSEAIQQLLSSFAEAGEAVEYRPQYAFTSASGEGRDMDNLRARKRKLETALSRLNALFLYDDEAMPEKDFIVERTNIERQLAETDKRIAELAATGLSSSEDSSDFLKKASYFIMVNKLIEDASVDYEKLVRTLDPTAIRDFVLNIVQEVEATDGRITAIAFRNGTAHRFKYKT

SEQ ID NO: 1306 - protein, 571 aa, Unknown
  Description of Unknown: Integrase B1307 sequence
  PTHR30461:SF3,IPR036162,PS51737,IPR011109,PTHR30461, PF00239,G3DSA:1.10.10.2600,IPR006119,PF14287,SSF53041, IPR025378,SM00857,IPR025827,cd03770,IPR038109, PS51736,PF13408,G3DSA:3.40.50.1390,PF07508,Coil
MKQSNNNKKSRDVTAFLYERLSRDDNMDGESYSIGNQKKLLTKVAKEKGYTNLVHFFDDGISGVTMDRPGFADMIQQLEQGKAAAVFVKDLSRLGRNYIEVGRLTEEFFPNHDIRLVAVSDNIDTDEGENELAPIRNLFNEWYARDISKKRRISNKIKGNAGEPMGQPPYGYVKDPENPKRWIVDEEAAQVVRRIYRMTLEGVGTEQIAAKLEEDGVLTPRAYWHSKGINRPGKVKDLPPTHWNSSSVIKMLSVQEYCGDILNFKTYSKSYKNKKRLENDRENWAIFKDVHEPIIERAVFEQVQQKRGKMRKRQAKDGERSMFSGLLVCADCGSNLHFHFNQGNPEIKYFNCSNYKGNRGTCGSTHYVRVDFLEQVVLGEIRRLTKYAGLYEDDFLKEVIGHSRQAEETERRLKEKELKSLLARDDELDGLFEHIYEDNVSGKLSDDRFAKMSRRYEEEQKELSEKIKKLRSEIEKQSSRATSTDMFVSIVRKYTRARKLTPRMLNELVEKIEVYNAEKIDGEWVQRLRIHYNCVGEMNIPNEPALPIPAVTVNTRKGVFVSYTTDDRPAV

SEQ ID NO: 1307 - protein, 571 aa, Unknown
  Description of Unknown: Integrase B1308 sequence
  PTHR30461:SF3,IPR036162,PS51737,IPR011109,PTHR30461, PS00397,PF00239,G3DSA:1.10.10.2600,IPR006119,SSF53041, SM00857,IPR025827,IPR038109,PS51736,cd03768, IPR006118,PF13408,G3DSA:3.40.50.1390,PF07508,Coil
MMQDRTAPASTNRVAIYIRVSTTHQIDKDSLPMQRQDLIAYAKLMLNTDDYVIFEDAGYSGKNTDRPKFQEMMSQIRQGAFSHLLVWKIDRISRNLLDFATMYKELKDLGVVFVSKNEQFDTSTAMGEAMLKIILVFAELERNMTSERVTATMISRASNGQWNGGRVPYGYNYDYETKDFSINSIEAEIVHLIHDKYEEMRSLVRESRYLNEKGLRTRAGNLWNPVSLHIILHNIFYCGDYRYNVLKEGDRQKVKDESEWITIEDHHEQIISREQKERVIAMLDANKRLDRKRNTYQSEKYVHVFAGLLYCGNCGKPMGATPAAAKKDWRYSKYTCPTRRKLASACDGKFTSDPIVGEFVFNYVLNMLNVQKNFADIHSPEELQVALLIGNTFSYIDHIDEDGLNDLFNMLSSGKIKGTVFGKSAKLKKKKVVSELSKLRNEKQKIERALDRLTKLYLYAEDAMPESEFIIQKSKLTEALDEVNEQIGFSNTDEWNQSVSDEEFVRRASEFIIAQKLTDRNYVSYKRLATSVDTAVIKTFVQSIIDSIIMDAGQVKQIIFKNGLSHTFIFK

SEQ ID NO: 1308 - protein, 571 aa, Unknown
  Description of Unknown: Integrase B1309 sequence
  cd03768,PTHR30461:SF3,SM00857,IPR006118,G3DSA:1.10.10.2600, IPR036162,PS51737,G3DSA:3.40.50.1390,IPR006119,IPR038109, PF07508,IPR011109,SSF53041,PTHR30461,PS00397, PS51736,Coil,PF00239
MDNNSNIRVAIYIRVSTLYQIDKDSLPMQREDLTNYCKYIFNTEDYEIFEDAGYSGKNTGRPAYQEMMLKIRKKQFTHLLVWKIDRISRNLLDFSNMYEELKKYNVTFISKNEQFDTSSAMGEAMLKIILVFAELERKLTSERVSSTMISRATKGLWNGANVPLGYKWNEEKKYPSPDEKEAKVVQYIYSTYIQCKSCAKVSKILNEEDIPTKRGGKWTSKTVNDILRNPFYKGTYRYNYKESARGKKKDESEWIIIDNNHEAIIDKAIWQLANETLDTNAGLVGRRYVGKIHTHIFSRKLVCSKCKSGYNASKDTMRENGYTPSKYVCSGKVRKFICDAKLVSDVVLGPFVLTLIKNIILAGNMCIDTTDELEDILLDGSPFEDVLSINQEDLEMLYVALYKVPTQKSNITYSHIKDKQPKSLEDQENEYVKKRIEKFKKEKTKYINALERLEELYMFSEEGISKVDYVIKKKEYESKLNNSEENLKQFYRMNDTEKNIQDMTFILNYENIIFNRAMNDNNELDFKMLMTNVNNKVVKDLIDMVIKNIYMKDKAVDIIEFQNGLALHFNY

SEQ ID NO: 1309 - protein, 571 aa, Unknown
  Description of Unknown: Integrase B1310 sequence
  PTHR30461:SF3,IPR036162,PS51737,IPR011109,PTHR30461, PS00397,PF00239,G3DSA:1.10.10.2600,IPR006119,SSF53041, SM00857,IPR025827,IPR038109,PS51736,mobidb-lite, cd03768,IPR006118,PF13408,G3DSA:3.40.50.1390,PF07508,Coil
MTAISEKLNSKKVAIYIRVSTRYQVDKDSLQVQRRELIAYSEMILGTSDYVIFEDAGYSAKNTDRPDYQRMMDRLRTGEFSHLLVWKIDRISRNLLDFAEMYSELKKLGIAFVSKNEQFDTSNAVGEAMLKIILVFAELERQMTSERVTAVMLSRANNGQWNGGRIPYGYDYDKKTKQFSVNAKEADIVKKIYLLYDQYRSLIYVCRHLNNLGIKTRAGNEWNVPGVHKILTSPFYIGAYQYNVHNDRKGNKKNKEDEWVTIENHHQPIVSKTDFDRISKALSDNCLGGVSKNKTYLRKNIHTFAGIMRCGICGTSMTASLDSPHADGWSPSIYTCRKRRENTAICSNKMVSDSTFGGVIVNFIANIIRAKDTVTDQTTLSSLENILLKNLSSSGITGIERPGLEALKQAIISGKTGIEYNPPIAESGLSNTSSEKSLLESKHRSKESALSRLKSLYLYSDSGMSEREYASERNKIISELQDIEKRLGEIRSEDQETMISSEDFISRASYFVMVENLIGDSKIDYKKFSQTVDKSIQKSFFTSIIAEIDIVNGKVTSVVFKNAITVRFKYE

SEQ ID NO: 1310 - protein, 571 aa, Unknown
  Description of Unknown: Integrase B1311 sequence
  PTHR30461:SF3,SM00857,G3DSA:1.10.10.2600,IPR036162,PF13408, IPR025827,G3DSA:3.40.50.1390,PS51737,IPR006119,IPR038109, PF07508,SSF53041,IPR011109,PTHR30461,Coil, PS51736,cd00338,PF00239
MRDVKEDTKKIVRILLRVSSDQQLEADGDLSIQRQLVVEEVKKHEEWILDSKEYFEGSNSGYKNSVVDRDVLQEALRDAENKEYDILLAYKDDRLGRRMLEIPMYIMSLKQFGVDVYTVKDGLLTPDIGDVMGMLRLTMQYGMAEKSSSDTGIRVKDTAKKLVQQGKFMGGKAPYGYKLEYSGEYSKHQRALKHLVIVPEHAEVVKYIYKLSLYKEYGSGKIATTLNLDNRYKNLAPNDVWKSGTITSILTNPIYTGYTAYRRREHIGGRYRSLSQEDWIIAEKPNDEITIIDRDMWEKVQISRQKRGRKYQKQSWNEKATVISRNDGQLALIDVAYCGYCGRKLTNGTKYDYWTIKGTGERRSSQKSIYKCQNVWQGVPHEKMKQIRADKIEPIVFKKLSEYVGRLQEDENIFEQILENQSFEKKQQEQILVREKRKLQEIEKDMDILNDAIPKAITGTYPLPLEDLAKNIERQKDKAAKQKAVVDELEINIKNLSVSQEDWENLYHNLPTWQDIFMNADVATKRVLVNKLIERIDITDDTVVIHFKVDLDHFCSQPRETINERVSQSGL

SEQ ID NO: 1311 - protein, 571 aa, Unknown
  Description of Unknown: Integrase B1312 sequence
  PTHR30461:SF3,IPR036162,PS51737,IPR011109,PTHR30461, PS00397,PF00239,G3DSA:1.10.10.2600,IPR006119,SSF53041, SM00857,IPR025827,IPR038109,PS51736,cd03768, IPR006118,PF13408,G3DSA:3.40.50.1390,PF07508,Coil
MMQDRTAPASTNRVAIYIRVSTTHQIDKDSLPMQRQDLIAYAKLMLNTDDYVIFEDAGYSGKNTDRPKFQEMMSQIRQGAFSHLLVWKIDRISRNLLDFATMYKELKDLGVVFVSKNEQFDTSTAMGEAMLKIILVFAELERNMTSERVTATMISRASNGQWNGGRVPYGYNYDYETKDFSINPIEAEIVHLIHDKYEEMRSLVRESRYMNEKGLRTRAGNLWNPVSLHIILHNIFYCGDYRYNVLKEGDRQKVKDESEWITVEDHHESIISREQKERVIAMLDANKRLDRKRNTYQSEKYVHVFAGLLYCGNCGKPMGATPAAAKKDWQYSKYTCPTRRKLASACNGKFTSDPIVGEFVFNYVLNMLNVQKNFADIHSPEELQAALLIGNTFSYIDHIDEDGLNDLFNMLSSGKIKGTVFGKSAKLKKKKVVSELSKLRNEKQKIERALDRLTKLYLYAEDAMPESEFIIQKSKLTEALDEVNEQIGFSNTDEWNQSLSDEEFVRRASEFIIAQKLTDRNYVSYKRLATSVDTAVIKTFVQSIIDSIIMDAGQVKQIIFKNGLSHTFIFK

SEQ ID NO: 1312 - protein, 571 aa, Unknown
  Description of Unknown: Integrase B1313 sequence
  cd00338,SM00857,G3DSA:1.10.10.2600,IPR036162,PF13408, IPR025827,PS51737,G3DSA:3.40.50.1390,IPR006119,IPR038109, PF07508,IPR011109,SSF53041,PTHR30461,PS51736, Coil,PF00239
MTDVKEDTKKIVRILLRVSSDQQLEANGDLSIQRKLVVEEVKKHEEWILDSKEYFEGSNSGYKNSVADRDVLQEALRDAENREYDILLAYKDDRLGRRMLEIPMYIMSLKQFGVDVYTVKDGLLTPDLGDVMGMLKLAMQYGMAEKSSSDTGMRVKDTAKKLVQQGKFMGGKAPYGYKLEYSGEYSKHQRALKHLVIVPEHAEVVKYIYKLSLYKEYGSGKIATTLNLDNRYKNLAPNDVWKSGTITSILTNPIYAGYTAYGRRQHTAGRYRSLSQEDWIIAEKPNDEITIIDRDMWEKVQISRQKRGTKYQKQPWNEKATVISRNDGQLALIDVAYCGYCGRKLTNGTKYDYWTIKGTGERRSSQKSIYKCQNVWQGVPHEKMKQIRADKIEPIVFKKLSEYVGRLQEDENIFEQILENQSFEKSQQEQILVREKRNLQEIEKNIDILNDAIPNAITGTYPLSLEDLAKSIERQKDKASKQKTVVEELETNIKNLSVSQEDWENLYHNLPTWQDIFMNADVATKRVLVNKLIERIDITDDTVVIHFKVDLDHFCPQPRMTNYDGVPEPGL

SEQ ID NO: 1313 - protein, 571 aa, Unknown
  Description of Unknown: Integrase B1314 sequence
  PTHR30461:SF3,IPR036162,PS51737,IPR011109,PTHR30461, PS00397,PF00239,G3DSA:1.10.10.2600,IPR006119,SSF53041, SM00857,IPR025827,IPR038109,PS51736,cd03768, IPR006118,PF13408,G3DSA:3.40.50.1390,PF07508,Coil
MMQDRTAPASTNRVAIYIRVSTTHQIDKDSLPMQRQDLIAYAKLMLNTDDYVIFEDAGYSGKNTDRPKFQEMMSQIRQGAFSHLLVWKIDRISRNLLDFATMYKELKDLGVVFVSKNEQFDTSTAMGEAMLKIILVFAELERNMTSERVTATMISRASNGQWNGGRVPYGYNYDYETKDFSINPIEAEIVRLIHDKYEEMRSLVRESRYLNEKGLRTRAGNLWNPVSLHIILHNIFYCGDYRYNVLKEGDRQKVKDESEWITVEDHHEPIISREQKERVIAMLDANKRLDRKRNTYKSEKYVHVFAGLLYCGNCGKPMGATPAAAKKDWQYSKYTCPTRRKLASACNGKFTSDPIVGEFVFNYVLNMLNVQKNFADIHSPEELQAALLIGNTFSYIDHIDEDGLNDLFNMLSSGKIKGTVFGKSAKLKKKKVVSELSKLRNEKQKIERALDRLTKLYLYAEDAMPESEFIIQKSKLTEALDEVNEQIGFSNTDEWNQSVSDEEFVRRASEFIIAQKLTDRNYVSYKRLATSVDTAVIKTFVQGIIDSIIMDAGQVKQIIFKNGLSHTFIFK

SEQ ID NO: 1314 - protein, 571 aa, Unknown
  Description of Unknown: Integrase B1315 sequence
  PTHR30461:SF3,cd00338,SM00857,G3DSA:1.10.10.2600,IPR036162, PF13408,IPR025827,G3DSA:3.40.50.1390,PS51737,IPR006119, IPR038109,PF07508,IPR011109,SSF53041,PTHR30461, PS51736,Coil,PF00239
MICVDQNGQAVEISVADQMWLDDAYFKEKQMRLEPNAPRAALAYRVSTKGQVDHDDIPMQKIDCRKFAQKQGWRVVKEVAEKGVSGSKVSASKRDAIQQLKEEAANGEFDILLVYMFDRLGRIESETPFVLEWFVQHGIQMWSTHEGQQKIETHGDKLMNYIRFWQAAGESEKTSIRTRDRIRQIVSSGHYTGGFVCYGYQLVDQGRRNKRDKPVMDLVINEEESTWVRELFYKVIQEGASGYALAEMLNNRGLRTRAGAKFQSSNIIRIIRHEGYTGYIITKNARSEYIPELQIIDRETFDKANDIINRRKAKSEQERKIAHTSQNPTLLAGIVYCAHCGAKMSGFMHTDRYKLADGSIREKVQPKYNCFQRGQRNKGGRDCDGQALYLAEKVDAIVLQAVSKIFEQIRDTPYSRMAENRIRQESNLQKSKRASVEKKIKTAQHALERFEGEILKCLDGTSNFTEDMIAKQIRRYQQELDDAKAEYAALQNARLNEAAEIRKLRTYYDEFRGWAEEFDAAPLEIKRMILSQLIERVEVGRKYQVTIKLNMEYQQFLEITEEQKLIPLISA

SEQ ID NO: 1315 - protein, 571 aa, Unknown
  Description of Unknown: Integrase B1316 sequence
  PTHR30461:SF3,IPR036162,PS51737,IPR011109,PTHR30461, PS00397,PF00239,G3DSA:1.10.10.2600,IPR006119,SSF53041, SM00857,IPR025827,IPR038109,PS51736,cd03768, IPR006118,PF13408,G3DSA:3.40.50.1390,PF07508,Coil
MMQDRTAPASTNRVAIYIRVSTTHQIDKDSLPMQRQDLIAYAKLMLNTDDYVIFEDAGYSGKNTDRPKFQEMMSQIRQGAFSHLLVWKIDRISRNLLDFATMYKELKDLGVVFVSKNEQFDTSTAMGEAMLKIILVFAELERNMTSERVTATMISRASNGQWNGGRVPYGYNYDYEAKDFSINPIEAEIVRLIHDKYEEMRSLVRESRYLNEKGLRTRAGNLWNPVSLHIILHNIFYCGDYRYNVLKEGDRQKVKDESEWITVEDHHEPIISREQKERVIAMLDANKRLDRKRNTYQSEKYVHVFAGLLYCGNCGKPMGATPAAAKKDWQYSKYTCPTRRKLSSACNGKFTSDPIVGEFVFNYVLNMLNVQKNFADIHSPEELQAALLIGNTFSYIDHIDEDGLNDLFNMLSSGKIKGTVFGKSAKLKKKKVVSELSKLRNEKQKIERALDRLTKLYLYAEDAMPESEFIIQKSKLTEALDEVNEQIGFSNTDEWNQSVSDEEFVRRASEFIIAQKLTDRNYVSYKRLATSVDTAVIKTFVQGIIDSIIMDAGQVKQIIFKNGLSHTFIFK

SEQ ID NO: 1316 - protein, 571 aa, Unknown
  Description of Unknown: Integrase B1317 sequence
  cd03768,PTHR30461:SF3,SM00857,G3DSA:1.10.10.2600,IPR036162, PF13408,PS51737,G3DSA:3.40.50.1390,IPR025827,IPR006119, IPR038109,PF07508,IPR011109,SSF53041,PTHR30461, PS51736,Coil,PF00239
MKTTDQPQVKQYVIYSRKSKFTGKGESIENQIELCRQYIAMHFGEDEAEHALVYEDEGFSGGNLERPQFKQMMKDSQKIEFAAIVVYRLDRISRNIGDFAKLIEDLGDRHIDFISIREQFDTSSPMGRAMMYIASVFSQLERETIAERIRDNMHELSKTGRWLGGTTPTGYASESLSSVTVDGKVKKACKLKPIPEEIQLVKTIFSVFTESGSLSKTDQYLLEHRCVTKRGKQFTRFAIRGILTNPVYMIADDTAYQYLKENNVDLFAEPSEFDGEHGIMAYNRTLQRPGKATQIRPMEDWIVAVGKHPGIISGANWVRVQSMLDVNKSKSYRRPRSNVALLSGLLRCGECGDYMRPKLTGRTNANGELIYTYMCSTKERSHGAVCSMKNCNGNTLDAKIVEEIRKVATDKKDFGQLLSKTKKVINDNKASYEAELTLLVKNHAETEARIKRLVESLSVASETSAKYVMEQIDELHRQSEQEQTRIAELEKLARQSNALSQNLFFYRDMIESFADTVDSTTIEERRRLLRTIVKKVVWDGKNVYVYLFAEDGELNLPPIGQLMCPSGEDSE

SEQ ID NO: 1317 - protein, 571 aa, Unknown
  Description of Unknown: Integrase B1318 sequence
  SM00857,G3DSA:1.10.10.2600,IPR036162,PF13408,IPR025827, G3DSA:3.40.50.1390,PS51737,IPR006119,IPR038109,PF07508, SSF53041,IPR011109,PTHR30461,Coil,PS51736, cd00338,PF00239
MNIYHARETLRTCSIYDLKLRVAYYARVSTDRAEQQVSISHQTEYFENLIRSNPNWEFVGAYVDDGISGMHAEKREDFQNMLRDAKAGKIDMIITKEISRFARNTLDSIKYTRELLSCGVCVWFQNDGINTIDEDSELRLTIMAGVAQDELRKLSSRVKFGHARSIQNGVVLGNRIYGYKKKDGKLTVIPEEAEMVRMIFRDYAAGVSTPKIEKKLWDMGYRNSKGSKIDRNVIRHIIKNPKYKGYFCGGKVKIVDMFTKKQEFIPESEWIMFKDDGSRVPQIIDEETWEKANQYMTMRGDAIKTRRTSFKSENLFTGMIFCSNDNAPYWLKQHYIRGKEDVRWVCSHKIKNGAASCNSFGIKESELKIMVSDLINESSCNIEEVIKKYLELLRRAIDNKPDSKAEIDRLQKQIESINKKKEKILEYNLDGNISDEEFIQRNKGYNEQIQKLNSQISDLTPNQDDFVSAEMQFKNIIDTLKKFNGVESEDINRQIVEELFEKIVVKSFEGNKATLTFYLKTGEVKKKQVSMSCSEYMLFNIIPERHKRFYRKTCISGASEIAFNYEYRMVI

SEQ ID NO: 1318 - protein, 571 aa, Unknown
  Description of Unknown: Integrase B1319 sequence
  cd03768,PTHR30461:SF3,SM00857,G3DSA:1.10.10.2600,IPR036162, PF13408,PS51737,G3DSA:3.40.50.1390,IPR025827,IPR006119, IPR038109,PF07508,IPR011109,SSF53041,PTHR30461, PS51736,Coil,PF00239
MLKIAIYSRKSKFTGKGDSIENQIEMCKDYTLSTISKDVEFTVYEDEGFSGGNLDRPNFKKLMSAIKNKKFNILVCYRLDRISRNVADFSSTLEILQSNNCSFISIKEQFDTSSPMGRAMIYIASVFAQLERETIAERVKDNMLEIAKNGKWTGGKIPLGFTSDKIEYIDEKGITRTSPQLIINEKEMKFVNFLYNKYLELGSLHKLEVYIHENNIRSRNDILYEKSSLKTILQNPIYVKANDDVVEYLNNSNWTVYGKPDNIHSLLTYNKTEQTKKDGKYTKVKKDLSERLAAVSSIKGYIEPELWLSVQKQFDKNKNTFPRLGKTHNALLVGKIRCGKCKEYMLISHGRISKTTGEKLFYYTCSLKKKSRKKLCDNGNAKAADLEKLVLLSLKQLSINKKDFLSKIRDKYKTDETYKNLDLDKLSLNKSLKEKKLQIDNLVTKLSLCNDIEDILLNKIKDLKDECTNIEKSLTELNSKTLTLKNNLLNLDLIESLLTKCSIIDKLDKSEQKLIIDNLIDTVYWYSDGPGKGKIKIKFVGTDDNQKEISFSIKEMQQLMLHFYSHSMSSI

SEQ ID NO: 1319 - protein, 571 aa, Unknown
  Description of Unknown: Integrase B1320 sequence
  PTHR30461:SF3,IPR036162,PS51737,IPR011109,PTHR30461, PS00397,PF00239,G3DSA:1.10.10.2600,IPR006119,SSF53041, SM00857,IPR025827,IPR038109,PS51736,cd03768, IPR006118,PF13408,G3DSA:3.40.50.1390,PF07508,Coil
MMQDRTAPASTNRVAIYIRVSTTHQIDKDSLPMQRQDLIAYAKLMLNTDDYVIFEDAGYSGKNTDRPKFQEMMSQIRQGAFSHLLVWKIDRISRNLLDFATMYKELKDLGVVFVSKNEQFDTSTAMGEAMLKIILVFAELERNMTSERVTATMISRASNGQWNGGRVPYGYNYDYETKDFSTNPIEAEIVHLIHDKYEEMRSLVRESRYLNEKGLRTRAGNLWNPVSLHIILHNIFYCGDYRYNVLKEGDRQKVKDESEWITVENHHEPIISREQKERVIAMLDANKRLDRKRNTYQSEKYVHVFAGLLYCGNCGKPMGATPAAAKKDWQYSKYTCPTRRKLASACNGKFTSDPIVGEFVFNYVLNMLNVQKNFADIHSPEELQAALLIGNTFSYIDHIDEDGLNDLFNMLSSGKIKGTVFGKSAKPKKKKVVSELSKLRNEKQKIERALDRLTKLYLYAEDAMPESEFIIQKSKLTEALDEVNEQIGFSNTDEWNQSVSDEEFVRRASEFIIAQKLTDRNYVSYKRLATSVDTAVIKTFVQSIIDSIIMDAGQVKQIIFKNGLSHTFIFK

SEQ ID NO: 1320 - protein, 571 aa, Unknown
  Description of Unknown: Integrase B1321 sequence
  PTHR30461:SF3,IPR036162,PS51737,IPR011109,PTHR30461, PS00397,PF00239,G3DSA:1.10.10.2600,IPR006119,SSF53041, cd00338,SM00857,IPR025827,IPR038109,PS51736, IPR006118,PF13408,G3DSA:3.40.50.1390,PF07508,Coil
MSIRDKLSALKVAIYIRVSTHWQVDKDSLKVQERELIAYCQMVLGINDYVVFTDPGYSAKNTDRPDYQAMMDRIRTGEFSHLLVWKIDRISRNIIDFATMSEELKHLGVAFVSKNEQFDTSTAMGEAMLQIIMVFAQFERKQTSERVTAVMLSRAGNGQWNGGRVPYGYLWDKETASFQLCETEAGYVRRMAQLYEEHQSLLHVVKWLNDAGVKTRRGFAWTPTSVHVILTNPWYIGQYVYNVHSDGKGVERRDESEWVCVEHHHEPILSEDQFYRIKFLLTRNRRGTPTPGKSYARKHTHIFSGLMRCGICGSNMSASADRRRANGFRPSQYACASRRRKGTTCTNKYISDLTVGSFVLNYAANIIRAARNSAADVQPDVLERKLLRGETFKDVEGINSEAIQQLLSSFAEAGEAVEYRPQYAFTSASGEGRDMDNLRARKRKLETALSRLNALFLYDDEAMPEKDFIVERTNIERQLAETGKRIAELAATGLSSSEDSSDFLKKASYFIMVNKLIEDASVDYEKLVRTLDPTAIRDFVLNIVQEVEATDGRITAITFRNGTAHRFKYKT

SEQ ID NO: 1321 - protein, 570 aa, Unknown
  Description of Unknown: Integrase B1322 sequence
  PTHR30461:SF3,SM00857,G3DSA:1.10.10.2600,IPR036162,PF13408, PS51737,G3DSA:3.40.50.1390,IPR025827,IPR006119,IPR038109, PF07508,IPR011109,SSF53041,PTHR30461,Coil, PS51736,cd00338,PF00239
MNIYYVREKLRNCSIYDIELNVAYYARVSTEKVEQQASIKHQEEHFEELIHSNNRWKFAGSYIDDGISGMHADKREEFQRMLRDAKLGKIDMIITKEISRFARNTLDSIQYTRELLSYGVCVWFQNDGINTIDDDSEFRLTIMAGVAQDEIRKLSSRVKFGHAQSIKNGVVLGHRMYGYSNNQGKLELIPEEADMVRMVFRDYASGMSTPRIEKKLWNMGYRSFKGGKISRDVIKNIIRNPKYKGYYCGGKVKVVDMFTKKQEFLPQSEWIMFKDDGSRVPQIIDETTWEKANAYLRERGEAIKSRRTSFKNENIFTGKLFCANDGAPYWMKQHYIRGKEDVRWVCSYKIKNGAASCDSFGLAESELKEVIADLINESSENIDNILKEYFEILQSTIKNIPDNKSEISRLEKQIETLKQKREKILEYNLDGKISDDEFISRNKEYVKQIKQTESHIRELQNIKSPEPVEIQLSAIKEQLEKFKGVTPKDINRQIVNELFEKITVEPLAATCATLTFQLRSGSLEKWGFPLRCSDDMILTLHSEQHKIFSRKTCIKTQDMVFFKYKYLLAL

SEQ ID NO: 1322 - protein, 570 aa, Unknown
  Description of Unknown: Integrase B1323 sequence
  PTHR30461:SF3,SM00857,G3DSA:1.10.10.2600,IPR036162,PF13408, PS51737,G3DSA:3.40.50.1390,IPR025827,IPR006119,IPR038109, PF07508,IPR011109,SSF53041,PF00239,PTHR30461, PS51736,Coil,cd00338
MNIYYVREKLRSCSIYDIELNVAYYARVSTEKLEQQVSIKHQEEHFEELIHSNNRWRFAGSYIDDGISGMNANKREEFQRMLRDAKLGKIDMIITKEISRFARNTLDSIQYTRELLSYGVCVWFQNDGINTIDEDSELRLTIMAGVAQDEIRKLSSRIKFGHAQSIKNGVVLGHRMYGYSNNQGKLELIPEEADMVRMVFRDYASGMSTPRIEKKLWNMGYRSFKGGKISRDVIKNIIRNPKYKGYYCGGKVKIVDMFTKKQEFLPQSEWVMFKDDGSRVPQIIDETTWEKANAYLRERGEAIKSRRTSFKSENIFTGKLFCANDGAPYWMKQHYIRGKEDVRWVCSYKIKNGAASCNSFGLAESELKEVIAELINKSSENIDSILEEYFEILQSSIKNIPDNKNEISRLEKQIDLLKQKREKILEYNLDGKISDDEFVSRNKEYVKQIKQTESHIRELQNIKSPEPAEIQLSAIKEQLEKFKGVTPQDINRQIVNELFEKITVEPLAVTCATLTFQLRSGSLEKWGFPLRRSDDMILTLHSEQHKIFSRKTCIKTQDMVFFKYKYLLAL

SEQ ID NO: 1323 - protein, 570 aa, Unknown
  Description of Unknown: Integrase B1324 sequence
  PTHR30461:SF3,SM00857,G3DSA:1.10.10.2600,IPR036162,PF13408, PS51737,G3DSA:3.40.50.1390,IPR025827,IPR006119,IPR038109, PF07508,IPR011109,SSF53041,PF00239,PTHR30461, PS51736,Coil,cd00338
MNIYYVREKLRSCSIYDIELNVAYYARVSTEKIEQQASIKHQEEHFEELIHSNNRWKFAGSYIDDGISGIHADKREEFQRMLRDAKLGKIDMIITKEISRFARNTLDSIQYTRELLSYGVCVWFQNDGINTIDDDSEFRLTIMAGVAQDEIRKLSSRVKFGHAQSIKNGVVLGHRMYGYSNNQGKLELVPEEADMVRMIFQDYASGISTPRIEKKLWDMGYRSFKGGKINRDVIKNIIRNPKYKGYYCGGKVKVVDMFTKKQEFLPQSEWIMFKDDGSRVPQIIDETTWEKANAYLRERGEAIKSRRTSFKNENIFTGKLFCANDGAPYWMKQHYTRGKEDVRWVCSYKIKNGAASCDSFGLAESELKEIIAELINKSSENIDSILEEYFEILQSSIKNIPDNKNEISRLEKQIDLLKQKREKILEYNLDGKISDDEFISRNKEYVKQIKQIESHILEIQNTKSPEPVEIQLSAIKEQLEKFKGVTPQDINRQIVNELFEKITVEPLAVTCATLTFQLRSGSLEKWGFPLRRSDDMILTLHSEQHKIFSRKTCIKTQDMVFFKYKYLLAL

SEQ ID NO: 1324 - protein, 570 aa, Unknown
  Description of Unknown: Integrase B1325 sequence
  PTHR30461:SF3,SM00857,G3DSA:1.10.10.2600,IPR036162,PF13408, PS51737,G3DSA:3.40.50.1390,IPR025827,IPR006119,IPR038109, PF07508,IPR011109,SSF53041,PF00239,PTHR30461, PS51736,Coil,cd00338
MNIYYVREKLRSCSIYDIELNVAYYARVSTEKLEQQASIKHQEEHFEELIHSNSKWKFAGSYIDDGISGMHADKREEFQRMLRDAKLGKIDMIITKEISRFARNTLDSIQYTRELLSYGVCVWFQNDGINTIDDDSEFRLTIMAGVAQDEIRKLSSRVKFGHAQSIKNGVVLGHRMYGYSNNQGKLELIPEEADMVRMIFQDYASGISTPRIEKKLWNMGYRNFKGGKINRDVIKNIIRNPKYKGYYCGGKVKVIDMFTKKQEFLPQSEWVMFKDDGSRVPQIIDETTWEKANAYLRERGEAIKSRRTSFKNENIFTGKLFCANDGAPYWMKQHYIRGKEDVRWVCSYKIKNGAASCNSFGLAESELKEVIAELINKSSENIDSILEEYFEILQSSIKNIPDNKNEISRLEKQIDMLKQKREKILEYNLDGKISDDEFISRNKEYVKQIKQTENYIQELQNIKSPEPVETQLSAIKEQLEKFKGVTPQDINRQIVNELFEKITVEPLAVTCATLTFQLRSGSLEKWGFPLRRSDDMILTLHSEQHKIFSRKTCIKTQHMVFYKYKYLLAL

SEQ ID NO: 1325 - protein, 570 aa, Unknown
  Description of Unknown: Integrase B1326 sequence
  PTHR30461:SF3,SM00857,G3DSA:1.10.10.2600,IPR036162,PF13408, PS51737,G3DSA:3.40.50.1390,IPR025827,IPR006119,IPR038109, PF07508,IPR011109,SSF53041,PF00239,PTHR30461, PS51736,Coil,cd00338
MNIYYVREKLRSCSIYDIELNVAYYARVSTEKLEQQVSIKHQEEHFEELIHSNNRWRFAGSYIDDGISGMNANKREEFQRMLRDAKLGKIDMIITKEISRFARNTLDSIQYTRELLSYGVCVWFQNDGINTIDEDSELRLTIMAGVAQDEIRKLSSRIKFGHAQSIKNGVVLGHRMYGYSNNQGKLELIPEEADMVRMVFRDYASGMSTPRIEKKLWNMGYRSFKGGKISRDVIKNIIRNPKYKGYYCGGKVKIVDMFTKKQEFLPQSEWVMFKDDGSRVPQIIDETTWEKANAYLRERGEAIKSRRTSFKSENIFTGKLFCANDGAPYWMKQHYIRGKEDVRWVCSYKIKNGAASCNSFGLAESELKEVIAELINKSSENIDSILEEYFEILQSSIKNIPDNKNEISRLEKQIDLLKQKREKILEYNLDGKISDDEFVSRNKEYVKQIKQTESHIRELQNIKSPEPAEIQLSAIKEQLEKFKGVTPQDINRQIVNELFEKITVEPLAVTCATLTFQLRSGSLEKWGFPLRRSDDMIFTLHPEQHKVFSRKTCIKTQDMVFYKYKYLLAL

SEQ ID NO: 1326 - protein, 570 aa, Unknown
  Description of Unknown: Integrase B1327 sequence
  PTHR30461:SF3,SM00857,G3DSA:1.10.10.2600,IPR036162,PF13408, IPR025827,G3DSA:3.40.50.1390,PS51737,IPR006119,IPR038109, PF07508,IPR011109,SSF53041,PTHR30461,Coil, PS51736,cd00338,PF00239
MNIYYVREKLRNCSIYDIELNVAYYARVSTEKVEQQASIKHQEEHFEELIHSNNRWKFAGSYIDDGISGMHADKREEFQRMLRDAKLGKIDMIITKEISRFARNTLDSIQYTRELLSYGVCVWFQNDGINTIDDDSEFRLTIMAGVAQDEIRKLSSRVKFGHAQSIKNGVVLGHRMYGYSNNQGKLELVPEEADMVRMIFQDYASGISTPRIEKKLWDMGYRSFKGGKINRDVIKNIIRNPKYKGYYCGGKVKVVDMFTKKQEFLPQSEWIMFKDDGSRVPQIIDETTWEKANAYLRERGEAIKSRRTSFKNENIFTGKLFCANDGAPYWMKQHYIRGKEDVRWVCSYKIKNGAASCTSFGLAESELKEVIADLINKSSENIDSILEEYFEILQSSIKNIPDNKNEISRLEKQIDLLKQKREKILEYNLDGKISDDEFISRNKEYVKQIKQIESHILEIQNTKSPEPVEIQLSAIKEQLEKFKGVTPQDINRQIVNELFEKITVEPLAVTCATLTFQLRSGSLEKWGFPLRRSDDMILTLHPEQHKIFSRKTCIKTQDMVFFKYKYLLAL

SEQ ID NO: 1327 - protein, 570 aa, Unknown
  Description of Unknown: Integrase B1328 sequence
  PTHR30461:SF3,SM00857,G3DSA:1.10.10.2600,IPR036162,PF13408, PS51737,G3DSA:3.40.50.1390,IPR025827,IPR006119,IPR038109, PF07508,IPR011109,SSF53041,PF00239,PTHR30461, PS51736,Coil,cd00338
MNIYYVREKLRSCSIYDIELNVAYYARVSTEKVEQQASIKHQEEHFEELIRSNNRWKFAGSYIDDGISGMHADKREEFQRMLKDAKLGKIDMIITKEISRFARNTLDSIQYTRELLSYGVCVWFQNDGINTIDDDSEFRLTIMAGVAQDEIRKLSSRVKFGHAQSIKNGVVLGHRMYGYSNNKGKLELIPEEADMIRIIFQDYASGISTPRIEKKLWDMGYRSFKGGKINRDVIKNIIRNPKYKGYYCGGKVKVVDMFTKKQEFLPQSEWIMFKDDGSRVPQIIDETTWEKANAYLRERGEAIKSRKTSFKSENIFTGKLFCANDGAPYWMKQHYIRGKEDVRWVCSYKIKNGAASCDSFGLAESELKEVIAELINKSSENIDSILEEYFEILQSLIKNIPDNKNEISRLEKQIDLLKQKREKILEYNLDGKISDDEFISRNKEYMKQIKQIESHILEIQNTKSPEPVEIQLSAIKEQLEKFKGVTPKDINRQIVNELFEKITVEPLAATCATLTFQLRSGNLEKRGFPLRCSDDMIFTLHSEQHKIFSRKTCIKTQDMVFFKYKYLLAL

SEQ ID NO: 1328 - protein, 570 aa, Unknown
  Description of Unknown: Integrase B1329 sequence
  PTHR30461:SF3,SM00857,G3DSA:1.10.10.2600,IPR036162,PF13408, PS51737,G3DSA:3.40.50.1390,IPR025827,IPR006119,IPR038109, PF07508,IPR011109,SSF53041,PF00239,PTHR30461, PS51736,Coil,cd00338
MNIYYVREKLRNCSIYDIELNVAYYARVSTEKVEQQASIKHQEEHFEELIHSNNRWKFAGSYIDDGISGMHADKREEFQRMLRDAKLGKIDMIITKEISRFARNTLDSIQYTRELLSYGVCVWFQNDGINTIDDDSEFRLTIMAGVAQDEIRKLSSRVKFGHAQSIKNGVVLGHRMYGYSNNQGKLELIPEEADMVRMIFQDYASGISTPRIEKKLWDMGYRSFKGGKINRDVIKNIIRNPKYKGYYCGGKVKVVDMFTKKQEFLPQSEWIMFKDDGSRVPQIIDETTWEKANAYLRERGEAIKSRRTSFKNENIFTGKLFCANDGAPYWMKQHYIRGKEDVRWVCSYKIKNGAASCDSFGLAESELKEVIADLINESSENIDNILKEYFEILQSTIKNIPDNKSEISRLEKQIETLKQKREKILEYNLDGKISDDEFISRNKEYVKQIKQTESHIRELQNIKSPEPVEIQLSAIKEQLEKFKGVTPKDINRQIVNELFEKITVEPLAATCATLTFQLRSGSLEKWGFPLRCSDDMILTLHPEQHKIFSRKTCIKTQHMVFYKYKYLLAL

SEQ ID NO: 1329 - protein, 570 aa, Unknown
  Description of Unknown: Integrase B1330 sequence
  PTHR30461:SF3,SM00857,G3DSA:1.10.10.2600,IPR036162,PF13408, IPR025827,G3DSA:3.40.50.1390,PS51737,IPR006119,IPR038109, PF07508,SSF53041,IPR011109,PTHR30461,Coil, PS51736,cd00338,PF00239
MNIYYVREKLRSCSIYDIELNVAYYARVSTEKIEQQASIKHQEEHFEELIHSNNRWKFAGSYIDDGISGMHADKREEFQRMLRDAKLGKIDMIITKEISRFARNTLDSIQYTRELLSYGVCVWFQNDGINTIDEDSELRLTIMAGVAQDEIRKLSSRIKFGHAQSIKNGVVLGHRMYGYSNHQGKLELIPEEADMVRMVFRDYASGMSTPRIEKKLWNMGYRSFKGGKISRDVIKNIIRNPKYKGYYCGGKVKIVDMFTKKQEFLPQSEWVMFKDDGSRVPQIIDEITWEKANAYLRERGEAIKSRKTSFKSENIFTGKLFCANDGAPYWMKQHYIRGKEDVRWVCSYKIKNGAASCDSFGLAESELKEVIAELINKSSENIDSILEEYFEILQSSIKNIPDNKNEISRLEKQIDLLKQKREKILEYNLDGKISDDEFISRNKEYVKQIKQIESHILEIQNTKSPEPVEIQLSAIKEKLEKFKGVNPKDINRQIVNELFEKITVEPLAATCATLTFQLRSGNLEKWGFPLRCSDDMIFTLHSEQHKIFSRKTCIKTQDMVFFKYKYLLAL

SEQ ID NO: 1330 - protein, 570 aa, Unknown
  Description of Unknown: Integrase B1331 sequence
  PTHR30461:SF3,SM00857,G3DSA:1.10.10.2600,IPR036162,PF13408, PS51737,G3DSA:3.40.50.1390,IPR025827,IPR006119,IPR038109, PF07508,IPR011109,SSF53041,PTHR30461,Coil, PS51736,cd00338,PF00239
MNIYYVREKLRSCSIYDIELNVAYYARVSTEKVEQQASIKHQEEHFEELIHSNNRWKFAGSYIDDGISGMHADKREEFQRMLRDAKLGKIDMIITKEISRFARNTLDSIQYTRELLSYGVCVWFQNDGINTIDDDSEFRLTIMAGVAQDEIRKLSSRVKFGHAQSIKNGVVLGHRMYGYSNNQGKLELIQEEADMVRMIFQDYASGISTPRIEKKLWNMGYRNFKGGKINRDVIKNIIRNPKYKGYYCGGKVKVIDMFTKKQEFLPQSEWVMFKDDGSRVPQIIDENTWEKANAYLRERGEAIKSRRTSFKNENIFTGKLFCANDGAPYWMKQHYIRGKEDVRWVCSYKIKNGAASCNSFGLAESELKEVIAELINKSSENIDSILEEYFEILQSSIKNIPDNKNEISRLEKQIDMLKQKREKILEYNLDGKISDDEFISRNKEYVKQIKQTENHIRELQNTKSPEPVETQLSAIKEQLEKFKGVTPQDINRQIVNELFEKITVEPLAVTCATLTFKLRSGSLEKWRFPLRRSDDMILTLHPEQHKIFSRKTCIKTQHMVFYKYKYLLAL

SEQ ID NO: 1331 - protein, 570 aa, Unknown
  Description of Unknown: Integrase B1332 sequence
  PTHR30461:SF3,SM00857,G3DSA:1.10.10.2600,IPR036162,PF13408, IPR025827,G3DSA:3.40.50.1390,PS51737,IPR006119,IPR038109, PF07508,IPR011109,SSF53041,PTHR30461,Coil, PS51736,cd00338,PF00239
MNIYYVREKLRNCSIYDIELNVAYYARVSTEKVEQQASIKHQEEHFEELIHSNNRWKFAGSYIDDGISGIHADKREEFQKMLRDAKLGKIDMIITKEISRFARNTLDSIQYTRELLSYGVCVWFQNDGINTIDEDSELRLTIMAGVAQDEIRKLSSRIKFGHAQSIKNGVVLGHRMYGYSNHQGKLELIPEEADMVRMVFRDYASGMSTPRIEKKLWNMGYRSFKGGKISRDVIKNIIRNPKYKGYYCGGKVKVVDMFTKKQEFLPQSEWIMFKDDGSRVPQIIDETTWEKANAYLRERGEAIKSRRTSFKNENIFTGKLFCANDGAPYWMKQHYIRGKEDVRWVCSYKIKNGADSCDSFGLAESELKEVIAELINKSSENIDSILEEYFEILQSSIKNIPDNKNEISRLEKQIDLLKQKREKILEYNLDGKISDDEFISRNKEYVKQIKQIESHILEIQNTKSPEPVEIQLSAIKEQLEKFKGVNPKDINRQIVNELFEKITVEPLAATCATLTFQLRSGSIEKWGFPLRRSDDMILTLNSEQHKIFSRKTCIKTQDMVFFKYKYLLAL

SEQ ID NO: 1332 - protein, 570 aa, Unknown
  Description of Unknown: Integrase B1333 sequence
  PTHR30461:SF3,SM00857,G3DSA:1.10.10.2600,IPR036162,PF13408, PS51737,G3DSA:3.40.50.1390,IPR025827,IPR006119,IPR038109, PF07508,SSF53041,IPR011109,PF00239,PTHR30461, PS51736,Coil,cd00338
MNIYYVREKLRNCSIYDIELNVAYYARVSTEKVEQQASIKHQEEHFEELIHSNNRWKFAGSYIDDGISGMHADKREEFQRMLRDAKLGKIDMIITKEISRFARNTLDSIQYTRELLSYGVCVWFQNDGINTIDDDSEFRLTIMAGVAQDEIRKLSSRVKFGHAQSIKNGVVLGHRMYGYSNNQGKLELIPEEADMVRMIFEDYASGISTPRIEKKLWDMGYRSLKGGKINRDVIKNIIRNPKYKGYYCGGKVKVVDMFTKKQEFLPQSEWIMFKDDGSRVPQIIDETTWEKANAYLRERGEAIKSRRTSFKNENIFTGKLFCANDGAPYWMKQHYIRGKEDVRWVCSYKIKNGAASCDSFGLAESELKEVIADLINESSENIDNILKEYFEILQSTIKNIPDNKSEISRLEKQIETLKQKREKILEYNLDGKISDDEFISRNKEYVKQIKQTESHIRELQNIKSPEPVEIQLSAIKEQLEKFKGVTPKDINRQIVNELFEKITVEPLAATCATLTFQLRSGSLEKWGFPLRCSDDMIFTLHSEQHKIFSRKTCIKTQDMVFFKYKYLLAL

SEQ ID NO: 1333 - protein, 570 aa, Unknown
  Description of Unknown: Integrase B1334 sequence
  PTHR30461:SF3,SM00857,G3DSA:1.10.10.2600,IPR036162,PF13408, PS51737,G3DSA:3.40.50.1390,IPR025827,IPR006119,IPR038109, PF07508,IPR011109,SSF53041,PF00239,PTHR30461, PS51736,Coil,cd00338
MNIYYVREKLRNCSIYDIELNVAYYARVSTEKVEQQASIKHQEEHFEELIHSNNRWKFAGSYIDDGISGMHADKREEFQRMLRDAKLGKIDMIITKEISRFARNTLDSIQYTRELLSYGVCVWFQNDGINTIDDDSEFRLTIMAGVAQDEIRKLSSRVKFGHAQSIKNGVVLGHRMYGYSNNQGKLELIPEEADMVRMVFRDYASGMSTPRIEKKLWNMGYRSFKGGKISRDVIKNIIRNPKYKGYYCGGKVKVVDMFTKKQEFLPQSEWIMFKDDGSRVPQIIDETTWEKANAYLRERGEAIKSRRTSFKNENIFTGKLFCANDGAPYWMKQHYIRGKEDVRWVCSYKIKNGAASCTSFGLAESELKEVIADLINKSSENIDSILEEYFEILQSSIKNIPDNKNEISRLEKQIDLLKQKREKILEYNLDGKISDDEFISRNKEYVKQIKQIESHILEIQNTKSPEPVEIQLSAIKEQLEKFKGVTPQDINRQIVNELFEKITVEPLAVTCATLTFQLRSGSLEKWGFPLRRSDDMILTLHPEQHKIFSRKTCIKTQDMVFYKYKYLLAL

SEQ ID NO: 1334 - protein, 570 aa, Unknown
  Description of Unknown: Integrase B1335 sequence
  PTHR30461:SF3,cd00338,SM00857,G3DSA:1.10.10.2600,IPR036162, PF13408,IPR025827,G3DSA:3.40.50.1390,PS51737,IPR006119, IPR038109,PF07508,SSF53041,IPR011109,PTHR30461, PS51736,Coil,PF00239
MICVDQNGQAVEISVADQMWLDDAYFKEKQLRLGTDAPRAALAYRVSTKGQVDHDDIPMQKIDCRKFAQKQGWRVVKEVAEKGVSGSKVSASKRDAIQQLKEEAANGEFDILLVYMFDRLGRIESETPFVLEWFVQHGIEMWSTHEGQQKIETHGDKLMNYIRFWQAAGESEKTSIRTRDRIRQIVSSGHYTGGFVCYGYQLVDQGRRNKRDKPVMDLVINEEEATWVRELFYKVIQEGTSGYALAEMLNNRGLRTRAGAKFQSSNILRIIRHEGYTGYIITKNARSEYIPELQIIDQETFEKANDIISRRSAKTAQDRRIAHTSQNPTLLAGIVYCAHCGAKMSGFMHTDRYKLADGSIREKVQPKYNCFQRGQRNKGGRDCDGQALYLAERVDAIVLKIVEEVFEQIRDTPYSQVAENRIRQESNLQKTKRAAAEKKIKAAQHALERFEGEILKCLDGTSNFTEDMIAKQIRRYQQELDDAKAEYAELQNARLNEAAEIRKLRTYYDDFKGWAEEFDTAPLEMKRMILSHLIDRVEVGRKYQVIVKFNMKYRQFLECTAETYNTEIGA

SEQ ID NO: 1335 - protein, 570 aa, Unknown
  Description of Unknown: Integrase B1336 sequence
  PTHR30461:SF3,IPR036162,PS51737,IPR011109,PTHR30461, PS00397,PF00239,G3DSA:1.10.10.2600,IPR006119,SSF53041, SM00857,IPR025827,IPR038109,PS51736,cd03768, IPR006118,PF13408,G3DSA:3.40.50.1390,PF07508,Coil
MTNNAASARVAIYVRVSTLYQVDKDSLPMQKQDLLSYAKLMLNTEDCMIFEDAGYSGKNMDRPKFQEMMSQIRTGTFTHLLVWKIDRISRNLLDFASMYAELKELGVTFVSKSEQFDTSTAMGEAMLKIILVFAELERNMTSERVTATMISRAHNRLWNGGRIPYGYNYDPQTREFSFNETEMPLVIMIHDMYEQQRSLVRVARELNEKGYRSRAGNYWSPVSLRLILKNLFYCGDYVYNKQREGNRQKVKDESEWVITKEHHPAMISRDQKEHVIKILNSNSKLCRERDIYSAPDHVHVFGGLLVCSSCGKTFNSSPGSITRDKWHYSKYGCSTRRKSTTLCKSKGTSDPIVGEFTFNYILNMLNAQANFASINSPADLQKRLLIGDTFSYIDHIEADGLNDLYNILNSGKITGAVWGNNVKAPTKKVAVESELTKIKAEKQKTERALERLRNLYLYVDDAMSDAEYIIQRNKLTETLDNLNEQIGLLNTDTWEQSVSDEEFIQRASEFIVAQKLTGRKYVSYKRLAKSVDAAVLRDFVLSIIDRMTVTDGKISSIVFRNGLCHNFVFK

SEQ ID NO: 1336 - protein, 570 aa, Unknown
  Description of Unknown: Integrase B1337 sequence
  PTHR30461:SF3,SM00857,G3DSA:1.10.10.2600,IPR036162,PF13408, IPR025827,G3DSA:3.40.50.1390,PS51737,IPR006119,IPR038109, PF07508,IPR011109,SSF53041,PF00239,PTHR30461, PS51736,Coil,cd00338
MNIYYVREKLRSCSIYDIELNVAYYARVSTEKLEQQASIKHQEEHFEELIHSNSKWKFAGSYIDDGISGMHADKREEFQRMLRDAKLGKIDMIITKEISRFARNTLDSIQYTRELLSYGVCVWFQNDGINTIDDDSEFRLTIMAGVAQDEIRKLSSRVKFGHAQSIKNGVVLGHRMYGYSNNQGKLELIPEEADMVRMIFQDYASGISTPRIEKKLWNMGYRNFKGGKINRDVIKNIIRNPKYKGYYCGGKVKVIDMFTKKQEFLPQSEWVMFKDDGSRVPQIIDENTWEKANAYLRERGEAIKSRRTSFKNENIFTGKLFCANDGAPYWMKQHYIRGKEDVRWVCSYKIKNGAASCDSFGLAESELKEVIAELINKSSENIDAILEEYFEILQSSIKNIPDNKNEISRLEKQIDMLKQKREKILEYNLDRKISDDEFISRNKEYVKQIKQTENHIRELQNTKSPEPVETQLSAIKEQLEKFKGVTPQDINRQIVNELFEKITVEPLAVTCATLTFHLRSGSLEKWGFPLRRSDDMIFTLHPEQHKIFSRKTCIKTQHMVFYKYKYLLAL

SEQ ID NO: 1337 - protein, 570 aa, Unknown
  Description of Unknown: Integrase B1338 sequence
  PTHR30461:SF3,SM00857,G3DSA:1.10.10.2600,IPR036162,PF13408, PS51737,IPR025827,G3DSA:3.40.50.1390,IPR006119,IPR038109, PF07508,IPR011109,SSF53041,PTHR30461,Coil, PS51736,cd00338,PF00239
MNIYYVREKLRNCSIYDIELNVAYYARVSTEKVEQQASIKHQEEHFEELIHSNNRWKFAGSYIDDGISGIHADKREEFQRMLRDAKLGKIDMIITKEISRFARNTLDSIQYTRELLSYGVCVWFQNDGINTIDDDSEFRLTIMAGVAQDEIRKLSSRVKFGHAQSIKNGVVLGHRMYGYSNNQGKLELVPEESDMVRMIFQDYASGISTPRIEKKLWDMGYRSFKGGKINRDVIKNIIRNPKYKGYYCGGKVKVVDMFTKKQEFLPQSEWIMFKDDGSRVPQIIDETTWEKANAYLRERGEAIKSRRTSFKNENIFTGKLFCANDGAPYWMKQHYIRGKEDVRWVCSYKIKNGAASCDSFGLAESELKEIIAELINKSSENIDSILEEYFEILQSSIKNIPDNKNEISRLEKQIDLLKQKREKILEYNLDGKISDDEFISRNKEYVKQIKQIESHILEIQNTKSPEPVEIQLSAIKEQLEKFKGVNPKDINRQIVNELFEKITVEPLAATCATLTFQLRSGSIEKWGFPLRRSDDMILTLHPEQHKIFSRKTCIKTQDMVFFKYKYLLAL

SEQ ID NO: 1338 - protein, 570 aa, Unknown
  Description of Unknown: Integrase B1339 sequence
  PTHR30461:SF3,SM00857,G3DSA:1.10.10.2600,IPR036162,PF13408, IPR025827,G3DSA:3.40.50.1390,PS51737,IPR006119,IPR038109, PF07508,IPR011109,SSF53041,PTHR30461,Coil, PS51736,cd00338,PF00239
MNIYYVREKLRSCSIYDIELNVAYYARVSTEKIEQQASIKHQEEHFEELIHSNNRWKFAGSYIDDGISGMHADKREEFQRMLRDAKLGKIDMIITKEISRFARNTLDSIQYTRELLSYGVCVWFQNDGINTIDEDSELRLTIMAGVAQDEIRKLSSRIKFGHAQSIKNGVVLGHRMYGYSNHQGKLELIPEEADMVRMVFRDYASGMSTPRIEKKLWDMGYRSFKGGKINRDVIKNIIRNPKYKGYYCGGKVKVVDMFTKKQEFLPQSEWIMFKDDGSRVPQIIDETTWEKANAYLRERGEAIKSRKTSFKSENIFTGKLFCANDGAPYWMKQHYIRGKEDVRWVCSYKIKNGAASCDSFGLAESELKEIIAELINKSSENIDSILEEYFEILQSSIKNIPDNKNEISRLEKQIDLLKQKREKILEYNLDGKISDDEFISRNKEYVKQIKQIESHILEIQNTKSPEPVEIQLSAIKEQLEKFKGVTPQDINRQIVNELFEKITVEPLAVTCATLTFQLRSGGLEKWGFPLCRSDDMILTLHSEQHKIFSRKTCIKTQDMVFFKYKYLLAL

SEQ ID NO: 1339 - protein, 570 aa, Unknown
  Description of Unknown: Integrase B1340 sequence
  PTHR30461:SF3,SM00857,G3DSA:1.10.10.2600,IPR036162,PF13408, IPR025827,G3DSA:3.40.50.1390,PS51737,IPR006119,IPR038109, PF07508,SSF53041,IPR011109,PTHR30461,Coil, PS51736,cd00338,PF00239
MNIYYVREKLRSCSIYDIELNVAYYARVSTEKVEQQASIKHQEEHFEELIHSNNRWKFAGSYIDDGISGMHADKREEFQRMLKDAKLGKIDMIITKEISRFARNTLDSIQYTRELLSYGVCVWFQNDGINTIDEDSELRLTIMAGVAQDEIRKLSSRIKFGHAQSIKNGVVLGHRMYGYSNHQGKLELIPEEADMVRMVFRDYASGISTPRIEKKLWNMGYRSFKGGKISRDVIKNIIRNPKYKGYYCGGKVKIVDMFTKKQEFLPQSEWVMFKDDGSRVPQIIDEITWEKANAYLRERGEAIKSRKTSFKSENIFTGKLFCANDGAPYWMKQHYIRGKEDVRWVCSYKIKNGAASCDSFGLAESELKEVIAELINKSSENIDSILEEYFEILQSSIKNIPDNKNEISRLEKQIDLLKQKREKILEYNLDGKISDDEFISRNKEYVKQIKQIESHILEIQNTKSPEPVEIQLSAIKEQLEKFKGVTSKDINRQIVNELFEKITVEPLAATCATLTFQLRSGNLEKWGFPLRCSDDMIFTLHSEQHKIFSRKTCIKTQDMVFFKYKYLLAL

SEQ ID NO: 1340 - protein, 570 aa, Unknown
  Description of Unknown: Integrase B1341 sequence
  PTHR30461:SF3,SM00857,G3DSA:1.10.10.2600,IPR036162,PF13408, IPR025827,G3DSA:3.40.50.1390,PS51737,IPR006119,IPR038109, PF07508,IPR011109,SSF53041,PTHR30461,Coil, PS51736,cd00338,PF00239
MNIYYVREKLRSCSIYDIELNVAYYARVSTEKVEQQASIKHQEEHFEELIHSNNRWKFAGSYIDDGISGMHADKREEFQRMLKDAKLGKIDMIITKEISRFARNTLDSIQYTRELLSYGVCVWFQNDGINTIDEDSELRLTIMAGVAQDEIRKLSSRIKFGHAQSIKNGVVLGHRMYGYSNHQGKLELIPEEADMVRMVFRDYASGISTPRIEKKLWNMGYRSFKGGKISRDVIKNIIRNPKYKGYYCGGKVKIVDMFTKKQEFLPQSEWVMFKDDGSRVPQIIDEITWEKANAYLRERGEAIKSRKTSFKSENIFTGKLFCANDGAPYWMKQHYIRGKEDVRWVCSYKIKNGAASCDSFGLAESELKEVIAELINKSSENIDSILEEYFEILQSSIKNIPDNKNEISRLEKQIDLLKQKREKILEYNLDGKISDDEFISRNKEYVKQIKQIESHILEIQNTKSPEPVEIQLSAIKEQLEKFKGVTPKDINRQIVNELFEKITVEPLAATCATLTFQLRSGNLEKWGFPLRCSDDMILTLHSEQHKIFSRKTFIKTQDMVFFKYKYLLAL

SEQ ID NO: 1341 - protein, 570 aa, Unknown
  Description of Unknown: Integrase B1342 sequence
  PTHR30461:SF3,SM00857,G3DSA:1.10.10.2600,IPR036162,PF13408, IPR025827,G3DSA:3.40.50.1390,PS51737,IPR006119,IPR038109, PF07508,IPR011109,SSF53041,PF00239,PTHR30461, PS51736,Coil,cd00338
MNIYYVREKLRNCSIYDIELNVAYYARVSTEKVEQQASIKHQEEHFEELIHSNNRWKFAGSYIDDGISGMHADKREEFQRMLRDAKLGKIDMIITKEISRFARNTLDSIQYTRELLSYGVCVWFQNDGINTIDDDSEFRLTIMAGVAQDEIRKLSSRVKFGHAQSIKNGVVLGHRMYGYSNNQGKLELIPEEADMVRMIFQDYASGISTPRIEKKLWDMGYRSFKGGKINRDVIKNIIRNPKYKGYYCGGKVKVVDMFTKKQEFLPQSEWIMFKDDGSRVPQIIDETTWEKANAYLRERGEAIKSRRTSFKNENIFTGKLFCANDGAPYWMKQHYIRGKEDVRWVCSYKIKNGAASCDSFGLAESELKEVIADLINESSENIDNILKEYFEILQSTIKNIPDNKSEISRLEKQIETLKQKREKILEYNLDGKISDDEFISRNKEYVKQIKQTESHIRELQNIKSPEPVEIQLSAIKEQLEKFKGVTPKDINRQIVNELFEKITVEPLAATCATLTFQLRSGSLEKWGFPLRCSDDMILTLHSEQHKIFSRKTCIKTQDMVFFKYKYLLAL

SEQ ID NO: 1342 - protein, 570 aa, Unknown
  Description of Unknown: Integrase B1343 sequence
  PTHR30461:SF3,SM00857,G3DSA:1.10.10.2600,IPR036162,PF13408, IPR025827,G3DSA:3.40.50.1390,PS51737,IPR006119,IPR038109, PF07508,SSF53041,IPR011109,PF00239,PTHR30461, PS51736,Coil,cd00338
MNIYYVREKLRNCSIYDIELNVAYYARVSTEKIEQQASIKHQEEHFEELIHSNNRWKFAGSYIDDGISGMHADKREEFQRMLKDAKLGKIDMIITKEISRFARNTLDSIQYTRELLSYGVCVWFQNDGINTIDDDSEFRLTIMAGVAQDEIRKLSSRVKFGHAQSIKNGVVLGHRMYGYSNHQGKLELIPEEADMVRMVFRDYASGMSTPRIEKKLWNMGYRSFKGGKISRDVIKNIIRNPKYKGYYCGGKVKVVDMFTKKQEFLPQSEWIMFKDDGSRVPQIIDETTWEKANAYLRERGEAIKSRRTSFKNENIFTGKLFCANDGAPYWMKQHYIRGKEDVRWVCSYKIKNGAASCDSFGLAESELKEVIADLINESSENIDNILKEYFEILQSTIKNIPDNKSEISRLEKQIETLKQKREKILEYNLDGKISDDEFISRNKEYVKQIKQTESHIRELQNIKSPEPVEIQLSAIKEQLEKFKGVTPKDINRQIVNELFEKITVEPLAATCATLTFQLRSGSLEKWGFPLRCSDDMILTLHPEQHKIFSRKTCIKTQHMVFYKYKYLLAL

SEQ ID NO: 1343 - protein, 570 aa, Unknown
  Description of Unknown: Integrase B1344 sequence
  PTHR30461:SF3,SM00857,G3DSA:1.10.10.2600,IPR036162,PF13408, PS51737,G3DSA:3.40.50.1390,IPR025827,IPR006119,IPR038109, PF07508,IPR011109,SSF53041,PF00239,PTHR30461, PS51736,Coil,cd00338
MKKFPIDLSCLTEEEISQFQEDPYTLYNGDQNVAIYLRYSSTGQSDQSIEGQLRDCRTFCKANHYRIVAIYVDRATTARKDVEKRVHLMEMISDSAKQNWEYVIVWKLDRFARNRNDSAIMKMRLRKNGVKVLSATEHLTDSPESIILESVLEGMAEFFSAELSQKVTRGMRESALKCHSVGGHIPLGYKVENHKLVVDPDTAHIVQEAFSLYANGESVAAICRKFNSAGYKTAKNTEFNRSSFKAMFRNTRYIGTYTYKDIVIENGIPAIIDKELFETVQRRLSKTATAPARGKAKVDYLLSGKLFCGHCGASMNGESGAGRHGKVYHYYSCYTKKRKLGCDKRPLKKDYIEGIVARDALNLLTDQLIDEIADMAIRQSEQDLINDTHIPQLTAQLSEVEKSITNITAAIEKGIASETLMNRLVQLEHEKKTLNKEIKAEEKFVYRIDRDQIVFWLSQFKYGNIEDEDFRRRLIDLLVNSVTVWDEPDGYKITTAYNLTSCKTKTFRVEKNPAAEEATGFDFGESECAKKLVKSLDFTSFFYFLPRLCSPANGAAAQLSDQDPFCRRIP

SEQ ID NO: 1344 - protein, 570 aa, Unknown
  Description of Unknown: Integrase B1345 sequence
  SM00857,G3DSA:1.10.10.2600,IPR036162,PF13408,IPR025827, G3DSA:3.40.50.1390,IPR006119,IPR038109,PF07508,SSF53041, IPR011109,PTHR30461,Coil,cd00338,PF00239
MAYRKITDIKDTIGMRAVFYARVSTAEEEQLNAIELQIEENRGCIKDHGWKLVGEYIDRSKSGTMVKGRDDYQRLYEDLYEDLFDIVVIKDQERLQRNTLDWYLFINRVVQTGKLLFMYMDGKFYSPDDALITGVRAIIAEEFSRNLSKKLHNYHDHRIEKARQGQEIALQGSGNVYGWDKKDGKYYINPEQAKVRRLMCEGIMARKGSTLIAKELNDAGYRNTVGKPWKPMDIPKFVYDCKNVGTMIINKERHDFESKQTIKLPKEEWVYVENALPPIVTQEEWDLICKIHEERVIATGSDRRGKKTSGYSFSGKLVCGICGAPYWRKQRVSKDEYWVCSTKQTKGRRTRKRDSTMGKAGEINPLGCDNENISYNSLMEIMGVVSERLQANTDTIKQDMINWLTKLRKQLIEANGGHTEADLQRELSRKSKLLDAYLDGILNKQEYQTKAEELDERIIQLKAETEKNKANSGDIAEIDKVLANIDEEVSRYVDGNEKLKVEYLLEHLEQVQIFPDKVIVIVPILSEGIVVEKTQYVSRAKRCGQDNFNAYDLRCSKAYFRQYLFERKEH

SEQ ID NO: 1345 - protein, 570 aa, Unknown
  Description of Unknown: Integrase B1346 sequence
  cd03768,SM00857,G3DSA:1.10.10.2600,IPR036162, PF13408,PS51737,SSF109709,G3DSA:3.40.50.1390, IPR025827,IPR006119,IPR038109,PF07508, IPR011109,SSF53041,PTHR30461,PS51736,PF00239
MEEQKQIRCAIYTRKSTDEGLEKEFNTLEAQREAGENFVMSMKHQGWVILPERYDDGGFSGGNLKRPALKRLMADVEKGIVDMIVVYKIDRLTRSLLDFAQLVQTFEKNNCSFVSVTQHFNTCDSMGKLTLNILLSFAQFERELGAERVRDKIAASKKKGMWTGGAIPLGYDVNNKKLVINPAEAETIRFIFEDYKRTRSQIRTVEDLNEKGFKPKTWKTKTGKIVGCEMFNHAMISNILNNPIYIGMVPYKGELYKGQHKAIITQELWDETRKVKKDNIGTAFRPCRSVKNSLLKGLLECSCCGTMTPTRSKRGNKYYEYYTSLKAVKEGANNAHCQIGSIPAGAIDNFVLDKVKKIFQTPELQEELLKEFKRQNEDFNGADVHNIVQDIGQAFQYFEPATVHEFITEVVEKVIVYTDHIIIKLRPMSADLFERGAIEKDSHYNEKLLELSYPIKFGRKRGCVQIVEPNQPSGETCERDMKLYNAVTQAFYYKQVMDDQKISLSELSKREKLDRGYMGQILRLTTLAPDIIMAIIEGRQPKLLTARRLIRDHFPYSWEDQRRELGFNPA

SEQ ID NO: 1346 - protein, 570 aa, Unknown
  Description of Unknown: Integrase B1347 sequence
  SM00857,G3DSA:1.10.10.2600,IPR036162,PF13408,IPR025827, G3DSA:3.40.50.1390,PS51737,IPR006119,IPR038109,PF07508, SSF53041,IPR011109,PTHR30461,Coil,cd00338, PF00239
MAYRKITDIRDTIGMRAVFYARVSTAEEEQLNAIELQIEENRGCIKDHGWKLVGEYIDRSKSGTMVKGRDDYQRLYEDLYEDLFDIVVIKDQERLQRNTLDWYLFINRVVQTGKLLFMYMDGKFYSPDDALITGVRAIIAEEFSRNLSKKLHNYHDHRIEKARQGQEIALQGSGNVYGWDKKDGKYYINPEQAKVRRLMCEGIMARKGSTLIAKELNDAGYRNTVGKPWKPMDIPKFVYDCKNVGTMIINKERHDFESKQTIKLPKEEWVYVENALPPIVTQEEWDLICKIHEERVIATGSDRRGKKTSGYSFSGKLVCGICGAPYWRKQRVSKDEYWVCSTKQTKGRRTRKRDSTMGKAGEINPLGCDNENISYNSLMEIMGVVSERLQANTDTIKHDMINWLTKLRKQLLEANGGHTEADLQRELSRKSKLLDAYLDGILNKQEYQKKAEELDERIIQLKAETEKNKANSGDIAEIDKVLANIDEEVSRYVDGNEKLKVEYLLEHLEQVQIFPDKVIVIVPILSEGIVVEKAQYVSREKWLWKKYINEYYNGQFKSGSGMRLLRWRSD

SEQ ID NO: 1347 - protein, 570 aa, Unknown
  Description of Unknown: Integrase B1348 sequence
  PTHR30461:SF3,IPR036162,PS51737,IPR011109,PTHR30461, PF00239,G3DSA:1.10.10.2600,IPR006119,SSF53041,cd00338, SM00857,IPR025827,IPR038109,mobidb-lite,PS51736, PF13408,G3DSA:3.40.50.1390,PF07508,Coil
MAQVEIIAANLKDKNNNITIANKKKRVCAYGRVSTDDEEQITSYNSQIKYYTEKIKSNPDWEFVGIYADEGISGTQVKNRTEFQRMIDDALNGKIDIIMTKSISRFARNVVDTLKTIRELRDKKVDVYFEKENIHTIDLDSEMFLTLYSAFAQAESESTSQNVKLGLKAMMKRGEYVGSPDCYGYDWNKETKQLEINEEQAEVVRMIFNWYIEGLGCRRIANKLEEMKIPNYTGTRWSTSSISNMIHQEKYVGDLLQNKSYTVSPITHKCVRNKGEREKYYVKDHHEPIITREVWDKVQEISKKRYEGITFSKSNYKSRETRKYAFSGKIKCAFCGTNFCRRQSSYSKKHPTYNYYWTCFKKREHSDACPDSVGISETKLEETFVMIYNDIIKNKHKTKQALIKAIKDVLSDNDYQDKLNNLLKEKETIEQRLSKIIDMELDNDIDRKEMFIQKERELLNQLNDIKSKITEYEKILDENKGLSKQIKEIDEYFDNYPSTLKKFNREAFENMIECIIVGDYDENGNKLPRVARFVLKTGKEYKFEISKNSSNDKGNSDKNNEVSLCTRNMT

SEQ ID NO: 1348 - protein, 570 aa, Unknown
  Description of Unknown: Integrase B1349 sequence
  PTHR30461:SF3,SM00857,G3DSA:1.10.10.2600,IPR036162,PF13408, IPR025827,G3DSA:3.40.50.1390,PS51737,IPR006119,IPR038109, PF07508,IPR011109,SSF53041,PF00239,PTHR30461, PS51736,Coil,cd00338
MNIYYVREKLRSCSIYDIELNVAYYARVSTEKVEQQASIKHQEEHFEELIHSNNRWKFAGSYIDDGISGMHADKREEFQRMLRDAKLGKIDMIITKEISRFARNTLDSIQYTRELLSYGVCVWFQNDGINTIDEDSELRLTIMAGVAQDEIRKLSSRIKFGHAQSIKNGVVLGHRMYGYSNHQGKLELIPEEADMVRMVFRDYASGMSTPRIEKKLWNMGYRSFKGGKISRDVIKNIIRNPKYKGYYCGGKVKIVDMFTKKQEFLPQSEWIMFKDDGSRVPQIIDETTWEKANAYLRERGEAIKSRRTSFKNENIFTGKLFCANDGAPYWMKQHYIRGKEDVRWVCSYKIKNGADSCDSFGLAESELKEVIAELINKSSENIDSILEEYFEILQSSIKNIPDNKNEISRLEKQIDLLKQKREKILEYNLDGKISDDEFISRNKEYVKQIKQIESHILEIQNTKSPEPVEIQLSAIKEQLEKFKGVNPKDINRQIVNELFEKITVEPLAATCATLTFQLRSGSIEKWGFPLRRSDDMILTLHSEQHKIFSRKTCIKTQDMVFFKYKYLLAL

SEQ ID NO: 1349 - protein, 570 aa, Unknown
  Description of Unknown: Integrase B1350 sequence
  PTHR30461:SF3,SM00857,G3DSA:1.10.10.2600,IPR036162,PF13408, IPR025827,G3DSA:3.40.50.1390,PS51737,IPR006119,IPR038109, PF07508,SSF53041,IPR011109,PF00239,PTHR30461, PS51736,Coil,cd00338
MNIYYVREKLRSCSIYDIELNVAYYARVSTEKVEQQASIKHQEEHFEELIHSNNRWKFAGSYIDDGISGMHADKREEFQRMLRDAKLGKIDMIITKEISRFARNTLDSIQYTRELLSYGVCVWFQNDGINTIDDDSEFRLTIMAGVAQDEIRKLSSRVKFGHAQSIKNGVVLGHRMYGYSNNQGKLELIPEEADMVRMIFRDYASGMSTPRIEKKLWNMGYRSFKGGKISRDVIKNIIRNPKYKGYYCGGKVKVVDMFTKKQEFLPQSEWIMFKDDGSRVPQIIDETTWEKANAYLRERGEAIKSRRTSFKSENIFTGKLFCANDGAPYWMKQHYIRGKEDVRWVCSYKIKNGAASCNSFGLAESELKEVIADLINKSSENIDNILKEYFEILQSTIKNIPDNKSEISRLEKQIDTLKQKREKILEYNLDGKISDDEFVSRNKEYMKQIKQTENRIRELQNVKVKEPEDAQLKAIKEQLEKFKGVTPQDINRQIVNELFEKITVEPLAVTCATLTFQLRSGSLEKWGFPLRRSDDMILTLHPEQHKIFSRKTCIKTQDMVFFKYKYFLAL

SEQ ID NO: 1350 - protein, 570 aa, Unknown
  Description of Unknown: Integrase B1351 sequence
  PTHR30461:SF3,SM00857,G3DSA:1.10.10.2600,IPR036162,PF13408, PS51737,IPR025827,G3DSA:3.40.50.1390,IPR006119,IPR038109, PF07508,IPR011109,SSF53041,PTHR30461,Coil, PS51736,cd00338,PF00239
MNIYYVREKLRNCSIYDIELNVAYYARVSTEKVEQQASIKHQEEHFEELIHSNNRWKFAGSYIDDGISGIHADKREEFQRMLRDAKLGKIDMIITKEISRFARNTLDSIQYTRELLSYGVCVWFQNDGINTIDDDSEFRLTIMAGVAQDEIRKLSSRVKFGHAQSIKNGVVLGHRMYGYSNNQGKLELVPEESDMVRMIFQDYASGISTPRIEKKLWDMGYRSFKGGKINRDVIKNIIRNPKYKGYYCGGKVKVVDMFTKKQEFLPQSEWIMFKDDGSRVPQIIDETTWEKANAYLRERGEAIKSRRTSFKNENIFTGKLFCANDGAPYWMKQHYIRGKEDVRWVCSYKIKNGAASCDSFGLAESELKEIIAELINKSSENIDSILEEYFEILQSSIKNIPDNKNEISRLEKQIDLLKQKREKILEYNLDGKISDNEFISRNKEYVKQIKQIESHILEIQNTKSPEPVEIQLSAIKEQLEKFKGVNPKDINRQIVNELFEKITVEPLAATCATLTFQLRSGSIEKWGFPLRRSDDMILTLHPEQHKIFSRKTCIKTQDMVFFKYKYLLAL

SEQ ID NO: 1351 - protein, 570 aa, Unknown
  Description of Unknown: Integrase B1352 sequence
  PTHR30461:SF3,SM00857,G3DSA:1.10.10.2600,IPR036162,PF13408, IPR025827,G3DSA:3.40.50.1390,PS51737,IPR006119,IPR038109, PF07508,SSF53041,IPR011109,PTHR30461,Coil, PS51736,cd00338,PF00239
MNIYYVREKLRSCSIYDIELNVAYYARVSTEKVEQQASIKHQEEHFEELIHSNNRWKFAGSYIDDGISGMHADKREEFQRMLKDAKLGKIDMIITKEISRFARNTLDSIQYTRELLSYGVCVWFQNDGINTIDEDSELRLTIMAGVAQDEIRKLSSRIKFGHAQSIKNGVVLGHRMYGYSNHQGKLELIPEEADMVRMVFRDYASGISTPRIEKKLWNMGYRSFKGGKISRDVIKNIIRNPKYKGYYCGGKVKIVDMFTKKQEFLPQSEWVMFKDDGSRVPQIIDEITWEKANAYLRERGEAIKSRKTSFKSENIFTGKLFCANDGAPYWMKQHYIRGKEDVRWVCSYKIKNGAASCDSFGLAESELKEVIAELINKSSENIDSILEEYFEILQSSIKNIPDNKNEISRLEKQIDLLKQKREKILEYNLDGKISDDEFISRNKEYVKQIKQIESHILEIQNTKSPEPVEIQLSAIKEQLEKFKGVTPKDINRQIVNELFEKITVEPLAATCATLTFQLRSGNLEKWGFPLRCSDDMIFTLHSEQHKIFSRKTCIKTQDMVFFKYKYLLAL

SEQ ID NO: 1352 - protein, 570 aa, Unknown
  Description of Unknown: Integrase B1353 sequence
  PTHR30461:SF3,SM00857,G3DSA:1.10.10.2600,IPR036162,PF13408, PS51737,G3DSA:3.40.50.1390,IPR025827,IPR006119,IPR038109, PF07508,IPR011109,SSF53041,PF00239,PTHR30461, PS51736,Coil,cd00338
MKKFPIDLSCLTEEEISQFQEDPYTLYNGDQNVAIYLRYSSTGQSDQSIEGQLRDCRTFCKANHYRIVAIYVDRATTARKDVEKRVHLMEMISDSAKQNWEYVIVWKLDRFARNRNDSAIMKMRLRKNGVKVLSATEHLTDSPESIILESVLEGMAEFFSAELSQKVTRGMRESALKCHSVGGHIPLGYKVENHKLVVDPDTAHIVQEAFSLYANGESVAAICRKFNSAGYKTAKNTEFNRSSFKAMFRNTRYIGTYTYKDIVIENGIPAIIDKELFETVQRRLSKTATAPARGKAKVDYLLSGKLFCGHCGASMNGESGAGRHGKVYHYYSCYTKKRKLGCDKRPLKKDYIEGIVARDALNLLTDQLIDEIADMAIRQSEQDLINDTHIPQLTAQLSEVEKSITNITAAIEKGIASETLMNRLVQLEHEKKTLNKEIKAEEKFVYRIDRDQIVFWLSQFKYGNIEDENFRRRLIDLLVNSVTVWDEPDGYKITTAYNLTSCKTKTFRVEKNPAAEEATGFDFGESECAKKLVKSKDFTSFFYFLPRLCSPANGAAAQLSDQDPFCRRIP

SEQ ID NO: 1353 - protein, 570 aa, Unknown
  Description of Unknown: Integrase B1354 sequence
  PTHR30461:SF3,SM00857,G3DSA:1.10.10.2600,IPR036162,PF13408, IPR025827,G3DSA:3.40.50.1390,PS51737,IPR006119,IPR038109, PF07508,IPR011109,SSF53041,PTHR30461,Coil, PS51736,cd00338,PF00239
MNIYYVREKLRSCSIYDIELNVAYYARVSTEKVEQQASIKHQEEHFEELIHSNNRWKFAGSYIDDGISGMHADKREEFQRMLKDAKLGKIDMIITKEISRFARNTLDSIQYTRELLSYGVCVWFQNDGINTIDEDSELRLTIMAGVAQDEIRKLSSRIKFGHAQSIKNGVVLGHRMYGYSNHQGKLELIPEEADMVRMVFRDYASGISTPRIEKKLWNMGYRSFKGGKISRDVIKNIIRNPKYKGYYCGGKVKIVDMFTKKQEFLPQSEWVMFKDDGSRVPQIIDEITWEKANAYLRERGEAIKSRKTSFKSENIFTGKLFCANDGAPYWMKQHYIRGKEDVRWVCSYKIKNGAASCDSFGLAESELKEVIAELINKSSENIDSILEEYFEILQSSIKNIPDNKNEISRLEKQIDLLKQKREKILEYNLDGKISDDEFISRNKEYVKQIKQIESHILEIQNTKSPEPVEIQLSAIKEKLEKFKGVNPKDINRQIVNELFEKITVEPLAATCATLTFQLRSGNLEKWGFPLRCSDDMILTLHSEQHKIFSRKTCIKTQDMVFFKYKYLLAL

SEQ ID NO: 1354 - protein, 570 aa, Unknown
  Description of Unknown: Integrase B1355 sequence
  PTHR30461:SF3,SM00857,G3DSA:1.10.10.2600,IPR036162,PF13408, IPR025827,G3DSA:3.40.50.1390,PS51737,IPR006119,IPR038109, PF07508,SSF53041,IPR011109,PF00239,PTHR30461, PS51736,Coil,cd00338
MNIYYVREKLRSCSIYDIELNVAYYARVSTEKVEQQASIKHQEEHFEELIRSNNRWKFAGSYIDDGISGMHADKREEFQRMLKDAKLGKIDMIITKEISRFARNTLDSIQYTRELLSYGVCVWFQNDGINTIDDDSEFRLTIMAGVAQDEIRKLSSRVKFGHAQSIKNGVVLGHRMYGYSNNQGKLELVPEEADMVRMIFQDYASGISTPRIEKKLWDMGYRSFKGGKINRDVIKNIIRNPKYKGYYCGGKVKVVDMFTKKQEFLPQSEWIMFKDDGSRVPQIIDETTWEKANAYLRERGEAIKSRRTSFKNENIFTGKLFCANDGAPYWMKQHYIRGKEDVRWVCSYKIKNGADSCDSFGLAESELKEVIAELINKSSENIDRILEEYFEILQSLIKNIPDNKNEISRLEKQIDLLKQKREKILEYNLDGKISDDEFISRNKEYMKQIKQIESHILEIQNTKSPEPVEIQLSAIKEQLEKFKGVTPKDINRQIVNELFEKITVEPLAVTCATLTFQLRSGGLEKWGFPLCRSDDMILTLHSEQHKIFSRKTCIKTQDMVFFKYKYLLAL

SEQ ID NO: 1355 - protein, 570 aa, Unknown
  Description of Unknown: Integrase B1356 sequence
  SM00857,G3DSA:1.10.10.2600,IPR036162,PF13408,IPR025827, G3DSA:3.40.50.1390,PS51737,IPR006119,IPR038109,PF07508, IPR011109,SSF53041,PTHR30461,Coil,PS51736, cd00338,PF00239
MFLTLEQYIESIQAINTSGEKDKKIEALLEYYEKYNKRIKAAPGMFYAVIYARYSSHGQREESIEGQVREALEYAARNNMIVIGVYIDKALTGKTDTRDGFQRMIKDAAKKKWQYVICWKLDRFARNRYDSARYKAKLKEYNIRVVSAREYIPDGPEGILLEGALESQAEFYSASLRENVKRGMTDNALECISNGGNIPFGFKTEKKRYVLDTEKAPVVKRIYQMYNTGSTIQELVKYLDGLGIRSTKGNKITINGINSILRNPKYMGVYKYKDTYVEGAIPQIVEKELFEAVQKKLNDRASKKRLKKNDVEFLLTTKLYCGKCGMGMTGMSGTGKLGAKYYYYSCVGRRRDHNCDKDNVGKDWIENIVISETVNTVLNDDVIKRIADGVIDFQRREQNNQVLSGLKNRLVEVEKSIENIIRAIEQGIITPSTKSRMETLEAEKVAIEHGITEESLKNPIVTREQVIFFLEKFKGGDIADQEYRRKLVDTFVNSVYVYDDHILISYNFTSSGDRTKLEEISKGYEKAEETANTSRFSHFFMGSPLLPNGPPKRHSPIGGCLFLAASRIPC

SEQ ID NO: 1356 - protein, 570 aa, Unknown
  Description of Unknown: Integrase B1357 sequence
  PTHR30461:SF3,SM00857,G3DSA:1.10.10.2600,IPR036162,PF13408, PS51737,G3DSA:3.40.50.1390,IPR025827,IPR006119,IPR038109, PF07508,IPR011109,SSF53041,PTHR30461,Coil, PS51736,cd00338,PF00239
MNIYYVREKLRSCSIYDIELNVAYYARVSTEKIEQQASIKHQEEHFEELIHSNNRWKFAGSYIDDGISGIHADKREEFQRMLRDAKLGKIDMIITKEISRFARNTLDSIQYTRELLSYGVCVWFQNDGINTIDDDSEFRLTIMAGVAQDEIRKLSSRVKFGHAQSIKNGVVLGHRMYGYSNNQGKLEMVPEEADMVRMIFQDYASGISTPRIEKKLWDMGYRSFKGGKINRDVIKNIIRNPKYKGYYCGGKVKVVDMFTKKQEFLPQSEWIMFKDDGSRVPQIIDETTWEKANAYLRERGEAIKSRRTSFKNENIFTGKLFCANDGAPYWMKQHYTRGKEDVRWVCSYKIKNGAASCDSFGLAESELKEIIAELINKSSENIDSILEEYFEILQSSIKNIPDNKNEISRLEKQIDLLKQKREKILEYNLDGKISDDEFISRNKEYVKQIKQIESHILEIQNTKSPEPVEIQLSAIKEQLEKFKGVTPQDINRQIVNELFEKITVEPLAVTCATLTFQLRSGSLEKWGFPLRRSDDMILTLHSEQHKIFSRKTCIKTQDMVFFKYKYLLAL

SEQ ID NO: 1357 - protein, 570 aa, Unknown
  Description of Unknown: Integrase B1358 sequence
  PTHR30461:SF3,SM00857,G3DSA:1.10.10.2600,IPR036162,PF13408, IPR025827,G3DSA:3.40.50.1390,PS51737,IPR006119,IPR038109, PF07508,IPR011109,SSF53041,PF00239,PTHR30461, PS51736,Coil,cd00338
MNIYYVREKLRNCSIYDIELNVAYYARVSTEKVEQQASIKHQEEHFEDLIHSNNRWKFAGSYIDDGISGIHADKREEFQRMLRDAKLGKIDMIITKEISRFARNTLDSIQYTRELLSYGVCVWFQNDGINTIDDDSEFRLTIMAGGAQDEIRKLSSRVKFGHAQSIKNGVVLGHRMYGYSNNQGKLELVPEEADMVRMIFQDYASGISTPRIEKKLWDMGYRSFKGGKINRDVIKNIIRNPKYKGYYCGGKVKVVDMFTKKQEFLPQSEWIMFKDDGSRVPQIIDETTWEKANAYLRERGEAIKSRRTSFKNENIFTGKLFCANDGAPYWMKQHYIRGKEDVRWVCSYKIKNGAASCDSFGLAESELKEIIAELINKSSENIDSILEEYFEILQSSIKNIPDNKNEISRLEKQIDLLKQKREKILEYNLDGKISDDEFISRNKEYVKQIKQIESHILEIQNAKSPEPVEIQLSAIKEQLEKFKGVNPKDINRQIVNELFEKITVEPLAVTCATLTFQLRSGSLEKWGFPLRCSDDMIFTLHSEQHKIFSRKTCIKTQDMVFFKYKYLLAL

SEQ ID NO: 1358 - protein, 570 aa, Unknown
  Description of Unknown: Integrase B1359 sequence
  PTHR30461:SF3,SM00857,G3DSA:1.10.10.2600,IPR036162,PF13408, IPR025827,PS51737,G3DSA:3.40.50.1390,IPR006119,IPR038109, PF07508,IPR011109,SSF53041,PTHR30461,Coil, PS51736,cd00338,PF00239
MNIYYVREKLRSCSIYDIELNVAYYARVSTEKLEQQVSIKHQEEHFEELIHSNNRWRFAGSYIDDGISGMNANKREEFQRMLRDAKLGKIDMIITKEISRFARNTLDSIQYTRELLSYGVCVWFQNDGINTIDEDSELRLTIMAGVAQDEIRKLSSRIKFGHAQSIKNGVVLGHRMYGYSNNQGKLELIPEEADMVRMVFRDYASGMSTPRIEKKLWNMGYRSFKGGKISRDVIKNIIRNPKYKGYYCGGKVKIVDMFTKKQEFLPQSEWVMFKDDGSRVPQIIDETTWEKANAYLRERGEAIKSRRTSFKSENIFTGKLFCANDGAPYWMKQHYIRGKEDVRWVCSYKIKNGAASCNSFGLAESELKEVIAELINKSSENIDSILEEYFEILQSSIKNIPDNKNEISRLEKQIDLLKQKREKILEYNLDGKISDDEFVSRNKEYVKQIKQTESHIRELQNIKSPEPAEIQLSAIKEQLEKFKGVTPQDINRQIVNELFEKITVEPLAVTCATLTFQLRSGSLEKWGFPLRRSDDMIFTLHSEQHKIFSRKTCIKTQDMVFFKYKYLLAL

SEQ ID NO: 1359 - protein, 570 aa, Unknown
  Description of Unknown: Integrase B1360 sequence
  PTHR30461:SF3,SM00857,G3DSA:1.10.10.2600,IPR036162,PF13408, IPR025827,G3DSA:3.40.50.1390,PS51737,IPR006119,IPR038109, PF07508,IPR011109,SSF53041,PF00239,PTHR30461, PS51736,Coil,cd00338
MNIYYVREKLRNCSIYDIELNVAYYARVSTEKVEQQASIKHQEEHFEDLIHSNNRWKFAGSYIDDGISGIHADKREEFQRMLRDAKLGKIDMIITKEISRFARNTLDSIQYTRELLSYGVCVWFQNDGINTIDDDSEFRLTIMAGVAQDEIRKLSSRVKFGHAQSIKNGVVLGHRMYGYSNNQGKLELVPEEADMVRMIFQDYASGISTPRIEKKLWDMGYRSFKGGKINRDVIKNIIRNPKYKGYYCGGKVKVVDMFTKKQEFLPQSEWIMFKDDGSRVPQIIDEATWEKANAYLRERGEAIKSRRTSFKSENIFTGKLFCANDGAPYWMKQHYIRGKEDVRWVCSYKIKNGAASCNSFGLAESELKEVIAELINKSSENIDSILEEYFEILQSSIKNIPDNKNEISRLEKQIDLLKQKREKILEYNLDGKISDDEFVSRNKEYVKQIKQTESHIRELQNIKSPEPAEIQLSAIKEQLEKFKGVTPQDINRQIVNELFEKITVEPLAVTCATLTFQLRSGSLEKWGFPLRRSDDMIFTLHSEQHKIFSRKTCIKTQDMVFFKYKYLLAL

SEQ ID NO: 1360 - protein, 570 aa, Unknown
  Description of Unknown: Integrase B1361 sequence
  PTHR30461:SF3,cd00338,SM00857,G3DSA:1.10.10.2600,IPR036162, PF13408,PS51737,G3DSA:3.40.50.1390,IPR025827,IPR006119, IPR038109,PF07508,IPR011109,SSF53041,PTHR30461, PS51736,Coil,PF00239
MCAKKKPAMLEPDMQDAVIYTRYSSHNQRDCSIEQQVADCEIFARQNNLRVVKVYADRHLSGTTDNRPQFQQMLKDATHGHWAYVICWKIDRFARNRYDSATYKFRLKKAGVRVLYAKESIPDGPEGILLESVLEGSAEYYSAALAQNIRRGMKYNAEQCKVNSGSIPFGYCKGPDGRFAIHEANAEVVREIFRKAAAGMPFVDIANDLNSRGLKTSRGGRWNKGSFRLLMNEAYIGVYHFSDTRIEGGMPALIDQGTFWAANERLKANSSVRGRHQDGGDYLLTGKLKCAHCGSYMIGFSGTGKNGELHYYYGCQKRRRERACKKANVPREWIERVVVKAALDYVLRPDVMEWIADAVMEYQEREAASAQLAALTAELEENQKATDNVMKAIEAGIITSTTKQRLLDLEAKAQDLKRAIELEKLSHVRLERDQVLFWLDRFRGGSLQSQEFRRKVIDAFVSVVYLSDDHLRIAFNYSGGSNAEADFDLVMDAEAAAGELSKKFAQGHVASTTQEKSEPLSVGKKVRIFSFAVFLTASFSFPVSAARLFSRCRLHIRSGCRLFRQRGGRE

SEQ ID NO: 1361 - protein, 570 aa, Unknown
  Description of Unknown: Integrase B1362 sequence
  PTHR30461:SF3,IPR036162,PS51737,IPR011109,PTHR30461, PS00397,PF00239,G3DSA:1.10.10.2600,IPR006119,SSF53041, SM00857,IPR025827,IPR038109,PS51736,cd03768, IPR006118,PF13408,G3DSA:3.40.50.1390,PF07508,Coil
MQYKESNIRRNNRVAIYVRVSTVYQADKDSLPMQKQELISYAKLMLGTDDVVIFEDAGYSGKNTIRPKFQEMMEKIRVGAFTHLLVWKIDRISRNLLDFAAMYNELKKLGVTFVSKNEQFDTSTAMGEAMLKIILVFAELERNMTAERVTATMISRAGNGLWNGGRVPYGYSYNAEDQTFSLNSNEDNIVHMIHDKYEELRSLIRLARYLNEKGYRTRAGNEWSPVSLLIILRSFFYCGDYQYNRLKEGDRQQPKDKSEWVTVKDHHIAIISRDQKERIIGILDTNSKLCKDHNIYSTTHTHIFAGLLICSSCGKTMGASPAAAKKDWQYSKYICSTRRSSVACAGKATSDPIIGEFVFNYILNMLNAQNNFKRISSPAELQDMLLLGNTFCNVDHIESDGLNDLYNVLVSGNIEGEVYGKDTKIKDQAPAISDLSRLRSEKQRLERAMDRLTNLYLYSDDAMSEREYIIQKTKLADSISEIDDQIGFATSGGWQQSISDELFIQRASQFIISQKLSGRNYVSYKRLAISTDAKVLQSFVRSIIDSITMDSGRVKQIIFKNGLSHIFVYK

SEQ ID NO: 1362 - protein, 570 aa, Unknown
  Description of Unknown: Integrase B1363 sequence
  PTHR30461:SF3,SM00857,G3DSA:1.10.10.2600,IPR036162,PF13408, IPR025827,G3DSA:3.40.50.1390,PS51737,IPR006119,IPR038109, PF07508,SSF53041,IPR011109,PTHR30461,Coil, PS51736,cd00338,PF00239
MNIYYVREKLRSCSIYDIELNVAYYARVSTEKVEQQASIKHQEEHFEELIHSNNRWKFAGSYIDDGISGMHADKREEFQRMLKDAKLGKIDMIITKEISRFARNTLDSIQYTRELLSYGVCVWFQNDGINTIDDDSEFRLTIMAGVAQDEIRKLSSRVKFGHAQSIKNGVVLGHRMYGYSNNKGKLELIPEEADMIRIIFQDYASGISTPRIEKKLWNMGYRSFKGGKISRDVIKNIIRNPKYKGYYCGGKVKIVDMFTKKQEFLPQSEWVMFKDDGSRVPQIIDEITWEKANAYLKERGEAIKSRRTSFKNENIFTGKLFCANDGAPYWMKQHYIRGKEDVRWVCSYKIKNGAASCNSFGLAESELKEIIAELINKSSENIDSILEEYFEILQSSIKNIPDNKNEISRLEKQIDLLKQKREKILEYNLDGKISDDEFISRNKEYVKQIKQIESHILEIQNTKSPEPVEIQLSAIKEKLEKFKGVNPKDINRQIVNELFEKITVEPLAATCATLTFQLRSGNLEKWGFPLRCSDDMILTLHSEQHKIFSRKTCIKTQNMVFFKYKYLLAL

SEQ ID NO: 1363 - protein, 570 aa, Unknown
  Description of Unknown: Integrase B1364 sequence
  PTHR30461:SF3,SM00857,G3DSA:1.10.10.2600,IPR036162,PF13408, PS51737,G3DSA:3.40.50.1390,IPR025827,IPR006119,IPR038109, PF07508,IPR011109,SSF53041,PTHR30461,Coil, PS51736,cd00338,PF00239
MNIYYVREKLRNCSIYDIELNVAYYARVSTEKVEQQASIKHQEEHFEELIHSNNRWKFAGSYIDDGISGIHADKREEFQRMLRDAKLGKIDMIITKEISRFARNTLDSIQYTRKLLSYGVCVWFQNDGINTIDDDSEFRLTIMAGVAQDEIRKLSSRVKFGHAQSIKNGVVLGHRMYGYSNNQGKLELIPEEADMVRMVFRDYASGMSTPRIEKKLWNMGYRSFKGGKISRDVIKNIIRNPKYKGYYCGGKVKVVDMFTKKQEFLPQSEWIMFKDDGSRVPQIIDETTWEKANAYLRERGEAIKSRRTSFKNENIFTGKLFCANDGAPYWMKQHYIRGKEDVRWVCSYKIKNGAASCTSFGLAESELKEVIADLINKSSENIDSILEEYFEILQSSIKNIPDNKNEISRLEKQIDLLKQKREKILEYNLDGKISDDEFISRNKEYVKQIKQIESHILEIQNTKSPEPVEIQLSAIKEQLEKFKGVTPQDINRQIVNELFEKITVEPLAVTCATLTFQLRSGSLEKWGFPLRRSDDMILTLHSEQHKIFSRKTCIKTQDMVFFKYKYLLAL

SEQ ID NO: 1364 - protein, 570 aa, Unknown
  Description of Unknown: Integrase B1365 sequence
  PTHR30461:SF3,SM00857,G3DSA:1.10.10.2600,IPR036162,PF13408, IPR025827,G3DSA:3.40.50.1390,PS51737,IPR006119,IPR038109, PF07508,IPR011109,SSF53041,PF00239,PTHR30461, PS51736,Coil,cd00338
MNIYYVREKLRSCSIYDIELNVAYYARVSTEKVEQQASIKHQEEHFEELIHSNNRWKFAGSYIDDGISGMHADKREEFQRMLRDAKLGKIDMIITKEISRFARNTLDSIQYTRELLSYGVCVWFQNDGINTIDEDSELRLTIMAGVAQDEIRKLSSRIKFGHAQSIKNGVVLGHRMYGYSNHQGKLELIPEEADMVRMVFRDYASGMSTPRIEKKLWNMGYRSFKGGKISRDVIKNIIRNPKYKGYYCGGKVKVVDMFTKKQEFLPQSEWIMFKDDGSRVPQIIDETTWEKANAYLRERGEAIKSRRTSFKNENIFTGKLFCANDGAPYWMKQHYIRGKEDVRWVCSYKIKNGADSCDSFGLAESELKEVIAELINKSSENIDSILEEYFEILQSSIKNIPDNKNEISRLEKQIDLLKQKREKILEYNLDGKISDDEFISRNKEYVKQIKQIESHILEIQNTKSPEPVEIQLSAIKEQLEKFKGVNPKDINRQIVNELFEKITVEPLAATCATLTFQLRSGSIEKWGFPLRRSDDMILTLHSEQHKIFSRKTCIKTQDMVFFKYKYLLAL

SEQ ID NO: 1365 - protein, 570 aa, Unknown
  Description of Unknown: Integrase B1366 sequence
  PTHR30461:SF3,SM00857,G3DSA:1.10.10.2600,IPR036162,PF13408, PS51737,IPR025827,G3DSA:3.40.50.1390,IPR006119,IPR038109, PF07508,IPR011109,SSF53041,PTHR30461,Coil, PS51736,cd00338,PF00239
MNIYYVREKLRNCSIYDIELNVAYYARVSTEKVEQQASIKHQEEHFEELIHSNNRWKFAGSYIDDGISGIHADKREEFQRMLRDAKLGKIDMIITKEISRFARNTLDSIQYTRELLSYGVCVWFQNDGINTIDDDSEFRLTIMAGVAQDEIRKLSSRVKFGHAQSIKNGVVLGHRMYGYSNNQGKLELVPEESDMVRMIFQDYASGISTPRIEKKLWDMGYRSFKGGKINRDVIKNIIRNPKYKGYYCGGKVKVVDMFTKKQEFLPQSEWIMFKDDGSRVPQIIDETTWEKANAYLRERGEAIKSRRTSFKNENIFTGKLFCANDGAPYWMKQHYIRGKEDVRWVCSYKIKNGAASCDSFGLAESELKEIIAELINKSSENIDSILEEYFEILQSSIKNIPDNKSEISRLEKQIDTLKQKREKILEYNLDGKISDDEFISRNKEYVKQIKQIESHILEIQNTKSPEPVEIQLSAIKEQLEKFKGVTPQEINRQIVNELFEKITVEPLAATCATLTFQLRSGSLEKWGFPLRRSDDMILTLHSEQHKIFSRKTCIKTQDMVFFKYKYLLAL

SEQ ID NO: 1366 - protein, 570 aa, Unknown
  Description of Unknown: Integrase B1367 sequence
  PTHR30461:SF3,SM00857,G3DSA:1.10.10.2600,IPR036162,PF13408, IPR025827,G3DSA:3.40.50.1390,PS51737,IPR006119,IPR038109, PF07508,IPR011109,SSF53041,PTHR30461,Coil, PS51736,cd00338,PF00239
MQQALNAVIYARYSSHSQQEQSIEGQLRDCYAYAQREGLQVVGEYIDRAISGKTDERPDFQRMIADASKKQFQRVIVWKLDRFARNRYDSAHYKAKLKKYGVKVVSATENISDEPEGIILEGLLESMAEYYSANLSKHVRRGQRESIINGTYLGGVPPIGYKVENKRLVIDERTAPTIRYMFEQYAKGVPKREIIAELNARGIRNKKGKPLTLSSMQAALRNEKYIGIYRYSGQEVMGGCEALIDEATFRKVQERLDKVKHAPAAAKAKIDYLLQGKAFCGYCGSRMVGESGRGKMGNTYHYYACGKRKKEHTCAKKNEKKDFIEWYVVEQTVEYVLTPDRMDYIAAALVAQYEKDFGDNRIKDYEKQLERINGEIRSLVDTLAVCPPSARQPIFDKMELLDVQKTDLEIDIAKLRVAARVQLTEEQIKVWLKQFCKGDLDDMEFRERIIDVFINSVYLYDDKTVIYYNIEGGKQVSYMEMLDSTEEPPFADDPQGSSGVRISNDTLRQIRTVILIQSVSGLRFLLFGKNGVFAALLHPAAPKENPARLFSWSGFCLCVGFVVLVIVERA

SEQ ID NO: 1367 - protein, 570 aa, Unknown
  Description of Unknown: Integrase B1368 sequence
  PTHR30461:SF3,SM00857,G3DSA:1.10.10.2600,IPR036162,PF13408, IPR025827,G3DSA:3.40.50.1390,PS51737,IPR006119,IPR038109, PF07508,IPR011109,SSF53041,PF00239,PTHR30461, PS51736,Coil,cd00338
MNIYYVREKLRSCSIYDIELNVAYYARVSTEKIEQQASIKHQEEHFEELIHSNNRWKFAGSYIDDGISGMHADKREEFQRMLRDAKLGKIDMIITKEISRFARNTLDSIQYTRELLSYGVCVWFQNDGINTIDEDSELRLTIMAGVAQDEIRKLSSRVKFGHAQSIKNGVVLGHRMYGYSNNQGKLELVPEEADMVRMIFQDYASGISTPRIEKKLWNMGYRSFKGGKISRDVIKNIIRNPKYKGYYCGGKVKIVDMFTKKQEFLPQSEWVMFKDDGSRVPQIIDEITWEKANAYLRERGEAIKSRKTSFKSENIFTGKLFCANDGAPYWMKQHYIRGKEDVRWVCSYKIKNGAASCNSFGLAESELKEIIAELINKSSENIDSILEEYFEILQSSIKNIPDNKNEISRLEKQIDLLKQKREKILEYNLDGKISDDEFVSRNKEYVKQIKQTESHIRELQNTKSPEPVEIQLNAIKEQLKKFKGVTQKDINRQIVNELFEKITVEPLAVTCATLTFQLRSESLEKWGFPLRCSDDMILTLHSEQHKIFSRKTFIKTQDMVFFKYKYLLAL

SEQ ID NO: 1368 - protein, 570 aa, Unknown
  Description of Unknown: Integrase B1369 sequence
  PTHR30461:SF3,SM00857,G3DSA:1.10.10.2600,IPR036162,PF13408, IPR025827,G3DSA:3.40.50.1390,PS51737,IPR006119,IPR038109, PF07508,SSF53041,IPR011109,PTHR30461,Coil, PS51736,cd00338,PF00239
MNIYYVREKLRSCSIYDIELNVAYYARVSTEKIEQQASIKHQEEHFEELIHSNNRWKFAGSYIDDGISGMHADKREEFQRMLRDAKLGKIDMIITKEISRFARNTLDSIQYTRELLSYGVCVWFQNDGINTIDDDSEFRLTIMAGVAQDEIRKLSSRVKFGHAQSIKNGVVLGHRMYGYSNHQGKLELIPEEADMVRMVFRDYASGMSTPRIEKKLWDMGYRSFKGGKINRDVIKNIIRNPKYKGYYCGGKVKVVDMFTKKQEFLPQSEWIMFKDDGSRVPQIIDETTWEKANAYLRERGEAIKSRKTSFKSENIFTGKLFCANDGAPYWMKQHYIRGKEDVRWVCSYKIKNGAASCDSFGLAESELKEVIAELINKSSENIDSILEEYFEILQSSIKNIPDNKNEISRLEKQIDLLKQKREKILEYNLDGKISDDEFISRNKEYVKQIKQIESHILEIQNTKSPEPVEIQLSAIKEKLEKFKGVNPKDINRQIVNELFEKITVEPLAATCATLTFQLRSGNLEKWGFPLRCSDDMIFTLHSEQHKIFSRKTCIKTQDMVFFKYKYLLAL

SEQ ID NO: 1369 - protein, 570 aa, Unknown
  Description of Unknown: Integrase B1370 sequence
  PTHR30461:SF3,SM00857,G3DSA:1.10.10.2600,IPR036162,PF13408, IPR025827,G3DSA:3.40.50.1390,PS51737,IPR006119,IPR038109, PF07508,IPR011109,SSF53041,PF00239,PTHR30461, PS51736,Coil,cd00338
MNIYYVREKLRSCSIYDIELNVAYYARVSTEKLEQQASIKHQEEHFEELIHSNSKWKFAGSYIDDGISGMHADKREEFQRMLRDAKLGKIDMIITKEISRFARNTLDSIQYTRELLSYGVCVWFQNDGINTIDDDSEFRLTIMAGVAQDEIRKLSSRVKFGHAQSIKNGVVLGHRMYGYSNNQGKLELIPEEADMVRMIFQDYASGISTPRIEKKLWNMGYRNFKGGKINRDVIKNIIRNPKYKGYYCGGKVKVIDMFTKKQEFLPQSEWVMFKDDGSRVPQIIDENTWEKANAYLRERGEAIKSRRTSFKNENIFTGKLFCANDGAPYWMKQHYIRGKEDVRWVCSYKIKNGAASCDSFGLAESELKEVIAELINKSSENIDAILEEYFEILQSSIKNIPDNKNEISRLEKQIDMLKQKREKILEYNLDRKISDDEFISRNKEYVKQIKQTENHIRELQNTKSPEPVETQLSAIKEQLEKFKGVTPQDINRQIVNELFEKITVEPLAVTCATLTFHLRSGSLEKWGFPLRRSDDMILTLHPEQHKIFSRKTCIKTQHMVFYKYKYLLAL

SEQ ID NO: 1370 - protein, 570 aa, Unknown
  Description of Unknown: Integrase B1371 sequence
  PTHR30461:SF3,SM00857,G3DSA:1.10.10.2600,IPR036162,PF13408, PS51737,G3DSA:3.40.50.1390,IPR025827,IPR006119,IPR038109, PF07508,IPR011109,SSF53041,PTHR30461,Coil, PS51736,cd00338,PF00239
MNIYYVREKLRNCSIYDIELNVAYYARVSTEKVEQQASIKHQEEHFEELIHSNNRWKFAGSYIDDGISGMHADKREEFQRMLRDAKLGKIDMIITKEISRFARNTLDSIQYTRELLSYGVCVWFQNDGINTIDDDSEFRLTIMAGVAQDEIRKLSSRVKFGHAQSIKNGVVLGHRMYGYSNNQGKLELIPEEADMVRMVFRDYASGMSTPRIEKKLWNMGYRSFKGGKISRDVIKNIIRNPKYKGYYCGGKVKVVDMFTKKQEFLPQSEWIMFKDDGSRVPQIIDETTWEKANAYLRERGEAIKSRRTSFKNENIFTGKLFCANDGAPYWMKQHYIRGKEDVRWVCSYKIKNGAASCDSFGLAESELKEIIAELINKSSENIDSILEEYFEILQSSIKNIPDNKNEISRLEKQIDLLKQKREKILEYNLDGKISDDEFISRNKEYVKQIKQIESHILEIQNTKSPEPVEIQLSAIKEQLEKFKGVTPQDINRQIVNELFEKITVEPLAVTCATLTFQLRSGSLEKWGFPLRRSDDMILTLHSEQHKIFSRKTCIKTQDMVFFKYKYLLAL

SEQ ID NO: 1371 - protein, 570 aa, Unknown
  Description of Unknown: Integrase B1372 sequence
  PTHR30461:SF3,SM00857,G3DSA:1.10.10.2600,IPR036162,PF13408, IPR025827,G3DSA:3.40.50.1390,PS51737,IPR006119,IPR038109, PF07508,IPR011109,SSF53041,PF00239,PTHR30461, PS51736,Coil,cd00338
MNIYYVREKLRSCSIYDIELNVAYYARVSTEKLEQQASIKHQEEHFEELIHSNSKWKFAGSYIDDGISGMHADKREEFQRMLRDAKLGKIDMIITKEISRFARNTLDSIQYTRELLSYGVCVWFQNDGINTIDDDSEFRLTIMAGVAQDEIRKLSSRVKFGHAQSIKNGVVLGHRMYGYSNNQGKLELIPEEADMVRMIFQDYASGISTPRIEKKLWNMGYRNFKGGKINRDVIKNIIRNPKYKGYYCGGKVKVIDMFTKKQEFLPQSEWVMFKDDGSRVPQIIDEITWEKANAYLRERGEAIKSRKTSFKSENIFTGKLFCANDGAPYWMKQHYIRGKEDVRWVCSYKIKNGAASCDSFGLAESELKEVIAELINKSSENIDAILEEYFEILQSSIKNIPDNKNEITRLEKQIDVLKQKREKILEYNLDGKISDDEFISRNKEYVKQIKQTENHIRELQNIKSPEPVEIQLSAIKEQLEKFKGVTPKDINRQIVNELFEKITVEPLAATCATLTFQLRSGSLEKWGFPLRRSDDMILTLNPEQHKIFSRKTCIKTQDMVFFKYKYLLAL

SEQ ID NO: 1372 - protein, 570 aa, Unknown
  Description of Unknown: Integrase B1373 sequence
  PTHR30461:SF3,SM00857,G3DSA:1.10.10.2600,IPR036162,PF13408, PS51737,G3DSA:3.40.50.1390,IPR025827,IPR006119,IPR038109, PF07508,IPR011109,SSF53041,PTHR30461,Coil, PS51736,cd00338,PF00239
MNIYYVREKLRNCSIYDIELNVAYYARVSTEKVEQQASIKHQEEHFEELIHSNNRWKFAGSYIDDGISGMHADKREEFQRMLRDAKLGKIDMIITKEISRFARNTLDSIQYTRELLSYGVCVWFQNDGINTIDDDSEFRLTIMAGVAQDEIRKLSSRVKFGHAQSIKNGVVLGHRMYGYSNNQGKLELIPEEADMVRMVFRDYASGMSTPRIEKKLWNMGYRSFKGGKISRDVIKNIIRNPKYKGYYCGGKVKVVDMFTKKQEFLPQSEWIMFKDDGSRVPQIIDETTWEKANAYLRERGEAIKSRRTSFKNENIFTGKLFCANDGAPYWMKQHYIRGKEDVRWVCSYKIKNGAASCDSFGLAESELKEIIAELINKSSENIDSILEEYFEILQSSIKNIPDNKNEISRLEKQIDLLKQKREKILEYNLDGKISDDEFISRNKEYVKQIKQIESHILEIQNTKSPEPVEIQLSAIKEQLEKFKGVTPQDINRQIVNELFEKITVEPLAVTCATLTFQLRSGSLEKWGFPLRRSDDMIFTLHSEQHKIFSRKTCIKTQDMVFFKYKYLLAL

SEQ ID NO: 1373 - protein, 570 aa, Unknown
  Description of Unknown: Integrase B1374 sequence
  PTHR30461:SF3,SM00857,G3DSA:1.10.10.2600,IPR036162,PF13408, IPR025827,G3DSA:3.40.50.1390,PS51737,IPR006119,IPR038109, PF07508,IPR011109,SSF53041,PF00239,PTHR30461, PS51736,Coil,cd00338
MNIYYVREKLRSCSIYDIELNVAYYARVSTEKVEQQASIKHQEEHFEELIHSNNRWKFAGSYIDDGISGMHADKREEFQRMLRDAKLGKIDMIITKEISRFARNTLDSIQYTRELLSYGVCVWFQNDGINTIDDDSEFRLTIMAGVAQDEIRKLSSRVKFGHAQSIKNGVVLGHRMYGYSNNQGKLELIPEEADMVRMIFQDYASGISTPRIEKKLWNMGYRNFKGGKINRDVIKNIIRNPKYKGYYCGGKVKVIDMFTKKQEFLPQSEWIMFKDDGSRVPQIIDETTWEKANAYLRERGEAIKSRRTSFKNENIFTGKLFCANDGAPYWMKQHYIRGKEDVRWVCSYKIKNGAASCNSFGLAESELKEVIAELINKSSENIDSILEEYFEILQSSIKNIPDNKNEISRLEKQIDLLKQKREKILEYNLDGKISDDEFISRNKEYVKQIKQIESHILEIQNTKSPEPVEIQLSAIKEQLEKFKGVTPQDINRQIVNELFEKITVEPLAVTCATLTFQLRSGSLEKWGFPLRRSDDMILTLHPEQHKIFSRKTCIKTQDMVFFKYKYLLAL

SEQ ID NO: 1374 - protein, 570 aa, Unknown
  Description of Unknown: Integrase B1375 sequence
  PTHR30461:SF3,SM00857,G3DSA:1.10.10.2600,IPR036162,PF13408, PS51737,G3DSA:3.40.50.1390,IPR025827,IPR006119,IPR038109, PF07508,IPR011109,SSF53041,PTHR30461,Coil, PS51736,cd00338,PF00239
MNIYYVREKLRNCSIYDIELNVAYYARVSTEKVEQQASIKHQEEHFEDLIHSNNRWKFAGSYIDDGISGIHADKREEFQRMLRDAKLGKIDMIITKEISRFARNTLDSIQYTRELLSYGVCVWFQNDGINTIDDDSEFRLTIMAGVAQDEIRKLSSRVKFGHAQSIKNGVVLGHRMYGYSNNQGKLELIPEEADMVRMVFRDYASGMSTPRIEKKLWNMGYRSFKGGKISRDVIKNIIRNPKYKGYYCGGKVKVVDMFTKKQEFLPQSEWIMFKDDGSRVPQIIDETTWEKANAYLRERGEAIKSRRTSFKNENIFTGKLFCANDGAPYWMKQHYIRGKEDVRWVCSYKIKNGAASCDSFGLAESELKEIIAELINKSSENIDSILEEYFEILQSSIKNIPDNKNEISRLEKQIDLLKQKREKILEYNLDGKISDDEFISRNKEYVKQIKQIESHILEIQNTKSPEPVEIQLSAIKEQLEKFKGVTPQDINRQIVNELFEKITVEPLAVTCATLTFQLRSGSLEKWGFPLRRSDDMIFTLHSEQHKIFSRKTCIKTQDMVFFKYKYLLAL

SEQ ID NO: 1375 - protein, 570 aa, Unknown
  Description of Unknown: Integrase B1376 sequence
  PTHR30461:SF3,SM00857,G3DSA:1.10.10.2600,IPR036162,PF13408, PS51737,IPR025827,G3DSA:3.40.50.1390,IPR006119,IPR038109, PF07508,SSF53041,IPR011109,PF00239,PTHR30461, PS51736,Coil,cd00338
MNIYYVREKLRSCSIYDIELNVAYYARVSTEKVEQQASIKHQEEHFEELIHSNSKWKFAGSYIDDGISGMHADKREEFQRMLRDAKLGKIDMIITKEISRFARNTLDSIQYTRELLSYGVCVWFQNDGINTIDDDSEFRLTIMAGVAQDEIRKLSSRVKFGHAQSIKNGVVLGHRMYGYSNNQGKLELIPEEADMVRMIFQDYASGISTPRIEKKLWNMGYRNFKGGKINRDVIKNIIRNPKYKGYYCGGKVKVIDMFTKKQEFLPQSEWVMFKDDGSRVPQIIDETTWEKANAYLRERGEAIKSRRTSFKNENIFTGKLFCANDGAPYWMKQHYIRGKEDVRWVCSYKIKNGAASCNSFGLAESELKEVIAELINKSSENIDSILEEYFEILQSSIKNIPDNKNEISRLEKQIDMLKQKREKILEYNLDGKISDDEFISRNKEYVKQIKQTENYIQELQNIKSPEPVETQLSAIKEQLEKFKGVTPQDINRQIVNELFEKITVEPLAVTCATLTFQLRSGSLEKWGFPLRRSDDMILTLNPEQHKIFSRKTCIKTQDMVFFKYKYLLAL

SEQ ID NO: 1376 - protein, 570 aa, Unknown
  Description of Unknown: Integrase B1377 sequence
  cd03768,SM00857,G3DSA:1.10.10.2600,IPR036162,PF13408, PS51737,IPR025827,G3DSA:3.40.50.1390,IPR006119,IPR038109, PF07508,IPR011109,SSF53041,PTHR30461,PS51736, Coil,PF00239
MKAAIYSRVSTEGQDYSKQTNELKDYAKRNGIEVAYIFEEKESGFNNDRPEFEKLRKLTKQDIDIILVWEISRLSRRSVYLQQQVEDFTNKGICIYALSNSLRTINTDGTINEMARVVLAVTATIAEQEAATLKARTLSGKRHKVLKEGHSYTQIAPYGYDYDKETKLLSINEKEATVVRRIFQLSIDGYSLIRIATALNVEGIKNKNGNKWYFATIRDMLINPVYMGKARYALKKAPAKEGKKYRKPLEFVEVDSPAIVSEETYQLSLERMQGRKSISKSSYSVEYPLLRGLIVCPVCGRRYVYKRASKLYTCNNRDNDCKAKGASAHKLESIVWDIIKVYFKENMTNNKVEEQIEPLQAEIDSYKQKILLLDGQLSELTEEASRIYDAAIEAQKRFPNMPKLYEDKMKELDSIDKEASRYKKEKELTDKKIRSISKKINHIKEARDINLDDITDELEKYNIFHQFIDNLVICGTKHTSFIVLTLTTGQILYIGHYSKRCSNYYILFYPSSDIYFDIQTNKGYINHLKEKATINSDGSIYLGDLTGEVKEYSIIDFVNYLDIEENRRYY

SEQ ID NO: 1377 - protein, 570 aa, Unknown
  Description of Unknown: Integrase B1378 sequence
  SM00857,G3DSA:1.10.10.2600,IPR036162,PF13408,IPR025827, G3DSA:3.40.50.1390,PS51737,IPR006119,IPR038109,PF07508, SSF53041,IPR011109,PTHR30461,Coil,cd00338, PF00239
MAYRKITDIRDTIGMRAVFYARVSTAEEEQLNAIELQIEENRGCIKEHGWKLVGEYIDRSKSGTMVKGRDDYQRLYEDLYEDLFDIVVIKDQERLQRNTLDWYLFINRVVQTGKLLFMYMDGKFYSPDDALITGVRAIIAEEFSRNLSKKLHNYHDHRIEKARQGQEIALQGSGNVYGWDKKDGKYYINPEQAKVRRLMCEGIMARKGSTLIAKELNEAGYRNTVGKLWKPMDIPKFVYDCKNVGTMIINKERHDFESKQTIKLPKEEWVYVENALPPIVTQEEWDLICKIHEERVIATGSDRRGKKTSGYSFSGKLVCGICGAPYWRKQRVSKDEYWVCSTKQTKGRRTRKRDSTMGKAGEINPLGCDNENISYNSLMEIMGVVSERLQANTDTIKQDMINWLTKLRKQLLEANGGHTEADLQRELSRKSKLLDAYLDGILNKQEYQKKAEELDERIIQLKTETEKNKANSGDIAEIDKVLANIDEEVARYVDGNEKLKVEYLLEHLEQVQIFPDKVIVIVPILSEGIVVEKTQYVSREKWLWKKYINEYYNGQFKSGSGMRLLRWRSD

SEQ ID NO: 1378 - protein, 570 aa, Unknown
  Description of Unknown: Integrase B1379 sequence
  PTHR30461:SF3,SM00857,G3DSA:1.10.10.2600,IPR036162,PF13408, PS51737,G3DSA:3.40.50.1390,IPR025827,IPR006119,IPR038109, PF07508,IPR011109,SSF53041,PTHR30461,Coil, PS51736,cd00338,PF00239
MNIYYVREKLRSCSIYDIELNVAYYARVSTEKVEQQASIKHQEEHFEELIHSNNRWKFAGSYIDDGISGMHADKREEFQRMLRDAKLGKIDMIITKEISRFARNTLDSIQYTRELLSYGVCVWFQNDGINTIDDDSEFRLTIMAGVAQDEIRKLSSRVKFGHAQSIKNGVVLGHRMYGYSNNKGKLELIPEEADMIRIIFQDYASGISTPRIEKKLWNMGYRSFKGGKISRDVIKNIIRNPKYKGYYCGGKVKVVDMFTKKQEFLPQSEWIMFKDDGSRVPQIIDETTWEKANAYLKERGEAIKSRRTSFKNENIFTGKLFCANDGAPYWMKQHYIRGKEDVRWVCSYKIKNGAASCNSFGLAESELKEIIAELINKSSENIDSILEEYFEILQSSIKNIPDNKNEISRLEKQIDLLKQKREKILEYNLDGKISDDEFVSRNKEYVKQIKQTESHIRELQNTKSPEPVEIQLNAIKEQLKKFKGVTQKDINRQIVNELFEKITVEPLAVTCATLTFQLRSGSLEKWGFPLRCSDDMIFTLHSEQHKIFSRKTCIKTQDMVFFKYKYLLAL

SEQ ID NO: 1379 - protein, 570 aa, Unknown
  Description of Unknown: Integrase B1380 sequence
  PTHR30461:SF3,SM00857,G3DSA:1.10.10.2600,IPR036162,PF13408, PS51737,G3DSA:3.40.50.1390,IPR025827,IPR006119,IPR038109, PF07508,IPR011109,SSF53041,PF00239,PTHR30461, PS51736,Coil,cd00338
MNIYYVREKLRSCSIYDIELNVAYYARVSTEKIEQQASIKHQEEHFEELIHSNNRWKFAGSYIDDGISGIHADKREEFQRMLRDAKLGKIDMIITKEISRFARNTLDSIQYTRELLSYGVCVWFQNDGINTIDDDSEFRLTIMAGVAQDEIRKLSSRVKFGHAQSIKNGVVLGHRMYGYSNNQGKLELVPEEADMVRMIFQDYASGISTPRIEKKLWDMGYRSFKGGKINRDVIKNIIRNPKYKGYYCGGKVKVVDMFTKKQEFLPQSEWIMFKDDGSRVPQIIDETTWEKANAYLRERGEAIKSRRTSFKNENIFTGKLFCANDGAPYWMKQHYTRGKEDVRWVCSYKIKNGAASCDSFGLAESELKEIIAELINKSSENIDSILEEYFEILQSSIKNIPDNKNEISRLEKQIDLLKQKREKILEYNLDGKISDDEFISRNKEYVKQIKQIESHILEIQNTKSPEPVEIQLSAIKEQLEKFKGVTPQDINRQIVNELFEKITVEPLAVTYATLTFQLRSGSLEKWGFPLRRSDDMILTLHSEQHKIFSRKTCIKTQDMVFFKYKYLLAL

SEQ ID NO: 1380 - protein, 570 aa, Unknown
  Description of Unknown: Integrase B1381 sequence
  PTHR30461:SF3,SM00857,G3DSA:1.10.10.2600,IPR036162,PF13408, IPR025827,PS51737,G3DSA:3.40.50.1390,IPR006119,IPR038109, PF07508,SSF53041,IPR011109,PF00239,PTHR30461, PS51736,Coil,cd00338
MKKFPIDLSCLTEEEISQFQEDPYTLYNGDQDVALYLRYSSTGQSDQSIEGQLRDCRAFCKANHYRIVAIYVDRATTAHKDVEKRVHLMEMVADSAKQNWEYVIVWKLDRFARNRNDSAIMKMRLRKNGVKVLSATEHLTDSPESIILESVLEGMAEFFSAELSQKVTRGMRESALKCHSVGGHIPLGYKVENHKLVVDPDTAHIVQEAFSLYANGESVADICRKFNSAGYKTAKNTEFNRSSFKAMFRNTRYIGTYTYKDIVIENGIPAIIDKELFETVQRRLSKTATAPARGKAKVDYLLSGKLFCGHCGASMNGESGAGRHGKVYHYYSCYTKKRKLGCDKRPLKKDYIEGIVARDALNLLTDQLIDEIADMAIQQSEQDLINDTHIPQLTAQLSEVEKSITNITAAIEKGIASETLMNRLVQLEHEKKTLNKEIKAEEKFVYRIDRDQIVFWLSQFKYGNIEDEDFRRRLIDLLVNSVTVWDEPDGYKITTAYNLTSCKTKTFRVEKNPAAEEATGFDFGESECAKKLVKSLDFTSFFYFLPRLCSPANGAAAQLSDQDPFCRRIP

SEQ ID NO: 1381 - protein, 570 aa, Unknown
  Description of Unknown: Integrase B1382 sequence
  PTHR30461:SF3,SM00857,G3DSA:1.10.10.2600,IPR036162,PF13408, PS51737,G3DSA:3.40.50.1390,IPR025827,IPR006119,IPR038109, PF07508,IPR011109,SSF53041,PTHR30461,Coil, PS51736,cd00338,PF00239
MNIYYVREKLRNCSIYDIELNVAYYARVSTEKVEQQASIKHQEEHFEELIHSNNRWKFAGSYIDDGISGMHADKREEFQRMLRDAKLGKIDMIITKEISRFARNTLDSIQYTRELLSYGVCVWFQNDGINTIDDDSEFRLTIMAGVAQDEIRKLSSRVKFGHAQSIKNGVVLGHRMYGYSNNQGKLELIPEEADMVRMVFRDYASGMSTPRIEKKLWNMGYRSFKGGKISRDVIKNIIRNPKYKGYYCGGKVKVVDMFTKKQEFLPQSEWIMFKDDGSRVPQIIDETTWEKANAYLRERGEAIKSRRTSFKNENIFTGKLFCANDGAPYWMKQHYIRGKEDVRWVCSYKIKNGAASCDSFGLAESELKEIIAELINKSSENIDSILEEYFEILQSSIKNIPDNKNEISRLEKQIDLLKQKREKILEYNLDGKISDDEFISRNKEYVKQIKQIESHILEIQNTKSPEPVEIQLSAIKEQLEKFKGVTPKDINRQIVNELFEKITVEPLAATCATLTFQLRSGNLEKWGFPLRCSDDMILTLHPEQHKIFSRKTCIKTQDMVFFKYKYLLAL

SEQ ID NO: 1382 - protein, 570 aa, Unknown
  Description of Unknown: Integrase B1383 sequence
  PTHR30461:SF3,IPR036162,PS51737,IPR011109,PTHR30461, PS00397,PF00239,G3DSA:1.10.10.2600,IPR006119,SSF53041, SM00857,IPR025827,IPR038109,PS51736,cd03768, IPR006118,PF13408,G3DSA:3.40.50.1390,PF07508,Coil
MQYKESNIRRNNRVAIYVRVSTVYQADKDSLPMQKQELISYAKLMLGTDDVVIFEDAGYSGKNTIRPKFQEMMEKIRVGAFTHLLVWKIDRISRNLLDFAAMYNELKKLGVTFVSKNEQFDTSTAMGEAMLKIILVFAELERNMTAERVTATMISRAGNGLWNGGRVPYGYSYNAEDQTFSLNSNEDNIVHMIHDKYEELRSLIRLARYLNEKGYRTRAGNEWSPVSLLIILRSFFYCGDYQYNRLKEGDRQQPKDKSEWVTVKDHHIAIISRDQKERIIGILDTNSKLCKDHNIYSTTHTHIFAGLLICSSCGKTMGASPATAKKDWQYSKYICSTRRSSVACAGKATSDPIIGEFVFNYILNMLNAQNNFKRISSPAELQDMLILGNTFCNVDHIESDGLNDLYNVLVSGNIEGEVYGKDTKIKDQAPTISDLSRLRSEKQRLERAMDRLTNLYLYSDDAMSEREYIIQKTKLADSISEIDDQIGFATSGGWQQSISDELFIQRASQFIISQKLSGRNYVSYKRLAISTDAKVLQSFVRSIIDSITMDSGRVKQIIFKNGLSHIFVYK

SEQ ID NO: 1383 - protein, 570 aa, Unknown
  Description of Unknown: Integrase B1384 sequence
  PTHR30461:SF3,SM00857,G3DSA:1.10.10.2600,IPR036162,PF13408, IPR025827,G3DSA:3.40.50.1390,PS51737,IPR006119,IPR038109, PF07508,SSF53041,IPR011109,PF00239,PTHR30461, PS51736,Coil,cd00338
MNIYYVREKLRSCSIYDIELNVAYYARVSTEKIEQQASIKHQEEHFEELIHSNNRWKFAGSYIDDGISGMHADKREEFQRMLRDAKLGKIDMIITKEISRFARNTLDSIQYTRELLSYGVCVWFQNDGINTIDDDSEFRLTIMAGVAQDEIRKLSSRVKFGHAQSIKNGVVLGHRMYGYSNNKGKLELIPEEADMIRIIFQDYASGISTPRIEKKLWDMGYRSFKGGKISRDVIKNIIRNPKYKGYYCGGKVKIVDMFTKKQEFLPQSEWVMFKDDGSRVPQIIDDITWEKANAYLRERGEAIKSRKTSFKSENIFTGKLFCANDGAPYWMKQHYIRGKEDVRWVCSYKIKNGAASCNSFGLAESELKEVIAELINKSYENIDSILEEYFEILQSSIKNIPDNINEITRLEKQIDLLKQKREKILEYNLDGKISDDEFISRNKEYVKQIKQIESHILEIQNAKSPEPVEIQLSAIKEQLEKFKGVNPKDINRQIVNELFEKITVEPLAATCATLTFQLRSGSLEKWGFPLRCSGDMILTLHSEQHKIFSRKTCIKTQDMVFFKYKYLLAL

SEQ ID NO: 1384 - protein, 570 aa, Unknown
  Description of Unknown: Integrase B1385 sequence
  PTHR30461:SF3,cd00338,SM00857,IPR036162,PF13408, PS51737,G3DSA:3.40.50.1390,IPR025827,IPR006119,PF07508, IPR011109,SSF53041,PTHR30461,PS51736,Coil, PF00239
MKTVAIYSRKSRFTGKGDSIENQIEMCKEHIKKFVSPKVEFLIYEDEGFSGGNTNRPAFQRLINDIKYGNIDLLICYRLDRISRNVADFSSVLDVLQEYKVDFISIKEQFDTSSPMGRAMIYIASVFAQLERETIAERIKDNMLEMAKKGKWTGGKLPLGFTSKKIAYIDEEGKKRFKVTLEHDSKDLEFVKFLYEKYLELGSLHKLETYTHENNIRSASGKIFEKSTLKIILQNPIYVKADENVFNYFENKGWSVYGEPDGLHSLLSYNKTETAKKDGKLTKRTKDESESLVAVSDIKGFIDSSLWLKVQYQFKKNKNTFPRLGKTHNALLVGKLFCGNCGTRMIIQHGRTSTKTGIKTFYYVCSLKKTSKKKLCSAHNVKTDFLENLVLDSLEKLYYKKDFINDSLKINLKENKDNIKEINTTKKLIELNKNKINSLIEKLSLDFDNVLSDILIPQIKKIKIENDVLESKLEKLKLKKQESEMNRIEIDLITSLLNKCKNIKELTRTEQKQIIDCLVDSIYYYSNDNGNDKIKIKFINDIDSINTLLSDEEKRQFEKLSFYSHSMSSI

SEQ ID NO: 1385 - protein, 570 aa, Unknown
  Description of Unknown: Integrase B1386 sequence
  SM00857,G3DSA:1.10.10.2600,IPR036162,PF13408,IPR025827, G3DSA:3.40.50.1390,PS51737,IPR006119,IPR038109,PF07508, SSF53041,IPR011109,PTHR30461,Coil,cd00338, PF00239
MAYRKITDIRDTIGMRAVFYARVSTAEEEQLNAIELQIEENRGCIKDHGWKLVGEYIDRSKSGTMVKGRDDYQRLYEDLYEDLFDIVVIKDQERLQRNTLDWYLFINRVVQTGKLLFMYMDGKFYSPDDALITGVRAIIAEEFSRNLSKKLHNYHDHRIEKARQGQEIALQGSGNVYGWDKKDGKYYINPEQAKVRRLMCEGIMARKGSTLIAKELNDAGYRNTVGKPWKPMDIPKFVYDCKNVGTMIINKERHDFESKQTIKLPKEEWVYVENALPPIVTQEEWDLICKIHEERVIATGSDRRGKKTSGYSFSGKLVCGICGAPYWRKQRVSKDEYWVCSTKQTKGRRTRKRDSTMGKAGEINPLGCDNENISYNSLMEIMGVVSERLQANTDTIKQDIINWLTKLRKQLLEANGGHTEADLQREISRKSKLLDTYLDGILNKQEYQKKAEELDERIIQLKAETEKNKANSGDIAEIDKVLANIDEEVSRYVDGNEKLKVEYLLEHLEQVQIFPDKVIVIVPILSEGIVVEKTQYVSREKRRRKVHNHFNYVWADKKGQRKNSNLRQRY

SEQ ID NO: 1386 - protein, 570 aa, Unknown
  Description of Unknown: Integrase B1387 sequence
  PTHR30461:SF3,SM00857,G3DSA:1.10.10.2600,IPR036162,PF13408, IPR025827,G3DSA:3.40.50.1390,PS51737,IPR006119,IPR038109, PF07508,SSF53041,IPR011109,PTHR30461,Coil, PS51736,cd00338,PF00239
MNIYYVREKLRNCSIYDIELNVAYYARVSTEKVEQQASIKHQEEHFEELIHSNNRWKFAGSYIDDGISGIHADKREEFQKMLRDAKLGKIDMIITKEISRFARNTLDSIQYTRELLSYGVCVWFQNDGINTIDEDSELRLTIMAGVAQDEIRKLSSRIKFGHAQSIKNGVVLGHRMYGYSNHQGKLELIPEEADMVRMVFRDYASGMSTPRIEKKLWNMGYRSFKGGKISRDVIKNIIRNPKYKGYYCGGKVKVVDMFTKKQEFLPQSEWIMFKDDGSRVPQIIDETTWEKANAYLRERGEAIKSRRTSFKNENIFTGKLFCANDGAPYWMKQHYIRGKEDVRWVCSYKIKNGAASCDSFGLAESELKEVIAELINKSSENIDSILEEYFEILQSSIKNIPDNKNEISRLEKQIDLLKQKREKILEYNLDGKISDDEFISRNKEYVKQIKQIESHILEIQNTKSPEPVEIQLSAIKEQLEKFKGVTPKDINRQIVNELFEKITVEPLAATCATLTFQLRSGSIEKWGFPLRRSDDMILTLNSEQHKIFSRKTCIKTQDMVFFKYKYLLAL

SEQ ID NO: 1387 - protein, 570 aa, Unknown
  Description of Unknown: Integrase B1388 sequence
  PTHR30461:SF3,SM00857,G3DSA:1.10.10.2600,IPR036162,PF13408, IPR025827,G3DSA:3.40.50.1390,PS51737,IPR006119,IPR038109, PF07508,IPR011109,SSF53041,PTHR30461,Coil, PS51736,cd00338,PF00239
MNIYYVREKLRNCSIYDIELNVAYYARVSTEKVEQQASIKHQEEHFEELIHSNNRWKFAGSYIDDGISGIHADKREEFQRMLRDAKLGKIDMIITKEISRFARNTLDSIQYTRKLLSYGVCVWFQNDGINTIDDDSEFRLTIMAGVAQDEIRKLSSRVKFGHAQSIKNGVVLGHRMYGYSNNQGKLELIPEEADMVRMVFRDYASGMSTPRIEKKLWNMGYRSFKGGKISRDVIKNIIRNPKYKGYYCGGKVKVVDMFTKKQEFLPQSEWIMFKDDGSRVPQIIDETTWEKANAYLRERGEAIKSRRTSFKNENIFTGKLFCANDGAPYWMKQHYIRGKEDVRWVCSYKIKNGAASCDSFGLAESELKEVIAELINKSSENIDSILEEYFEILQSSIKNIPDNKNEISRLEKQIDLLKQKREKILEYNLDGKISDDEFISRNKEYVKQIKQIESHILEIQNTKSPEPVEIQLSAIKEQLEKFKGVNPKDINRQIVNELFEKITVEPLAATCATLTFQLRSGSIEKWGFPLRRSDDMILTLHSEQHKIFSRKTCIKTQDMVFFKYKYLLAL

SEQ ID NO: 1388 - protein, 570 aa, Unknown
  Description of Unknown: Integrase B1389 sequence
  PTHR30461:SF3,SM00857,G3DSA:1.10.10.2600,IPR036162,PF13408, IPR025827,G3DSA:3.40.50.1390,PS51737,IPR006119,IPR038109, PF07508,IPR011109,SSF53041,PTHR30461,Coil, PS51736,cd00338,PF00239
MNIYYVREKLRSCSIYDIELNVAYYARVSTEKLEQQASIKHQEEHFEELIHSNNRWKFAGSYIDDGISGMHADKREEFQRMLKDAKLGKIDMIITKEISRFARNTLDSIQYTRELLSYGVCVWFQNDGINTIDDDSEFRLTIMAGVAQDEIRKLSSRVKFGHAQSIKNGVVLGHRMYGYSNNQGKLELIPEEADMVRMIFQDYASGISTPRIEKKLWNMGYRNFKGGKINRDVIKNIIRNPKYKGYYCGGKVKVIDMFTKKQEFLPQPEWVMFKDDGSRVPQIIDENTWEKANAYLRERGEAIKSRRTSFKNENIFTGKLFCANDGAPYWMKQHYIRGKEDVRWVCSYKIKNGAASCDSFGLAESELKEVIAELINKSSENIDSILEEYFEILQSSIKNIPDNKNEISRLEKQIDLLKQKREKILEYNLDGKISDDEFISRNKEYVKQIKQIESHILEIQNTKSPEPVEIQLSAIKEKLEKFKGVNPKDINRQIVNELFEKITVEPLAATCATLTFQLRSGNLEKWGFPLRCSDDMILTLHSEQHKIFSRKTCIKTQDMVFFKYKYLLAL

SEQ ID NO: 1389 - protein, 570 aa, Unknown
  Description of Unknown: Integrase B1390 sequence
  PTHR30461:SF3,IPR036162,PS51737,IPR011109,PTHR30461, PS00397,PF00239,G3DSA:1.10.10.2600,IPR006119,SSF53041, SM00857,IPR025827,IPR038109,PS51736,cd03768, IPR006118,PF13408,G3DSA:3.40.50.1390,PF07508,Coil
MTNNAASARVAIYVRVSTLYQVDKDSLPMQKQDLLSYAKLMLNTEDCMIFEDAGYSGKNMDRPKFQEMMSQIRTGTFTHLLVWKIDRISRNLLDFASMYAELKELGVTFVSKSEQFDTSTAMGEAMLKIILVFAELERNMTSERVTATMISRAHNRLWNGGRIPYGYNYDPQTREFSFNETEMPLVIMIHDMYEQQRSLVRVARELNEKGYRSRAGNYWSPVSLRLILKNLFYCGDYVYNKQREGNRQKVKDESEWVITKEHHPAMISRDQKEHVIKILNSNSKLCRERDIYSAPDHVHVFGGLLVCSSCGKTFNSSPGSITRDKWHYSKYGCSTRRKSTTLCKSKGTSDPIVGEFTFNYILNMLNAQANFASINSPADLQKRLLIGDTFSYIDHIEADGLNDLYNILASGKITGAVWGNNVKAPTKKVAVESELTKIKAEKQKTERALDRLRNLYLYVDDAMSDAEYIIQRNKLTETLDNLNEQIGLLNTDTWEQSVSDEEFIQRASEFIVAQKLTGRKYVSYKRLAKSVDATVLRDFVLSIIDRMTVTDGKISSIVFRNGLCHNFVFK

SEQ ID NO: 1390 - protein, 570 aa, Unknown
  Description of Unknown: Integrase B1391 sequence
  SM00857,G3DSA:1.10.10.2600,IPR036162,PF13408,PS51737, G3DSA:3.40.50.1390,IPR025827,IPR006119,IPR038109,PF07508, IPR011109,SSF53041,PTHR30461,Coil,PS51736, cd00338,PF00239
MNIYYVREKLRSCSIYDIELNVAYYARVSTEKVEQQASIKHQEEHFEELIHSNNRWKFAGSYIDDGISGMHADKREEFQRMLRDAKLGKIDMIITKEISRFARNTLDSIQYTRELLSYGVCVWFQNDGINTIDEDSELRLTIMAGVAQDEIRKLSSRIKFGHAQSIKNGVVLGHRMYGYSNHQGKLELIPEEADMVRMVFRDYASGMSTPRIEKKLWNMGYRSFKGGKISRDVIKNIIRNPKYKGYYCGGKVKIVDMFTKKQEFLPQSEWVMFKDDGSRVPQIIDETTWEKANAYLRERGEAIKSRKTSFKSENIFTGKLFCANDGAPYWMKQHYIRGKEDVRWVCSYKIKNGAASCNSFGLAESELKEIIAELINKSSENIDSILEEYFEILQSSIKNIPDNKNEISRLEKQIDLLKQKREKILEYNLDGKISDDEFISRNKEYVKQIKQIESHILEIQNTKSPEPVEIQLSAIKEKLEKFKGVNPKDINRQIVNELFEKITVEPLAVTCATLTFQLRSGNLEKRGFPLRCSDDMIFTLHSEQHKIFSRKTCIKTQDMVFFKYKYLLAL

SEQ ID NO: 1391 - protein, 570 aa, Unknown
  Description of Unknown: Integrase B1392 sequence
  PTHR30461:SF3,SM00857,G3DSA:1.10.10.2600,IPR036162,PF13408, PS51737,G3DSA:3.40.50.1390,IPR025827,IPR006119,IPR038109, PF07508,IPR011109,SSF53041,PTHR30461,Coil, PS51736,cd00338,PF00239
MNIYYVREKLRSCSIYDIELNVAYYARVSTEKVEQQASIKHQEEHFEELIRSNNRWKFAGSYIDDGISGMHADKREEFQRMLKDAKLGKIDMIITKEISRFARNTLDSIQYTRELLSYGVCVWFQNDGINTIDDDSEFRLTIMAGVAQDEIRKLSSRVKFGHAQSIKNGVVLGHRMYGYSNNKGKLELIPEEADMIRIIFQDYASGISTPRIEKKLWDMGYRSFKGGKINRDVIKNIIRNPKYKGYYCGGKVKVVDMFTKKQEFLPQSEWIMFKDDGSRVPQIIDETTWEKANAYLRERGEAIKSRKTSFKSENIFTGKLFCANDGAPYWMKQHYIRGKEDVRWVCSYKIKNGAASCDSFGLAESELKEVIAELINKSSENIDSILEEYFEILQSSIKNIPDNKNEISRLEKQIDLLKQKREKILEYNLDGKISDDEFISRNKEYVKQIKQIESHILEIQNTKSPEPVEIQLSAIKEQLEKFKGVTSKDINRQIVNELFEKITVEPLAATCATLTFQLRSGNLEKWGFPLRCSDDMILTLHSEQHKIFSRKTCIKTQDMVFFKYKYLLAL

SEQ ID NO: 1392 - protein, 570 aa, Unknown
  Description of Unknown: Integrase B1393 sequence
  PTHR30461:SF3,SM00857,G3DSA:1.10.10.2600,IPR036162,PF13408, PS51737,G3DSA:3.40.50.1390,IPR025827,IPR006119,IPR038109, PF07508,IPR011109,SSF53041,PF00239,PTHR30461, PS51736,Coil,cd00338
MNIYYVREKLRNCSIYDIELNVAYYARVSTEKVEQQASIKHQEEHFEELIHSNNRWKFAGSYIDDGISGIHADKREEFQRMLRDAKLGKIDMIITKEISRFARNTLDSIQYTRKLLSYGVCVWFQNDGINTIDDDSEFRLTIMAGVAQDEIRKLSSRVKFGHAQSIKNGVVLGHRMYGYSNNQGKLELVPEEADMVRMIFQDYASGISTPRIEKKLWDMGYRSFKGGKINRDVIKNIIRNPKYKGYYCGGKVKVVDMFTKKQEFLPQSEWIMFKDDGSRVPQIIDETTWEKANAYLRERGEAIKSRRTSFKSENIFTGKLFCANDGAPYWMKQHYIRGKEDVRWVCSYKIKNGAASCNSFGLAESELKEVIAELINKSSENIDSILEEYFEILQSSIKNIPDNKNEISRLEKQIDLLKQKREKILEYNLDGKISDDEFISRNKEYVKQIKQIESHILEIQNTKSPEPVEIQLSAIKEQLEKFKGVTPQDINRQIVNELFEKITVEPLAVTCATLTFQLRSGSLEKWGFPLRRSDDMIFTLHSEQHKIFSRKTCIKTQDMVFFKYKYLLAL

SEQ ID NO: 1393 - protein, 570 aa, Unknown
  Description of Unknown: Integrase B1394 sequence
  PTHR30461:SF3,SM00857,G3DSA:1.10.10.2600,IPR036162,PF13408, IPR025827,G3DSA:3.40.50.1390,PS51737,IPR006119,IPR038109, PF07508,IPR011109,SSF53041,PTHR30461,Coil, PS51736,cd00338,PF00239
MNIYYVREKLRNCSIYDIELNVAYYARVSTEKVEQQASIKHQEEHFEDLIHSNNRWKFAGSYIDDGISGIHADKREEFQRMLRDAKLGKIDMIITKEISRFARNTLDSIQYTRELLSYGVCVWFQNDGINTIDDDSEFRLTIMAGVAQDEIRKLSSRVKFGHAQSIKNGVVLGHRMYGYSNNQGKLELVPEEADMVRMIFQDYASGISTPRIEKKLWDMGYRSFKGGKINRDVIKNIIRNPKYKGYYCGGKVKVVDMFTKKQEFLPQSEWIMFKDDGSRVPQIIDEATWEKANAYLRERGEAIKSRRTSFKSENIFTGKLFCANDGAPYWMKQHYIRGKEDVRWVCSYKIKNGAASCNSFGLAESELKEIIAELINKSSENIDSILEEYFEILQSSIKNIPDNKNEISRLEKQIDLLKQKREKILEYNLDGKISDDEFISRNKEYVKQIKQIESHILEIQNTKSPEPVEIQLSAIKEQLEKFKGVTPQDINRQIVNELFEKITVEPLAVTCATLTFQLRSGSLEKWGFPLRRSDDMIFTLHSEQHKIFSRKTCIKTQDMVFFKYKYLLAL

SEQ ID NO: 1394 - protein, 570 aa, Unknown
  Description of Unknown: Integrase B1395 sequence
  PTHR30461:SF3,SM00857,G3DSA:1.10.10.2600,IPR036162,PF13408, IPR025827,G3DSA:3.40.50.1390,PS51737,IPR006119,IPR038109, PF07508,IPR011109,SSF53041,PF00239,PTHR30461, PS51736,Coil,cd00338
MNIYYVREKLRSCSIYDIELNVAYYARVSTEKLEQQASIKHQEEHFEELIHSNNRWKFAGSYIDDGISGMHADKREEFQRMLKDAKLGKIDMIITKEISRFARNTLDSIQYTRELLSYGVCVWFQNDGINTIDDDSEFRLTIMAGVAQDEIRKLSSRVKFGHAQSIKNGVVLGHRMYGYSNNQGKLELIPEEADMVRMIFQDYASGISTPRIEKKLWNMGYRNFKGGKINRDVIKNIIRNPKYKGYYCGGKVKVIDMFTKKQEFLPQPEWVMFKDDGSRVPQIIDENTWEKANAYLRERGEAIKSRRTSFKNENIFTGKLFCANDGAPYWMKQHYIRGKEDVRWVCSYKIKNGAASCNSFGLAESELKEVIAELINKSSENIDSILEEYFEILQSSIKNIPDNKNEISRLEKQIDLLKQKREKILEYNLDGKISDDEFISRNKEYMKQIKQIESHILEIQNTKSPEPVEIQLSAIKEQLEKFKGVTPKDINRQIVNELFEKITVEPLAATCATLTFQLRSGNLEKWGFPLRCSDDMILTLHSEQHKIFSRKTCIKTQDMVFFKYKYLLAL

SEQ ID NO: 1395 - protein, 570 aa, Unknown
  Description of Unknown: Integrase B1396 sequence
  PTHR30461:SF3,SM00857,G3DSA:1.10.10.2600,IPR036162,PF13408, PS51737,G3DSA:3.40.50.1390,IPR025827,IPR006119,IPR038109, PF07508,IPR011109,SSF53041,PF00239,PTHR30461, PS51736,Coil,cd00338
MNIYYVREKLRNCSIYDIELNVAYYARVSTEKVEQQASIKHQEEHFEELIHSNNRWKFAGSYIDDGISGMHADKREEFQRMLRDAKLGKIDMIITKEISRFARNTLDSIQYTRELLSYGVCVWFQNDGINTIDDDSEFRLTIMAGVAQDEIRKLSSRVKFGHAQSIKNGVVLGHRMYGYSNNQGKLELIPEEADMVRMIFQDYASGISTPRIEKKLWDMGYRSFKGGKINRDVIKNIIRNPKYKGYYCGGKVKVVDMFTKKQEFLPQSEWIMFKDDGSRVPQIIDETTWEKANAYLRERGEAIKSRRTSFKSENIFTGKLFCANDGAPYWMKQHYIRGKEDVRWVCSYKIKNGAASCDSFGLAESELKEIIAELINKSSENIDSILEEYFEILQSSIKNIPDNKNEISRLEKQIDLLKQKREKILEYNLDGKISDDEFISRNKEYVKQIKQIESHILEIQNTKSPEPVEIQLSAIKEQLEKFKGVTPQDINRQIVNELFEKITVEPLAVTCATLTFQLRSGSLEKWGFPLRRSDDMIFTLHSEQHKIFSRKTCIKTQDMVFFKYKYLLAL

SEQ ID NO: 1396 - protein, 570 aa, Unknown
  Description of Unknown: Integrase B1397 sequence
  PTHR30461:SF3,SM00857,G3DSA:1.10.10.2600,IPR036162,PF13408, IPR025827,G3DSA:3.40.50.1390,PS51737,IPR006119,IPR038109, PF07508,IPR011109,SSF53041,PTHR30461,Coil, PS51736,cd00338,PF00239
MNIYYVREKLRNCSIYDIELNVAYYARVSTEKVEQQASIKHQEEHFEELIHSNNRWKFAGSYIDDGISGIHADKREEFQRMLRDAKLGKIDMIITKEISRFARNTLDSIQYTRKLLSYGVCVWFQNDGINTIDDDSEFRLTIMAGVAQDEIRKLSSRVKFGHAQSIKNGVVLGHRMYGYSNNQGKLELVPEEADMVRMIFQDYASGISTPRIEKKLWDMGYRSFKGGKINRDVIKNIIRNPKYKGYYCGGKVKVVDMFTKKQEFLPQSEWIMFKDDGSRVPQIIDETTWEKANAYLRERGEAIKSRRTSFKNENIFTGKLFCANDGAPYWMKQHYIRGKEDVRWVCSYKIKNGAASCDSFGLAESELKEVIAELINKSSENIDSILEEYFEILQSSIKNIPDNKNEISRLEKQIDLLKQKREKILEYNLDGKISDDEFISRNKEYVKQIKQIESHILEIQNTKSPEPVEIQLSAIKEQLEKFKGVTPQDINRQIVNELFEKITVEPLAVTCATLTFQLRSGSLEKWGFPLRRSDDMIFTLHSEQHKIFSRKTCIKTQDMVFFKYKYLLAL

SEQ ID NO: 1397 - protein, 570 aa, Unknown
  Description of Unknown: Integrase B1398 sequence
  PTHR30461:SF3,SM00857,G3DSA:1.10.10.2600,IPR036162,PF13408, IPR025827,PS51737,G3DSA:3.40.50.1390,IPR006119,IPR038109, PF07508,IPR011109,SSF53041,PTHR30461,Coil, PS51736,cd00338,PF00239
MNIYYVREKLRSCSIYDIELNVAYYARVSTEKLEQQASIKHQEEHFEELIHSNNRWKFAGSYIDDGISGMHADKREEFQRMLKDAKLGKIDMIITKEISRFARNTLDSIQYTRELLSYGVCVWFQNDGINTIDDDSEFRLTIMAGVAQDEIRKLSSRVKFGHAQSIKNGVVLGHRMYGYSNNQGKLELIPEEADMVRMIFQDYASGISTPRIEKKLWNMGYRNFKGGKINRDVIKNIIRNPKYKGYYCGGKVKVIDMFTKKQEFLPQPEWVMFKDDGSRVPQIIDENTWEKANAYLRERGEAIKSRRTSFKNENIFTGKLFCANDGAPYWMKQHYIRGKEDVRWVCSYKIKNGAASCNSFGLAESELKEVIAELINKSSENIDSILEEYFEILQSSIKNIPDNKNEISRLEKQIDLLKQKREKILEYNLDGKISDDEFISRNKEYMKQIKQIESHILEIQNTKSPEPVEIQLSAIKEQLEKFKGVTPKDINRQIVNELFEKITVEPLAATCATLTFQLRSGNLKKWGFPLRCSDDMILTLHSEQHKIFSRKTCIKTQDMVFFKYKYLLAL

SEQ ID NO: 1398 - protein, 570 aa, Unknown
  Description of Unknown: Integrase B1399 sequence
  PTHR30461:SF3,SM00857,G3DSA:1.10.10.2600,IPR036162,PF13408, PS51737,G3DSA:3.40.50.1390,IPR025827,IPR006119,IPR038109, PF07508,IPR011109,SSF53041,PTHR30461,Coil, PS51736,cd00338,PF00239
MNIYYVREKLRSCSIYDIELNVAYYARVSTEKVEQQASIKHQEEHFEELIHSNNRWKFAGSYIDDGISGMHADKREEFQRMLRDAKLGKIDMIITKEISRFARNTLDSIQYTRELLSYGVCVWFQNDGINTIDDDSEFRLTIMAGVAQDEIRKLSSRVKFGHAQSIKNGVVLGHRMYGYSNNQGKLELIPEEADMVRMVFRDYASGMSTPRIEKKLWNMGYRSFKGGKISRDVIKNIIRNPKYKGYYCGGKVKVVDMFTKKQEFLPQSEWIMFKDDGSRVPQIIDETTWEKANAYLRERGEAIKSRRTSFKNENIFTGKLFCANDGAPYWMKQHYIRGKEDVRWVCSYKIKNGAASCDSFGLAESELKEIIAELINKSSENIDSILEEYFEILQSSIKNIPDNKNEISRLEKQIDLLKQKREKILEYNLDGKISDDEFISRNKEYVKQIKQIESHILEIQNTKSPEPVEIQLSAIKEQLEKFKGVTPQDINRQIVNELFEKITVEPLAVTCATLTFQLRSGSLEKWGFPLRRSDDMIFTLHSEQHKIFSRKTCIKTQDMVFFKYKYLLAL

SEQ ID NO: 1399 - protein, 570 aa, Unknown
  Description of Unknown: Integrase B1400 sequence
  PTHR30461:SF3,SM00857,G3DSA:1.10.10.2600,IPR036162,PF13408, IPR025827,G3DSA:3.40.50.1390,PS51737,IPR006119,IPR038109, PF07508,IPR011109,SSF53041,PF00239,PTHR30461, PS51736,Coil,cd00338
MNIYYVREKLRNCSIYDIELNVAYYARVSTEKVEQQASIKHQEEHFEDLIHSNNRWKFAGSYIDDGISGIHADKREEFQRMLRDAKLGKIDMIITKEISRFARNTLDSIQYTRELLSYGVCVWFQNDGINTIDDDSEFRLTIMAGVAQDEIRKLSSRVKFGHAQSIKNGVVLGHRMYGYSNNQGKLELVPEEADMVRMIFRDYASGMSTPRIEKKLWNMGYRSFKGGKISRDVIKNIIRNPKYKGYYCGGKVKVVDMFTKKQEFLPQSEWIMFKDDGSRVPQIIDETTWEKANAYLRERGEAIKSRRTSFKSENIFTGKLFCANDGAPYWMKQHYIRGKEDVRWVCSYKIKNGAASCNSFGLAESELKEVIADLINKSSENIDNILKEYFEILQSTIKNIPDNKSEISRLEKQIDTLKQKREKILEYNLDGKISDDEFVSRNKEYMKQIKQTENRIRELQNVKVKEPEDAQLKAIKEQLEKFKGVTPQDINRQIVNELFEKITVEPLAVTCATLTFQLRSGSLEKWGFPLRRSDDMILTLHSEQHKVFSRKTCIKTQDMVFYKYKYLLAL

SEQ ID NO: 1400 - protein, 570 aa, Unknown
  Description of Unknown: Integrase B1401 sequence
  cd03768,PTHR30461:SF3,SM00857,IPR036162,PF13408, PS51737,IPR025827,G3DSA:3.40.50.1390,IPR006119,PF07508, SSF53041,IPR011109,PTHR30461,PS51736,Coil, PF00239
MKTVAIYSRKSRFTGKGDSIENQIEMCKEHIKKFVSPNVEFLIYEDEGFSGGNTNRPAFQRLINDIKYGNINLLICYRLDRISRNVADFSSVLDVLQEYKVDFISIKEQFDTSSPMGRAMIYIASVFAQLERETIAERIKDNMLEMAKKGKWTGGKLPLGFTSKKIAYIDEEGKKRFKVTLEHDSKDLEFVKFLYEKYLELGSLHKLETYTHENNIRSASGKIFEKSTLKIILQNPIYVKADENVFNYFENKGWSVYGEPDGLHSLLSYNKTETAKKDGKLTKRNKDESESLVAVSDVKGFIDSSLWLKVQYQFKKNKNTFPRLGKTHNALLVGKLFCGNCGTRMIIQHGRTSTKTGIKTFYYVCSLKKTSKKKLCSAHNVKTDFLENLVLDSLEKLYYKKDFINDSLKINLKENKDNIKEINTTKKLIELNKNKINSLIEKLSLDFDNILSDILIPQIKKIKIENDVLESKLEELKLKKQESEMNRIEIDLITSLLNKCKNIKELTRTEQKQIIDCLVDSIYYYSNDNGNDKIKIKFINDIDSINTLLSDEEKRQFEKLSFYSHSMSSI

SEQ ID NO: 1401 - protein, 570 aa, Unknown
  Description of Unknown: Integrase B1402 sequence
  cd03768,SM00857,G3DSA:1.10.10.2600,IPR036162,PF13408, IPR025827,G3DSA:3.40.50.1390,PS51737,IPR006119,IPR038109, PF07508,IPR011109,SSF53041,PTHR30461,PS51736, Coil,PF00239
MKAAIYSRVSTDQQDYSKQTDELKDYAKRNGIEVVYVFEEKESGFNNDRPEFEKLRKLTKQDIDIILVWEISRLSRRSVYLQQQIEDFTNKGICIYALSNSLRTINADGTINEMARVVLAVTATIAEQEAATLKARTLSGKRHKVLKEGHSYTQIAPYGYDYDKETKLLSINEKEATVVRRIFQLSIDGYSLIRIATALNVEGIKNKKGNKWYFATIRDMLINPVYMGKARYALKKAPAKEGKKYRKPLEFVEVDSPAIVSEETYQLSLERMQGRKSISKSSYSVEYPLLRGLIVCPVCGRRYVYKRASKLYTCNNRDNDCKAKGASAHKLESIVWDIIKVYFKENMTNNKVEEQIEPLQAEIDSYKQKILLLDGQLSELTEEASRIYDAAIEAQKRFPNMPKLYEDKMKELDSIDKEASRYKKEKELTDKKIRSISKKINHIKEARDINLDDITDELEKYNIFHQFIDNLVICGTKHTSFIVLTLTTGQILYIGHYSKRCSNYYILFYPSSDIYFDIQTNKGYINHLKEKATINSDGSIYLGDLTGEVKEYSIIDFVNYLDIEENRRYY

SEQ ID NO: 1402 - protein, 570 aa, Unknown
  Description of Unknown: Integrase B1403 sequence
  PTHR30461:SF3,SM00857,G3DSA:1.10.10.2600,IPR036162,PF13408, IPR025827,G3DSA:3.40.50.1390,PS51737,IPR006119,IPR038109, PF07508,IPR011109,SSF53041,PTHR30461,Coil, PS51736,cd00338,PF00239
MNIYYVREKLRSCSIYDIELNVAYYARVSTEKLEQQVSIKHQEEHFEELIHSNNRWRFAGSYIDDGISGMNANKREEFQRMLRDAKLGKIDMIITKEISRFARNTLDSIQYTRELLSYGVCVWFQNDGINTIDEDSEFRLTIMAGVAQDEIRKLSSRVKFGHAQSIKNGVVLGHRMYGYSNNQGKLELVPEEADMVRMIFQDYASGISTPRIEKKLWDMGYRSFKGGKINRDVIKNIIRNPKYKGYYCGGKVKVVDMFTKKQEFLPQSEWIMFKDDGSRVPQIIDEATWEKANAYLRERGEAIKSRRTSFKSENIFTGKLFCANDGAPYWMKQHYIRGKEDVRWVCSYKIKNGAASCNSFGLAESELKEIIAELINKSSENIDSILEEYFEILQSSIKNIPDNKNEISRLEKQIDLLKQKREKILEYNLDGKISDDEFISRNKEYVKQIKQIESHILEIQNTKSPEPVEIQLSAIKEQLEKFKGVTPQDINRQIVNELFEKITVEPLAVTCATLTFQLRSGSLEKWGFPLRRSDDMILTLHSEQHKVFSRKTCIKTQDMVFYKYKYLLAL

SEQ ID NO: 1403 - protein, 570 aa, Unknown
  Description of Unknown: Integrase B1404 sequence
  PTHR30461:SF3,SM00857,G3DSA:1.10.10.2600,IPR036162,PF13408, IPR025827,G3DSA:3.40.50.1390,PS51737,IPR006119,IPR038109, PF07508,SSF53041,IPR011109,PF00239,PTHR30461, PS51736,Coil,cd00338
MNIYYVREKLRNCSIYDIELNVAYYARVSTEKVEQQASIKHQEEHFEELIHSNNRWKFAGSYIDDGISGMHADKREEFQRMLKDAKLGKIDMIITKEISRFARNTLDSIQYTRELLSCGVCVWFQNDGINTIDDDSEFRLTIMAGVAQDEIRKLSSRVKFGHAQSIKNGVVLGHRMYGYSNNRGKLELIQEEADMVRMIFQDYASGISTPRIEKKLWDMGYRSLKGGKINRDVIKNIIRNPKYKGYYCGGKVKVIDMFTKKQEFLPQSEWVMFKDDGSRVPQIIDETTWEKANAYLRERGEAIKSRRTSFKNENIFTGKLFCANDGAPYWMKQHYIRGKEDVRWVCSYKIKNGAASCSSFGLAESELKEVIAELINKSSENIDSILEEYFEILQSSIKNIPDNTNEITRLEKQIDLLKQKREKILEYNLDGKITDDEFIARNKEYVNRIKQTENLIRELQNVKSPEPVDVQLKSIKEQLEKFKGVTPQDINRQIVDELFEKITVEPLAVTCATLTFHLRSGSLEKWGFPLRCSDDMILTLHPEQHKIFSRKTCIKTQHMVFYKYKYLLAL

SEQ ID NO: 1404 - protein, 570 aa, Unknown
  Description of Unknown: Integrase B1405 sequence
  PTHR30461:SF3,SM00857,G3DSA:1.10.10.2600,IPR036162,PF13408, PS51737,IPR025827,G3DSA:3.40.50.1390,IPR006119,IPR038109, PF07508,IPR011109,SSF53041,PF00239,PTHR30461, PS51736,Coil,cd00338
MNIYYVREKLRNCSIYDIELNVAYYARVSTEKVEQQASIKHQEEHFEELIHSNNRWKFAGSYIDDGISGIHADKREEFQRMLRDAKLGKIDMIITKEISRFARNTLDSIQYTRELLSYGVCVWFQNDGINTIDDDSEFRLTIMAGVAQDEIRKLSSRVKFGHAQSIKNGVVLGHRMYGYSNNQGKLELVPEESDMVRMIFQDYASGISTPRIEKKLWDMGYRSFKGGKINRDVIKNIIRNPKYKGYYCGGKVKVVDMFTKKQEFLPQSEWIMFKDDGSRVPQIIDETTWEKANAYLRERGEAIKSRRTSFKNENIFTGKLFCANDGAPYWMKQHYIRGKEDVRWVCSYKIKNGAASCDSFGLAESELKEVIAELINKSSENIDSILEEYFEILQSSIKNIPDNKNEISRLEKQIDLLKQKREKILEYNLDGKISDDEFVSRNKEYVKQIKQTESHIRELQNIKSPEPAEIQLSAIKEQLEKFKGVTPKDINRQIVNELFEKITVEPLAATCATLTFQLRSGSLEKWGFPLRRSDDMILTLHSEQHKIFSRKTCIKTQDMVFFKYKYLLAL

SEQ ID NO: 1405 - protein, 570 aa, Unknown
  Description of Unknown: Integrase B1406 sequence
  PTHR30461:SF3,IPR036162,PS51737,IPR011109,PTHR30461, PS00397,PF00239,G3DSA:1.10.10.2600,IPR006119,SSF53041, SM00857,IPR025827,IPR038109,PS51736,cd03768, IPR006118,PF13408,G3DSA:3.40.50.1390,PF07508,Coil
MRKKITKKQAEDKVAIYVRVSTHWQIDKDSLPMQKTDLANYCAYVLNINNYEIFEDAGYSAKNTDRPDFQKMMSRIRSGEFSHLLVWKIDRISRNLLDFIDMYEELKRLGVAFVSRNEQFDTTTAMGEAMLKIILVFAELERNTTSERVSNVMISRAETGKWNGGRVPYGYVSPGRGKMPVVDKIEAAVVKQIFNNYESSRSTTMVARDLSDKGILTKAGNKWSATTISKILGNRWYIGSYIYNMRDSTDDYNLKDESEWVVVDNHHEPIISRDQFNRVQETLSMNTKDKTRGAITRQRKNAHIFSCLLECGQCGGNMAATIDRPRKDGTRPSIYGCYSRRSTSKCTNKYVSDVTLLPFMLSYIKAMMLMKKKVSSIENVKSAENFLIANAGMTDVKAIEGVGETYKLLKSGSVGIEYEPGISSYKDAPETKASMERLRTEYGKNVRALNRMKSLFLYGDDDIDKASFLKEQHDLEDEIKRQETILARYESTDGSLDEMDEDEFEAKASYVIMAKMLTGEFDPSYDIVCKTLDPMVLQRFFKSIIDKVGIVDGKVCWIRFRNGITHKFMY

SEQ ID NO: 1406 - protein, 570 aa, Unknown
  Description of Unknown: Integrase B1407 sequence
  SM00857,G3DSA:1.10.10.2600,IPR036162,PF13408,IPR025827, G3DSA:3.40.50.1390,PS51737,IPR006119,IPR038109,PF07508, SSF53041,IPR011109,PTHR30461,Coil,cd00338, PF00239
MAYRKITDIKDTIGMRAVFYARVSTAEEEQLNAIELQIEENRGCIKDHGWKLVGEYIDRSKSGTMVKGRDDYQRLYEDLYEDLFDIVVIKDQERLQRNTLDWYLFINRVVQTGKLLFMYMDGKFYSPDDALITGVRAIIAEEFSRNLSKKLHNYHDHRIEKARQGQEIALQGSGNVYGWDKKDGKYYINPEQAKVRRLMCEGIMARKGSTLIAKELNDAGYRNTVGKPWKPMDIPKFVYDCKNVGTMIINKERHDFESKQTIKLPKEEWVYVENALPPIVTQEEWDLICKIHEERVIATGSDRRGKKTSGYSFSGKLVCGICGAPYWRKQRVSKDEYWVCSTKQTKGRRTRKRDSTMGKAGEINPLGCDNENISYNSLMEIMGVVSERLQANTDTIKHDMINWLTKLRKQLLEANGGHAEADLQRELSRKSKLLDAYLDGILNKQEYQKKAEELDERIIQLKAETEKNKANSGDIAEIDKVLANIDEEVSRYVDGNEKLKVEYLLEHLEQVQIFPDKVIVIVPILSEGIVVEKAQYVSREKWLWKKYINEYYNGQFKSGSGMRLLRWKSD

SEQ ID NO: 1407 - protein, 570 aa, Unknown
  Description of Unknown: Integrase B1408 sequence
  PTHR30461:SF3,SM00857,G3DSA:1.10.10.2600,IPR036162,PF13408, PS51737,G3DSA:3.40.50.1390,IPR025827,IPR006119,IPR038109, PF07508,IPR011109,SSF53041,PTHR30461,Coil, PS51736,cd00338,PF00239
MNIYYVREKLRNCSIYDIELNVAYYARVSTEKVEQQASIKHQEEHFEELIHSNNRWKFAGSYIDDGISGIHADKREEFQRMLRDAKLGKIDMIITKEISRFARNTLDSIQYTRELLSYGVCVWFQNDGINTIDDDSEFRLTIMAGVAQDEIRKLSSRVKFGHAQSIKNGVVLGHRMYGYSNNQGKLELIPEEAEMVRMIFQDYASGISTPRIEKKLWNMGYRSFKGGKISRDVIKNIIRNPKYKGYYCGGKVKVVDMFTKKQEFLPQSEWIMFKDDGSRVPQIIDETTWEKANAYLRERGEAIKSRRTSFKSENIFTGKLFCANDGAPYWMKQHYIRGKEDVRWVCSYKIKNGAASCDSFGLAESELKEIIAELINKSSENIDSILEEYFEILQSSIKNIPDNKNEISRLEKQIDLLKQKREKILEYNLDGKISDDEFISRNKEYVKQIKQIESHILEIQNTKSPEPVEIQLSAIKEQLEKFKGVTPQDINRQIVNELFEKITVEPLAVTCATLTFQLRSGSLEKWGFPLRRSDDMILTLHSEQHKIFSRKTCINTQDMVFFKYKYLLAL

SEQ ID NO: 1408 - protein, 570 aa, Unknown
  Description of Unknown: Integrase B1409 sequence
  cd03768,SM00857,G3DSA:1.10.10.2600,IPR036162,PF13408, IPR025827,G3DSA:3.40.50.1390,PS51737,IPR006119,IPR038109, PF07508,IPR011109,SSF53041,PTHR30461,PS51736, Coil,PF00239
MKAAIYSRVSTDQQDYSKQTDELKDYAKRNGIEVVYVFEEKESGFNNDRPEFEKLRKLTKQDIDIILVWEISRLSRRSVYLQQQIEDFTNKGICIYALSNSLRTINADGTINEMARVVLAVTATIAEQEAATLKARTLSGKRHKVLKEGHSYTQIAPYGYDYDKETKLLSINEKEATVVRRIFQLSIDGYSLIRIATALNVEGIKNKKGNKWYFATIRDMLINPVYMGKARYALKKAPAKEGKKYRKPLEFVEVDSPAIVSEETYQLSLERMQGRKSISKSSYSVEYPLLRGLIVCPVCGRRYVYKRASKLYTCNNRDNDCKAKGASAHKLESIVWDIIKVYFKENMTNNKVEEQIEPLQAEIDSYKQKILLLDGQLSELTEEASRIYDAAIEAQKRFPNMPKLYEDKMKELDSIDKEASRYKKEKELTDKKIRSISKKINHIKEARDINLDDITDELEKYNIFHQFIDNLVICGTKHTSFIVLTLTTGQILYIGHYSKRCSNYYILFYPSSDIYFDIQTSKGYINHLKEKATINSDGSIYLGDLTGEVKEYSIIDFVNYLDIEENRRYY

SEQ ID NO: 1409 - protein, 570 aa, Unknown
  Description of Unknown: Integrase B1410 sequence
  PTHR30461:SF3,SM00857,G3DSA:1.10.10.2600,IPR036162,PF13408, IPR025827,G3DSA:3.40.50.1390,PS51737,IPR006119,IPR038109, PF07508,IPR011109,SSF53041,PTHR30461,Coil, PS51736,cd00338,PF00239
MNIYYVREKLRSCSIYDIELNVAYYARVSTEKLEQQASIKHQEEHFEELIHSNSKWKFAGSYIDDGISGMHADKREEFQRMLRDAKLGKIDMIITKEISRFARNTLDSIQYTRELLSYGVCVWFQNDGINTIDDDSEFRLTIMAGVAQDEIRKLSSRVKFGHAQSIKNGVVLGHRMYGYSNNQGKLELIPEEADMVRMIFQDYASGISTPRIEKKLWNMGYRNFKGGKINRDVIKNIIRNPKYKGYYCGGKVKVIDMFTKKQEFLPQSEWVMFKDDGSRVPQIIDENTWEKANAYLRERGEAIKSRRTSFKNENIFTGKLFCANDGAPYWMKQHYIRGKEDVRWVCSYKIKNGAASCDSFGLAESELKEVIAELINKSSENIDSILEEYFEILQSSIKNIPDNKNEISRLEKQIDLLKQKREKILEYNLDGKISDDEFISRNKEYVKQIKQIESHILEIQNTKSPEPVEIQLSAIKEQLEKFKGVTPQDINRQIVNELFEKITVEPLAVTCATLTFQLRSGSLEKWGFPLRRSDDMILTLHPEQHKIFSRKTCIKTQHMVFYKYKYLLAL

SEQ ID NO: 1410 - protein, 570 aa, Unknown
  Description of Unknown: Integrase B1411 sequence
  PTHR30461:SF3,SM00857,G3DSA:1.10.10.2600,IPR036162,PF13408, PS51737,G3DSA:3.40.50.1390,IPR025827,IPR006119,IPR038109, PF07508,SSF53041,IPR011109,PTHR30461,Coil, PS51736,cd00338,PF00239
MKKFPIDLSCLTEEEISQFQEDPYTLYNGDQEVALYLRYSSTGQSDQSIEGQLRDCRTFCKANHYRIVAIYVDRATTARKDVEKRVHLMEMISDSAKQNWEYVIVWKLDRFARNRNDSAIMKMRLRKNGVKVLSATEHLTDSPESIILESVLEGMAEFFSAELSQKVTRGMRESALKCHSVGGHIPLGYKVENHKLVVDPDTAHIVQEAFSLYANGESVADICRKFNSAGYKTAKNTEFNRSSFKAMFRNTRYIGTYTYKDIVIENGIPAIIDKELFETVQRRLSKTATAPARGKAKVDYLLSGKLFCGHCGASMNGESGAGRHGKVYHYYSCYTKKRKLGCDKRPLKKDYIEGIVARDALNLLTDQLIDEIADMAIRQSEQDLINDTHIPQLTAQLSEVEKSITNITAAIEKGIASETLMNRLVQLEHEKKTLNKEIKAEEKFVYRIDRDQIVFWLSQFKYGNIEDENFRRRLIDLLVNSVTVWDEPDGYKITTAYNLTSCKTKTFRVEKNPAAEEATGFDFGESECAKKLVKSLDFTSFFYFLPRLCSPANGAAAQLSDQDPFCRRIP

SEQ ID NO: 1411 - protein, 569 aa, Unknown
  Description of Unknown: Integrase B1412 sequence
  PTHR30461:SF3,IPR036162,PS51737,IPR011109,PTHR30461, PF00239,G3DSA:1.10.10.2600,IPR006119,SSF53041,cd00338, SM00857,IPR025827,IPR038109,mobidb-lite,PS51736, PF13408,G3DSA:3.40.50.1390,PF07508,Coil
MPRAAQAAGAEFDGTPRAVIYARYSSTHQRERSIEDQIADCRAYAEHCGLMVVGIYADRAISGKTDERPDFQRMIDDSKKRQFDRVIVWKLDRFARNRYDSALYKHKLKQNGVSVLSAMENIGEGDESIILEAILEASAEYYSRDLRKKVLRGMTTSAKKGLHNTGSVPYGYRLEGESAVPDGDRAEFVKHVFEAYAKGETPAELYREMQCRGLDTKVNGRKVSDNIIGSILRNEKYTGRGMWRGIPVEWPRLIDDELFEAARARTEKNRRAPAAYKAAEPFILCGKAFCGYCGAPLMSGGGKGRSGKYYRHYICRTKKRERACGKKTEDKDFLEWYIVEQTCAYVLAPERLEYIADRVVECYKESFDGQRVSALEARIAKLDRDLDKTTDLLFAAPSAAAVDRINKHVVELEAQKSELEAELSGLKIAAAITYTRDEVVAWLKQFCNGDPLEAEFRRRIVETFINSVYVYDDRIVIYFNVRGGKQISYAEMLDSAGDVEPLPPGPESKKSGGPDNGTAASNSKERFLHEKNTEQTAESAVRFCSGLVHQKAQLRKRLSFFLFIVHCKE

SEQ ID NO: 1412 - protein, 569 aa, Unknown
  Description of Unknown: Integrase B1413 sequence
  PTHR30461:SF3,IPR036162,PS51737,IPR011109,PTHR30461, PS00397,PF00239,G3DSA:1.10.10.2600,IPR006119,SSF53041, SM00857,IPR025827,IPR038109,PS51736,cd03768, IPR006118,PF13408,G3DSA:3.40.50.1390,PF07508,Coil
MTNQKEKIVALYVRVSTGYQIDKDSLPFQKKELKAYCEHVLHVNKKRIEVFEDAGKSGKNTKRPAFERMMEKVKAGKVSHVVVYKIDRITRNLVDFSLMYDDFKYNNVTFISLNEQFDTSSAIGEAILKIILVFAELERKLTSERVTDVMIGRAQSGQWNGARVPYGWDWDAENKCPVHSKKEAPYAKAMYQMYLDGGSSVTIRDYNNSHNIPTKRGGEWTSKTVADFLRNPINKGDYRYNYRESARGKKKAEEEVIYLEGVFPPLVDPEIWNEVNRRMDENHTRKNTSSMHPIRKNCNVFAGLIACGKCGANYQVTSKDRRRGNGFRPSSYACTGKYQKKHCDNLNVSDVKIGPFMINYIAAIIDASKSRRFIKDTESLERVILSHIDFTDVAGISESSLQDTIDLLYGRSGTETLSGKPVSKDGKNTDTAEKKKELQEKLQKTDRALERLKKAYLFDDDAMGEKEFLEMKTKLEVDKVKLENSIKSLDSSSISENVDQAAFIKSASQFLISHKINSGGNIEYSELAMMDEEAMKTLMNSIIDHITVMDRHITEIVFKNGLTHTLLYR

SEQ ID NO: 1413 - protein, 569 aa, Unknown
  Description of Unknown: Integrase B1414 sequence
  SM00857,G3DSA:1.10.10.2600,IPR036162,PF13408,IPR025827, PS51737,G3DSA:3.40.50.1390,IPR006119,IPR038109,PF07508, SSF53041,IPR011109,PF00239,PTHR30461,PS51736, Coil,cd00338
MNIYYAREQLRSCSIYDLKINVAYYARVSTEKMEQQVSIKHQEEHFEELIRNNHQWFFAGAYIDDGISGIHTEKREEFQRMLRDAKLGKIDMIITKEISRFARNTLDSIQYTRELLSYGVCVWFQNDGINTIDEDSELRLTIMAGVAQDEIRKLSSRIKFGHAQSIKNGVVLGHRMYGYSNDKGKLTIVPEEADMVRMIFRDYASGVTTPQIEKKLWDMGYRSFKGKRIDRNVIKSIIKNPKYKGYYCGGKVKIVDMFTKKQEFLPQSEWVMFKDDGSRVPQIIDERTWEKANTYMRERGDAIRSRKTSFKQENIFTGKLICANDGAHYWLKRHCIHKKEDARWVCSHKIRNGANSCNSFGLSEAELQVIIANLINKSIENIDQILKKYFEILKSIIDNRPDNLDEIKRLERQIDTLKLKREKILEYNLSGDISDSEFVSRNKEYVNQIKETEKRIFDLQNTKKPEPIDNQIDAIKKQLEKFKGIVPDDVNRLVVDELFDKILVEPLDGSCLLSFYLKDGNVEKWGFPLRCSDSMKLNIFPEQHTIFSRNNCIKTQDIVLYNYTYKLAL

SEQ ID NO: 1414 - protein, 569 aa, Unknown
  Description of Unknown: Integrase B1415 sequence
  SM00857,IPR006118,G3DSA:1.10.10.2600,IPR036162,PS51737, G3DSA:3.40.50.1390,IPR006119,IPR038109,PF07508,IPR011109, SSF53041,PF00239,PTHR30461,PS00397,PS51736, Coil,cd00338
MDVIGYIRVSTNNQDLQRQRYLINKYCTENGYTLVHIYEDFAISGANLDRKEYQNLLNIKKGDADLIVISELSRFSRNENYLKTANDIYELLDKANIVLLDKPENILTKEDFLDIDKFIPFIFEAKGSAYERKKIITRAITGKDAKVAMNPLAITESYYSIPFGFKAVSNPNYVSGKTPKSLLAVDDEAMEIVKDVFKYISEGMTFQATTDKINMMYGDTISKQTAQNIIHNTIYKGLRKRKGEYFRLPIEQPISDDLWEKANYSCANNRLFKGNSTKHFNPIKGIGKCICGKNLTVGNTPSKLGSSLSYECAERAVLYSKSRCKNPNINFHLLNRIVWDIVKQNVLSKNYTIKSNEAIKALENENKKLQTAIASLEKEKEKLDSEKNTIITNGLLSTDSSVMKIVNEKVAEYNDKLKDIETKITNIKKEVTKNKKKITDEKKSQTSKELNEMSLEGKSKIFYQMLESIVTYSVKAKSGMVIVTFNNGLQVIALWKNYIKPSVWYLPVGFQFDMEKRMIYVKTMPKTEGFDFTISDYETKFYEYRDLFKHFDLAQYQVEIPKEELERKN

SEQ ID NO: 1415 - protein, 569 aa, Unknown
  Description of Unknown: Integrase B1416 sequence
  PTHR30461:SF3,IPR036162,PS51737,IPR011109,PTHR30461, PS00397,PF00239,G3DSA:1.10.10.2600,IPR006119,SSF53041, SM00857,IPR025827,IPR038109,PS51736,cd03768, IPR006118,PF13408,G3DSA:3.40.50.1390,PF07508,Coil
MTEQNEKIVALYVRVSTGYQVDKDSLPFQKKELKAYCEHVLHIDKNRIEIFEDAGKSGKNTKRPAFERMMGKVKSGQISHVIVYKIDRISRNLVDFSLMYDDFKYNNVTFISLNEQFDTSSAIGEAILKIILVFAELERKLTSERVTDVMIGRAQNGQWNGARVPYGWDWDEEKQCPVHSKKEAQYAIAMYEMYLNGGSTVSIRDYNNAHNIPTKRGGEWTSKTVADFLRNPINKGAYRYNYRESARGRKKPNEEVVFIENVFPPLVEPRIWELVNKRMDENTLKLNTSSMHTIRKNCNVFAGLIVCGKCGVNYQVTAKDRRKGSGFRPSSYACTGKYQKNHCDNLNVSDVKIGPFMINYIAAMVDASKSRKFIKDTKSLEQVLLSHINFSNIAGIANDSLQETLELISGYSASKSALWSAETLSKEQQTDVDSKQSELNERLQKVNRAMERLKKVYLFSDDGMDEKEFLEMKSSLEADRVKIENEIKGLSAPIATNIDQVAFIKSASEFLLMHKINSGEFVDYKELATLDEESLKQFMNSVIDHIVVRERKIVEIVFTNGLSHTLLYK

SEQ ID NO: 1416 - protein, 569 aa, Unknown
  Description of Unknown: Integrase B1417 sequence
  SM00857,G3DSA:1.10.10.2600,IPR036162,PF13408,IPR025827, G3DSA:3.40.50.1390,PS51737,IPR006119,IPR038109,PF07508, SSF53041,IPR011109,PF00239,PTHR30461,PS51736, Coil,cd00338
MNIYYAREQLRSCSIYDLKINVAYYARVSTEKMEQQVSIKHQEEHFEELIRNNHQWFFAGAYIDDGISGIHTEKREEFQRMLRDAKLGKIDMIITKEISRFARNTLDSIQYTRELLSYGVCVWFQNDGINTIDEDSELRLTIMAGVAQDEIRKLSSRIKFGHAQSIKNGVVLGHRMYGYSNDKGKLTIVPEEADMVRMIFRDYASGVTTPQIEKKLWDMGYRSFKGKKIDRNVIKSIIKNPKYKGYYCGGKVKIVDMFTKKQEFLPQSEWVMFKDDGSRVPQIIDERTWEKANTYMRERGDAIRSRKTSFKQENIFTGKLICANDGAHYWLKRHCIHKKEDARWVCSHKIRNGANSCNSFGLSEAELQVIIANLINKSIENIDQILKKYFEILKSIIDNRPDNLDEIKRLERQIDTLKLKREKILEYNLNGDISDSEFVSRNKEYVNQIKETEKRIFDLQNTKKPEPIDNQIDAIKKQLEKFKGIVPDDVNRLVVDELFDKILVEPLDGSCLLSFYLKDGNVEKWGFPLRCSDSMKLNIFPEQHTTFSRNNCIKTQDVVLYNYTYKLAL

SEQ ID NO: 1417 - protein, 569 aa, Unknown
  Description of Unknown: Integrase B1418 sequence
  PTHR30461:SF3,cd00338,SM00857,G3DSA:1.10.10.2600,IPR036162, PF13408,PS51737,IPR025827,G3DSA:3.40.50.1390,IPR006119, IPR038109,PF07508,IPR011109,SSF53041,PTHR30461, PS51736,Coil,PF00239
MSSVDKIAVVYARYSSHGQTEQSIEGQIAAAQKYAEQHGYTIIHVYADRAMTGRNDDREQFQKMLSDTAMHQFGVILLWKIDRFGRNREEIAFNRYRCKKNGVRVERVAEDVPDGPEGVILDSVLEGMAEYYSLQLAQNVRRGQRESAKKSMSIGGNKMLGYIVNPETKRYESDPKTASYVTEIFKRYANGETISEIVTWLNAQGIRTTRGSEFTVNSLHRLLKNEKYTGVYIFHDIRNEGGMPALTDRATFDKVQEMLKVNRRAPARVWSKTEYLLTDKLFCGHCGAMMVGESGHGRNGIKHSYYTCLNRKKKKSCDKKPVRQDVIEPLVLRAIGKLLENPATLENIADQVWAAYERSDTSGDTIKALDKQIADVDRALSNVMKAIEMGIINEMTKTRMDELTDQKQALSAARAEAGLAGGFKLTRDMILFFLQEIAALDMADRDSQKRLIKTFVNAIYLYDDHFDIAFNYTDNGKVVVRMQEINDAVRGEMFGRCAQCPTKRVVASILPRLFLCFSTVKCNRASCILQCCPDRVLFPCALAICGGSGYNSLVTAPLHDTQKTEYQSQ

SEQ ID NO: 1418 - protein, 569 aa, Unknown
  Description of Unknown: Integrase B1419 sequence
  PTHR30461:SF3,IPR036162,PS51737,IPR011109,PTHR30461, PS00397,PF00239,G3DSA:1.10.10.2600,IPR006119,SSF53041, SM00857,IPR025827,IPR038109,PS51736,cd03768, IPR006118,PF13408,G3DSA:3.40.50.1390,PF07508,Coil
MINQKEKIVALYVRVSTGYQVDKDSLPFQKKELKAYCEHVLHVDKKRIEVFEDAGKSGKNTKRPAFERMMEKVKAGKVSHVVVYKIDRITRNLVDFSLMYDDFKYNNVTFISLNEQFDTSSAIGEAILKIILVFAELERKLTSERVTDVMIGRAQSGQWNGARVPYGWDWDAENKCPVHSKKEAPYAKAMYQMYLDGGSSVTIRDYNNSHNIPTKRGGEWTSKTVADFLRNPINKGAYRYNYRESSRGKRKADEEVIYMEGVFPPLIDQEIWNEVNRRMDANHTRKNTSAMHPIRKNCNVFAGLIVCGKCGSNYQVTAKDRRRGNGFRPSSYACTGKYQKKHCDNLNVSDVKIGPFMINYIAAIIDASKSRRFIKDTESLERVILSHIDFTDVAGISESSLQDTIDLLYGRSGTETLSGKPVSKDGKNTDTVEKKKELQEKLQKTDRALERLKKAYLFDDDAMDEKEFLEMKTKLEVDKVKLENSIKSLDSSSISENVDQAAFIKSASQFLISHKINSGGNIEYSELAMMDEEAMKTLMNSIIDHITVMDRHITEIVFKNGLTHTLLYR

SEQ ID NO: 1419 - protein, 569 aa, Unknown
  Description of Unknown: Integrase B1420 sequence
  PTHR30461:SF3,IPR036162,PS51737,IPR011109,PTHR30461, PF00239,G3DSA:1.10.10.2600,IPR006119,PF14287,SSF53041, IPR025378,SM00857,IPR025827,cd03770,IPR038109, PS51736,PF13408,G3DSA:3.40.50.1390,PF07508,Coil
MKQSSKKHELGTAALYCRLSRDDNMDSESNSIQNQRKILQKAAKDKGYTDTVFFVDDGITGTTMKRPGFQKMLTAIEAGYISAVFVKDLSRLGRNYIEVGKLTEEFFPLHDIRLVAVSDGVDSDEGEDDFTPFKNIMNEYYAKDISKKRRIVNKMKGNAGVPLSPPPYGYIKNPDDPRFWVVEPEAAEVVRRIYRMALEGYGLAETAAQLAADGVVNPTYYWRSRGTSRGGSKSTVEPTKWGHTTVKKILTLQEYCGDVINFKSYSKSYKMKKRIENPEENRAIFLNVHEAIIDRQTWEKVQALQKGTRRKKPTVTQEPSVFSGLLKCPECGGNLNFHFNQNNHDIKFFSCQNHNSGYRKCSKTHYIRLDFLEQVVLYEVKRLACFASEYENDFIKAMIGRSAKVAENTALRKQRELDALTARDRELDMLFERLYEDNVAGKIDDARFAKMSKRYEQEQGENAKKIKALRLELKKDESKRMDIDDFLETVRRYTDATTITKRMVAELIDHIEVYHAEKQDGVTNQRVVIYYNCIGAFDVPDRRKIPEADIIMETRKGVALSYAPEQVAV

SEQ ID NO: 1420 - protein, 569 aa, Unknown
  Description of Unknown: Integrase B1421 sequence
  PTHR30461:SF3,IPR036162,PS51737,IPR011109,PTHR30461, PS00397,PF00239,G3DSA:1.10.10.2600,IPR006119,SSF53041, SM00857,IPR025827,IPR038109,PS51736,cd03768, IPR006118,PF13408,G3DSA:3.40.50.1390,PF07508,Coil
MTNQKEKIVALYVRVSTGYQVDKDSLPFQKKELKAYCEHVLHVDKKRIEVFEDAGKSGKNTKRPAFERMMEKVKAGKVSHVVVYKIDRITRNLVDFSLMYDDFKYNNVTFISLNEQFDTSSAIGEAILKIILVFAELERKLTSERVTDVMIGRAQSGQWNGARVPYGWDWDAENKCPVHSKKEAPYAKAMYQMYLDGGSSVTIRDYNNSHNIPTKRGGEWTSKTVADFLRNPINKGAYRYNYRESARGKRKADEEVIYMEGVFPPLIDQEIWNEVNRRMDANHTRKNTSAMHPIRKNCNVFAGLIVCGKCGSNYQVTAKDRRRGNGFRPSSYACTGKYQKKHCDNLNVSDVKIGPFMINYIAAIIDASKSRRFIKDTESLERVILSHIDFTDVAGISESSLQDTIDLLYGRSGTETLSGKPVSKDGKNTDTVEKKKELQEKLQKTDRALERLKKAYLFDDDAMDEKEFLEMKTKLEVDKVKLENSIKSLDSSSISENVDQAAFIKSASQFLISHKINSGGNIEYSELAMMDEEAMKTLMNSIIDHITVMDRHITEIVFKNGLTHTLLYR

SEQ ID NO: 1421 - protein, 569 aa, Unknown
  Description of Unknown: Integrase B1422 sequence
  PTHR30461:SF3,IPR036162,PS51737,IPR011109,PTHR30461, PS00397,PF00239,G3DSA:1.10.10.2600,IPR006119,SSF53041, SM00857,IPR025827,IPR038109,PS51736,cd03768, IPR006118,PF13408,G3DSA:3.40.50.1390,PF07508,Coil
MPDNPATIKKVAIYIRVSTKFQVDKDSLSVQRRELGTYSEMILNCSDYVVFEDAGYSAKNTDRPDYQRMMARLRTGEFSHLLVWKIDRISRNLLDFTEMYNELRSLGITFVSKNEQFDTSNAIGEAMLKIILVFAELERKMTSERVTDVMLSRASNGQWNGGRIPYGYQYDKASKKFSENPSEAKTVRTIYNMYEQYRSLIYVARYLNQANIKTRRGYEWTPTVIQSILRNPFYIGSYVYNVHDDGKGGKKKEKKEWITVENHHEAIISKKQYDSVSNVLTKNQKNDFSFSKAYVRKNIHVFAGLVKCGECGCAMTASPDRCRASGWRPSIYGCARRRRNSGACTNKFVSDASIGDFIINYIANIIRLKSVVNKNTSLESLEKRILRGEAFKNVTGMVGGLEEIREMLLSGESGFEYKPSIATSTPDKKESEVEYLNERYRKCETVMNRLKTLYLYGDGSMSQTEYILEREKILEELAGIEKKLTELNNAEMTRIDSNDEFSQKASYFIMLDRIMNSKYINYEKFSLSVDKVTQRAFFLQVIEKVIVKDGRVTSIYFRNGIVNTFTYAE

SEQ ID NO: 1422 - protein, 569 aa, Unknown
  Description of Unknown: Integrase B1423 sequence
  PTHR30461:SF3,IPR036162,PS51737,IPR011109,PTHR30461, PF00239,G3DSA:1.10.10.2600,IPR006119,PF14287,SSF53041, IPR025378,SM00857,IPR025827,cd03770,IPR038109, PS51736,PF13408,G3DSA:3.40.50.1390,PF07508,Coil
MKQSNNKKFRDVTAFLYERLSRDDNLEGESYSIGNQKKLLTKVAKEKGYTNLVHFLDDGISGVTMDRPGFVEMIKQLEQGKAAAVFVKDLSRLGRNYIEVGRLTEEFFPEHDIRLVAVSDNIDTAEGENELAPIRNLFNEWYARDISKKRRISNKIKGNGGEPMGQPPYGYMKDPDNPKRWIVDDEAAQVVKHIYGMTLDGMGTEQIAAQLEREEILTPRAYWLKKGVKRPGKGKQQPPTKWNSSTVTKILSLQEYCGDILNFKTYSKSYKNKKRIENDRENWVVFKDVHEPIIDRAVWEQVQQKRGKVRKRRTNEGEKNMFSGLLVCADCGNNLHFHFNQGNPEIRYFNCSNYKGNRGTCTSTHYVRVDFLEQVVLGEIKRLTKFASRYEDDFVKAVMGSTQQNVALDRKLKKKELAALQARDEELDGLFERIYEDNVSGKLSDDRFAKMSRRYEDEQKEISEKIKALRAEMDKLSSKSVTADMFISTVRKYTRAKVLTPRMLNELIDHIEVHQAEKIDGIWEQHLVIHYNCVGAIFIPDVFPLPAPQVSVNTRKGVVVNYAPGQLAV

SEQ ID NO: 1423 - protein, 569 aa, Unknown
  Description of Unknown: Integrase B1424 sequence
  PTHR30461:SF3,IPR036162,PS51737,IPR011109,PTHR30461, PF00239,G3DSA:1.10.10.2600,IPR006119,PF14287,SSF53041, IPR025378,SM00857,IPR025827,cd03770,IPR038109, PS51736,PF13408,G3DSA:3.40.50.1390,PF07508,Coil
MKQSSKKISTGTAALYCRLSRDDNMDSESNSIQNQRKILQKAAKDKGYTDTIFFVDDGITGTTMKRPGFQKMLTAIEAGYISAVFVKDLSRLGRNYIEVGKLTEEFFPLHDIRLVAVSDGVDSDEGEDDFTPFKNIMNEYYAKDISKKRRIVNKMKGNAGVPLSPPPYGYIKNPDDPRFWVVEPEAAEVVRRIYCMALEGYGLAEIAARLAADGVVNPTYYWRSRGTSRGGSKSTVEPTKWGHTTVKKILTLQEYCGDVINFKSYSKSYKMKKRIENPEENRAIFLNVHEAIIDRQTWEKVQALQKGTRRKKPTVTQAPSVFSGLLKCPECGGNLNFHFNQNNHDIKFFSCQNHNSGYRKCSKTHYIRLDFLEQVVLYEVKRLACFASEYENDFIKAMIGRSAKVAENTALRKQRELDTLTARDRELDMLFERLYEDNVAGKIDDARFAKMSKRYEQEQGENAKKIKALRLELKKDESKRMDIDDFLETVRRYTDATTITKRMVAELIDHIEVYHAEKQDGITNQRVDIHYNCIGAFDVPDRRKIPEADIIMETRKGVALSYAPEQVAV

SEQ ID NO: 1424 - protein, 569 aa, Unknown
  Description of Unknown: Integrase B1425 sequence
  cd03768,SM00857,G3DSA:1.10.10.2600,IPR036162,PF13408, IPR025827,PS51737,G3DSA:3.40.50.1390,IPR006119,IPR038109, PF07508,IPR011109,SSF53041,PTHR30461,PS51736, Coil,PF00239
MKGAIYSRVSTEGQDYSKQTNELKEYASKNGIDIVYVFEEKESGFNNDRPEFEKVRKLTKLDIDIILVWEISRISRRAIYLQQQVQEFTDKGICIYAKKEGFSTLNGDGTVNASTKMLIGFASIIAEQEAATLKERTISSKRNKILREGKSYTGVAPYGYDYSKDTKKLSINKEEAEVVKRIFQLSIDGYSAYRIPIILNAEGILSKKGNSWTVASIRTLLSNPVYMGKANYTLKSEKPKEGKTYRKAIEVASVDVPPIIDAELFNLSLEKITGRTNRSKSTGTKYNPLLRGLIICPNCGRRYTYKNRNQTYTCNNLIDNKLCKAKTITTKLDSIIWNVVKIFFYKELAAGKAQEQIEPLQVEIESYKQQLLLLDGKQSELTSKANIIINAAIEIKIQFPNMPDLYTNKLKEADVINKEAGRYLKERERLEKLIHSNESRIKNINKASKESSLVDSITDETEKYDLVHRAVECIMIFGEDKTSIIVVTFTTGQTIYIGYFSKRNSKYYTIFYPSVDIYFDIHKEKGYINHLKEEVAGIMPISQLNKQTVEYCITDFVNYLDIEDNRRYY

SEQ ID NO: 1425 - protein, 569 aa, Unknown
  Description of Unknown: Integrase B1426 sequence
  PTHR30461:SF3,IPR036162,PS51737,IPR011109,PTHR30461, PF00239,G3DSA:1.10.10.2600,PF14287,IPR006119,SSF53041, IPR025378,SM00857,IPR025827,cd03770,IPR038109, PS51736,PF13408,G3DSA:3.40.50.1390,PF07508,Coil
MKQSNNKKSRDVTAFLYERLSRDDNLEGESYSIGNQKKLLAKVAKEKGYTNLVHFLDDGISGVTMDRPGFVEMICQLEQGKAAAVFVKDLSRLGRNYIEVGRLTEEFFPNHDIRLVAVSDNIDTAEGENELAPIRNLFNEWYARDISKKRRISNKIKGNAGEPMGQPPYGYIKDPNDPKHWIVDDEAAQVVRRVYSMTLEGFGTEQIAAQLEKDDVLTPRAYWLTKGIKRPGKGKQQPPTKWNSSTITKILSLQEYCGDILNFKTYSKSYKNKKRIDNDRENWVVFQDVHEAIIERAMYEQVQQKRGKIRKRRTNNGEHNMFSGLLVCADCGSNLHFHFNQGNPEIKYFNCSNYKGNRGTCTSTHYVRVDFLEEVVLGEIRRLTKFASLYEDEFVKAVIGHSQQAEQTDRKLKEKELRTLLARDEELDGLFERIYEDNVSGKLSDDRFAKMSRRYEDEQKELAEKIKKLRSEIEKQSSRSMTTDMFIGLVRKYTRARKLTPRMLNELIEKIEVFNAEKIDGVWEQRLRIHYNCVGTIEIPTVLPLPIPEVSVNTRKGVVVNYAPCELAV

SEQ ID NO: 1426 - protein, 569 aa, Unknown
  Description of Unknown: Integrase B1427 sequence
  PTHR30461:SF3,IPR036162,PS51737,IPR011109,PTHR30461, PS00397,PF00239,G3DSA:1.10.10.2600,IPR006119,SSF53041, SM00857,IPR025827,IPR038109,PS51736,cd03768, IPR006118,PF13408,G3DSA:3.40.50.1390,PF07508,Coil
MTNQKEKIVALYVRVSTGYQVDKDSLPFQKKELKAYCEHVLHIDKKRIEIFEDAGKSGKNTKRPAFERMMEKVKAGLVSHVIVYKIDRISRNLVDFSIMYDNFKRNDVTFISLNEQFDTSSAMGEAMLKIILVFAELERKLTSERVTDVMIGRAQSGQWNGARVPYGWDWDEENKRPVHSKKEAPYAKAMYQMYLDGGSSVTIRDYNNSHNIPTKRGGEWTSKTVADFLRNPINKGDYRYNYRESARGKRKSDEEVIYMDGVFPPLVDPEIWNEVNRRMDMNCKKRNTSAFHPIRKRCNVFAGLIVCGKCGSNYQVTSKDGRRGNGFRPSSYACTGKYQKKHCDNLNVSDVKIGPFMINYIAAIIDASKSRRFIKDTESLERVILSHIDFTDVAGISESSLQDTIDLLYGRSGTETLSGKPVSKDGKNTDTAEKKKELQEKLQKTDRALERLKKAYLFDDDAMDEKEFLEMKTKLEVDKVKLGNSIKSLDSSSISENVDQAAFIKSASQFLISHKINSGGNIEYSELAMMDEEAMKTLMNSIIDHITVMDRHITEIVFKNGLTHTLLYR

SEQ ID NO: 1427 - protein, 569 aa, Unknown
  Description of Unknown: Integrase B1428 sequence
  PTHR30461:SF3,SM00857,G3DSA:1.10.10.2600,IPR036162,PF13408, IPR025827,G3DSA:3.40.50.1390,PS51737,IPR006119,IPR038109, PF07508,SSF53041,IPR011109,PTHR30461,PS51736, cd00338,PF00239
MARAAKQDNNSEIIDGVIYARYSEGPNQTEASIEGQVRECKEYAKRNGIRIINVYSDSKHTGTNDNRAEFQKMLRDSRRGGFSVVVVWKIDRFGRNRAEMAQNKALLKLQGVKVVSAKEYIPDSPEGIILESVLEGMAEYYSANLSQNIKRGMKENALHCKSNGSGKSLGYIVDKDGYFEIEPNEATIVKTIFQKYDEGMKIADIWREIVASGAKTKRGKDFTQYGISRVLSNRAYIGEYRYGDIVTPGGMPRIIDDDLFNRVQERRALSKKAPASRRSNSDVDFLLTGKVFCGHCKGTMRGMSGTSKTGRKFYYYACHDKIFKHNKCTKKNVKKEWLETEVTRITRDDILNKETIEFIADRVVEIQRQEQEDKSMLRYYEQQLRDTQSAINNIMKAIEAGIITSSTKSRLFELEEQKSIIEGEIERKKIITPVIEKEQVIFSLERFFGGDINNKEYQRNIIDMFVNKVILYDNKIIITYNISSQNEISVDVVEQAAFAALDECSSKLSLPPPATRRGGHFPSRLFVNTRSHRCDNLCVTFTNSGACPCTQFRFTLCKADFLLPLINFI

SEQ ID NO: 1428 - protein, 569 aa, Unknown
  Description of Unknown: Integrase B1429 sequence
  SM00857,IPR006118,G3DSA:1.10.10.2600,IPR036162,PS51737, G3DSA:3.40.50.1390,IPR006119,IPR038109,PF07508,IPR011109, SSF53041,PF00239,PTHR30461,PS00397,PS51736, Coil,cd00338
MDVIGYIRVSTNNQDLQRQRYLINKYCTENGYTLVHIYEDFAISGANLDRKEYQNLLNIKKGDADLIVISELSRFSRNENYLKTANDIYELLDKANIVLLDKPENILTKEDFLDIDKFIPFIFEAKGSAYERKKIITRAITGKDAKVAMNPLAITESYYSIPFGFKAVSNPNYVSGKTPKSLLAVDDEAMEIVKDVFKYISEGMTFQATTDKINMMYGDTISKQTAQNIIHNTIYKGLRKRKGEYFRLPIEQPISDDLWEKANYSCANNRLFKGNSTKHFNPIKGIGKCICGKNLTVGNTPSKLGSSLSYECAERAVLYSKSRCKNPNINFHLLNRIVWDIVKQNVLSKNYTIKSNEAIKALENENKKLQTAIASLEKEKEKLDSEKNTIITNGLLSTDSSVMKIVNEKVAEYNDKLKDIETKITNIKKEVTKNKKKITDEKKSQTSKELNEMSLEGKSKIFYQMLESIVTYSVKAKSGMVIVTFNNGLQVIALWKNYIKPSVWYLPVGFQFDMEKRMIYVKTMPKTEGFDFTISDDETKFYEYRDLFKHFDLAQYQVEIPKEELERKN

SEQ ID NO: 1429 - protein, 569 aa, Unknown
  Description of Unknown: Integrase B1430 sequence
  PTHR30461:SF3,IPR036162,PS51737,IPR011109,PTHR30461, PS00397,PF00239,G3DSA:1.10.10.2600,IPR006119,SSF53041, SM00857,IPR025827,IPR038109,PS51736,cd03768, IPR006118,PF13408,G3DSA:3.40.50.1390,PF07508,Coil
MTEQNEKIVALYVRVSTGYQVDKDSLPFQKKELKAYCEHVLHIDKNCIEIFEDAGKSGKNTKRPAFERMMGKVKSGQVSHVIVYKIDRISRNLVDFSLMYDDFKYNNVTFISLNEQFDTSSAIGEAILKIILVFAELERKLTSERVTDVMIGRAQNGQWNGARVPYGWDWDEEKQCPVHSKKEAQYAIAMYEMYLNGGSTVSIRDYNNAHNIPTKRGGEWTSKTVADFLRNPINKGAYRYNYRESARGRKKPNEEVVFIENAFPPLVEPRIWELVNKRMDENTLKLNTSSMHTIRKNCNVFAGLIVCGKCGVNYQVTAKDRRKGSGFRPSSYACTGKYQKNHCDNLNVSDVKIGPFMINYIAAMVDASKSRKFIKDTRSLEQVLLSHINFSNIAGIANDSLQETLELISGYSASKSALWSAETLSKEQQTDVDSKQSELNERLQKVNRAMERLKKVYLFSDDGMDEKEFLEMKSSLEADRVKIENEIKGLSAPIATNVDQVAFIKSASEFLLMHKINSGEFVDYKELATLDEESLKQFMNSVIDHIVVRERKIVEIVFVNGLSHTLLYK

SEQ ID NO: 1430 - protein, 569 aa, Unknown
  Description of Unknown: Integrase B1431 sequence
  PTHR30461:SF3,IPR036162,PS51737,IPR011109,PTHR30461, PF00239,G3DSA:1.10.10.2600,IPR006119,PF14287,SSF53041, IPR025378,SM00857,IPR025827,cd03770,IPR038109, PS51736,PF13408,G3DSA:3.40.50.1390,PF07508,Coil
MKQSNNKKSRDVTAFLYERLSRDDNLEGESYSIGNQKKLLTKVAKEKGYTNLVHFLDDGISGVTMDRPGFVDMIRQLEQGKAAAVFVKDLSRLGRNYIEVGRLTEEFFPEHDIRLVAVSDNIDTAEGDNELAPIRNLFNEWYARDISKKRRISNKIKGNAGEPMGQPPYGYMKDPDNPKRWIVDDEAAQVVKHIYGMTLDGMGTEQIAAQLEREEILTPRAYWLKKGVKRPGKGKQQPPTKWNSSTVTKILSLQEYCGDILNFKTYSKSYKNKKRIENDRENWVVFKDVHEPIIDRAVWEQVQQKRGKVRKRRTNEGEKNMFSGLLVCADCGNNLHFHFNQGNPEIRYFNCSNYKGNRGTCTSTHYVRVDFLKQVVLGEIKRLTKFASRYEDDFVKAVMGSTQQNVALDRKLKEKELAALQARDEELDGLFERIYEDNVSGKLSDDRFAKMSRRYEDEQKEISEKIKTLRAEMDKLSSKSVMADMFISTVRKYTRAKVLTPRMLNELIDHIEVHQAEKIDGIWEQHLVIHYNCVGAIFIPDVFPLPAPQVSVNTRKGVVVNYAPGQLAV

SEQ ID NO: 1431 - protein, 569 aa, Unknown
  Description of Unknown: Integrase B1432 sequence
  PTHR30461:SF3,IPR036162,PS51737,IPR011109,PTHR30461, PF00239,G3DSA:1.10.10.2600,IPR006119,PF14287,SSF53041, IPR025378,SM00857,IPR025827,cd03770,IPR038109, PS51736,PF13408,G3DSA:3.40.50.1390,PF07508,Coil
MKKSNNKKTRDVTAFIYPRLSRDDNLEGGSYSIGNQKKLLTKTAKDMGYTNIVTFVDDGVSGFTMARPGFNEMMRQLEEGKASALFVKDLSRLGRNYIEVGRLMEEFFPEHDIRLVAVSDNIDTTEGENELAPIRNLFNEWYARDISKKRPISNKIKGIAGEPMGPPPFGYMKDPENPKHWIIDEEAAQVVRRIFSMILDGYGTEQIASIFELEGILTPCAYWLKKEIRKPGRAKQQPSTKWNASTIVNILTLQEYCGDVLNFKTYSKSYKNKKRIPNDRENWAIFKDVHESVIDRVIWELVQEKRGKIRRRKPKDGERNMFCGLLVCADCGHNLNYHFNQGNHDIKYFNCSNYNSGRGSCTSTHYIRVDFLEQVVLGEIKRLTKYAVHYEDEFQQAIMGSTQKAVELERKLKQKELAAAQARDGELDGLFERIYEDNISGKLSDERFAKMSQRYEEEQAELSGKIKALRKELDKLNGDAVSTDMFLATVRKYTRAKKLTPRMLNELVNHIEVHQAEKINGEWVQKLTIYYNCVGALFIPDTPSMPVPDVTVNTRRGVYVSYEPAQNRQ

SEQ ID NO: 1432 - protein, 569 aa, Unknown
  Description of Unknown: Integrase B1433 sequence
  PTHR30461:SF3,IPR036162,PS51737,IPR011109,PTHR30461, PS00397,PF00239,G3DSA:1.10.10.2600,IPR006119,SSF53041, SM00857,IPR025827,IPR038109,PS51736,cd03768, IPR006118,PF13408,G3DSA:3.40.50.1390,PF07508,Coil
MAEQNEKIVALYVRVSTGYQVDKDSLPFQKKELKAYCEHVLHIDKNCIEIFEDAGKSGKNTKRPAFERMMGKVKSGQVSHVIVYKIDRISRNLVDFSLMYDDFKYNNVTFISLNEQFDTSSAIGEAILKIILVFAELERKLTSERVTDVMIGRAQNGQWNGARVPYGWDWDEEKQCPVHSEKEAQYAIAMYEMYLNGGSTVSIRDYNNAHNIPTKRGGEWTSKTVADFLRNPINKGAYRYNYRESARGRKKPNEEVVFIENVFPPLVEPRIWELVNKRMDENTLKLNTSSMHTIRKNCNVFAGLIVCGKCGVNYQVTAKDRRKGSGFRPSSYACTGKYQKNHCDNLNVSDVKIGPFMINYIAAMVDASKSRKFIKDTKSLEQVLLSHINFSNIAGIANDSLQETLELISGYSASKSALWSAETLSKEQQTDVDSKQSELNERLQKVNRAMERLKKVYLFSDDGMDEKEFLEMKSSLEADRVKIENEIKGLSAPIATNVDQVAFIKSASEFLLMHKINSGEFVDYKELATLDEESLKQFMNSVIDHIVVRERKIVEIVFVNGLSHTLLYK

SEQ ID NO: 1433 - protein, 569 aa, Unknown
  Description of Unknown: Integrase B1434 sequence
  SM00857,G3DSA:1.10.10.2600,IPR036162,PF13408,IPR025827, G3DSA:3.40.50.1390,PS51737,IPR006119,IPR038109,PF07508, SSF53041,IPR011109,PTHR30461,Coil,cd00338, PF00239
MAYRKITDIRDTIGMRAVFYARVSTAEEEQLNAIELQIEENRGCIKDHGWKLVGEYIDRSKSGTMVKGRDDYQRLYEDLYEDLFDIVVIKDQERLQRNTLDWYLFINRVVQTGKLLFMYMDGKFYSPDDALITGVRAIIAEEFSRNLSKKLHNYHDHRIEKARQGQEIALQGSGNVYGWDKKDGKYYINPEQAKVRRLMCEGIMARKGSTLIAKELNDAGYRNTVGKPWKPMDIPKFVYDCKNVGTMIINKERHDFESKQTIKLPKEEWVYVENALPPIVTQEEWDLICKIHEERVIATGSDRRGKKTSGYSFSGKLVCGICGAPYWRKQRVSKDEYWVCSTKQTKGRRTRKRDSTMGKAGEINPLGCDNENISYNSLMEIMGVVSERLQANTDTIKQDMINWLTKLRKQLLEANGGHTEADLQRELSRKSKLLDAYLDGILNKQEYQKKAEELDERIIQLKAETEKNKANSGDIAEIDKVLANIDEEVSRYVDGNEKLKVEYLLEHLEQVQIFPDKVIVIVPILSEGIVVEKTQYVSREKWGWKNNFNSFNLWITKSNRGRFFAIRNK

SEQ ID NO: 1434 - protein, 569 aa, Unknown
  Description of Unknown: Integrase B1435 sequence
  PTHR30461:SF3,IPR036162,PS51737,IPR011109,PTHR30461, PS00397,PF00239,G3DSA:1.10.10.2600,IPR006119,SSF53041, SM00857,IPR025827,IPR038109,PS51736,cd03768, IPR006118,PF13408,G3DSA:3.40.50.1390,PF07508,Coil
MTNQKEKIVALYVRVSTGYQVDKDSLPFQKKELKAYCEHVLHVDKKRIEVFEDAGKSGKNTKRPAFERMMEKVKAGEVSHVVVYKIDRITRNLVDFSLMYDDFKYNNVTFISLNEQFDTSSAIGEAILKIILVFAELERKLASERVTDVMIGRAQSGQWNGARVPYGWDWDAENKCPVHSKKEAPYAKAMYQMYLDGGSSVTIRDYNNSHNIPTKRGGEWTSKTVADFLRNPINKGDYRYNYRESARGKRKADEEVIYMEGVFPPLIDPDIWNEVNRRMDANHTRKNTSAMHPIRKNCNVFAGLIVCGKCGSNYQVTAKDRRRGNGFRPSSYACTGKYQKKHCGNLNVSDVKIGPFMINYIAAIIDASKSRRFIKDTESLERVILSHIDFTDVAGISESSLQDTIDLLYGRSGTETLSGKLVSKDGKNTDTAEKKKELLEKLQKTDRALERLKKAYLFDDDAMDEKEFLEMKTKLEVDKVKLENSIKSLDSSSISENVDQAAFIKSASQFLISHKINSGGNIEYSELAMMDEEAMKTLMNSIIDHITVMDRHITEIVFKNGLTHTLLYR

SEQ ID NO: 1435 - protein, 569 aa, Unknown
  Description of Unknown: Integrase B1436 sequence
  PTHR30461:SF3,IPR036162,PS51737,IPR011109,PTHR30461, PF00239,G3DSA:1.10.10.2600,IPR006119,PF14287,SSF53041, IPR025378,SM00857,IPR025827,cd03770,IPR038109, PS51736,PF13408,G3DSA:3.40.50.1390,PF07508,Coil
MKQSNNKKSRDVTAFLYERLSRDDNLEGESYSIGNQKKLLTKVAKEKGYTNLVHFLDDGISGVTMDRPGFVEMIQQLEQGKAAAVFVKDLSRLGRNYIEVGRLTEEFFPEHDIRLVAVSDNIDTAEGDNELAPIRNLFNEWYARDISKKRRISNKIKGNAGEPMGQPPYGYMKDPDNPKHWIVDDEAAQVVKRIYGMTLDGMGTEQIAAQLEREEILTPRAYWLKKGVKRPGKGKQQPPTKWNSSTITKILSLQEYCGDILNFKTYSKSYKNKKRIENDRENWVVFKDVHEPIVDRAVWEQVQQKRGKVRKRRTNEGEKNMFSGLLVCADCGNNLHFHFNQGNPEIRYFNCSNYKGNRGTCTSTHYVRVDFLEQVVLGEIKRLTKFASRYEDDFVKAVMGSTQQNVALDRKLKEKELAALQARDEELDGLFERIYEDNVSGKLSDDRFAKMSRRYEDEQKEISEKIKALRAEMDKLSSKSVTADMFISTVRKYTRAKVLTPRMLNELIDHIEVHQAEKIDGIWEQHLVIHYNCVGAIFIPDVFPLPAPQVSVNTRKGVVVNYAPGQLAV

SEQ ID NO: 1436 - protein, 569 aa, Unknown
  Description of Unknown: Integrase B1437 sequence
  PTHR30461:SF3,IPR036162,PS51737,IPR011109,PTHR30461, PS00397,PF00239,G3DSA:1.10.10.2600,IPR006119,SSF53041, SM00857,IPR025827,IPR038109,PS51736,cd03768, IPR006118,PF13408,G3DSA:3.40.50.1390,PF07508,Coil
MAEQNEKIVALYVRVSTGYQVDKDSLPFQKKELKAYCEHVLHIDKNRIEIFEDAGKSGKNTKRPAFERMMGKVKSGQVSHVIVYKIDRISRNLVDFSLMYDDFKYNNVTFISLNEQFDTSSAIGEAILKIILVFAELERKLTSERVTDVMIGRAQNGQWNGARVPYGWDWDEEKQCPVHSKKEAQYAIAMYEMYLNGGSTVSIRDYNNAHNIPTKRGGEWTSKTVADFLRNPINKGAYRYNYRESARGRKKPNEEVVFIENAFPPLVEPRIWELVNKRMDENTLKLNTSSMHTIRKNCNVFAGLIVCGKCGVNYQVTAKDRRKGSGFRPSSYTCTGKYQKNHCDNLNVSDVKIGPFMINYIAAMVDASKSRKFIKDTKSLEQVLLSHISFSNIVGIANDSLQETLELISGYSASKSALWSAETLSKEQQTDVDSKQSELNERLQKVNRAMERLKKVYLFSDDGMDEKEFLEMKSSLEADRVKIENEIKGLSTPIATNVDQVAFIKSASEFLLMHKINSGEFVDYKELATLDEESLKQFMNSVIDHIVVRERKIVEIVFINGLSHTLLYK

SEQ ID NO: 1437 - protein, 569 aa, Unknown
  Description of Unknown: Integrase B1438 sequence
  PTHR30461:SF3,IPR036162,PS51737,IPR011109,PTHR30461, PF00239,G3DSA:1.10.10.2600,IPR006119,SSF53041,cd00338, SM00857,IPR025827,IPR038109,mobidb-lite,PS51736, PF13408,G3DSA:3.40.50.1390,PF07508,Coil
MPRAAQAAGAEFDGTPRAVIYARYSSTHQRERSIEDQIADCRAYAERCGLMVVGIYADRAISGKTDERPDFQRMIDDSKKRQFDRVIVWKLDRFARNRYDSALYKHKLKQNGVSVLSAMENIGEGDESIILEAILEASAEYYSRDLRKKVLRGMTTSAKKGLHNTGSVPYGYRLEGESAVPDGDRAEFVKHVFDAYAKGETPAELYREMQRRGLDTKVNGRKVSDNIIGSILRNEKYTGRGMWRGIPVEWPRLIDDELFEAARARTEKNRRAPAAYKAAEPFILCGKAFCGYCGAPLMSGGGKGRSGKYYRHYICRTKKRERACGKKTEDKDFLEWYIVEQTCAYVLAPERLEYIADRVVECYKESFDGQRVSALEARIAKLDHDLDKTTDLLFAAPSAAAVDRINKHVVELEAQKSELEAELSGLKIAAAITYTRDEVVAWLKQFCNGDPLEAEFRRRIVETFINSVYVYDDRIVIYFNVRGGKQISYAEMLESAGDVEPLPPGPESKKSGGPDNGTAANNSKERFLHGKNTEQTAESAVRFCSGLGHQKAQLRKRLSFFLFIVHCKE

SEQ ID NO: 1438 - protein, 569 aa, Unknown
  Description of Unknown: Integrase B1439 sequence
  PTHR30461:SF3,IPR036162,PS51737,IPR011109,PTHR30461, PF00239,G3DSA:1.10.10.2600,PF14287,IPR006119,SSF53041, IPR025378,SM00857,IPR025827,cd03770,IPR038109, PS51736,PF13408,G3DSA:3.40.50.1390,PF07508,Coil
MKQSSKKHELGTAALYCRLSRDDNMDSESNSIQNQRKILQKAAKDKGYTDTVFFVDDGITGTTMKRPGFQKMLTAIEAGYISAVFVKDLSRLGRNYIEVGKLTEEFFPLHDVRLVAVSDGVDSDEGEDDFTPFKNIMNEYYAKDISKKRRIVNKMKGNAGVPLSPPPYGYIKNPDDPRFWVVEPEAAEVVRRIYRMALEGYGLAETAAQLAADGVVNPTYYWRSRGTSRSGSKSTVEPTKWGHTTVKKILTLQEYCGDVINFKSYSKSYKMKKRIENPEENRAIFLNVHEAIIDRQTWEKVQALQKGTRRKKPTVTQEPSVFSGLLKCPECGGNLNFHFNQNNHDIKFFSCQNHNSGYRKCSKTHYIRLDFLEQVVLYEVKRLACFASEYENDFIKAMIGRSAKVAENTALRKQRELDALTARDRELDMLFERLYEDNVAGKIDDARFAKMSKRYEQEQGENAKKIKALRLELKKDESKRMDIDDFLETVRRYTDAATITKRMVAELIDHIEVYHAEKQDGITNQRVVIHYNCIGAFDVPDRRKIPEADIIMETRKGVALSYAPEQVAV

SEQ ID NO: 1439 - protein, 569 aa, Unknown
  Description of Unknown: Integrase B1440 sequence
  PTHR30461:SF3,IPR036162,PS51737,IPR011109,PTHR30461, PS00397,PF00239,G3DSA:1.10.10.2600,IPR006119,SSF53041, SM00857,IPR025827,IPR038109,PS51736,cd03768, IPR006118,PF13408,G3DSA:3.40.50.1390,PF07508,Coil
MAEQNEKIVALYVRVSTGYQVDKDSLPFQKKELKAYCEHVLHIDKNRIEIFEDAGKSGKNTKRPAFERMMGKVKSGQVSHVIVYKIDRISRNLVDFSLMYDDFKYNNVTFISLNEQFDTSSAIGEAILKIILVFAELERKLTSERVTDVMIGRAQNGQWNGARVPYGWDWDEEKQCPVHSKKESQYAIAMYEMYLNGGSTVSIRDYNNAHNIPTKRGGEWTSKTVADFLRNPINKGAYRYNYRESARGRKKPNEEVVFIENAFPPLVEPRTWELVNKRMDENTLKLNTSSMHTIRKNCNVFAGLIVCGKCGVNYQVTAKDRRKGSGFRPSSYACTGKYQKNHCDNLNVSDVKIGPFMINYIAAMVDASKSRKFIKDTKSLEQVLLSHINFSNIAGIANDSLQETLELISGYSASKSALWSAETLSKEQQTDVDSKQSELNERLQKVNRAMERLKKVYLFSDDGMDEKEFLEMKSSLEADRVKIENEIKGLSAPIATNVDQVAFIKSASEFLLMHKINSGEFVDYKELATLDEESLKQFMNSVIDHIVVRERKIVEIVFINGLSHTLLYK

SEQ ID NO: 1440 - protein, 569 aa, Unknown
  Description of Unknown: Integrase B1441 sequence
  PTHR30461:SF3,IPR036162,PS51737,IPR011109,PTHR30461, PF00239,G3DSA:1.10.10.2600,IPR006119,PF14287,SSF53041, IPR025378,SM00857,IPR025827,cd03770,IPR038109, PS51736,PF13408,G3DSA:3.40.50.1390,PF07508,Coil
MKQSSKKHELGTAALYCRLSRDDNMDSESNSIQNQRKILQKAAKDKGYTDTVFFVDDGITGTTMKRPGFQKMLTAIEAGYISAVFVKDLSRLGRNYIEVGKLTEEFFPLHDIRLVAVSDGVDSDEGEDDFTPFKNIMNEYYAKDISKKRRIVNKMKGNAGVPLSPPPYGYIKNPDDPRFWVVEPEAAEVVRRIYRMALEGYGLAETAAQLAADGVVNPTYYWRSRGTSRGGSKSTVEPTKWGHTTVKKILTLQEYCGDVINFKSYSKSYKMKKRIENPEENRAIFLNVHEAIIDRQTWEKVQALQKGTRRKKPTVTQEPSVFSGLLKCPECGGNLNFHFNQNNHDIKFFSCQNHNSGYRKCSKTHYIRLDFLEQVVLYEVKRLACFASEYENDFIKAMIGRSAKVAENTALRKQRELDALTARDRELDMLFERLYEDNVAGKIDDARFAKMSKRYEQEQGENAKKIKALRLELKKDESKRMDIDDFLETVRRYTDVATITKRMVAELIDHIEVYHAEKQDGITNQRVVIHYNCIGAFDVPDRRKIPEADIIMETRKGVALSYAPEQVAV

SEQ ID NO: 1441 - protein, 569 aa, Unknown
  Description of Unknown: Integrase B1442 sequence
  PTHR30461:SF3,IPR036162,PS51737,IPR011109,PTHR30461, PS00397,PF00239,G3DSA:1.10.10.2600,IPR006119,SSF53041, SM00857,IPR025827,IPR038109,PS51736,cd03768, IPR006118,PF13408,G3DSA:3.40.50.1390,PF07508,Coil
MTNQKEKIVALYVRVSTGYQIDKDSLPFQKKELKAYCEHVLHVDKKRIEVFEDAGKSGKNTKRPAFERMMEKVKAGKVSHVVVYKIDRITRNLVDFSLMYDDFKYNNVTFISLNEQFDTSSAIGEAILKIILVFAELERKLTSERVTDVMIGRAQSGQWNGARVPYGWDWDAENKCPVHSKKEAPYAKAMYQMYLDGGSSVTIRDYNNSHNIPTKRGGEWTSKTVADFLRNPINKGDYRYNYRESARGKRKADEEVIYMEGVFPPLIDPDIWNEVNRRMDANHTRKNTSAMHPIRKNCNVFAGLIVCGKCGSNYQVTAKDRRRGNGFRPSSYACTGKYQKKHCDNLNVSDVKIGPFMINYIAAIIDASKSRRFIKDTESLERVILSHIDFTDVAGISESSLQDTIDLLYGRSGTETLSGKQVSKDGKNTDTAEKKKELQEKLQKTDRALERLKKAYLFDDDAMDEKEFLEMKTKLEVDKVKLGNSIKSLDSSSISENVDQAAFIKSASQFLISHKINSGGNIEYSELAMMDEEAMKTLMNSIIDHITVMDRHITEIVFKNGLTHTLLYR

SEQ ID NO: 1442 - protein, 569 aa, Unknown
  Description of Unknown: Integrase B1443 sequence
  SM00857,G3DSA:1.10.10.2600,IPR036162,PF13408,IPR025827, G3DSA:3.40.50.1390,PS51737,IPR006119,IPR038109,PF07508, IPR011109,SSF53041,PF00239,PTHR30461,PS51736, Coil,cd00338
MNIYYAREQLRSCSIYDLKINVAYYARVSTEKMEQQVSIKHQEEHFEELIRNNHQWFFAGAYIDDGISGIHTEKREEFQRMLRDAKLGKIDMIITKEISRFARNTLDSIQYTRELLSYGVCVWFQNDGINTIDEDSELRLTIMAGVAQDEIRKLSSRIKFGHAQSIKNGVVLGHRMYGYSNDKGKLTIVPEEADMVRMIFRDYASGVTTPQIEKKLWDMGYRSFKGKRIDRNVIKSIIKNPKYKGYYCGGKVKIVDMFTKKQEFLPQSEWVMFKDDGSRVPQIIDERTWEKANTYMRERGDAIRSRKTSFKQENIFTGKLICANDGAHYWLKRHCIHKKEDARWVCSHKIRNGANSCNSFGLSEAELQVIIANLINKSIENIDQILKKYFEILKSIIDNRPDNLDEIKRLERQIDTLKLKREKILEYNLSGDISDSEFVSRNKEYVNQIKETEKRIFDLQNVKEPEPIDNQIDAIKKQLEKFKGIVPDDVNRLVVDELFDKILVEPLDGSCLLSFYLKDGNVEKWGFPLRCSDSMKLNIFPEQHTTFSRNNCIKTQDVVLYNYTYKLAL

SEQ ID NO: 1443 - protein, 569 aa, Unknown
  Description of Unknown: Integrase B1444 sequence
  PTHR30461:SF3,IPR036162,PS51737,IPR011109,PTHR30461, PS00397,PF00239,G3DSA:1.10.10.2600,IPR006119,SSF53041, SM00857,IPR025827,IPR038109,PS51736,cd03768, IPR006118,PF13408,G3DSA:3.40.50.1390,PF07508,Coil
MAEQNEKIVALYVRVSTGYQVDKDSLPFQKKELKAYCEHVLHIDKNRIEIFEDAGKSGKNTKRPAFERMMGKVKSGQVSHVIVYKIDRISRNLVDFSLMYDDFKYNNVTFISLNEQFDTSSAIGEAILKIILVFAELERKLTSERVTDVMIGRAQNGQWNGARVPYGWDWDEEKQCPVHSKKEAQYAIAMYEMYLNGGSTVSIRDYNNAHNIPTKRGGEWTSKTVADFLRNPINKGAYRYNYRESARGRKKPNEEVVFIENAFPPLVEPRIWELVNKRMDENTLKLNTSSMHTIRKNCNVFAGLIVCGKCGVNYQVTAKDRRKGSGFRPSSYACTGKYQKNHCDNLNVSDVKIGPFMINYIAAMVDVSKSRKFIKGTKSLEQVLLSHISFSNIVGIANDSLQETLELISGYSASKSALWSAETLSKEQQTDVDSKQSELNERLQKVNRAMERLKKVYLFSDDGMDEKEFLEMKSSLEADRVKIENEIKGLSAPIATNVDQVAFIKSASEFLLMHKINSGEFVDYKELATLDEESLKQFMNSVIDHIVVRERKIVEIVFINGLSHTLLYK

SEQ ID NO: 1444 - protein, 569 aa, Unknown
  Description of Unknown: Integrase B1445 sequence
  PTHR30461:SF3,IPR036162,PS51737,IPR011109,PTHR30461, PS00397,PF00239,G3DSA:1.10.10.2600,IPR006119,SSF53041, SM00857,IPR025827,IPR038109,PS51736,mobidb-lite, cd03768,IPR006118,PF13408,G3DSA:3.40.50.1390,PF07508,Coil
MTNQKEKIVALYVRVSTGYQVDKDSLPFQKKELKAYCEHVLHVDKKRIEVFEDAGKSGKNTKRPAFERMMGKVKAGKVSHVVVYKIDRITRNLVDFSLMYDDFKYNNVTFISLNEQFDTSSAIGEAILKIILVFAELERKLTSERVTDVMIGRAQSGQWNGARVPYGWDWDAENKCPVHSKKEAPYAKAMYQMYLDGGSSVTIRDYNNSHNIPTKRGGEWTSKTVADFLRNPINKGAYRYNYRESARGKRKADEEVIYMEGVFPPLIDPEIWNEVNRRMDANHTRKNTSAMHPIRKNCNVFAGLIVCGKCGSNYQVTAKDRRRGNGFRPSSYACTGKYQKKHCDNLNVSDVKIGPFMINYIAAIIDASKSRRFIKDTESLERVILSHIDFTDVAGISESSLQDTIDLLYGRSGAETLSGKPVSKDGKNTDTTEKKKELQEKLQKTDRALERLKKAYLFDDDAMDEKEFLEMKTKLEVNKVKLENSIKSLDSSSISENVDQAAFIKSASQFLISHKINSGGNIEYSELAMMDEEAMKTLMNSIIDHITVMDRHITEIVFKNGLTHTLLYR

SEQ ID NO: 1445 - protein, 569 aa, Unknown
  Description of Unknown: Integrase B1446 sequence
  PTHR30461:SF3,IPR036162,PS51737,IPR011109,PTHR30461, PS00397,PF00239,G3DSA:1.10.10.2600,IPR006119,SSF53041, SM00857,IPR025827,IPR038109,PS51736,mobidb-lite, cd03768,IPR006118,PF13408,G3DSA:3.40.50.1390,PF07508,Coil
MTNQKEKIVALYVRVSTGYQVDKDSLPFQKKELKAYCEHVLHVDKKRIEVFEDAGKSGKNTKRPAFERMMEKVKAGKVSHVVVYKIDRITRNLVDFSLMYDDFKYNNVTFISLNEQFDTSSAIGEAILKIILVFAELERKLTSERVTDVMIGRAQSGQWNGARVPYGWDWDAENKCPVHSKKEAPYAKAMYQMYLDGGSSVTIRDYNNSHNIPTKRGGEWTSKTVADFLRNPINKGDYRYNYRESARGKKKSDDEVVYIKDVFPPLIDPKIWDEVNRRMDANSQSRNTSAFHPIRKRCNVFAGLMICGKCGSGYQVKGKDSRKGDGFRPSSYACTGKYQKKNCDNLNVSDVKIGPFMINYIAAIIDASKSRRFIKDTESLERVILSHIDFTDVAGISESSLQDTIDLLYGRSGTETLSGKPVSKDGKNTDTAEKKKELQEKLQKTDRALERLKKAYLFDDDAMDEKEFLEMKTKLEVDKVKLENSIKSLDSSSISENVDQAAFIKSASQFLISHKINSGGNIEYSELAMMDEEAMKTLMNSIIDHITVMDRHITEIVFKNGLTHTLLYR

SEQ ID NO: 1446 - protein, 569 aa, Unknown
  Description of Unknown: Integrase B1447 sequence
  cd03768,PTHR30461:SF3,SM00857,IPR036162,PF13408, PS51737,IPR025827,G3DSA:3.40.50.1390,IPR006119,PF07508, IPR011109,SSF53041,PTHR30461,PS51736,Coil, PF00239
MKTKDTPKQYVIYSRKSKFTGKGESIENQIELCRQYIAMHFGEEAAENVLVYEDEGFSGGNLERPQFKKMMKDSQKITFAAIVVYRLDRISRNIGDFAKLIEDLGDRHIDFISIREQFDTSSPMGRAMMYIASVFSQLERETIAERIRDNMHELSKTGRWLGGTTPTGYASESLSSVTVDGKVKKACKLKPIPEEIQLVKTIFEVFMETGSLSKTDQYLLEHRCVTKRGKQFTRFAIRGILTNPVYMIADETAYQYLKENNVDLFAERSEFDGEHGVMAYNRTLQRPGKANQIRPMEEWIVAVGKHPGIIAGSDWVRVQAMLDINKSKSYRRPRSNVALLSGLLRCGECGDYMRPKLTNRRTADGELIYTYMCSTKERSHGTVCSMKNCNGNTLDAKIIEEIRKLSADKETLTRLLAQTKKVISGSKEGYDAELALLREKHAETEDRIKRLVESLSVASDTSAKYVMEQIDALHQESETQQLRLAELEALTEQSRMLHQEFAFHQEMIESFASAVDSATLEEKRRLLRTIVKKVVWDGKNAYVYLFAEDGEADLPPIDQPMYPLGVDSE

SEQ ID NO: 1447 - protein, 569 aa, Unknown
  Description of Unknown: Integrase B1448 sequence
  SM00857,G3DSA:1.10.10.2600,IPR036162,PF13408,IPR025827, G3DSA:3.40.50.1390,PS51737,IPR006119,IPR038109,PF07508, IPR011109,SSF53041,PF00239,PTHR30461,PS51736, Coil,cd00338
MNIYYAREQLRSCSIYDLKINVAYYARVSTEKMEQQVSIKHQEEHFEELIRNNHQWFFAGAYIDDGISGIHTEKREEFQRMLRDAKLGKIDMIITKEISRFARNTLDSIQYTRELLSYGVCVWFQNDGINTIDEDSELRLTIMAGVAQDEIRKLSSRIKFGHAQSIKNGVVLGHRMYGYSNDKGKLTIVPEEADMVRMIFRDYASGVTTPQIEKKLWDMGYRSFKGKKIDRNVIKSIIKNPKYKGYYCGGKVKIVDMFTKKQEFLPQSEWVMFKDDGSRVPQIIDERTWEKANTYMRERGDAIRSRKTSFKQENIFTGKLICANDGAHYWLKRHCIHKKEDARWVCSHKIRNGANSCNSFGLSEAELQVIIANLINKSIENIDQILKKYFEILKSIIDNRPDNLDEIKRLERQIDTLKLKREKILEYNLNGDISDSEFVSRNKEYVNQIKETEKRIFDLQNAKEPEPIDNQIDAIKKQLEKFKGIVPDDVNRLVVDELFDKILVEPLDGSCLLSFYLKDGNVEKWGFPLRCSDSMKLNIFPEQHTIFSRNNCIKTQDIVLYNYTYKLAL

SEQ ID NO: 1448 - protein, 569 aa, Unknown
  Description of Unknown: Integrase B1449 sequence
  PTHR30461:SF3,IPR036162,PS51737,IPR011109,PTHR30461, PS00397,PF00239,G3DSA:1.10.10.2600,IPR006119,SSF53041, SM00857,IPR025827,IPR038109,PS51736,cd03768, IPR006118,PF13408,G3DSA:3.40.50.1390,PF07508,Coil
MAEQNEKIVALYVRVSTGYQVDKDSLPFQKKELKAYCEHVLHIDKNRIEIFEDAGKSGKNTKRPAFERMMGKVKSGQVSHVIVYKIDRISRNLVDFSLMYDDFKYNNVTFISLNEQFDTSSAIGEAILKIILVFAELERKLTSERVTDVMIGRAQNGQWNGARVPYGWDWDEEKQCPVHSKKEAQYAIAMYEMYLNGGSTVSIRDYNNAHNIPTKRGGEWTSKTVADFLRNPINKGAYRYNYRESARGRKKPNGEVVFIENAFPPLVEPRIWELVNKRMDENTLKLNTSSMHTIRKNCNVFAGLIVCGKCGVNYQVTAKDRRKGSGFRPSSYACTGKYQKNHCDNLNVSDVKIGPFMINYIAAMVDASKSRKFIKDTKSLEQVLLSHINFSNIAGIANDSLQDTLELISGYSASKSALWSAKTLSKEQQTDVDSKQSELNERLQKVNRAMERLKKVYLFSDDGMDEKEFLEMKSSLEADRVKIENEIKGLSAPIATNVDQVAFIKSASEFLLMHKINSGEFVDYKELATLDEESLKQFMNSVIDHIVVRDRKIVEIVFINGLSHTLLYK

SEQ ID NO: 1449 - protein, 569 aa, Unknown
  Description of Unknown: Integrase B1450 sequence
  PTHR30461:SF3,IPR036162,PS51737,IPR011109,PTHR30461, PF00239,G3DSA:1.10.10.2600,IPR006119,SSF53041,cd00338, SM00857,IPR025827,IPR038109,PS51736,mobidb-lite, PF13408,G3DSA:3.40.50.1390,PF07508,Coil
MPRAAQAAGAAFDGTPRAVIYTRYSSTHQRERSIEDQIADCRAYAERCGLMVVGIYADRAISGKTDERPDFQRMIDDSKKRQFDRVIVWKLDRFARNRYDSALYKHKLKQNGVSVLSAMENIGEGDESIILEAILEASAEYYSRDLRKKVLRGMTTSAKKGLHNTGSVPYGYRLEGESAVPDGDRAEFVKHVFEAYAKGETPAELYREMQSRGLDTKVNGRKVSDNIIGSILRNEKYTGRGMWRGIPVEWPRLIDDELFEAARARTEKNRRAPAAYKAAEPFILCGKAFCGYCGAPLMSGGGKGRSGKYYRHYICRTKKRERACGKKTEDKDFLEWYIVEQTCAYVLAPERLEYIAERVVECYKESFDGQRVSALEARIAKLDRDLDKTTDLLFAAPSAAAVDRINKHVVELEAQKSELEAELSGLKIAAAITYTRDEVVAWLKQFCNGDPLEAEFRRRIVETFINSVYVYDDRIVIYFNVRGGKQISYAEMLESVGDVEPLPPGPENEKSGGPDNGTAANNSKERFLHGKNTEQTTESAVRFCSGLVHQKAQLRKRLSFFLFIIHGKE

SEQ ID NO: 1450 - protein, 569 aa, Unknown
  Description of Unknown: Integrase B1451 sequence
  PTHR30461:SF3,IPR036162,PS51737,IPR011109,PTHR30461, PS00397,PF00239,G3DSA:1.10.10.2600,IPR006119,SSF53041, SM00857,IPR025827,IPR038109,mobidb-lite,PS51736, cd03768,IPR006118,PF13408,G3DSA:3.40.50.1390,PF07508,Coil
MTNQKEKIVALYVRVSTGYQVDKDSLPFQKKELKAYCEHVLHIDKKRIEIFEDAGKSGKNTKRPAFERMMEKVKAGLVSHVIVYKIDRISRNLVDFSIMYDNFKRNDVTFISLNEQFDTSSAMGEAMLKIILVFAELERKLTSERVTDVMIGRAQSGQWNGARVPYGWDWDEENKRPVHSKKEAPYAKAMYQMYLDGGSSVTIRDYNNSHNIPTKRGGKWTSKTVADFLRNPINKGDYRYNYRESARGKRKSDEEVIYMDGVFPPLVDPEIWNEVNRRMDMNCKKRNTSAFHPIRKRCNVFAGLIVCGKCGSNYQVTSKDGRRGNGFRPSSYACTGKYQKKNCDNLNVSDVKIGPFMINYIAAIIDASKSKRFIKDTESLERVILSHIDFTDVAGISESSLQDTIDLLYGRSGTETLSGKPVSKDSKNTDTAEKKKELQEKLQKTDRALERLKKAYLFDDDAMDEKEFLEMKTKLEVDKVKLGNSIKSLDSSSISENVDQAAFIKSASQFLISHKINSGGNIEYSELAMMDEEAMKTLMNSIIDHITVMDRHITEIVFKNGLTHTLLYR

SEQ ID NO: 1451 - protein, 569 aa, Unknown
  Description of Unknown: Integrase B1452 sequence
  PTHR30461:SF3,IPR036162,PS51737,IPR011109,PTHR30461, PS00397,PF00239,G3DSA:1.10.10.2600,IPR006119,SSF53041, SM00857,IPR025827,IPR038109,PS51736,cd03768, IPR006118,PF13408,G3DSA:3.40.50.1390,PF07508,Coil
MTEQNEKIVALYVRVSTGYQVDKDSLPFQKKELKAYCEHVLHIDKNRIEIFEDAGKSGKNTKRPAFERMMGKVKSGQVSHVIVYKIDRISRNLVDFSLMYDDFKYNNVTFISLNEQFDTSSAIGEAILKIILVFAELERKLTSERVTDVMIGRAQNGQWNGARVPYGWDWDEEKQCPVHSKKEAQYAIAMYEMYLNGGSTVSIRDYNNAHNIPTKRGGEWTSKTVADFLRNPINKGAYRYNYRESARGRKKPNEEVVFIENAFPPLVEPRIWELVNKRMDENTLKLNTSSMHTIRKNCNVFAGLIVCGKCGVNYQVTAKDRRKGSGFRPSSYACTGKYQKNHCDNLNVSDVKIGPFMINYIAAMVDASKSRKFIKDTKSLEQVLLSHISFSNIAGIANDSLQETLELISGYSASKSALWSAETLSKEQQTDVDSKQSELNERLQKVNRAMERLKKVYLFSDDGMDEKEFLEMKSSLEADRVKIENEIKGLNAPIATNVDQVAFIKSASEFLLMHKINSGEFVDYKELATLDEESLKQFMNSVIDHIVVRERKIVEIVFVNGLSHTLLYK

SEQ ID NO: 1452 - protein, 569 aa, Unknown
  Description of Unknown: Integrase B1453 sequence
  SM00857,G3DSA:1.10.10.2600,IPR036162,PF13408,IPR025827, G3DSA:3.40.50.1390,PS51737,IPR006119,IPR038109,PF07508, IPR011109,SSF53041,PF00239,PTHR30461,PS51736, Coil,cd00338
MNIYYAREQLRSCSIYDLKINVAYYARVSTEKMEQQVSIKHQEEHFEELIRNNHQWFFAGAYIDDGISGIHTEKREEFQRMLRDAKLGKIDMIITKEISRFARNTLDSIQYTRELLSYGVCVWFQNDGINTIDEDSELRLTIMAGVAQDEIRKLSSRIKFGHAQSIKNGVVLGHRMYGYSNDKGKLTIVPEEADMVRMIFRDYASGVTTPQIEKKLWDMGYRSFKGKKIDRNVIKSIIKNPKYKGYYCGGKVKIVDMFTKKQEFLPQSEWVMFKDDGSRVPQIIDEKTWEKANTYMRERGDAIRSRKTSFKQENIFTGKLICANDGAHYWLKRHCIHKKEDARWVCSHKIRNGANSCNSFGLSEAELQVIIANLINKSIENIDQILKKYFEILKSIIDNRPDNLDEIKRLERQIDTLKLKREKILEYNLSGDISDSEFVSRNKEYVNQIKETEKRIFDLQNTKKPEPIDNQIDAIKKQLEKFKGIVPDDVNRLVVDELFDKILVEPLDGSCLLSFYLKDGNVEKWGFPLRCSDSMKLNIFPEQHTTFSRNNCIKTQDVVLYNYTYKLAL

SEQ ID NO: 1453 - protein, 569 aa, Unknown
  Description of Unknown: Integrase B1454 sequence
  PTHR30461:SF3,IPR036162,PS51737,IPR011109,PTHR30461, PS00397,PF00239,G3DSA:1.10.10.2600,IPR006119,SSF53041, SM00857,IPR025827,IPR038109,PS51736,cd03768, IPR006118,PF13408,G3DSA:3.40.50.1390,PF07508,Coil
MTEQNEKIVALYVRVSTGYQVDKDSLPFQKKELKAYCEHVLHIDKNCIEIFEDAGKSGKNTKRPAFERMMGKVKSGQVSHVIVYKIDRISRNLVDFSLMYDDFKYNNVTFISLNEQFDTSSAIGEAILKIILVFAELERKLTSERVTDVMIGRAQSGQWNGARVPYGWDWDEEKQCPVHSKKEAQYAIAMYEMYLNGGSTVSIRDYNNAHNIPTKRGGEWTSKTVADFLRNPINKGAYRYNYRESARGRKKPNEEVVFIENAFPPLVEPRIWELVNKRMDENTLKLNTSSMHTIRKNCNVFAGLIVCGKCGVNYQVTAKDRRKGSGFRPSSYACTGKYQKNHCDNLNVSDVKIGPFMINYIAAMVDASKSRKFIKDTKSLEQVLLSHINFSNIAGIANDSLQETLELISGYSASKSALWSAETLSKEQQTDVDSKQSELNERLQKVNRAMERLKKVYLFSDDGMDEKEFLEMKSSLEADRVKIENEIKGLSAPIATNVDQVAFIKSASEFLLMHKINSGEFVDYKELATLDEESLKQFMNSVIDHIVVRERKIVEIVFINGLSHTLLYK

SEQ ID NO: 1454 - protein, 569 aa, Unknown
  Description of Unknown: Integrase B1455 sequence
  PTHR30461:SF3,IPR036162,PS51737,IPR011109,PTHR30461, PS00397,PF00239,G3DSA:1.10.10.2600,IPR006119,SSF53041, SM00857,IPR025827,IPR038109,PS51736,cd03768, IPR006118,PF13408,G3DSA:3.40.50.1390,PF07508,Coil
MTNQKEKIVALYVRVSTGYQVDKDSLPFQKKELKAYCEHVLHVDKKRIEVFEDAGKSGKNTKRPAFERMMEKVKAGKVSHVVVYKIDRITRNLVDFSLMYDDFKYNNVTFISLNEQFDTSSAIGEAILKIILVFAELERKLTSERVTDVMIGRAQSGQWNGARVPYGWDWDAENKCPVHSKKEAPYAKAMYQMYLDGGSSVTIRDYNNSHNIPTKRGGEWTSKTVADFLRNPINKGDYRYNYRESARGKRKADEEVIYMEGVFPPLIDPEIWNEVNRRMDANHTRKNTSAMHPIRKNCNVFAGLIVCGKCGSNYQVTAKDRRRGNGFRPSSYACTGKYQKKHCDNLNVSDVKIGPFMINYIAAIIDASKSRRFIKDTESLERVILSHIDFTDVAGISESSLQDTIDLLYGRSGTETLSGKPVSKDGKNTDTAEKKKELQEKLQKTDRALERLKKAYLFDDDAMDEKEFLEMKTKLEVDKVKLENSIKSLDSSSISENVDQAAFIKSASQFLISHKINSGGNIEYSELAMMDEEAMKALMNSIIDHITVMDRHITEIVFKNGLTHTLLYR

SEQ ID NO: 1455 - protein, 568 aa, Unknown
  Description of Unknown: Integrase B1456 sequence
  SM00857,G3DSA:1.10.10.2600,IPR036162,PF13408,IPR025827, G3DSA:3.40.50.1390,PS51737,IPR006119,IPR038109,PF07508, SSF53041,IPR011109,PTHR30461,Coil,cd00338, PF00239
MAYRKITDIKDTIGMRAVFYARVSTAEEEQLNAIELQIEENRGCIKDHGWKLVGEYIDRSKSGTMVKGRDDYQRLYEDLYEDLFDIVVIKDQERLQRNTLDWYLFINRVVQTGKLLFMYMDGKFYSPDDALITGVRAIIAEEFSRNLSKKLHNYHDHRIEKARQGQEIALQGSGNVYGWDKKDGKYYINPEQAKVRRLMCEGIMARKGSTLIAKELNEAGYRNTVGKLWKPMDIPKFVYDCKNVGTMIINKERHDFESKQTIKLPKEEWVYVENALPPIVTQEEWDLICKIHEERVIATGSDRRGKKTSGYSFSGKLVCGICGAPYWRKQRVSKDEYWVCSTKQTKGRRTRKRDSTMGKAGEINPLGCDNENISYNSLMEIMGVVSERLQANTDTIKHDMINWLTKLRKQLLEANGGHTEADLQRELSRKSKLLDAYLDGILNKQEYQKKAEELDERIIQLKAETEKNKANSGDIAEIDKVLANIDEEVSRYVDGNEKLKVEYLLEHLEQVQIFQDKVIVIVPILSEGIVVEKAQYVSREKWSRKDDNHEYDDRLYRSHIRNRKSVWT

SEQ ID NO: 1456 - protein, 568 aa, Unknown
  Description of Unknown: Integrase B1457 sequence
  PTHR30461:SF3,IPR036162,PS51737,IPR011109,PTHR30461, PF00239,G3DSA:1.10.10.2600,IPR006119,PF14287,SSF53041, IPR025378,SM00857,IPR025827,cd03770,IPR038109, PS51736,PF13408,G3DSA:3.40.50.1390,PF07508,Coil
MQSKKKQDKAGITALYCRLSRDDGVEGDSNSVANQKKLLKQFAKENGLSNTRYYVDDGYTGTNFERPGFQKMIEDIDLGYISTVIVKDLSRLGRRYDMVGYYMDTYFPDRDVRFIAVNDNIDSDEGESEIAPFKNVLNEFYARDISKKCRSSYRIRGSTGEPLAPPPYGYIKSPDNPKKWVIDPEAAQVVRDIFKMALEGKSNETIASILQERKVLIPMAYWQEKGIRKGGKVTQPNKYKWCKTTVTKILTQQEYCGDIINFKTYSKSYKNKKRYDNPKENWVIFKDVHEPIISRDDFELVQMLVVKTKRRAPKQENGEKNMFCDFLYCADCGSKLWYHTNTTNKEIHYFSCSNYKKDTRGNCETRHYIRADAIEQIVMLELKRLAKYLEFHEEEFAKLLAEKTNADMLAEQKTLETELNRATARNEMLTSLFAKTYEDNVSGKLSDEMYMELSHKYEVERLELKTKIFEYKERLAKISEMEQNKDDFLKAVRKFMEMKSLTAPMLRELIDHIDVYEKEGGKKNYTQRIVIYYRFVGYLELPSSDDENYKANTRKGVDVEYIPTVKSA

SEQ ID NO: 1457 - protein, 568 aa, Unknown
  Description of Unknown: Integrase B1458 sequence
  PTHR30461:SF3,SM00857,G3DSA:1.10.10.2600,IPR036162,PF13408, PS51737,IPR025827,G3DSA:3.40.50.1390,IPR006119,IPR038109, PF07508,IPR011109,SSF53041,PTHR30461,Coil, PS51736,cd00338,PF00239
MNRYERLNEERKIIEKRKRVAAYCRVSTDNEDQANSFESQQRYFRQYIERNPDWELYEIFADEGISGTSTKKRKEFNRMIACAKNGDFDLIITKEISRFARNTLDSIYYTRDLKKHGVGVIFMNDNINTLDGDAELRLAIMSSIAQEESRKTSERVKWGQKRQMEQGVVFGRSMLGYDVKDGKMTINEEGAKIVRLIFHKFVNEGKGTHVIARELREEGIEPMRVKEWQNTVILRVIRNEKYCGDLVQKKTYTPDFLSHEKKYNRGQEEFVIIKDHHEPIVSRELFEEANRILDERSLSQEGKAKHSNRYPFSGKIKCGHCGASYVARYKTRKDGSKYKAWRCQEAAKHGSPHTDKAGNQIGCTGASIRNEDATHIMFLVTKELKLRQTKITKNLTSIIESIIAMDTTGTDIEKLKTQIATIEDKRTKLIDIYMSGDISKDEFSAARSKCDAEIAELQSVIDSIDKQQAMIRQQQELVQEIRDAINEIVCGVEYDDEFYKHILDKMVVNDKDNIDVYLNLLPMKWSYTVAKASKKALAPERNISGASVPISVSSPATSLYGIEYLCEM

SEQ ID NO: 1458 - protein, 568 aa, Unknown
  Description of Unknown: Integrase B1459 sequence
  cd03768,SM00857,G3DSA:1.10.10.2600,IPR036162,PF13408, IPR025827,SSF109709,G3DSA:3.40.50.1390,PS51737,IPR006119, IPR038109,PF07508,SSF53041,IPR011109,PTHR30461, PS51736,PF00239
MEDQKQIRCAIYTRKSTDEGLEKEFNTLEAQREAGENFVMSMKHQGWVILPDHYDDGGFSGGNLKRPALKRLMADVEKGKVDMIVVYKIDRLTRSLLDFAQLVQTLEKNDCSFVSVTQHFNTCDSMGKLTLNILLSFAQFERELGAERVRDKIAASKKKGMWTGGPAPLGYDIKEKKLIINPEEAEVVKFIFDDYLKTKSQLQTMKDVNEKGYKPKTRVTKTGRVASKGRFNHSMISNILSNPIYIGMVAYKDALYEGQHKGIIDKAIWDNVADLKKSNIGSGFSPQKSEKVALLKGLLECECCGAMTPTRSKKGNKYYEYYTSSKAVKEGVKTVNCQIGSIPAGEIESFVLDKVKKIFQSPNLQQAMLKEFERQNANYNGADVNAIIKDIGEAFKYFEPATVHDFIKEVVRKVIVCHDHIEIKLKPFSVSLFEDGTLGSDENFDAKHLELKYPVRFGRKRGRVLIIEPTPQTPDQGERDSKLYTAVTQAFYWKQQMEERHITLTELAKQEHTDRGYMGQILKLTTLAPDIVMAIIEGRQPKLLTTRGLIRGHFPYIWEDQRRELGFK

SEQ ID NO: 1459 - protein, 568 aa, Unknown
  Description of Unknown: Integrase B1460 sequence
  SM00857,G3DSA:1.10.10.2600,IPR036162,PF13408,PS51737, G3DSA:3.40.50.1390,SSF109709,IPR025827,IPR006119,IPR038109, PF07508,IPR011109,SSF53041,PTHR30461,PS51736, cd00338,PF00239
MESFSPIRCAIYTRKSTDEGLEKEFNTLEAQREAGENYIRSMKHQGWVILPEHYDDGGFSGGSLKRPALKQLLSDVEAGKVDMIVVYKIDRLTRSLLDFAQLVKIFEKHCCSFVSVTQHFNTCDSMGKLTLNILLSFAQFERELGAERVRDKIAASKKKGMWTGGPLPLGYDSKNKKLVINKEEAEIVRFIFEDYRRTGSQFQTVRDVNEKGYKPKERITKTGNNISKGSFNHAMISNILNNPVYLGKVVYKGELYDGQHKAIISQELWDETKSLRKANLGEAFRPSRVIKHSLLKGLIECECCGAMTPTRSKHGNKYYEYYTPLKTVKEGAKIAHCKVGSIPAGEIESFVIDKIKSIFQAPEFQQGLLKEFGNQGHNCNAADIHKIISDIGDAIKYFEPRTIHNFISELVRKVIICHDHIEIKLQPFAATLYESSLVKPDPAFNNKILELKYPVQFGQKRGRTVIVEPASVERITPHRDEKLFNAVTLAFYWKQIMEEKHLSVTELARRENIDRGYMGQIIRLTTLAPDIIMAIINGTQPKLLNLRKLLRERFPYSWEEQKRELGFI

SEQ ID NO: 1460 - protein, 568 aa, Unknown
  Description of Unknown: Integrase B1461 sequence
  PTHR30461:SF3,SM00857,G3DSA:1.10.10.2600,IPR036162,PF13408, IPR025827,G3DSA:3.40.50.1390,PS51737,IPR006119,IPR038109, PF07508,SSF53041,IPR011109,PTHR30461,Coil, cd00338,PF00239
MKKFKFPIDLSMLTEEEINQFREDPSTLFQGDTDVCLYLRFSSERQKEQSIEGQLRDCIAYCKRKNYRIVAIYVDRATTARKDVEKRVHFQEMITASVHQTWKLVVVWKLDRFARNREDSAVFKMRLRKNGVKVESATEGISKNPEGIILEAVLEGIAEYYSADLSQKITRGMRESALKCHSIGGHVPLGYKIENHKLVINPDTAHIVQEAFELYANGETVADICRMFNAKGYRTAKGAEFNRNSFKSMFRNRRYIGVYRYKDFEKEGGVPPIIDKDLFETVQKRLSANAEAPARGKAKVDYLLAGKLFCGHCGGSMNGESGTSKTGAVHNYYACYTRKRQHSCDKKPLRKEWIEQIVAQDAMELLTDDTIQEMADMAISQTEKDLRENTRIPELSERMKETESGIANITKAVEKGIASDALMSRLVELEKEKKNLLRLIAEEEKYVCKIDRDQIVYWLTKFKNGNIEDENFKRIIIDLMVNSVTVWDEPDDFRITTAYNLTSCKNKTFRIPSSSDKGFGFEGLESTRWTLHEHLLFQRRLCCKGVVVMSKRKAQGARHIVPCPLGFL

SEQ ID NO: 1461 - protein, 568 aa, Unknown
  Description of Unknown: Integrase B1462 sequence
  SM00857,G3DSA:1.10.10.2600,IPR036162,PF13408,PS51737, G3DSA:3.40.50.1390,SSF109709,IPR025827,IPR006119,IPR038109, PF07508,IPR011109,SSF53041,PTHR30461,PS51736, cd00338,PF00239
MESFSPIRCAIYTRKSTDEGLEKEFNTLEAQREAGENYIRSMKHQGWVILPEHYDDGGFSGGSLKRPALKQLLSDVEAGKVDMIVVYKIDRLTRSLLDFAQLVKIFEKHCCSFVSVTQHFNTCDSMGKLTLNILLSFAQFERELGAERVRDKIAASKKKGMWTGGPLPLGYDSKNKKLVINKEEAEIVRFIFEDYKRTGSQFQTVRDVNEKGYKPKERMTKTGKNISKGSFNHAMISNILNNPVYLGKVVYKGELYDGQHKAIISQELWDEAKSLRKANLGEAFRPSRVIKHSLLKGLIECECCGAMTPTRSKKGNKYYEYYTPLKTVKEGAKIAHCKVGSIPAGEIESFVIDKIKSIFQAPEFQQRLLKEFENQGHNCNAADIHKIISDIGDAIKYFEPRTIHDFISELVRKVIICHDHIEIKLQPFAATLYESSLVKPDPAFNNKILELKYPVRFGQKRGRTVIIEPAFVERTTPHRDEKLFNAVTLAFYWKQIMEEKHLTLTDMAKRENIDRGYMGQIIRLTTLAPDIIMAIINGTQPKLLSLRKLLRERFPYSWEEQKRELGFI

SEQ ID NO: 1462 - protein, 568 aa, Unknown
  Description of Unknown: Integrase B1463 sequence
  PTHR30461:SF3,cd00338,SM00857,G3DSA:1.10.10.2600,IPR036162, PF13408,PS51737,G3DSA:3.40.50.1390,IPR025827,IPR006119, IPR038109,PF07508,IPR011109,SSF53041,PTHR30461, PS51736,Coil,PF00239
MARKKNIAAGLDAVIYARYSSHNQREVSIEQQIAECTKHAAALGLRIVGTYEDRAISGKTDNRPRFQQMMRDAEKGKFQAVVAWKSNRIGRNMLQAMVNEAKLDDYGVKVFYAEEDFDDTAAGRFALRNMMNVNQFYSENMAEDITRGLYDNANKCMANGRQPLGYKRGADGKVMLDEPAAAVVREIFTRVAAGDLFVDIARDLNAKGIKTSKGAAWNKGSFQSICQNERYKGIYIYGNVRIVDGIPRIVSDELWYKVQEAMRMKKNPVGTRHRVGAEDYLLTGKLRCGHCGSYMTGISGTSRNGELHYYYTCQKRRTEHACNKKNVRRDVIEPAIAQAIKMYCLTDDVIEWMADQTVQYWEKHDNDLQIEALEQQLAENKKATSNMLKAIEMGIITEATRSRMVELETENSKLTAQLSAAKRDVVKINREDLIDELHILRSKDIHDREVQAELFKDFLVAAYIYDDNRLKLVFSFMGKDNSVEIPLETGEDPPDGEDSPDAKMFVLTPDCSTKKALYFVGSMVLFFLLKQKMGAALPCLHRFQMFCRRFSAAPESLVFRQVRRCRFS

SEQ ID NO: 1463 - protein, 568 aa, Unknown
  Description of Unknown: Integrase B1464 sequence
  PTHR30461:SF3,SM00857,G3DSA:1.10.10.2600,IPR036162,PF13408, IPR025827,G3DSA:3.40.50.1390,PS51737,IPR006119,IPR038109, PF07508,SSF53041,IPR011109,PTHR30461,PS51736, cd00338,PF00239
MAKRSAKKNEYQSAEQVGVIYARYSSHNQKEESIEQQIAECSDFAAKNGIRIVGIYADKAVSGRSDRRPNFQRMMRDAEKRQFQIVVAYKSNRIARNMLNALQYEARLDLLGIKTLYAKEEFGNTAAGRFALRTMMNVNQFYSENMGEDIKRGMVDNANECKVNGMLPLGYVKSKEGKYAITPDEAAVVREIFDSVLKDVPVAEIARSLNQRGIRTKLGREWNKNSFHIMLKNDNYIGVYRHSGVVVEDGIPPILEKEVFAAVQEKLANKKKTAGRRSANGEYLLTGKLFCGYCGSYMIGVSGTGENGTVHNYYQCQKRHAEGRCEKKNVRRDFIEKLIARLTQDYILQDDTIEWIADSTMSFQAMARRESGVAQLERDLADNRKVAKNIMAAIEQGIITETTKARLLEVEGTIHDLERSLSIAKAASQPIEHERVVFSLEQMREGNVGSKEHQKKLIDTFVKSVTLWDDRIQIDYYHTPGKHKFSYSLEELTSKAENESNASDVRTDSLELHHCRRELHRFTTAFLLTAAPLRLYGTIKKTQESNSCVFFACIDGCVPQCPARLGIV

SEQ ID NO: 1464 - protein, 568 aa, Unknown
  Description of Unknown: Integrase B1465 sequence
  SM00857,G3DSA:1.10.10.2600,IPR036162,PF13408,PS51737, G3DSA:3.40.50.1390,SSF109709,IPR025827,IPR006119,IPR038109, PF07508,IPR011109,SSF53041,PTHR30461,PS51736, cd00338,PF00239
MESFSPIRCAIYTRKSTDEGLEKEFNTLEAQREAGENYIRSMKHQGWVILPEHYDDGGFSGGSLKRPALKQLLSDVEAGKVDMIVVYKIDRLTRSLLDFAQLVKIFEKHCCSFVSVTQHFNTCDSMGKLTLNILLSFAQFERELGAERVRDKIAASKKKGMWTGGPLPLGYDSKNKKLVINKEEAEIVRFIFEDYKRTGSQFQTVRDVNEKGYKPKERMTKTGKNISKGSFNHAMISNILNNPVYLGKVVYKGELYDGQHKAIISQELWDEVKSLRKANLGEAFRPSRVIKHSLLKGLIECEYCGAMTPTRSKHGNKYYEYYTPLKTVKEGAKIAHCKVGSIPAGEIESFVIDKIKSIFQAPEFQQGLLKEFENQGHNCNAADIHKIISDIGDAIKYFEPRTIHNFISELVRKVIICHDHIEIKLQPFAATLYESSFVKPDPAFNNKILELKYPVRFGQKRGRTVIVEPASVERITPHRDEKLFNAVTLAFYWKQIMEEKHLSVTELARRENIDRGYMGQIIRLTTLAPDIIMAIINGTQPKLLNLRKLLRERFPYSWEEQKRELGFI

SEQ ID NO: 1465 - protein, 568 aa, Unknown
  Description of Unknown: Integrase B1466 sequence
  PTHR30461:SF3,SM00857,G3DSA:1.10.10.2600,IPR036162,PF13408, IPR025827,PS51737,G3DSA:3.40.50.1390,IPR006119,IPR038109, PF07508,IPR011109,SSF53041,PF00239,PTHR30461, Coil,cd00338
MKKFKFPIDLSMLTEEEIDQFKEDPFTLFHGETDVCLYLRFSSERQKEQSIEGQLRDCIAYCKRKNYRIVAIYVDRATTARKDVEKRIHFQEMITASVHQTWKLVIVWKLDRFARNREDSAVFKMRLRKNGVKVESATEGISKNPEGIILEAVLEGIAEYYSADLSQKITRGMRESALKCHSIGGHVPLGYKIEDHKLVINPDTAHIVQEAFELYANGETVADICRMFNAKGYRTAKGAEFNRNSFKSMFRNRRYIGVYRYKDFEKEGGVPPIIDKDLFETVQKRLSANAEAPARGKAKVDYLLAGKLFCGHCGGSMNGESGTSKTGAVHNYYACYTRKRQHSCDKKPLRKEWIEQIVAQDAMELLTDDAIQEMADMAISQTEKDLRENTRIPELSERMKETESGIANITKAVEKGIASDALMSRLVELEKEKKNLLRLIAEEEKYVCKIDRDQIVYWLTKFKDGNIEDENFKRIIIDLMVNSVTVWDEPDGFRITTAYNLTSCKNKTFRIPSSSDKGFGFEGLESTKREPYEPGPDHLHGRWRVRIGLPAQSGKMKKGYRLGISPIR

SEQ ID NO: 1466 - protein, 568 aa, Unknown
  Description of Unknown: Integrase B1467 sequence
  SM00857,G3DSA:1.10.10.2600,IPR036162,PF13408,PS51737, G3DSA:3.40.50.1390,SSF109709,IPR025827,IPR006119,IPR038109, PF07508,IPR011109,SSF53041,PF00239,PTHR30461, PS51736,Coil,cd00338
MESFSPIRCAIYTRKSTDEGLEKEFNTLEAQREAGENYIRSMKHQGWVILPEHYDDGGFSGGSLKRPALKQLLSDVEAGKVDMIVVYKIDRLTRSLLDFAQLVKIFEKHCCSFVSVTQHFNTCDSMGKLTLNILLSFAQFERELGAERVRDKIAASKKKGMWTGGPLPLGYDSKNKKLVINKEEAEIVRFIFEDYRRTGSQFQTVRDVNEKGYKPKERITKTGKNISKGSFNHAMISNILNNPVYLGKVVYKGELYDGQHKAIISQELWDETKSLRKANLGEAFRPSRVIKHSLLKGLIECECCGAMTPTRSKHGNKYYEYYTPLKTVKEGAKIAHCKVGSIPAGEIESFVIDKIKSIFQAPEFQQGLLKEFGNQGHNCNAADIHKIISDIGDAIKYFEPRTIHNFISELVRKVIICHDHIEIKLQPFAATLYESSLVKPDPAFNNKILELKYPVRFGQKRGRTVIVEPASVERITPHRDEKLFNAVTLAFYWKQIMEEKHLSVTELARRENIDRGYMGQIIRLTTLAPDIIMAIINGTQPKLLNLRKLLRERFPYSWEEQKRELGFI

SEQ ID NO: 1467 - protein, 568 aa, Unknown
  Description of Unknown: Integrase B1468 sequence
  PTHR30461:SF3,cd00338,SM00857,G3DSA:1.10.10.2600,IPR036162, PF13408,IPR025827,G3DSA:3.40.50.1390,PS51737,IPR006119, IPR038109,PF07508,IPR011109,SSF53041,PTHR30461, PS51736,Coil,PF00239
MNNKKTKVYIYTRVSTVMQIDGYSLEAQKNKMKNYAEFNDFKIAGEYEDAGKSGKSIEGRMGFNQMIEDIKSGKDNVEYVLVFKLSRFGRNAADVLSTLQIMQDYGVNLICVEDGIDSSKDAGKLMISVLSAVAEIERENIRVQTMEGRSQKAREGKWNGGFAPYGYALDSGKLVINEEEAEAIRIIFDQYVHSNLGANGIAKYLENHGIHKIPRQNGKNPLFDAGYIRKIIKNPVYCGKIAYGRRRTEKVHGTRNEYRTVNKEDYILADGIHEGIISEELWKDAQIKALVQSKKYEHVNKSKNVRIHLLSGIVKCPICGTGMYGNKSIKKRKDGTKYKDFYYYGCKHRNMTRGHKCDYKKQINEEVLDAAVAEVIVKLVSNPKFAKMMQSKINTKVDVKPINQEIANYKKQLKQANMAKDRIIEEIDSMDAEDRHFEIRKKDLNDRLNKMYDKIEESSDMLATALNKKRSIEADKLTVDNIYKVLICFEKLYDKMDQTEKRQLVSALVDKVEIYEEKRENGQWLKSITFKLPIIEGRERISLDNSDRVETVAWLEQYRSEDTNHDSN

SEQ ID NO: 1468 - protein, 568 aa, Unknown
  Description of Unknown: Integrase B1469 sequence
  cd03768,SM00857,G3DSA:1.10.10.2600,IPR036162,PF13408, PS51737,SSF109709,G3DSA:3.40.50.1390,IPR025827,IPR006119, IPR038109,PF07508,IPR011109,G3DSA:1.10.10.2830,SSF53041, PTHR30461,PS51736,PF00239
MEEQKKVRCAIYTRKSTDEGLDKEFNTLEAQREAGANYILSQKHQGWVLLDERYDDGGFSGGNINRPALKRLIHDVEAGKIDMIVVYKIDRLTRSLADFSKLIEVLDKHKCSFVSVTQNFNTYDSMGRLTLNVLLSFAQFEREVGAERIRDKVAASRKKGMWMGGKVPFGYMLINKHLEINPTEAEIVRLIFNKYSACKSERDVCTFLKAGGYCINARKQKNGTELPAKEFTVSKIDYMLRNPIYIGKVVHKGTVYDGQQEAIISKELWERVENTRLGNRHGKLKPSRVVRNALLKGMLECGCGCNSSMIPTRTRKKNRTYEYYVSLKAVKEGYQHCELGSIPVGELDKFVLSKIQNILKSPLLLNELLKYLKPDMPEIGMNELLQKTKAPEDFFTYLSQESLRQILERLISRVIIYKDKLVIRLLPLGALLLEKSQTADLQASEEHSGLAELVYHISFSRKRGHMKVIPAEESQTAVDETLLNALVKAHNWRDKLENSDMSLRELARKEKVAHVYISKMMKLTYLAPDIIDAIIVGTQPQSLKISDLLKSPIPASWSEQRTKYGFNS

SEQ ID NO: 1469 - protein, 567 aa, Unknown
  Description of Unknown: Integrase B1470 sequence
  PTHR30461:SF3,IPR036162,PS51737,IPR011109,PTHR30461, PS00397,PF00239,G3DSA:1.10.10.2600,IPR006119,SSF53041, SM00857,IPR025827,IPR038109,PS51736,cd03768, IPR006118,PF13408,G3DSA:3.40.50.1390,PF07508,Coil
MKEDNRIVALYVRVSTGYQVDKDSLPFQKKELKAYCEHVLHIDKNRIEIFEDAGKSGKNTKRPAFERMMDKVKAGQVSHVVVYKIDRISRNLIDFSIMYNEFKYHRVAFISLNEQFDTSSAMGEAMLKIVLVFAEMERKLTSERVTDVMIGRAQSGLWNGARVPYGWDWDDEKKCPVHSKVEAKYVKQMYEDYLNGGSSVSIAKNYNANKIPTKRGGEWTSKTIADVIRNPMNKGDYRYNYRESARGRKKPQEEVIYIKGVFEPLVSINDWEKANKLMDGRGFKMNSSGQIIMNKRCNVFTGLIFCGKCGERYNVRSKDCRQGSGFRPSSYACGKKSRKGTCDNQNISDVIIAPIMINYIAAMVDVSKHKRHIKTTKELEQMILKRISFSDIVGISEDSLKDTLDLLYGKNGTQLWSANTVSQEDKSENKQKLTELQVKLEKTERAIERLKKAFLFDDDGIDEKEFLEMKSALEIDRVKIENEIKGMETESISVNVNQVEFIKTASQYLLMHELNKDEIINYKELAIADEDSIKNLFNSVLDHITVMDKRITEIVFKNGLTHKLLYK

SEQ ID NO: 1470 - protein, 567 aa, Unknown
  Description of Unknown: Integrase B1471 sequence
  SM00857,G3DSA:1.10.10.2600,IPR036162,PF13408,PS51737, G3DSA:3.40.50.1390,IPR025827,IPR006119,IPR038109,PF07508, SSF53041,IPR011109,PTHR30461,Coil,cd00338, PF00239
MAYRKITDIRDTIGMRAVFYARVSTAEEEQLNAIELQIEENRGCIKDHGWKLVGEYIDRSKSGTMVKGRDDYQRLYEDLYEDLFDIVVIKDQERLQRNTLDWYLFINRVVQTGKLLFMYMDGKFYSPDDALITGVRAIIAEEFSRNLSKKLHNYHDHRIEKARQGQEIALQGSGNVYGWDKKDGKYYINPEQAKVRRLMCEGIMARKGSTLIAKELNEAGYRNTVGKLWKPMDIPKFVYDCKNVGTMIINKERHDFESKQTIKLPKEEWVYVENALPPIVTQEEWDLICKIHEERVIATGSDRRGKKTSGYSFSGKLVCGICGAPYWRKQRVSKDEYWVCSTKQTKGRRTRKRDSTMGKAGEINPLGCDNENISYNSLMEIMGVVSERLQANTDTIKQDMINWLTKLRKQILEANGGHTEADLQRELSRKSKLLDAYLDGILNKQEYQKKAEELDERIIQLKAETEKNKANSGDIAEIDKVLANIDEEVSRYVDGNEKLKVEYLLEHLEQVQIFPDKVIVIVPILSEGIVVEKTQYVSREKWSGKNHINAYALYDCSTIRRTNIMEW

SEQ ID NO: 1471 - protein, 567 aa, Unknown
  Description of Unknown: Integrase B1472 sequence
  PTHR30461:SF3,IPR036162,PS51737,IPR011109,PTHR30461, PS00397,PF00239,G3DSA:1.10.10.2600,IPR006119,SSF53041, SM00857,IPR025827,IPR038109,PS51736,cd03768, IPR006118,PF13408,G3DSA:3.40.50.1390,PF07508,Coil
MTENQEKIVALYVRVSTGYQVDKDSLPFQKKELKAYCEHVLHIDKKRIEIFEDAGKSGKNTKRPAFERMMNKIKAGQVSHVIVYKIDRISRNLVDFSLMYDDFKYNNVTFISLNEQFDTSSAIGEAILKIILVFAELERKLTSERVKDVMIGRAKNVQWNGARVPYGWDWDEKNKCPVHSDKEAPYVRTMYQMYLDGGSTITIRNYNNSHNIPTKRGGEWTSKTVADLLRNPMNRGDYRYNYRESSRGRKKPAEEVIYIKDAFPPIVDPKIWDAVNKKMDENAALRNTSGLHTIRNRCNVFAGLIVCGKCGHNYQVKGKDSRKGNGFRPSSYACTGKFQKNNCDNMNISDVNIGPFIINYIAAMVDASKKRKNIRNIDDLEQLILSHINFSDVIGISEESLRNTMDLFSAQTSSLGISSLSTQDQDGSVISQKNKLEEELQKTNRALERLKKAFLFDDDGISEKEFLEMKSKLEIDRIQIENSLKKISQDSISANVNHIEFIKTASQFLMIHEINSGNFVDYKKLASADEKTMKDFISSVVSGITVLDKRIVKIVFRNGLSHTLLYR

SEQ ID NO: 1472 - protein, 567 aa, Unknown
  Description of Unknown: Integrase B1473 sequence
  PTHR30461:SF3,IPR036162,PS51737,IPR011109,PTHR30461, PF00239,G3DSA:1.10.10.2600,IPR006119,PF14287,SSF53041, IPR025378,SM00857,IPR025827,cd03770,IPR038109, PF13408,G3DSA:3.40.50.1390,PF07508,Coil
MQPKKNNKIGITALYCRLSRDDGMDGESNSIVNQKTLLSQKAKEKGLTDIKFYVDDGYTGTNFNRPGFGQLISDIEMGYIYAVMVKDLSRLGRDYVSVGNYTDVYFPDHDIRFIAVNDGIDSEEGESEIAPFKNILNEMYARDISKKIRSSHRLRGSMGEPLSQPPYGYMKSAENKKKWVIDPEAADVVKSIFKMCLEGKGNETIARILQEKQILVPMAYWQSKGLPRGGKKTQPNPYKWCKTTIQKILSQQEYCGDVINFKTCSKSFKNKTRLPNDPENWAIFRDVHEPIIARGDFEKVQTLIAKTKRRAPKPQNGEKSIFCDLLFCGDCHGKLRHHTNTINKDIHYFVCANNKVDYRGECPGRHYVRADAVEQVVMLELRRMAEFLESDEEAFAELLAQKTDRELLKEKKHDEEELQKVTVRNDTVCRLYEKLYEDNATGKVSDEWFMQLSHKYEAERMELKAKIKALRQKLSECGQRESERESFTSAIREFMRMDRLTAPLLRELIDIEVFETEGKGKNRTQRIVIYYRFVGYVEIPEVSDRRHIKAETRRGVAVEYLTEPKTA

SEQ ID NO: 1473 - protein, 567 aa, Unknown
  Description of Unknown: Integrase B1474 sequence
  PTHR30461:SF3,IPR036162,PS51737,IPR011109,PTHR30461, PF00239,G3DSA:1.10.10.2600,PF14287,IPR006119,SSF53041, IPR025378,SM00857,IPR025827,cd03770,IPR038109, PS51736,PF13408,G3DSA:3.40.50.1390,PF07508,Coil
MQSKNKNQIGITALYCRLSRDDGTESESNSIGNQKKLLSQKAKEMGLTDTKYYVDDGYTGTNFNRPGFQQLIDDIEIGLVSAVMVKDLSRLGRDYVSVGNYTDSYFPEHNVRFIAVNDAIDSDEGESEIAPFKNILNEMYARDISKKIRSSHRLRGSMGEPLSQPPYGYMKSAENKKKWIIDPEAATVVKSIFKMCLDGKGNETIARELQENKVLIPMAYWQSKGLNRGGKKTQTNPYKWCKTTVQKILSQQEYCGDIINFKTYSKSFKNKTRYENSKENWAVFKNVNEPIINRETFETVQKFISKTKRRAPKKENGERSIFNGLIYCGDCHSKMRYHTSTSNKEIHYFTCSDNKVDYRGKCPGRHYVRADALEEVVKLELRRLVEMLEIDESYFAQLLLRKNDEEREKDKKFLESELQKAIARNNTVSQIYEKLYEDNVIGKVSDEWFVELSHKYEKERMNLKAKIADTRHKIEELKNNNSEYEKFISAIRRFMQMDNLTSPLLRELIDHIDIFETEGTGKSRTQRIVIYYRFIGYIELPNATKQTHIADTRKGVAVEYITEQFTA

SEQ ID NO: 1474 - protein, 567 aa, Unknown
  Description of Unknown: Integrase B1475 sequence
  SM00857,G3DSA:1.10.10.2600,IPR036162,PF13408,IPR025827, G3DSA:3.40.50.1390,PS51737,IPR006119,IPR038109,PF07508, SSF53041,IPR011109,PTHR30461,Coil,cd00338, PF00239
MAYRKITDIRDTIGMRAVFYARVSTAEEEQLNAIELQIEENRGCIKDHGWKLVGEYIDRSKSGTMVKGRDDYQRLYEDLYEDLFDIVVIKDQERLQRNTLDWYLFINRVVQTGKLLFMYMDGKFYSPDDALITGVRAIIAEEFSRNLSKKLHNYHDHRIEKARQGQEIALQGSGNVYGWDKKDGKYYINPEQAKVRRLMCEGIMARKGSTLIAKELNDAGYRNTVGKPWKPMDIPKFVYDCKNVGTMIINKERHDFESKQTIKLPKEEWVYVENALPPIVTQEEWDLICKIHEERVIATGSDRRGKKTSGYSFSGKLVCGICGAPYWRKQRVSKDEYWVCSTKQTKGRKTRKRDSTMGKAGEINPLGCDNENISYNSLMEIMGVVSERLQANTDTIKQDMINWLTKLRKQLLEANGGHTEADLQRELSRKSKLLDAYLDGILNKQEYQKKAEELDERIIQLKTETEKNKANSGDIAEIDKVLANIDEEVARYVDGNEKLKVEYLLEHLEQVQIFPDKVIVIVPILSEGIVVEKTQYVSRDKWSRKDHINAYALYDCSTIRRTNIMEW

SEQ ID NO: 1475 - protein, 567 aa, Unknown
  Description of Unknown: Integrase B1476 sequence
  PTHR30461:SF3,IPR036162,PS51737,IPR011109,PTHR30461, PS00397,PF00239,G3DSA:1.10.10.2600,IPR006119,SSF53041, SM00857,IPR025827,IPR038109,PS51736,cd03768, IPR006118,PF13408,G3DSA:3.40.50.1390,PF07508,Coil
MSATATKNRVAIYVRVSTLYQADKDSLPMQKQDLISYAKLMLNTDDFVIFEDAGYSGKNTDRPKFQEMMFQVRTGAFTHLLVWKIDRISRNLLDFSAMYKELKDLGVIFVSKNEQFDTSTAMGEAMLKIILVFAELERNMTAERVTATMINRASNGLWNGGRIPYGYCYNHETQKFTLNNSESKIVNLIHDKYEETRSLIQETRWLNENGYRTRAGNEWNPVSIAIILRNVFYCGDYQYNRLKEGNRQRQKNKSEWITVENHHIAIVTREQKQRILNILESNARLCKTRNMYISTKHVHIFSGLLYCGSCGNPMGSSPASAKKDWQYSKYSCSTRRKSTTSCSGKSVSDPIVGEFVFNYILNMLNAQKSFSTISSPSILQQRLLMGDTFQSIAFIESDGLNDLYNMLLSGSISGEIYGNDANFKVSDSGLSNLQSKKQKLERALDRLTSLYLYSDTAISEREYIVQKAKLTDSLDEINEQIGFIGSDSYRQAISDNLLIERASQFIIAQKLSDRNYISYKRLAMSVDAEVLQSFVRGIIDNIIIDCGHVKQITFRNGLSHIFVYKEH

SEQ ID NO: 1476 - protein, 567 aa, Unknown
  Description of Unknown: Integrase B1477 sequence
  PTHR30461:SF3,IPR036162,PS51737,IPR011109,PTHR30461, PF00239,G3DSA:1.10.10.2600,IPR006119,PF14287,SSF53041, IPR025378,SM00857,IPR025827,cd03770,IPR038109, PS51736,PF13408,G3DSA:3.40.50.1390,PF07508,Coil
MQSKNKNQIGITALYCRLSRDDGTESESNSIGNQKKLLSQKAKEMGLTDTKYYVDDGYTGTNFNRPGFQQLIDDIEIGLVSAVMVKDLSRLGRDYVSVGNYTDSYFPEHNIRFIAVNDAIDSDEGESEIAPFKNILNEMYARDISKKIRSSHRLRGSMGEPLSQPPYGYMKSPENKKKWIIDPEAATVVKSIFKMCLDGKGNETIARELQENEVLIPMAYWRSKGLNRGGKKTQTNPYKWCKTTIQKILSQQEYCGDIINFKTYSKSFKNKRRIENSKENWAVFKDVNEPIIDRETFETVQKFISKTKRRAPKKENGERSIFNGLIYCGDCHSKMRYHTSTSNKEIHYFTCSDNKVDYRGKCQGRHYVRADALEEVVKLELRRLVEMLEIDESYFAQLLLRKNDEEREKDKKFLESELQKAIARNNTVSQIYEKLYEDNVIGKVSDEWFVELSHKYEKERMNLKAKIADTRHKIEELKNNNSEYEKFISAIRRFMQMDNLTSPLLRELIDHIDIFETEGTGKSRTQRIVIYYRFIGYIELPNATKQTHIADTRKGVAVEYITEQFTA

SEQ ID NO: 1477 - protein, 567 aa, Unknown
  Description of Unknown: Integrase B1478 sequence
  PTHR30461:SF3,IPR036162,PS51737,IPR011109,PTHR30461, PS00397,PF00239,G3DSA:1.10.10.2600,IPR006119,SSF53041, SM00857,IPR025827,IPR038109,PS51736,cd03768, IPR006118,PF13408,G3DSA:3.40.50.1390,PF07508,Coil
MTENQEKIVALYVRVSTGYQVDKDSLPFQKKELKAYCEHVLHIDKKRIEIFEDAGKSGKNTKRPAFERMMDKVKAGQVSHVIVYKIDRISRNLVDFSLMYDDFKYNNVTFISLNEQFDTSSAIGEAILKIILVFAELERKLTSERVKDVMIGRAKNVQWNGARVPYGWDWDEKNKCPVHSDKEAPYVRTMYQMYLDGGSTITIRNYNNSHNIPTKRGGEWTSKTVADLLRNPMNRGDYRYNYRESSRGRKKPAEEVIYIKDAFPPIVDPKIWDAVNKKMDENAALRNTSGLHTIRNRCNVFAGLIVCGKCGHNYQVKGKDSRKGNGFRPSSYACTGKFQKNNCDNMNISDVNIGPFIINYIAAMVDASKKRKNIRNIDDLEQLILSHINFSDVIGISEESLRNAMDLFSAQTSSLGISSLSTQDQDGSVISQKNKLEEELQKTNRALERLKKAFLFDDDGISEKEFLEMKSKLEIDRIQIENSLKKISQDSISANVNHIEFIKTASQFLMIHEINSGNFVDYKKLASADEKTMKDFISSVVSGITVLDKRIVKIVFRNGLSHTLLYR

SEQ ID NO: 1478 - protein, 567 aa, Unknown
  Description of Unknown: Integrase B1479 sequence
  PTHR30461:SF3,IPR036162,PS51737,IPR011109,PTHR30461, PS00397,PF00239,G3DSA:1.10.10.2600,IPR006119,SSF53041, SM00857,IPR025827,IPR038109,PS51736,cd03768, IPR006118,PF13408,G3DSA:3.40.50.1390,PF07508,Coil
MSEDKRIVALYVRVSTGYQVDKDSLPFQKKELKAYCEHVLHIDKKRIEIFEDAGKSGKNTKRPAFERMMEKVKHGQVSHVIVYKIDRISRNLVDFSLMYDDFKYNKVTFISLNEQFDTSSAIGEAILKIILVFAELERKLTSERVTDVMIGRAQSGLWNGARVPYGWDWDDENKCPVHSKTEAKYVKQMYEDYLNGGSSVSIAKSYNANKIPTKRGGEWTSKTIADVIRNPMNKGDYRYNYRESARGRKKPQEEVIYIKGIFEPLVSINDWEKANKLMDGRGLKMNSSGQTIMNKRCNVFTGLIFCGKCGERYNVRSKDSRQGSGFRPSSYACGKRSRKGTCDNQNVSDVAIAPIIINYIAAMADIAKHKRHIKTTKELEQMILKRISFSDIVGISEDSLKDTLNLLYGKNGTQLWSANTVSQEDKSENKQKLTELQEKLEKTERAIERLKKAFLFDDDGLDEKEFLEMKSALEIDRVKIENEIKGMETESISVNVNQVEFIKTASQYLLMHELNKDEIINYKELAIADEDSIKNLFNSVLDHITVMDKRITEIVFKNGLTHKLLYK

SEQ ID NO: 1479 - protein, 567 aa, Unknown
  Description of Unknown: Integrase B1480 sequence
  PTHR30461:SF3,IPR036162,PS51737,IPR011109,PTHR30461, PS00397,PF00239,G3DSA:1.10.10.2600,IPR006119,SSF53041, SM00857,IPR025827,IPR038109,PS51736,mobidb-lite, cd03768,IPR006118,PF13408,G3DSA:3.40.50.1390,PF07508,Coil
MSEDKRIVALYVRVSTGYQVDKDSLPFQKKELKAYCEHVLHIDKKRIEIFEDAGKSGKNTKRPAFERMMEKVKHGQVSHVIVYKIDRISRNLVDFSLMYDDFKYNKVTFISLNEQFDTSSAIGEAILKIILVFAELERKLTSERVTDVMIGRAQSGLWNGARVPFGWDWDDENKCPVHSKTEAKYVKQMYSDYLNGGSSVSIAKSYNANKIPTKRGGEWTSKTIADVIRNPMNKGDYRYNYRESARGRKKPQEEVIYIKGIFEPLVSINDWEKANKLMDGRGLKMNSSGQTIMNKRCNVFTGLIFCGKCGERYNVRSKDSRQGSGFRPSSYACGKRSRKGTCDNQNVSDVAIAPIIINYIAAMADIAKHKRHIKTTKELEQMILKRISFSDIAGIAEDSLKDTLDLLYGKNGTQLWSANTVSQEDESENKQKLTELQAKLEKTERAIERLKKAFLFDDDGLDEKEFLEMKSALEINRVKIENEIKGMEAESISVNVNQVEFIKTASQYLLMHELNKDEIINYKELAITDDDSIKNLFNSVLDHITVIDKHITKIVFKNGLTHKLLYK

SEQ ID NO: 1480 - protein, 567 aa, Unknown
  Description of Unknown: Integrase B1481 sequence
  PTHR30461:SF3,IPR036162,PS51737,IPR011109,PTHR30461, PF00239,G3DSA:1.10.10.2600,IPR006119,PF14287,SSF53041, IPR025378,SM00857,IPR025827,cd03770,IPR038109, PS51736,PF13408,G3DSA:3.40.50.1390,PF07508,Coil
MQPKKNNKIGITALYCRLSRDDGMDGESNSIVNQKTLLSQKAKEKGLTDTKFYVDDGYTGTNFNRPGFQQMLSDIEMGYIYAVMVKDLSRLGRDYVSVGNYTDVYFPDHDIRFIAVNDGIDSEEGESEIAPFKNILNEMYARDISKKIRSSHRLRGSMGEPLSQPPYGYMKSAENKKKWVIDPEAAEVVKSVFKMCLEGKGNETIARILQEKQILVPMAYWQRKGLPRGGKKTQPNPYKWCKTTIQKILSQQEYCGDVINFKTCSKSFKNKTRLPNDPENWAIFRDVHEPIIARSDFEKVQTPIAKTKRRAPKPQNGEKNMFCDFLYCADCGSKLWYHTNTTNKEIHYFSCSNYKKDTRGNCETRHYIRADAIEQIVMLELKRLAKYLESHEEEFAKLLAEKNNADMLAEQKTLETELNRAIARNEMLTSLFAKTYEDNVSGKLSDEMYMELSHKYEVERLELKTKIFEYKECLAKISEMEQNKDDFLKSVRKFMEMESLTAPMLRELIDHIDVYEKEGGKKNYTQRIVIYYRFVGYLELPSSDDENYKANTRKGVDVEYIPTAKSA

SEQ ID NO: 1481 - protein, 567 aa, Unknown
  Description of Unknown: Integrase B1482 sequence
  PTHR30461:SF3,IPR036162,PS51737,IPR011109,PTHR30461, PS00397,PF00239,G3DSA:1.10.10.2600,IPR006119,SSF53041, SM00857,IPR025827,IPR038109,PS51736,mobidb-lite, cd03768,IPR006118,PF13408,G3DSA:3.40.50.1390,PF07508,Coil
MSEDKRIVALYVRVSTGYQVDKDSLPFQKKELKAYCEHVLHIDKKRIEIFEDAGKSGKNTKRPAFERMMEKVKHGQVSHVIVYKIDRISRNLVDFSLMYDDFKYNKVTFISLNEQFDTSSAIGEAILKIILVFAELERKLTSERVTDVMIGRAQSGLWNGARVPYGWDWDDEKKCPVHSKTEAKYVKQMYEDYLNGGSSVSIAKSYNANKIPTKRGGEWTSKTIADVIRNPMNKGDYRYNYRESARGRKKPQEEVIYIKGIFEPLVSINDWEKANKLMDGRGLKMNSSGQTIMNKRCNVFTGLIFCGKCGERYNVRSKDSRQGSGFRPSSYACGKRSRKGTCDNPNVSDVAIAPIIINYIAAMADIAKHKRHIKTTKELEQMILKRISFSDIVGISEDSLKDTLDLLYGKNGTQLWSANTVSQEDKSENKQKLTELQAKLEKTERAIERLKKAFLFDDDGLDEKEFLEMKSALEIDRVKIENEIKGMETESISVNVNQVEFIKTASQYLLMHELNKDEIINYKELAIADEDSIKNLFNSVLDHITVIDKHITEIVFKNGLTHKLLYK

SEQ ID NO: 1482 - protein, 567 aa, Unknown
  Description of Unknown: Integrase B1483 sequence
  PTHR30461:SF3,SM00857,G3DSA:1.10.10.2600,IPR036162,PF13408, IPR025827,G3DSA:3.40.50.1390,PS51737,IPR006119,IPR038109, PF07508,SSF53041,IPR011109,PF00239,PTHR30461, PS51736,Coil,cd00338
MRAFIYCRFSSHKQQELSIEGQRDICQEYADKHNITVVGQYADRARSGKTENRADFRRLMRDAATGVVDCVLVWRYDRFFRNRAESALYRKQLEAAGVHLISVTEYIPEGSAGIITQGMIETVAEYFSAKLSEDVSRGMNKAAQHCQIVGRAPLGYRAGPNKRWQIDPVGAELVRRIFEWYASGKAMGQLAAQLNEEGHRTTNGTLYTRSSFNSILRNEKYIGVYSYGGEVRIEGGCPRIIEDELFFTVQRRLSANRHRPGAYKAEVPYLLSGKLFCGLCGAPMTGTAGTSHTGARHYYYICNNRRAKTCKKKNVRLDLIEEAVLQSALDILTDENIAYISTEVERRCAENSDSAALLASLNAQLEEVQRRLKNIGNAIAQGIITETTKELLEEAEADRTALRQQIDRAKVQAALVVKAEAVACWLDGFRRGDRTDPDFRRQVFGALVHSVFVYDDYLKIIFNVDSAGAAVVPYEAAQAATPSEAPPGSYLDTLGAPKKALRKRKAFFIMIAALCECFRFAVDFNPSQRLFLFCRGEIHPSSWGCNNSRKRLGRVILVAMHRGNMLY

SEQ ID NO: 1483 - protein, 567 aa, Unknown
  Description of Unknown: Integrase B1484 sequence
  PTHR30461:SF3,IPR036162,PS51737,IPR011109,PTHR30461, PF00239,G3DSA:1.10.10.2600,PF14287,IPR006119,SSF53041, IPR025378,SM00857,IPR025827,cd03770,IPR038109, PS51736,PF13408,G3DSA:3.40.50.1390,PF07508,Coil
MQSKNKNQIGITALYCRLSRDDGTESESNSIGNQKKLLSQKAKEMGLTDTKYYVDDGYTGTNFNRPGFQQLIDDIEIGLVSAVMVKDLSRLGRDYVSVGNYTDSYFPEHNVRFIAVNDAIDSDEGESEIAPFKNILNEMYARDISKKIRSSHRLRGSMGEPLSQPPYGYMKSSENKKKWIIDPEAATVVKSIFKMCLDGKGNETIARELQENEVLIPMAYWRSKGLNRGGKKTQTNPYKWCKTTIQKILSQQEYCGDIINFKTYSKSFKNKRRIENSKENWAVFKDVNEPIIDRETFETVQKFISKTKRRAPKKENGERSIFNGLIYCGDCHSKMRYHTSTSNKEIHYFTCSDNKVDYRGNCPGRHYVRADALEEVVKLELRRLVEMLEIDESYFAQLLLRKNDEEREKDKKFLESELQKAITRSNTVSQLYEKLYEDNVIGKVSDEWFVELSHKYEKERMDLKAKIADTRHKIEELKNTNSEYGKFISAIRRFMQMDNLTSPLLRELIDHIDIFETEGTGKSRTQRIVIYYRFIGYIELPNVTKQTHIADTRKGVAVEYITEQFTA

SEQ ID NO: 1484 - protein, 567 aa, Unknown
  Description of Unknown: Integrase B1485 sequence
  PTHR30461:SF3,SM00857,G3DSA:1.10.10.2600,IPR036162,PF13408, IPR025827,PS51737,PS51736,G3DSA:3.40.50.1390,IPR006119, IPR038109,PF07508,SSF53041,IPR011109,PTHR30461, mobidb-lite,cd00338,PF00239
MARSAKKIEYAPAEQIGVIYARYSSHNQKEESIEQQIAECTEFAEKNGIRIIGIYADKAVSGRSDRRPNFQRMMRDAEKRHFQIVVAYKSNRIARNMLNALQYEAKLDSFGIKTLYAKEEFGNTAAGRFALRTMMNVNQFYSENMGEDIKRGMVDNAIECKVNGMLPLGYVKGEDGKYAIAADEAAVVREIYDSVLKDIPLAEIARSLNQRGIRTKLGRDWNKNSFHILLKNDNYIGVYRHSGVVVEDGIPPILDKEVFEAVQEKLTNKKKTAGRRSANGEYLLTGKLFCGYCGSYMIGVSGTGENGTVHNYYQCQKRHAEGRCEKKNVRRDFIEKLIARLTQDYILQDDTIEWIADSTMSFQAMARRESGVAQLERDLADNRKVAKNIMAAIEQGIITETTKARLLEVEGTIHDLERSLSIAKAASQPIERERVVFSLEQMREGNVGSKEHQKKLIDTFVKSVTLWDDRIQIDYYHTPGKHKFSYSLEELTSKAENESNASDVRTDSLELHQNVRNFLVFAEDSELFCIFQNQTLSTVAILPPFGSHPTQSRLKSSKETRNSTSKR

SEQ ID NO: 1485 - protein, 567 aa, Unknown
  Description of Unknown: Integrase B1486 sequence
  PTHR30461:SF3,IPR036162,PS51737,IPR011109,PTHR30461, PS00397,PF00239,G3DSA:1.10.10.2600,IPR006119,SSF53041, SM00857,IPR025827,IPR038109,PS51736,cd03768, IPR006118,PF13408,G3DSA:3.40.50.1390,PF07508,Coil
MKEDNRIVALYVRVSTGYQVDKDSLPFQKKELKAYCEHVLHIDKNRIEIFEDAGKSGKNTKRPAFERMMDKVKAGQVSHVVVYKIDRISRNLIDFSIMYNEFKYHRVAFISLNEQFDTSSAMGEAMLKIVLVFAEMERKLTSERVTDVMIGRAQSGLWNGARVPYGWDWDDEKKCPVHSKVEAKYVKQMYADYLNGGSSVSIAKSYNANKIPTKRGGEWTSKTIADVIRNPMNKGDYRYNYRESARGRKKPQEEVIYIKGVFEPLVSINDWEKANKLMDGRGFKMNSSGQIIMNKRCNVFTGLIFCGKCGERYNVRSKDCRQGSGFRPSSYACGKKSRKGTCDNQNISDVIIAPIMINYIAAMVDVSKHKKQIKTTKELEQVILKRISFSDVAGISEDSLQATLDLLYGKTGTQLWSANTVSQEDKSENKQKLTELQVKLEKTERAIERLKKAFLFDDDGIDEKEFLEMKSALEIDRVKIENEIKGMETESISVNVNQVEFIKTASQYLLMHELNKDENINYKELAITDEDSIKTLFNSVLDHITVIDKHITEIVFKNGLTHKLLYK

SEQ ID NO: 1486 - protein, 567 aa, Unknown
  Description of Unknown: Integrase B1487 sequence
  PTHR30461:SF3,IPR036162,PS51737,IPR011109,PTHR30461, PS00397,PF00239,G3DSA:1.10.10.2600,IPR006119,SSF53041, SM00857,IPR025827,IPR038109,PS51736,mobidb-lite, cd03768,IPR006118,PF13408,G3DSA:3.40.50.1390,PF07508,Coil
MSEDKRIVALYVRVSTGYQVDKDSLPFQKKELKAYCEHVLHIDKKRIEIFEDAGKSGKNTKRPAFERMMEKVKHGQVSHVIVYKIDRISRNLVDFSLMYDDFKYNKVTFISLNEQFDTSSAIGEAILKIILVFAELERKLTSERVTDVMIGRAQSGLWNGARVPYGWDWDDENKCPVHSKTEAKYVKQMYADYLNGGSSVSIAKSYNANNIPTKRGGEWTSKTIADVIRNPMNKGDYRYNYRESARGRKKPQEEVIYIKGIFEPLVSINDWEKANKLMDGRGLKMNSSGQTIMNKRCNVFTGLIFCGKCGERYNVRSKDSRQGSGFRPSSYACGKRSRKGTCDNQNVSDVAIAPIIINYIAAMADIAKHKRHIKTTKELEQMILKRISFSDIAGISEDSLKDTLDLLYGKNGTQLWSANTVSQEDKSENKQKLTELQAKLEKTERAIERLKKAFLFDDDGLDEKEFLEMKSKLEIDRVKIENEIKGMEAESISVNVNQVEFIKTASQYLLMHELNKDEIINYKELAITDEDSIKNLFNSVLDHITVMDKRITEIIFKNGLTHKLLYK

SEQ ID NO: 1487 - protein, 567 aa, Unknown
  Description of Unknown: Integrase B1488 sequence
  PTHR30461:SF3,IPR036162,PS51737,IPR011109,PTHR30461, PS00397,PF00239,G3DSA:1.10.10.2600,IPR006119,SSF53041, SM00857,IPR025827,IPR038109,PS51736,mobidb-lite, cd03768,IPR006118,PF13408,G3DSA:3.40.50.1390,PF07508,Coil
MSEDKRIVALYVRVSTGYQVDKDSLPFQKKELKAYCEHVLHIDKKRIEIFEDAGKSGKNTKRPAFERMMEKVKHGQVSHVIVYKIDRISRNLVDFSLMYDDFKYNKVTFISLNEQFDTSSAIGEAILKIILVFAELERKLTSERVTDVMIGRAQSGLWNGARVPYGWDWDDEKKCPVHSKTEAKYVKQMYEDYLNGGSSVSIAKSYNANKIPTKRGGEWTSKTIADVIRNPMNKGDYRYNYRESARGRKKPQEEVIYIKGIFEPLVSINDWEKANKLMDGRGLKMNSSGQTIMNKRCNVFTGLIFCGKCGERYNVRSKDSRQGSGFRPSSYACGKRSRKGTCDNPNVSDVAIAPIIINYIAAMVDITKHKRHIKTTKELEQMILKRISFSDIAGIAEDSLKDTLDLLYGKNGTQLWSANTVSQEDKSENKQKLTELQAKLEKTERAIERLKKAFLFDDDGLDEKEFLEMKSALEIDRVKIENEIKGMETESISVNVNQVEFIKTASQYLLMHELNKDEIINYKELAIADEDSIKNLFNSVLDHITVMDKRITEIVFKNGLTHKLLYK

SEQ ID NO: 1488 - protein, 567 aa, Unknown
  Description of Unknown: Integrase B1489 sequence
  PTHR30461:SF3,IPR036162,PS51737,IPR011109,PTHR30461, PS00397,PF00239,G3DSA:1.10.10.2600,IPR006119,SSF53041, SM00857,IPR025827,IPR038109,PS51736,mobidb-lite, cd03768,IPR006118,PF13408,G3DSA:3.40.50.1390,PF07508,Coil
MSEDKRIVALYVRVSTGYQVDKDSLPFQKKELKAYCEHVLHIDKKRIEIFEDAGKSGKNTKRPAFERMMEKVKLGQVSHVIVYKIDRISRNLVDFSLMYDDFKYNKVTFISLNEQFDTSSAIGEAILKIILVFAELERKLTSERVTDVMIGRAQSGLWNGARVPYGWDWDDEKKCPVHSKTEAKYVKQMYEDYLNGGSSVSIAKSYNANKIPTKRGGEWTSKTIADVIRNPMNKGDYRYNYRESARGRKKPQEEVIYIKGIFEPLVSINDWEKANKLMDGRGLKMNSSGQTIMNKRCNVFTGLIFCGKCGERYNVRSKDSRQGSGFRPSSYACGKRSRKGTCDNQNVSDVAIAPIIINYIAAMVDITKHKRHIKTTKELEQIILKRISFSDIVGISEDSLKDTLDLLYGKNGTQLWSANTVSQEDKSENKQKLTELQAKLEKTERAIERLKKAFLFDDDGLDEKEFLEMKSALEIDRVKIENEIKGMETESISVNVNQVEFIKTASQYLLMHEMNKDEIINYKELAIADEDSIKNLFNSVLDHITVIDKHITEIVFKNGLTHKLLYK

SEQ ID NO: 1489 - protein, 567 aa, Unknown
  Description of Unknown: Integrase B1490 sequence
  PTHR30461:SF3,IPR036162,PS51737,IPR011109,PTHR30461, PS00397,PF00239,G3DSA:1.10.10.2600,IPR006119,SSF53041, SM00857,IPR025827,IPR038109,PS51736,cd03768, IPR006118,PF13408,G3DSA:3.40.50.1390,PF07508,Coil
MTENPEKIVALYVRVSTGYQVDKDSLPFQKKELKAYCEHVLHIDKKRIEIFEDAGKSGKNTKRPAFERMMNKIKAGQVSHVIVYKIDRISRNLVDFSLMYDDFKYNNVTFISLNEQFDTSSAIGEAILKIILVFAELERKLTSERVKDVMIGRAKNVQWNGARVPYGWDWDEKNKCPVHSDKEAPYVRTMYQMYLDGGSTITIRNYNNSHNIPTKRGGEWTSKTVADLLRNPMNRGDYRYNYRESSRGRKKPAEEVIYIKDAFPPIVDPKIWDAVNKKMDENAALRNTSGLHTIRNRCNVFAGLIVCGKCGHNYQVKGKDSRKGNGFRPSSYACTGKFQKNNCDNMNISDVNIGPFIINYIAAMVDASKKRKNIRNIDDLEQLILSHINFSDVIGISEESLRNTMDLFSAQTSSLGISSLSTQDQDGSVISQKNKLEEELQKTNRALERLKKAFLFDDDGISEKEFLEMKSKLEIDRIQIENSLKKISQDSISANVNHIEFIKTASQFLMIHEINSGNFVDYKKLASADEKTMKDFISSVVSGITVLDKRIVKIVFRNGLSHTLLYR

SEQ ID NO: 1490 - protein, 567 aa, Unknown
  Description of Unknown: Integrase B1491 sequence
  PTHR30461:SF3,IPR036162,PS51737,IPR011109,PTHR30461, PS00397,PF00239,G3DSA:1.10.10.2600,IPR006119,SSF53041, SM00857,IPR025827,IPR038109,PS51736,mobidb-lite, cd03768,IPR006118,PF13408,G3DSA:3.40.50.1390,PF07508,Coil
MSEDKRIVALYVRVSTGYQVDKDSLPFQKKELKAYCEHVLHIDKKRIEIFEDAGKSGKNTKRPAFERMMEKVKHGQVSHVIVYKIDRISRNLVDFSLMYDDFKYNKVTFISLNEQFDTSSAIGEAILKIILVFAELERKLTSERVTDVMIGRAQSGLWNGARVPFGWDWDDEKKCPVHSKTEAKYVKQMYEDYLNGGSSVSIAKSYNANKIPTKRGGEWTSKTIADVIRNPMNKGDYRYNYRESARGRKKPQEEVIYIKGIFKPLVSINDWEKANKLMDGRGLKMNSSGQTIMNKRCNVFTGLIFCGKCGERYNVRSKDSRQGSGFRPSSYACGKRSRKGTCDNPNVSDVAIAPIIINYIAAMADIAKHKRHIKTTKELEQMILKRISFSDIVGISEDSLKDTLDLLYGKNGTQLWSANTVSQEDKSENKQKLTELQAKLEKTERAIERLKKAFLFDDDGLDEKEFLEMKSALEIDRVKIENEIKGMETESISVNVNQVEFIKTASQYLLMHELNKDEIINYKELAIADEDSIKNLFNSVLDHITVIDKHITEIVFKNGLTHKLLYK

SEQ ID NO: 1491 - protein, 567 aa, Unknown
  Description of Unknown: Integrase B1492 sequence
  PTHR30461:SF3,IPR036162,PS51737,IPR011109,PTHR30461, PS00397,PF00239,G3DSA:1.10.10.2600,IPR006119,SSF53041, SM00857,IPR025827,IPR038109,PS51736,cd03768, IPR006118,PF13408,G3DSA:3.40.50.1390,PF07508,Coil
MKEDNRIVALYVRVSTGYQVDKDSLPFQKKELKAYCEHVLHIDKKRIEIFEDAGKSGKNTKRPAFERMMEKVKLGQVSHVIVYKIDRISRNLVDFSLMYDDFKYNKVTFISLNEQFDTSSAIGEAILKIILVFAELERKLTSERVTDVMIGRAQSGLWNGARVPYGWDWDDEKKCPVHSKVEAKYVRQMYSDYLNGGSSVSIAKSYNANKIPTKRGGEWTSKTIADVIRNPMNKGDYRYNFRESARGRKKPQEEVVYIKGVFEPLVPINDWERANKLMDERGLKMNSSGQTIMNKRCNVFSGLIICGKCGENFNVRSKDCRKGIGFRPSSYICGKKAHKGTCDNPNVSDVIIAPLMINYIAAMVDVTKHKRQIKTTKELEQVILKRISFSDIAGIAEDSLQATLDLLYGKNGTQLWSANAVSKEQDSENKQKLTELQEKLKKTGRAIERLKKAFLFDDDGMDEKEFLEMKSSLEIDRVKIENEIKGMETESISVNVNQVEFIKTASQYLLMHELNKDEIIDYKELAVTDEESIKILFNEVLDHIAIIDRHVTEIVFKNGLTHKLLYK

SEQ ID NO: 1492 - protein, 567 aa, Unknown
  Description of Unknown: Integrase B1493 sequence
  PTHR30461:SF3,IPR036162,PS51737,IPR011109,PTHR30461, PS00397,PF00239,G3DSA:1.10.10.2600,IPR006119,SSF53041, SM00857,IPR025827,IPR038109,PS51736,cd03768, IPR006118,PF13408,G3DSA:3.40.50.1390,PF07508,Coil
MTENQEKIVALYVRVSTGYQVDKDSLPFQKKELKAYCEHVLHIDKKRIEIFEDAGKSGKNTKRPAFERMMNKIKAGQVSHVIVYKIDRISRNLVDFSLMYDDFKYNNVTFISLNEQFDTSSAIGEAILKIILVFAELERKLTSERVKDVMIGRAKNVQWNGARVPYGWDWDEKNKCPVHSDKEAPYVRTMYQMYLDGGSTITIRNYNNSHNIPTKRGGEWTSKTVADLLRNPMNRGDYRYNYRESSRGRKKPAEEVIYIKDAFPPIVDPKIWDAVNKKMDENAALRNTSGLHTIRNRCNVFAGLIVCGKCGHNYQVKGKDSRKGNGFRPSSYACTGKFQKNNCDNMNISDVNIGPFIINYIAAMVDASKKRKNIRNIDDLEQLILSHINFSDVIGISEESLRNTMDLFSVQTSSLGISSLSTQDQDGSVISQKNKLEEELQKTNRALERLKKAFLFDDDGISEKEFLEMKSKLEIDRIQIENSLKKISQDSISANVNHIEFIKTASQFLMIHEINSGNFVDYKKLASADEKTMKDFISSVVSGITVLDKRIVKIVFRNGLSHTLLYR

SEQ ID NO: 1493 - protein, 567 aa, Unknown
  Description of Unknown: Integrase B1494 sequence
  PTHR30461:SF3,IPR036162,PS51737,IPR011109,PTHR30461, PS00397,PF00239,G3DSA:1.10.10.2600,IPR006119,SSF53041, SM00857,IPR025827,IPR038109,PS51736,mobidb-lite, cd03768,IPR006118,PF13408,G3DSA:3.40.50.1390,PF07508,Coil
MSEDKRIVALYVRVSTGYQVDKDSLPFQKKELKAYCEHVLHIDKKRIEIFEDAGKSGKNTKRPAFERMMEKVKHGQVSHVIVYKIDRISRNLVDFSLMYDDFKYNKVTFISLNEQFDTSSAIGEAILKIILVFAELERKLTSERVTDVMIGRAQSGLWNGARVPYGWDWDDEKKCPVHSKVEAKYVRQMYSDYLNGGSSVSIAKSYNANKIPTKRGGEWTSKTIADVIRNPMNKGDYRYNYRESARGRKKPQEEVIYIKGIFEPLVSINDWEKANKLMDGRGLKMNSSGQTIMNKRCNVFTGLIFCGKCGERYNVRSKDSRQGSGFRPSSYACGKRSRKGTCDNQNVSDVAIAPIIINYIAAMADIAKHKRHIKTTKELEQMILKRISFSDIAGISEDSLKDTLDLLYGKNGTQLWSANTVSQEDKSENKQKLTELQVKLEKTERAIERLKKAFLFDDDGLDEKEFLEMKSALEIDRVKIENEIKGMETESISVNVNQVEFIKTASQYLLMHELNKDEIINYKELAIADEDSIKNLFNSVLDHITVMDKRITEIVFKNGLTHKLLYK

SEQ ID NO: 1494 - protein, 567 aa, Unknown
  Description of Unknown: Integrase B1495 sequence
  PTHR30461:SF3,IPR036162,PS51737,IPR011109,PTHR30461, PS00397,PF00239,G3DSA:1.10.10.2600,IPR006119,SSF53041, SM00857,IPR025827,IPR038109,PS51736,mobidb-lite, cd03768,IPR006118,PF13408,G3DSA:3.40.50.1390,PF07508,Coil
MSEDKRIVALYVRVSTGYQVDKDSLPFQKKELKAYCEHVLHIDKKRIEIFEDAGKSGKNTKRPAFERMMEKVKHGQVSHVIVYKIDRISRNLVDFSLMYDDFKYNKVTFISLNEQFDTSSAIGEAILKIILVFAELERKLTSERVTDVMIGRAQSGLWNGARVPYGWDWDDEKKCPVHSKTEAKYVKQMYEDYLNGGSSVSIAKSYNANKIPTKRGGEWTSKTIADVIRNPMNKGDYRYNYRESARGRKKPQEEVIYIKGIFEPLVPINDWEKANKLMDGRGLKMNSSGQTIMNKRCNVFTGLIFCGKCGERYNVRSKDSRQGSGFRPSSYACGKRSRKGTCDNQNVSDVAIAPIIINYIAAMADIAKHKRHIKTTKELEQMILKRISFSDIAGISEDSLKDTLDLLYGKNGTQLWSANTVSQEDKSENKQKLTELQAKLEKTERAIERLKKAFLFDDDGLDEKEFLEMKSALEIDRVKIENEIKGMETESISVNVNQVEFIKTASQYLLMHELNKDEIINYKELAIADEDSIKNLFNSVLDHITVMDKRITEIVFKNGLTHKLLYK

SEQ ID NO: 1495 - protein, 567 aa, Unknown
  Description of Unknown: Integrase B1496 sequence
  PTHR30461:SF3,IPR036162,PS51737,IPR011109,PTHR30461, PS00397,PF00239,G3DSA:1.10.10.2600,IPR006119,SSF53041, SM00857,IPR025827,IPR038109,PS51736,mobidb-lite, cd03768,IPR006118,PF13408,G3DSA:3.40.50.1390,PF07508,Coil
MSEDKRIVALYVRVSTGYQVDKDSLPFQKKELKAYCEHVLHIDKKRIEIFEDAGKSGKNTKRPAFERMMEKVKLGQVSHVIVYKIDRISRNLVDFSLMYDDFKYNKVTFISLNEQFDTSSAIGEAILKIILVFAELERKLTSERVTDVMIGRAQSGLWNGARVPYGWDWDDEKKCPVHSKTEAKYVKQMYEDYLNGGSSVSIAKSYNANKIPTKRGGEWTSKTIADVIRNPMNKGDYRYNYRESARGRKKPQEEVIYIKGIFEPLVSINDWEKANKLMDGRGLKMNSSGQTIMNKRCNVFTGLIFCGKCGERYNVRSKDSRQGSGFRPSSYACGKRSRKGTCDNPNVSDVAIAPIIINYIAAMVDITKHKRHIKTTKELEQMILKRISFSDIAGIAEDSLKDTLDLLYGKNGTQLWSANTVSQEDKSENKQKLTELQAKLEKTERAIERLKKAFLFDDDGLDEKEFLEMKSALEIDRVKIENEIKGMETESISVNVNQVEFIKTASQYLLMHELNKDEIINYKELAIADEDSIKNLFNSVLDHITVMDKRITEIVFKNGLTHKLLYK

SEQ ID NO: 1496 - protein, 567 aa, Unknown
  Description of Unknown: Integrase B1497 sequence
  PTHR30461:SF3,cd00338,SM00857,G3DSA:1.10.10.2600,IPR036162, PS51737,G3DSA:3.40.50.1390,IPR006119,IPR038109,PF07508, IPR011109,SSF53041,PTHR30461,PS51736,Coil, PF00239
MKRKVAIYARVSTEHEAQINALENQIQYYDNILAQHPEWELVGRYVDEGITGTSVKKRKNFLRMMEDAKNGMFSLILTREVSRFARNTVDTLQETRKLKSYGVEVYFTEDNIRTSDDTDGELRLALMATLAQNESKKTSVRVKAGQKISFENGVLYGNGNILGYDRVGRELVVNPEQAETVKMIFNMYHDGMGCKQIAYELEKRGRVTSTGLTHWQPGTISRLLRNSFYCGKIVYRKQYVPDYLEQKRINNYDEVDKIEITGKHEPIVSEELFNDCQRRLDAKTVNRLRGKHAINPPKSAYARILKCQCGSNFERRKWHKYKDGRIRYGFECYKQKNHGSYRTRLKKGLDTTGCCTTKMFPEWKLKIVAHWLFNDLWKERDKIINRAIEMLNATIKDENVVDYTDEVKELNKKRKKYEEKLSNLVELRVEGDISKEVYEEKKGVFKKQIEYIDSELLKRDVKNSAIVSNVKTQIQLLTDLLEKKYDVISGDIPEDIVETFIDQIVVHDDYFEWRLRTSTEPVLCKVEGNEKDNTIIFLENDSHKVATQYRQLSLTSNTLISEKNIIT

SEQ ID NO: 1497 - protein, 567 aa, Unknown
  Description of Unknown: Integrase B1498 sequence
  PTHR30461:SF3,IPR036162,PS51737,IPR011109,PTHR30461, PS00397,PF00239,G3DSA:1.10.10.2600,IPR006119,SSF53041, SM00857,IPR025827,IPR038109,PS51736,mobidb-lite, cd03768,IPR006118,PF13408,G3DSA:3.40.50.1390,PF07508,Coil
MSEDKRIVALYVRVSTGYQVDKDSLPFQKKELKAYCEHVLHIDKKRIEIFEDAGKSGKNTKRPAFERMMEKVKHGQVSHVIVYKIDRISRNLVDFSLMYDDFKYNKVTFISLNEQFDTSSAIGEAILKIILVFAELERKLTSERVTDVMIGRAQSGLWNGARVPYGWDWDDENKCPVHSKTEAKYVKQMYEDYLNGGSSVSIAKSYNANKIPTKRGGEWTSKTIADVIRNPMNKGDYRYNYRESARGRKKPQEEVIYIKGIFEPLVSINDWEKANKLMDGRGLKMNSSGQTIMNKRCNVFTGLIFCGKCGERYNVRSKDSRQGSGFRPSSYACGKRSRKGTCDNPNVSDVAIAPIIINYIAAMVDITKHKRHIKTTKELEQIILKRISFSDIVGISEDSLKDTLDLLYGKNGTQLWSANTVSQEDKSENKQKLTELQAKLEKTERAIERLKKAFLFDDDGLDEKEFLEMKSALEIDRVKIENEIKGMETESISVNVNQVEFIKTASQYLLMHELNKDEIINYKELAIADEDSIKNLFNSVLDHITVMDKRITEIVFKNGLTHKLLYK

SEQ ID NO: 1498 - protein, 567 aa, Unknown
  Description of Unknown: Integrase B1499 sequence
  PTHR30461:SF3,IPR036162,PS51737,IPR011109,PTHR30461, PS00397,PF00239,G3DSA:1.10.10.2600,IPR006119,SSF53041, SM00857,IPR025827,IPR038109,mobidb-lite,PS51736, cd03768,IPR006118,PF13408,G3DSA:3.40.50.1390,PF07508,Coil
MSEDKRIVALYVRVSTGYQVDKDSLPFQKKELKAYCEHVLHIDKKRIEIFEDAGKSGKNTKRPAFERMMEKVKHGQVSHVIVYKIDRISRNLVDFSLMYDDFKYNKVTFISLNEQFDTSSAIGEAILKIILVFAELERKLTSERVTDVMIGRAQSGLWNGARVPYGWDWDDENKCPVHSKTEAKYVKQMYEDYLNGGSSVSIAKSYNANKIPTKRGGEWTSKTIADVIRNPMNKGDYRYNYRESARGRKKPQEEVIYIKGIFEPLVSINDWEKANKLMDERGLKMNSSGQTIMNKRCNVFTGLIFCGKCGERYNVRSKDSRQGSGFRPSSYACGKRSRKGTCDNKNVSDVAIAPIIINYIAAMADIAKHKRHIKTTKELEQMILKRISFSDIAGISEDSLKDTLDLLYGKNGTQLWSANTVSQEDKSENKQKLTELQAKLEKTERAIGRLKKAFLFDDDGLDEKEFLEMKSALEIDRVKIENEIKGMETESISVNVNQVEFIKTASQYLLMHELNKDEIINYKELAIADEDSIKNLFNSVLDHITVIDKHITEIVFKNGLTHKLLYK

SEQ ID NO: 1499 - protein, 567 aa, Unknown
  Description of Unknown: Integrase B1500 sequence
  PTHR30461:SF3,IPR036162,PS51737,IPR011109,PTHR30461, PS00397,PF00239,G3DSA:1.10.10.2600,IPR006119,SSF53041, SM00857,IPR025827,IPR038109,PS51736,cd03768, IPR006118,PF13408,G3DSA:3.40.50.1390,PF07508,Coil
MKEDNRIVALYVRVSTGYQVDKDSLPFQKKELKAYCEHVLHIDKDRIEIFEDAGKSGKNTKRPAFERMMDKVKAGQVSHVVVYKIDRISRNLIDFSIMYNEFKYHRVAFISLNEQFDTSSAMGEAMLKIVLVFAEMERKLTSERVTDVMIGRAQSGLWNGARVPYGWDWDDEKKCPVHSKVEAKYVKQMYEDYLNGGSSVSIAKNYNANKIPTKRGGEWTSKTIADVIRNPMNKGDYRYNYRESARGRKKPQEEVIYIKGVFEPLVSINDWEKANKLMDGRGFKMNSSGQIIMNKRCNVFTGLIFCGKCGERYNVRSKDCRQGSGFRPSSYACGKKSRKGTCDNQNISDVIIAPIMINYIAAMVDVSKHKKQIKTTKELEQVILKRINFSDVAGISEDSLQATLDLLYGKTGTQLWSAVTVSKEQDSKNKQRLVELQEKLKKTDRAIERLKKAFLFDDDGLDEKEFLEMKSRLEIDRVKIENEIKGMEAESISVNVNQVEFIKTASQYLLMHELNKDEIINYKELAITDEDSIKTLFNSVLDHITVIDKHITEIVFKNGLTHKLLYK

SEQ ID NO: 1500 - protein, 567 aa, Unknown
  Description of Unknown: Integrase B1501 sequence
  cd00338,SM00857,G3DSA:1.10.10.2600,IPR036162,PS51737, G3DSA:3.40.50.1390,IPR006119,IPR038109,PF07508,IPR011109, SSF53041,PTHR30461,Coil,PF00239
MKIIKDAVGYVRFSSAIQEQGTSIRRQRKLIKDWCDHQPQIIYHSTYQDIGKSAWKKHEHDERKAFLQMLEDRKLQRFPEPCYLLVEDASRLSRLDYDDAIAQMKDLFSLGFVVVFLATGRIYDADNFKDMGGRISFMVDAETHHKASEQKSHHSRKNWSQLRADAITTGKLISKSCARWVIPVPTGEGLPNHEGRNTTFIYNNHAQTIKRIFEMRLAGVSMSVIAQTLNSEDVPTLTNQSKTWNQSSVNGLLNNRAVIGDYVPSKKTVNVDEAQIIPGYYPRLISLADFQTVQAMREGKGRSSNSDNPTNVNLFKGILKCKCGSAVISSSVTPERYGYYVCSMYRLKRCSCHPEQRYEGGKGKGKRGKGNAISRSLVDSVLVEGLLSNLPLLLSGNNTDNNQLQTLESEHRAIEQTLTNFESMIARTGGSDRLAKLYQQAESELTSKQSEIDKLRLRMLTSVNVETVHQLDLSRRADRIELNLIAKKHISEIRLDMKKQTCDVWLHSGFTFYDLPLNREGFDIGGWIHFFIQLNEKEYRFTGKEPLNSGQEGRVTDYVDVKPDSDA

SEQ ID NO: 1501 - protein, 567 aa, Unknown
  Description of Unknown: Integrase B1502 sequence
  PTHR30461:SF3,cd16857,IPR036162,PS51737, IPR011109,PTHR30461,PS00397,PF00239, G3DSA:1.10.10.2600,IPR006119,SSF53041,SM00857,IPR038109 ,PS51736,cd03768,IPR006118,G3DSA:3.40.50.1390,PF07508,Coil
MRMKLHREEEHRKAALYIRVSTMYQIDKESLPHQREELTRYAEYALHISDYEIFEDAGFSGKNTDRPAYQEMMARIRQHEFTHLIVDKIDRISRNLLDFAAMYDELKKLDVTFISRNEQFDTSSAMGEAMLKIILVFAELERHMTSERVSAIMVDRAKKGKWNGANIPLGYDWSEKAGYPVENPQEVKIVQMMFDMYEKGYSSNRLTQYLNDHGIRGKRNGLWTTASVRQVLTNPFYKGTLRYNYRHKARGCIKKESEWIVIEHNHPNIISEEQWEHVNEILKSHSVTRIRKKHDHAFSGLLTCLCGGTGGARLDKPRQNGVRPSYYECNTHWRVSKTLCNNNLAMSDMLIGTFVFNYLKNMIRVQQHMGELETPEAMEAELLKGDCFHDISGIEKASLQKIYAVFCKNSNVAYQESEALRYDDPAVIAGNQVKELEKKRQAHERALERLNKAYLYAEIGLSEKEYLQNRQEIMQAIQDIDQKIQVIQPDSNSEDDIAFLEASSNFIIKQELLSDEPIQWLDFALHVSAATIHQFLCAIVTKIVFYQRRILSIEFKNGVVHRFLYRE

SEQ ID NO: 1502 - protein, 567 aa, Unknown
  Description of Unknown: Integrase B1503 sequence
  PTHR30461:SF3,IPR036162,PS51737,IPR011109,PTHR30461, PS00397,PF00239,G3DSA:1.10.10.2600,IPR006119,SSF53041, SM00857,IPR025827,IPR038109,PS51736,cd03768, IPR006118,PF13408,G3DSA:3.40.50.1390,PF07508,Coil
MSATATKNRVAIYVRVSTLYQADKDSLPMQKQDLISYAKLMLNTDDFVIFEDAGYSGKNTDRPKFQEMMFQVRTGAFTHLLVWKIDRISRNLLDFSAMYKELKDLGVIFVSKNEQFDTSTAMGEAMLKIILVFAELERNMTAERVTATMINRASNGLWNGGRIPYGYCYNHETQKFTLNNSESKIVNLIHDKYEETRSLIQETRWLNENGYRTRAGNEWNPVSIAIILRNVFYCGDYQYNRLKEGNRQRQKNKSEWITVENHHIAIVTREQKQRILNILESNARLCKTRNMYISTKHVHIFSGLLYCGSCGNPMGSSPASAKKDWQYSKYSCSTRRKSTTACSGKSVSDPIVGEFVFNYILNMLNAQKSFSTISSPSILQQRLLMGDTFQSIAFIESDGLNDLYNMLLSGSISGEIYGNDANFKVSDSGLSNLQSKKQKLERALDRLTSLYLYSDTAISEREYIVQKAKLTDSLDEINEQIGFIDSDSYRQAISDNLLIERASQFIIAQKLSDRNYISYKRLAMSVDAEVLQSFVRGIIDNIIIDCGHVKQITFRNGLSHIFVYKEH

SEQ ID NO: 1503 - protein, 567 aa, Unknown
  Description of Unknown: Integrase B1504 sequence
  PTHR30461:SF3,IPR036162,PS51737,IPR011109,PTHR30461, PS00397,PF00239,G3DSA:1.10.10.2600,IPR006119,SSF53041, SM00857,IPR025827,IPR038109,PS51736,mobidb-lite, cd03768,IPR006118,PF13408,G3DSA:3.40.50.1390,PF07508,Coil
MSEDKRIVALYVRVSTGYQVDKDSLPFQKKELKAYCEHVLHIDKKRIEIFEDAGKSGKNTKRPAFERMMDKVKAGQVSHVIVYKIDRISRNLVDFSLMYDDFKYNKVTFISLNEQFDTSSAIGEAILKIILVFAELERKLTSERVTDVMIGRAQSGQWNGARVPYGWDWDDEKKCPVHSKTEAKYVRQMYSDYLNGGSSVSIAKSYNANKIPTKRGGEWTSKTIADVIRNPMNKGDYRYNYRESARGRKKPQEEVIYIKGIFEPLVSINDWEKANKLMDGRGLKMNSSGQTIMNKRCNVFTGLIFCGKCGERYNVRSKDSRQGSGFRPSSYACGKRSRKGTCDNQNVSDVAIAPIIINYIAAMVDIAKHKRHIKTTKELEQIILKRISFSDIVGISEDSLKDTLELLYGKSSTQLWSANIVSREQDSENKQKLTELQAKLEKTERAIGRLKKAFLFDDDGLDEKEFLEMKSALEIDRVKIENEIKGMETESISVNVNQVEFIKTASQYLLMHELNKDEIINYKELAIADEDSIKNLFNSVLDHITVMDKRITEIVFKNGLTHKLLYK

SEQ ID NO: 1504 - protein, 567 aa, Unknown
  Description of Unknown: Integrase B1505 sequence
  PTHR30461:SF3,IPR036162,PS51737,IPR011109,PTHR30461, PF00239,G3DSA:1.10.10.2600,IPR006119,PF14287,SSF53041, IPR025378,SM00857,IPR025827,cd03770,IPR038109, PS51736,PF13408,G3DSA:3.40.50.1390,PF07508,Coil
MQSKNKNQIGITALYCRLSRDDGTESESNSIGNQKKLLSQKAKEMGLTDTKYYVDDGYTGTNFNRPGFQQLIDDIEIGLVSAVMVKDLSRLGRDYVSVGNYTDSYFPEHNIRFIAVNDAIDSDEGESEIAPFKNILNEMYARDISKKIRSSHRLRGSMGEPLSQPPYGYMKSPENKKKWIIDPEAATVVKSIFKMCLDGKGNETIARELQENEVLIPMAYWRSKGLNRGGKKTQTNPYKWCKTTVQKILSQQEYCGDIINFKTYSKSFKNKTRYENSKENWAVFKNVNEPIIDRETFETVQKFISKTKRRAPKKENGERSIFNGLIYCGDCHSKMRYHTSTSNKEIHYFTCSDNKVDYRGKCPGRHYVRADALEEVVKLELRRLVEMLEIDESYFAQLLLRKNDEEREKDKKFLESELQKAIARSNTVSQLYEKLYEDNVIGKVSDEWFVELSHKYEKERMDLKAKIADTRHQIEELKNTNSEYGKFISAIRRFMQMDNLTSPLLRELIDHIDIFETEGTGKSRTQRIVIYYRFIGYIELPNATKQTHIADTRKGVAVEYITEQFTA

SEQ ID NO: 1505 - protein, 567 aa, Unknown
  Description of Unknown: Integrase B1506 sequence
  PTHR30461:SF3,IPR036162,PS51737,IPR011109,PTHR30461, PS00397,PF00239,G3DSA:1.10.10.2600,IPR006119,SSF53041, SM00857,IPR025827,IPR038109,PS51736,mobidb-lite, cd03768,IPR006118,PF13408,G3DSA:3.40.50.1390,PF07508,Coil
MSEDKRIVALYVRVSTGYQVDKDSLPFQKKELKAYCEHVLHIDKKRIEIFEDAGKSGKNTKRPAFERMMEKVKHGQVSHVIVYKIDRISRNLVDFSLMYDDFKYNKVTFISLNEQFDTSSAIGEAILKIILVFAELERKLTSERVTDVMIGRAQSGLWNGARVPYGWDWDDENKCPVHSKTEAKYVKQMYADYLNGGSSVSIAKSYNANNIPTKRGGEWTSKTIADVIRNPMNKGDYRYNYRESARGRKKPQEEVIYIKGIFEPLVSINDWEKANKLMDGRGLKMNSSGQTIMNKRCNVFTGLIFCGKCGERYNVRSKDSRQGSGFRPSSYACGKRSRKGTCDNQNVSDVAIAPIIINYIAAMADIAKHKRHIKTTKELEQMILKRISFSDIAGISEDSLKDTLDLLYGKNGTQLWSANTVSQEDKSENKQKLTELQAKFEKTERAIERLKKAFLFDDDGLDEKEFLEMKSKLEIDRVKIENEIKGMEAESISVNVNQVEFIKTASQYLLMHELNKDEIINYKELAITDEDSIKNLFNSVLDHITVMDKRITEIIFKNGLTHKLLYK

SEQ ID NO: 1506 - protein, 567 aa, Unknown
  Description of Unknown: Integrase B1507 sequence
  PTHR30461:SF3,cd00338,SM00857,G3DSA:1.10.10.2600,IPR036162, PF13408,PS51737,G3DSA:3.40.50.1390,IPR025827,IPR006119, IPR038109,PF07508,IPR011109,SSF53041,PTHR30461, PS51736,Coil,PF00239
MDTIDPTIVLYHLAGRIANPKGDTMKKKQPNTRHGRAAIYARYSSHNQREASIEQQVKACRELAVRLGLDVVETYEDKAISGKSDRRPSFQRLLRDAEKGYFDCVLAWKSNRMGRNMLQAMTNEARLKDWGVRTFYAEEDFDDTAAGRFALRNMMNVNQFYSENMAEDITRGMMDNASKCLSNGALPLGYKAGENGRIVLDKAQAAVVQEIYTRVACREPFVDIAADLNRRGIKTKRGGPWTKSSFYTICRNERYRGIYIYDDVRVEGGVPRIVSDGLFYRVQEVLKVKKTPQSARHHTGAEDYLLTGKLFCGKCGRPMTGVSGTSRSGEMHYYYTCQKRRREHACDKKSVIREQIEKSVAQAIKQYMLTDEMIQHMADATMAYNARQEKDLHLQDLQGQLAAVKTSAANLLKAIEMGVITETTKARMVELEQEQGRLNAQIENARAELVPITRDNFVSLLHIYRNGDINDSKYLASLFETFLVRVDLYDDHFLIWFNPLGQKTPADIPITSIENGDTDEFFDECRSKNVFDWGGKWSTINHQDEHTTFITMIGNVFVLLCPFPGLK

SEQ ID NO: 1507 - protein, 567 aa, Unknown
  Description of Unknown: Integrase B1508 sequence
  PTHR30461:SF3,IPR036162,PS51737,IPR011109,PTHR30461, PS00397,PF00239,G3DSA:1.10.10.2600,IPR006119,SSF53041, SM00857,IPR025827,IPR038109,mobidb-lite,PS51736, cd03768,IPR006118,PF13408,G3DSA:3.40.50.1390,PF07508,Coil
MSEDKRIVALYVRVSTGYQVDKDSLPFQKKELKAYCEHVLHIDKKRIEIFEDAGKSGKNTKRPAFERMMEKVKHGQVSHVIVYKIDRISRNLVDFSLMYDDFKYNKVTFISLNEQFDTSSAIGEAILKIILVFAELERKLTSERVTDVMIGRAQSGLWNGARVPYGWDWDDENKCPVHSKTEAKYVKQMYEDYLNGGSSVSIAKSYNANKIPTKRGGEWTSKTIADVIRNPMNKGDYRYNYRESARGRKKPQEEVIYIKGIFEPLVSINDWEKANKLMDGRGLKMNSSGQTIMNKRCNVFTGLIFCGKCGERYNVRSKDSRQGSGFRPSSYACGKRSRKGTCDNPNVSDVAIAPIIINYIAAMVDITKHKRYIKTTKELEQMILKRISFSDIVGISEDSLKDTLDLLYGKNGTQLWSANTVSQEDKSENKQKLTELQAKLEKTERAIERLKKAFLFDDDGLDEKEFLEMKSALEIDRVKIENEIKGMETESISVNVNQVEFIKTASQYLLMHELNKDEIINYKELAIADEDSIKNLFNSVLDHITVMDKRITEIVFKNGLTHKLLYK

SEQ ID NO: 1508 - protein, 566 aa, Unknown
  Description of Unknown: Integrase B1509 sequence
  PTHR30461:SF3,SM00857,G3DSA:1.10.10.2600,IPR036162,PF13408, IPR025827,PS51737,G3DSA:3.40.50.1390,IPR006119,IPR038109, PF07508,IPR011109,SSF53041,PTHR30461,Coil, PS51736,cd00338,PF00239
MQNYTAPAPLQAPRAFGYCRKSTNEQREESLEAQQRAIVTFAATAGYELVQVYKDHGNSGRRGERPEFQRMLADAAAAGVQYIIVHKLDRFFRNADQQTVVEMQLRRQGIQVISAAEHFDTTPQGQFMRNVTKAINQWYSANLAQEVAKGLRENALTARTTGGPPPLGYTVDKTTGQYSIVPREAEAVQLIFKLYQQGAGYTEIIDALNAGGYVTRRGQPFGKNSLYDILRNEKYTGLYIWNRLAPADVDGRTSRRRLKPRDEWVCVENGMPQIIPTEQWQAVQDEMDKRKHRNAQYKAKAFYLLSGLVYCGGCGGAMAGEMHRYSSHGKAVEYRYYRCTAQHRQHDGGVHAHRVNADRLENAVIDYIQRIVLDPVNMDALCVAVLEALTPDGRNAERAKELKQEAGVIQQKVDRLYQAIENGLDAAGAIERINTLQKQRMTLLAQANDLDVSAESAVASVDELRRVWSGINLRELQPEKMRAIVRDLIYKIVVFDDGPRGSRLRIILNPARLNPSAIPKSIETAPLSELQDFSHTTGSGLPLPSIRETVMILDYGLIAAELSIAR

SEQ ID NO: 1509 - protein, 566 aa, Unknown
  Description of Unknown: Integrase B1510 sequence
  SM00857,G3DSA:1.10.10.2600,IPR036162,PF13408,PS51737, G3DSA:3.40.50.1390,IPR025827,IPR006119,IPR038109,PF07508, SSF53041,IPR011109,PF00239,PTHR30461,Coil, cd00338
MAEKIMQGIKQISELIGQAVKKRVVCLYRVSTVGQVEKDDIPMQKQYCREFCRGQSGWEIVKEFSEKGVSGFKVSAKDRDAIQEIQKMALKGEFDILLVFMFDRLGRRDDETPFVVEWFVKQGIEVWSAMEGQQRFDTHVDKLLNYIRYWQASGESIKTSLRVKTRLEQLTQEGYYTGGRVPFGYQAVKRGRINKKNHEVRDLAIEPGEAEVMKIIFQKYVYEGYGALRLHRYLMDQGLRTKDGKTITMGIINRVIKNPICIGIIQKGESQSSVLPELKIIDEEVFARAQEIVRERVVPQSEVPLTTRGQSLLVGNVYCGHCGARLSLATAGRNYKKKDGTVVKKTYSCYKCYNKAMAAEKCDGQTTYGVSKLDNLVDQIIHIQLQRIQKAPPQALIEKQRDREAEQVKAKAKLLREQYQQKQRDYQDLKEETLKVVRGTSRLNVDLLNNLIEETTVQMAELEGQIRTAEAELREVLSGAEQVRQEYAQLMDWAGLYDNCSFEAKKMIAAQFVKAVRVKRGYEVDIEFNVSFEEFQTLYLEPESEEDRRSRSATYLSLVEKSGQAG

SEQ ID NO: 1510 - protein, 566 aa, Unknown
  Description of Unknown: Integrase B1511 sequence
  PTHR30461:SF3,IPR036162,PS51737,IPR011109,PTHR30461, PS00397,PF00239,G3DSA:1.10.10.2600,IPR006119,SSF53041, SM00857,IPR025827,IPR038109,PS51736,cd03768, IPR006118,PF13408,G3DSA:3.40.50.1390,PF07508,Coil
MTEKKEKIAALYVRVSTGYQVDKDSLPFQKKELKNYCEHVLHIDKKRIEIFEDAGKSGKNTKRPAFERMMDKVKAGQVSHVIVYKIDRITRNLVDFSLMYDNFKYNNVTFISLNEQFDTSSAIGEAILKIILVFAELERKLTSERVTDVMIGRAQNGQWNGARVPYGWDWDEEKQMPVHSKKEAQYGIDMYHRYLNGYSTLRIARYNNEHSIPTKRGGEWSSKTVGDFLRNPINKGDYRYNYRNSARGKRKAKEEVVYIKNVFPPLIDPPIFDEVNRRLDENYKKQNTNYMFPIRKQCNIFSGLIICGKCGAHYQVCRKDERRLDGFRPSNYVCTRKRQKAICDSLNVSEVKIGPFMINYIAAMVDISQKRKKLKDKKELEQLILSHMQFTDLAGIADDSLQETMDLLYGRSTNIWSSSPIEKESQDNENKKNKLKENLQKTDRALERLKKAYLFDDDGMDEKEFLEMKSKLEIDRVKIENEIKDIDNDAIANNVNQIDFIKTASQFLIIHKINSGEFIDYRSLAILDEESMKAFMNSVIDHIVVLNRQITEIVFKNGLSHKLLYR

SEQ ID NO: 1511 - protein, 566 aa, Unknown
  Description of Unknown: Integrase B1512 sequence
  SM00857,G3DSA:1.10.10.2600,IPR036162,PF13408,IPR025827, G3DSA:3.40.50.1390,PS51737,IPR006119,IPR038109,PF07508, SSF53041,IPR011109,PTHR30461,Coil,cd00338, PF00239
MAYRKITDIRDTIGMRAVFYARVSTAEEEQLNAIELQIEENRGCIKDHGWKLVGEYIDRSKSGTMVKGRDDYQRLYEDLYEDLFDIVVIKDQERLQRNTLDWYLFINRVVQTGKLLFMYMDGKFYSPDDALITGVRAIIAEEFSRNLSKKLHNYHDHRIEKARQGQEIALQGSGNVYGWDKKDGKYYINPEQAKVRRLMCEGIMARKGSTLIAKELNDAGYRNTVGKPWKPMDIPKFVYDCKNVGTMIINKERHDFESKQTIKLPKEEWVYVENALPPIVTQEEWDLICKIHEERVIATGSDRRGKKTSGYSFSGKLVCGICGAPYWRKQRVSKDEYWVCSTKQTKGRRTRKRDSTMGKSGEINPLGCDNENISYNSLMEIMGVVSERLQANTDTIKHDMINWLTKLRKQLLEANGGHTEADLQRELSRKSKLLDAYLDGILNKQEYQKKAEELDERIIQLKAETEKNKANSGDIAEIDKVLANIDEEVSRYVDGNEKLKVEYLLEHLEQVQIFPDKVIVIVPILSEGIVVEKTQYISREKWSWKNHNYENAAKPHRTDIRFHTYF

SEQ ID NO: 1512 - protein, 566 aa, Unknown
  Description of Unknown: Integrase B1513 sequence
  PTHR30461:SF3,SM00857,G3DSA:1.10.10.2600,IPR036162,PF13408, IPR025827,G3DSA:3.40.50.1390,PS51737,IPR006119,IPR038109, PF07508,IPR011109,SSF53041,PTHR30461,cd00338, PF00239
MPTSKNTARKYAAGGSSDNSCGVEPLRAVIYARYSSSGQREESIEGQLRDCYEFAKKHGIIVIGEYIDKAMTGRVDRRPDFQRMMKDSEKGRFNCVLLWKMDRFARNRYDSAMYKYKLKKNGIRIFYAKETIPDGPEGIILESVMEGYAEYYSENLAQNVKRGNYDSALELKTLGKTCLGLKTGPDGRYMIDQAEATIVRRIFEEYAEGERAKDIYERLNSEGYRTSRGGKFNKNSLRRILSNKKYIGVYEYEDIYVENGIPAIITDRDLFERVQKMLKINHDAPARGKAQNFLLTTKLFCGLCGSPMIGDGGTSHTGKAYAYYSCTKRKRGRSCKKESVPKDWIEDLVVGELVKIVHNDELIEQIADRVMEYQKREKDQSGLHALEIRQKENEKAISNMLAAIEAGIITPSTKTRLMELEADRADIEKGIAHELLAEPEFERDQIIYFLERFRSGDIKDEAYRIMLVDTFLNSVYLYDDDHLVLVMNYSGENCKVDLKLVEGAVNGDGCKGSAFAPSSALKTPCENHRGFFCAGRDLESGFKVSAPLRSVHYHRPPDDVHPVIRT

SEQ ID NO: 1513 - protein, 566 aa, Unknown
  Description of Unknown: Integrase B1514 sequence
  PTHR30461:SF3,IPR036162,PS51737,IPR011109,PTHR30461, PS00397,PF00239,G3DSA:1.10.10.2600,IPR006119,SSF53041, SM00857,IPR025827,IPR038109,PS51736,cd03768, IPR006118,PF13408,G3DSA:3.40.50.1390,PF07508,Coil
MTEKKEKIAALYVRVSTGYQVDKDSLPFQKKELKNYCEHVLHIDKKRIEIFEDAGKSGKNTKRPAFERMMDKVKAGQVSHVIVYKIDRITRNLVDFSLMYDNFKYNNVTFISLNEQFDTSSAIGEAILKIILVFAELERKLTSERVTDVMIGRAQNGQWNGARVPYGWDWDEEKQMPVHSKKEAQYGIDMYHRYLNGYSTLRIARYNNEHSIPTKRGGEWSSKTVGDFLRNPINKGDYRYNYRNSARGKKKAKEEVVYIKNVFPPLIDPPIFDEVNRRLDENYKKQNTNYMFPIRKQCNIFSGLIICGKCGAHYQVCRKDERRLDGFRPSNYVCTRKRQKAICDSLNVSEVKIGPFMINYIAAMVDISQKRKKLKDKKELEQLILSHMQFTDLAGIADDSLQETMDLLYGRSTNIWSSSPIEKESQDNENKKNKLKENLQKTDRALERLKKAYLFDDDGMDEKEFLEMKSKLEIDRVKIENEIKDIDNDAIANNVNQIDFIKTASQFLIIHKINSGEFIDYRSLAILDEESMKAFMNSVIDHIVVLNRQITEIVFKNGLSHKLLYR

SEQ ID NO: 1514 - protein, 566 aa, Unknown
  Description of Unknown: Integrase B1515 sequence
  PTHR30461:SF3,SM00857,G3DSA:1.10.10.2600,IPR036162,PF13408, PS51737,IPR025827,G3DSA:3.40.50.1390,IPR006119,IPR038109, PF07508,IPR011109,SSF53041,PTHR30461,Coil, cd00338,PF00239
MKYSKRGSLGMKRVVAYCRVSTKSDDQQNSYENQNHYFEHYINECESYENIGIYADRGISGTSLKRPQFNKMLTDAGLDIENSYSIVAEPKFDLILVSNTSRFARSVSVDVILKALASNHVYVHFLDLDKTTENPDDITYIQLFSVFDERESRDKSRKVLFGIEQGIKNGNIHSHGNIYGYKYYPKPENRLEIVEHEAEIVRLIFDLYVNQGLGLYRIANYLKQSGIKTKKGKDFSDRGIRLILSNITYTGCGVRKKYTEGLVFEKHARRETDEPVVFDTDKVPAIIDRELYDKAQQILQGRIQHQRQKGIYSGKTDYAGKIICGSCGNKYIAGNSDYLVSEGRNVRCYSCASKRERRYDENGNKIYPCSNPNIYETVLDSQVTGAVYIFRTLTQVVNAMELLKKLRGILESQIDTRDDKAIISAQSELEEAKARRERLLDLYEDAAFDKDELNSRVEPINDRITELRERIKALSKTNDDLRRDIGEINNTIALLSEQKKLRENEWGVARKMYSKEAVLSYIESITVRPNKALVVKYKSFEQINRLVRKHRQLIPDSLMTLFQNYL

SEQ ID NO: 1515 - protein, 566 aa, Unknown
  Description of Unknown: Integrase B1516 sequence
  PTHR30461:SF3,SM00857,G3DSA:1.10.10.2600,IPR036162,PF13408, PS51737,G3DSA:3.40.50.1390,IPR025827,IPR006119,IPR038109, PF07508,IPR011109,SSF53041,PTHR30461,Coil, PS51736,cd00338,PF00239
MKKSNELPKSIIYSRYSSTNQREESIDSQIRIINTFAKSKYNIIKTYIDSAQSATTDNRESFQQMINDVKSGNLPDVKFLLVSKRDRFARNRYDMAYYKNILAKAGISIVSATEHLDDSPESVILESVLDGMSEYYSLNLGRECIKGLKENAYTCRTTGSTPPLGLKVNKDTLKFEIDEPNADAIRLLFKRFVEDGWSYQLICDELNAKGFRTTRGNLFNSKSTLIDYLNNEKYVGRLTYLKSKKDPLTGKRTCKRNYNRDEIIVVENAIPAIIDEETFNRAQEILKYRKRNASSFRTTNKMNMLVGKVICGKCGSHMNINTRKSGKNKEYYSTYRCSAKKEKMAKRCDNRELSATHLERYVISQLMFYLKQDTIVDRITDMLNEVLEHEFDSHDSEISQVNQQLMNVDVKIKNTTNAIAEGGVSLPSLVESLRALEDDKAMLKKRLHEINSAVPVFKKIDRNEVLELIEKAKEYMLSENDELIRSVINLFIEKINVGENGVEIIYYLHPFSYISHELWKTYVTRQELISYKGFSPKIMKGRWSRKAIISLSESKPTLARLISLVA

SEQ ID NO: 1516 - protein, 566 aa, Unknown
  Description of Unknown: Integrase B1517 sequence
  PTHR30461:SF3,IPR036162,PS51737,IPR011109,PTHR30461, PF00239,G3DSA:1.10.10.2600,IPR006119,PF14287,SSF53041, IPR025378,SM00857,IPR025827,cd03770,IPR038109, mobidb-lite,PS51736,PF13408,G3DSA:3.40.50.1390,PF07508,Coil
MNQSNQIRKTALYCRLSQDDGIEGDSNSIQNQKAILQKFAEDHHFPSPCFYVDDGFSGGTFQRPAFQQMISDMENGEIGIIVTKDLSRLGRNQLHTGLYIEERFPMFGVRYIAINDNVDTDSSESNDLMPFKNLFNEWFIRDTSRKIRAVLKAKAERGERLGTRTPYGYRKDPDTKKLIVDDEAAAIVRRIFAMCASGSGPSQIARILKKEQILTPTMYAYTRYGITHTCLDTAHPYNWSDSAIANLLENEIYLGNTINMKHSSRSYKDKRRVEHPREECLVFENTHPALITREVWDVVQRVRKNKRRLTKMEEQNKYSGLVFCADCGSNMVLHRAHTMSASYNHFTCRTYKKDGEACTGHYIRECVLDEVVLEDLRRVTAMAREHPEKFAAYIGSKQSAELQREIRRQERELAAMRKRKAELDAIFKKLYEDSVLGRITTEQFQMLSGSYTEEQNLITVGIPQKESEIQHLRETVSGTDSFLDKAKRYTDITELTPELLRLFIEKIVVHEKEVKWSKHAPQTVEIYYNGIGYVGSGQQDVEEALEAPEALEVPQTQDTEKPRQAS

SEQ ID NO: 1517 - protein, 566 aa, Unknown
  Description of Unknown: Integrase B1518 sequence
  SM00857,G3DSA:1.10.10.2600,IPR036162,PF13408,PS51737, IPR025827,G3DSA:3.40.50.1390,IPR006119,IPR038109,PF07508, SSF53041,IPR011109,PTHR30461,Coil,cd00338, PF00239
MAYRKITDIRDTIGMRAVFYARVSTAEEEQLNAIELQIEENRGCIKDHGWKLVGEYIDRSKSGTMVKGRDDYQRLYEDLYEDLFDIVVIKDQERLQRNTLDWYLFINRVVQTGKLLFMYMDGKFYSPDDALITGVRAIIAEEFSRNLSKKLHNYHDHRIEKARQGQEIALQGSGNVYGWDKKDGKYYINPEQAKVRRLMCEGIMARKGSTLIAKELNEAGYRNTVGKLWKPMDIPKFVYDCKNVGTMIINKERHDFESKQTIKLPKEEWVYVENALPPIVTQEEWDLICKIHEERVIATGSDRRGKKTSGYSFSGKLVCGICGAPYWRKQRVSKDEYWVCSTKQTKGRRTRKRDSTMGKAGEINPLGCDNENISYNSLMEIMGVVSERLQANTDTIKQDMINWLTKLRKQLLEANGGHTEADLQRELSRKSKLLDAYLDGILNKQEYQTKAEELDERIIQLKAETEKNKANSGDIAEIDKVLANIDEEVSRYVDGNEKLKVEYLLEHLEQVQIFPDKVIVIVPILSEGIVVEKTRYVSREKWCGKNNINEIDLWCFAANGGKYLLR

SEQ ID NO: 1518 - protein, 565 aa, Unknown
  Description of Unknown: Integrase B1519 sequence
  cd03768,PTHR30461:SF3,SM00857,IPR036162,PF13408, IPR025827,G3DSA:3.40.50.1390,PS51737,IPR006119,PF07508, SSF53041,IPR011109,PTHR30461,PS51736,Coil, PF00239
MLRTPGDLFFLAEAVNSTNKFYSVSDKSARVYFLYSFLEGETMRFFSYGRKSVFSDKSDSIDNQFRMNREYCESKFSGQVDSWQQFSDEDFTGANTSRPDLQRMLSFIKGGFCDVLVVYQLDRLSRDVRDFANIYALLEEHGVMFISIKENIDTTTPIGRAMMYVTVVFAQMERETIAARVTDNMLGLAKKGYWTGGNPPVGYVRKHIVVNGKKHCSIEVDPDGARYVTQIFDTFLAYNCSLQGMETRFKNQGIRTQSGKFFSTTQLHKMLTMPYCVEATPEVYDFYAAKGCIMDPGSPREMWDGSVGVIIYGRSTEKNKKHQAQPPEKWTVCLGKHKPFMPAEKWLAVQSRFTQNKCIKDAKWPVPLLKGVLRCKCGNLMQVSRKKKVDGTCSSWYYCRKRMRQGVDACDMGQIKCDLLDEEVLELFRGITADPALIQKFVKAEAPADVTDLKAAQARVSACERKIGRLAASLALAEDSAASKYIIAEMERLDVELGALKREASLAEMESHRAAASAKDAKATAAEIAKLIHGLDGFDDKEKNAIARAVIQECTWDGERLFITL

SEQ ID NO: 1519 - protein, 565 aa, Unknown
  Description of Unknown: Integrase B1520 sequence
  PTHR30461:SF3,cd00338,SM00857,G3DSA:1.10.10.2600,IPR036162, PF13408,IPR025827,G3DSA:3.40.50.1390,PS51737,IPR006119, IPR038109,PF07508,IPR011109,SSF53041,PTHR30461, PS51736,Coil,PF00239
MSATIPSLMQAPRAFGYCRKSTNEQREESLEAQQRAIVTFAATAGYELVQVYKDHGNSGRRGERPEFQRMLADAAAAGVQYIIVHKLDRFFRNADQQTVVEMQLRRQGIQVISAAEHFDATPQGQFMRNVTKAINQWYSANLAQEVAKGLRENALTARTTGGPPPLGYTVDKSTGQYAIVPREAEAVQLIFKLYQQGAGYTEIIDALNAGGYVTRRGQPFGKNSLYDILRNEKYTGLYIWNRLAPADVDGRTSRRRLKPRDEWVCVENGMPQIIPTEQWQAVQDEMDKRKHRNAQYKAKSFYLLSGLVYCGGCGGTMAGETHRYNSHGKAVEYRYYRCAAQHRQHDGGVHAHRVNADRLENAVIDYIQHIVLDPVNMDALCVAVLEALQPDGRNAERAKELKQEAGIIQQKVDRLYQAIENGLDAAGAIERINALQKQRMTLLAQANDLDISAESAAASVDELRRVWSGINLRELQPEKMRVIVRDLIYKIVVFDDGPRGSRLRIILNPARLNPSAIPKAIETMPFSELQNFSHTGGSGLPLPSICETITVLDYGLIAAELSIVR

SEQ ID NO: 1520 - protein, 565 aa, Unknown
  Description of Unknown: Integrase B1521 sequence
  PTHR30461:SF3,SM00857,G3DSA:1.10.10.2600,IPR036162,PF13408, IPR025827,G3DSA:3.40.50.1390,PS51737,IPR006119,IPR038109, PF07508,SSF53041,IPR011109,PF00239,PTHR30461, PS51736,Coil,cd00338
MKKFPIDLSMLTEEEIDQFRQDPSTLFEGDTDVSLYLRFSSERQREQSIEGQLRDCRSFCKVNRYRIAAIYVDRATTARKDVEKRIHFQEMIRDSEKKPWKYVVVWKLDRFARNRTDSALFKFRLRKNGVRVISATEAISEKPEGIILEAVLEGMAEFYSADLSQKITRGMRESALKCHSIGGHVPLGYKIEDHKLVVDPNTAYIVQEAFRLYANGETVAEICRMFNTKGYRTAKGAEFNRNSFKSMFRNERYIGVYTYRDIRIEGGVPAIIDKELFETVSHRLSVNAEAPARGKAKVDYLLAGKLFCGHCGGSMNGESGTSKTGAIHNYYTCYSRKRHHSCDKRPLKKEWIEQVVAQDAMELMTDEVIEELADMAMAQTDQDLKENTRIPELTERKKEIESGIANITKAIEKGIASDSLMERLVELEKDKKKILRLLEEEEKYVCRIDREQIIFWLEKFKGGNLEDEGFRRIIIDLIVNSVTVWDEPDGFRITTAYNLTSCKNKTYRVSPSSEKGFGFEGSESTNWTLHEHLLFQRRLCRKGVAVMSKQKARVKILCLDPRFYN

SEQ ID NO: 1521 - protein, 565 aa, Unknown
  Description of Unknown: Integrase B1522 sequence
  PTHR30461:SF3,IPR036162,PS51737,IPR011109,PTHR30461, PS00397,PF00239,G3DSA:1.10.10.2600,IPR006119,SSF53041, SM00857,IPR025827,IPR038109,PS51736,cd03768, IPR006118,PF13408,G3DSA:3.40.50.1390,PF07508,Coil
MPEKEKVVALYVRVSTGYQVDKDSLPFQKKELKNYCEHVLHINKNRIEVFEDAGKSGKNTKRPAFERMMEKVKSGQVSHVIVYKIDRISRNLVDFSLMYDDFKYNNVTFISLNEQFDTSSAIGEAILKIILVFAELERKLTSERVTDVMIGRAQNGQWNGARVPYGWDWDEEKQMPVHSKKEAQYGIDMYHRYLNGYSTLRIARYNNEHSIPTKRGGEWSSKTVGDFLRNPMNKGDYRYNYRNSARGKKKAKEEVVYIKNVFPPLIDPPIFDEVNRRLDENYKKQNTNYMFPIRKQCNIFSGLIICGKCGAHYQVCRKDERRLDGFRPSNYVCTRKRQKAICDSLNVSEVKIGPFMINYIAAMVDISQKRKKLKDKKELEQLILSHMQFTDLAGIADDSLQETMDLLYGRSTNIWSSSPIEKESQDNENKKNKLKENLQKTDRALERLKKAYLFDDDAMDEKEFLEMKSKLEIDRVKIENEIKDIDNDAIANNVNQIDFIKTAAQFLIIHKINSGEFIDYRSLAILDEESMKTFMNSVIDHIVVLNRQITEIVFKNGLSHKLLYR

SEQ ID NO: 1522 - protein, 565 aa, Unknown
  Description of Unknown: Integrase B1523 sequence
  PTHR30461:SF3,IPR036162,PS51737,IPR011109,PTHR30461, PF00239,G3DSA:1.10.10.2600,IPR006119,SSF53041,cd00338, SM00857,IPR025827,IPR038109,mobidb-lite,PS51736, PF13408,G3DSA:3.40.50.1390,PF07508,Coil
MRKKSNLNAATRAVIYARYSSANQRDCSIEQQVAKCRELAARLGLTVIDVYEDRAISGKTDRRPNFQRMMKDADLRQFDVVLAWKSNRMGRNMLQAMTNEERLRDNGIRTVYAEEDFDDTAAGRFALRNMMNVNQFYSENMAEDITRGLMDNAAKCLSNGSLPLGYKPGDDRHVVLDEAEAAIVQEIFTRVSCYEPFIDIARDLNRRGIKTKKGSEWGRSSFHTICRNERYRGIYIYRDVRIEGGMPRIVSDELFYKVQEVLKVKKNPQGRRKRSGYEEYLLTGKLFCGHCGSPMTGIAGTSKTGAMHYYYTCQKRRIDHSCDKKAVRRDQIERAVGVAIQQQLLTDENIQMMADKLMEYNARTETKYRLQGLQDQLNANKTATANILKAIEMGIITDATKARLLELEKEQGQLLVKIDEAKAEMVPISRNDFVKLLYIYKEGEPTDKKYLAALFDNFLVRVDLYDDHLKITFDPTGGRQPIDMPIGAEDSPESPGDSSESSDFEASSQDAEKFVLALHNCTKEKDLRTFVLRSFLFAVPNFYRTAIQKMLGTQSVPPSTPQILY

SEQ ID NO: 1523 - protein, 565 aa, Unknown
  Description of Unknown: Integrase B1524 sequence
  cd00338,SM00857,IPR036162,PS51737,G3DSA:3.40.50.1390, IPR006119,IPR011109,SSF53041,PTHR30461,PS51736, Coil,PF00239
MKVIGYTRVSTNNQDLKRQKDLIKDYCKQKGYMLSQILEDNGISGAVDDREGYKALLSITKDDADLVIVSELSRISRSEDVQTTLYNIHSLLAKGIKLIMLDEPEHIYEGKLDLTQFILLAVKAYGAAEERLKTRTRMNTGKETRLITNPMADLDAHKPYGFVSAINPKYGLSGEPKRIWVIDEEKMAQVKEIFELVASGMSLSKTAEYMNIRYHDRDFLKQSIFALIHRTEYKGIRKRAGKLYKLPVCPIPVEIWEAANKGLEDRTAIKDNHRVYFNPLKGIGKCVCGRNLGVQLESTKLSYSCTDRMINRGTKVKCHVPTTNYNLVNLVIWNISRQMVLDKNYEAKSNEAILKLEADNQRLEESKVEYHNSISEFDEEINTTAVKFASSTDLNPAILNALNARVNKLDAQKKELENRVIDIDKEIALNNRRIQEERKIQTQKELSDVSLESKSKFFHQILDSVYTYSARAKSGVIVVNFKNGLQVIALWKNHFKTSVWYLPVGFQFDIEKRMVYVKTMPKTEGFDFTISELETKYYEYRDLFKHFDLTKYQVEIPKEELEQKF

SEQ ID NO: 1524 - protein, 565 aa, Unknown
  Description of Unknown: Integrase B1525 sequence
  PTHR30461:SF3,IPR036162,PS51737,IPR011109, PTHR30461,PS00397,PF00239,G3DSA:1.10.10.2600, IPR006119,SSF53041,cd00338,SM00857,IPR025827,IPR038109 ,PS51736,IPR006118,PF13408,G3DSA:3.40.50.1390,PF07508,Coil
MGFNDLISATEDRNNIKNIAIYCRVSTIEQAEEGYSIDEQERLLRDWCNRMNYSVYKVYSDRGISGKDIKNRPALKELLNDAEDKKFEMVISWKINRISRKLSDVLKIVDVLEQNNIAFNSYSEQFDNSTPAGKMQFQMMALIGEFERGTIAQNVKMGMCAKAKAGEWCGGRVLGYDLVPVENQEGSKRRKTKLTINEIEARSVRLIFNEYSNGKGYKAITNQLNKLGYKTKKGNDFSVGSIREILTNPVYIGKVRYNVRQNWSEKRRRNINANPIITDGIHEPIIEEGLWDKVQAIMESKKGKPSRIYDGEYPLTGILKCPKCGAGMVISRTTNKLADGTKKRIAYYCCGAWKNKGTSVCNSNTIRVDKANEYVFNKLSELLSNEKMVETIVRNVNKERHNKINPAKKELERIDKELEKIDRKKTKLFEAYEEELISKEEFKERKDELNKRAKSLQEEKEPLLVTLSDDVSEEIPYEFIKSILENFSKVLTESATREQQKKLLHMIISEIAINEAREIDSIKLKINDSLVDYINKEEGVSIKGIPSSFMLRNVGISMLNLDIAI

SEQ ID NO: 1525 - protein, 565 aa, Unknown
  Description of Unknown: Integrase B1526 sequence
  SM00857,G3DSA:1.10.10.2600,IPR036162,PF13408,PS51737, G3DSA:3.40.50.1390,IPR025827,IPR006119,IPR038109,PF07508, SSF53041,IPR011109,PTHR30461,Coil,cd00338, PF00239
MAYRKITDIKDTIGMRAVFYARVSTAEEEQLNAIELQIEENRGCIKDHGWKLVGEYIDRSKSGTMVKGRDDYQRLYEDLYEDLFDIVVIKDQERLQRNTLDWYLFINRVVQTGKLLFMYMDGKFYSPDDALITGVRAIIAEEFSRNLSKKLHNYHDHRIEKARQGQEIALQGSGNVYGWDKKDGKYYINPEQAKVRRLMCEGIMARKGSTLIAKELNDAGYRNTVGKPWKPMDIPKFVYDCKNVGTMIINKERHDFESKQTIKLPKEEWVYVENALPPIVTQEEWDLICKIHEERVIATGSDRRGKKTSGYSFSGKLVCGICGAPYWRKQRVSKDEYWVCSTKQTKGRRTRKRDSTMGKAGEINPLGCDNENISYNSLMEIMGVVSERLQANTDTIKQDMINWLTKLRKQLLEANGGHTEADLQREISRKSKLLDAYLDGILNKQEYQKKAEELDERIIQLKAETEKNKANSGDIAEIDKVLANIDEEVARYIDGNEKLKVEYLLEHLEQVQIFPDKVIVIVPILSEGIVVEKTQYVSREKRRRKKYLFADGSRYFKAGRRKHYG

SEQ ID NO: 1526 - protein, 565 aa, Unknown
  Description of Unknown: Integrase B1527 sequence
  SM00857,IPR036162,PS51737,G3DSA:3.40.50.1390,IPR006119, IPR011109,SSF53041,PTHR30461,Coil,PS51736, cd00338,PF00239
MKVIGYTRVSTNNQDLKRQKDLIKDYCKQKGYMLSQILEDNGISGAVDDREGYKALLSVTKDDADLVIVSELSRISRSEDVQNTLYNIHSLLAKGIKLIMLDEPEHIYEGKLDLSQFLLLAIKAYGAAEERLKTRTRMNTGKETRMITNPMADLDAHKPYGFVSAPNPKHGLSGEPKKVWAIDEEKMAQVKEIFELVASGMSLFKTAEYMNIRYHDRGFLMKSIFEIIHRTEYKGIRKRAGKLYQLPVCPIPVELWEAANKGLKDRTAIKDNHRLYFNPLKGIGKCVCGRNLGVNQESKKLSYQCADKMINRGDKRKCHVPTTNYNLVNLVVWNICRQMVLDKDYEAKSNEAILKLEADNQRLEESKVEYHNSISELDEEINTTAEKFASSTDLNPAILNALNVRVNKLDAQKKELENRVVDIDREIALNNRRIQEERKIQTQKELSDVSLESKSKFFHQILDSVYTYSARAKSGVIAVNFKNGLQVIALWKNHFKTSVWYLPVGFQFDIEKRMIYVKTMPKTEGLDFTISEPETKFYEYRDLFKHFDLTKYQVEIPKEELERKD

SEQ ID NO: 1527 - protein, 565 aa, Unknown
  Description of Unknown: Integrase B1528 sequence
  PTHR30461:SF3,IPR036162,PS51737,IPR011109, PTHR30461,PS00397,PF00239,G3DSA:1.10.10.2600, IPR006119,SSF53041,SM00857,IPR025827,IPR038109,PS51736 ,cd03768,IPR006118,PF13408,G3DSA:3.40.50.1390,PF07508,Coil
MPEKEKIVALYVRVSTGYQVDKDSLPFQKKELKAYCEHVLHIDKKRIEIFEDAGKSGKNTKRPAFERMMEKVKSGQVSHVIVYKIDRISRNLVDFSLMYDDFKYNNVTFISLNEQFDTSSAIGEAILKIILVFAELERKLTSERVTDVMIGRAQNGQWNGARVPYGWDWNEEKQMPVHSKKEAQYGIDMYHRYLEGYSTLRIARYNNEHNIPTKRGGEWSSKTVGDFLRNPINKGDYRYNYRNSARGKKKAKEEVVYIKNVFPPLIDPPIFDEVNRRLDENYKKQNTNYMFPIRKQCNIFSGLIICGKCGAHYQVCRKDERRLDGFRPSNYVCTRKRQKAICDSLNVSEVKIGPFMINYIAAMVDISQKRKKLKDKKELEQLILSHMQFTDLAGIADDSLQETMDLLYGRSTNIWSPSPIAKESQDNENKKSKLKENLQKTDRALERLKKAYLFDDDGMDEKEFLEMKSKLEIDRVKIENEIKDIDNDAIANNVNQIDFIKTASQFLIIHKINSGEFIDYRSLAILDEESLKAFMNSVIDHIVVLNRQITEIVFKNGLSHKLLYR

SEQ ID NO: 1528 - protein, 565 aa, Unknown
  Description of Unknown: Integrase B1529 sequence
  SM00857,IPR036162,PS51737,G3DSA:3.40.50.1390,IPR006119, IPR011109,SSF53041,PTHR30461,Coil,PS51736, cd00338,PF00239
MKVIGYTRVSTNNQDLKRQKDLIKDYCKQKGYMLSQILEDNGISGAVDDREGYKALLSVTKDDADLVIVSELSRISRSEDVQNTLYNIHSLLAKGIKLIMLDEPEHIYEGKLDLSQFLLLAIKAYGAAEERLKTRTRMNTGKETRMITNPMADLDAHKPYGFVSAPNPKYGLSGEPKKVWAIDEEKMAQVKEIFELVASGMSLFKTAEYMNIRYHDRGFLMKSIFEIIHRTEYKGIRKRAGKLYQLPVCPIPVELWEAANKGLKDRTAIKDNHRLYFNPLKGIGKCVCGRNLGVNQESKKLSYQCADKMINRGDKRKCHVPTTNYNLVNLVVWNICRQMVLDKDYEAKSNEAILKLEADNQRLEESKVEYHNSISELDEEINTTAEKFASSTDLNPAILNALNVRVNKLDAQKKELENRVVDIDREIALNNRRIQEERKIQTQKELSDVSLESKSKFFHQILDSVYTYSARAKSGVIVVNFKNGLQVIALWKNHFKTSVWYLPVGFQFDIEKRMIYVKTMPKTEGFDFTISEPETKFYEYRDLFKHFDLTKYQVEIPKEELERKD

SEQ ID NO: 1529 - protein, 565 aa, Unknown
  Description of Unknown: Integrase B1530 sequence
  PTHR30461:SF3,cd00338,SM00857,G3DSA:1.10.10.2600, IPR036162,PF13408,PS51737,G3DSA:3.40.50.1390, IPR025827,IPR006119,IPR038109,PF07508, IPR011109,SSF53041,PTHR30461,PS51736,Coil,PF00239
MARSKKTECLPLERIGVIYARYSSHNQKEESIEQQVEECMNFASLNGIKIVHVYADRALSGRTDKRPQFQRLMRDAEKRSFSVVVAYKSNRIARDMLNALKYEDRLGKYGIETLYAKEEFGNTAAGRFALRTMMNVNQFYSENMAEDIKRGMLDNAENCKVNGALPLGYVSGSDKRYAIEPKEAEIVRGIYDKVLEGVSLADIASDLNARGVRTKHGSLWNKCSFHRILTNDVYIGVYRHSGVVKEGGVPPILEREVFVAMQKYLETKKNPRGRHRENGDYLLTGKLRCGYCESFMVGVSGTSKTGDKHYYYTCNGRHAGSGCKKENVRRDTIEYTVAALTQQVVFKEDIIEWIATAAVKLAKEASGQNEIDAMEAELAEDRKATKNIMAAIEQGIFTATTKSRLLELEADIASLEQSIRDAKAISEDKLLEKERVVYFLTSLRDGNLHSKTYQKRLIDTFVRAVYLWDDYIGIDYYYAGKDSMVKYSLSEIEADIGENIREVLKDSLTGHHSEMTFGCQAAAQGAPASTAKVFLRSKSWPLTLGHDFVFEAIDLRCSSTDFVSR

SEQ ID NO: 1530 - protein, 565 aa, Unknown
  Description of Unknown: Integrase B1531 sequence
  SM00857,G3DSA:1.10.10.2600,IPR036162,PF13408,PS51737, G3DSA:3.40.50.1390,IPR025827,IPR006119,IPR038109,PF07508, IPR011109,SSF53041,PTHR30461,Coil,PS51736, cd00338,PF00239
MAYRKITDIKDTIGMRAVFYARVSTAEEEQLNAIELQIEENIGCIKDHGWKLAGEYIDRSKSGTMVKGRDDYQRLYEDLYEDLFDIVVIKDQERLQRNTLDWYLFINRVVQTGKLLFMYMDGKFYSPDDALITGVRAIIAEEFSRNLSKKLHNYHDHRIEKARQGQEIALQGSGNVYGWDKKDGKYYINPEQAKVRRLMCEGIMARKGSTLIAKELNDAGYRNTVGKPWKPMDIPKFVYDCKNVGTMIINKERHDFESKQTIKLPKEEWVYVENALPPIVTQEEWDLICKIHEERVIATGSDRRGKKTSGYSFSGKLVCGICGAPYWRKQRVSKDEYWVCSTKQTKGRRTRKRDSTMGKAGEINPLGCDNENISYNSLMEIMGVVSERLQANTDTIKQDMINWLTKLRKQLLEANGGHTEADLQRELSRKSKLLDAYLDGILNKQEYQKKAEELDERIIQLKAETEKNKANSGDIAEIDKVLANIDEEVSRYVDGNEKLKVEYLLEHLEQVQIFPDKVIVIVPILSEGIVVEKAQYVSREKWCRKNHFDEGSYNCFKTNGRNGFP

SEQ ID NO: 1531 - protein, 565 aa, Unknown
  Description of Unknown: Integrase B1532 sequence
  PTHR30461:SF3,cd00338,SM00857,G3DSA:1.10.10.2600,IPR036162, PF13408,PS51737,G3DSA:3.40.50.1390,IPR025827,IPR006119, IPR038109,PF07508,IPR011109,SSF53041,PTHR30461, PS51736,Coil,PF00239
MSATIPSLMQAPRAFGYCRKSTNEQREESLEAQQRAIVTFAATAGYELVQVYKDHGNSGRRGERPEFQRMLADAAAAGVQYIIVHKLDRFFRNADQQTVVEMQLRRQGIQVISAAEHFDATPQGQFMRNVTKAINQWYSANLAQEVAKGLRENALTARTTGGPPPLGYTVDKSTGQYAIVPREAEAVQLIFKLYQQGAGYTEIIDALNAGGYVTRRGQPFGKNSLYDILRNEKYTGLYIWNRLAPADVDGRTSRRRLKPRDEWVCVENGMPQIIPTEQWQAVQDEMDKRKHRNAQYKAKAFYLLSGLVYCGGCGGVMSGEMHRYNSHGKAVEYRYYRCTAQHRQHDGGAHAHRVNADRLENAVIDYIQHIVLDPVNMDALCVAVLEALQPDGRNAERAKELKQEAGIIQQKVDRLYQAIENGLDAAGAIERINALQKQRMTLLAQANDLDVSAESAAASVDELRRVWSGINLRELQPEKMRAIVRDLIYKIVVFDDGPRGSRLRIILNPARLNPAAIPKAIETMPFSELQNFSHTGGSGLPLPSICETITVLDYGLIAAELSIVR

SEQ ID NO: 1532 - protein, 565 aa, Unknown
  Description of Unknown: Integrase B1533 sequence
  PTHR30461:SF3,IPR036162,PS51737,IPR011109,PTHR30461, PS00397,PF00239,G3DSA:1.10.10.2600,IPR006119,SSF53041, cd00338,SM00857,IPR025827,IPR038109,PS51736, IPR006118,PF13408,G3DSA:3.40.50.1390,PF07508,Coil
MDENKKIVALYVRVSTGYQVDKDSLPFQKKELRAYCEHMLHINKKQVEVFEDAGRSGKNTKRPAFERMMEKVKSGQVSHVIVYKIDRITRNLVDFSLMYDDFKYNNVTFISLNEQFDTSSAIGEAILKIILVFAELERKLTSERVKDVMIGRAQNKQWNGARVPYGWDWDAEKKCPVHSKKEAPYAKAMYQMYLDGGSSVTICDYNNSHNIPTKRGGEWTSKTVADFLRNPINKGDYRYNYRESARGKKKSDDEVIYIKGVFPPLIDPNIWDEVNRRMDANSQNRNTSVFHPIRKRCNVFAGLMICGKCGSGYQVKGKDSRKGDGFRPSSYACTGKYQKKNCDNLNVSDVKIGPFMLNYIAAMVDASKSRRFIKDSESLERVILSHISFSDVAGISVSSLQDTLDLLFGRSGSELLSGKPISSGATDESKTTELKEKLQRTDRALERLKKAYLFDDDGMDEKEFLEMKSKLEVDRIKLENSIKGLESSSISENVDQAAFLKSASQFLISHKINSGDYIDYSRLAALDEESMKAFVNSIVDHIVVLDKRITEIVFKNGLTHTLLYR

SEQ ID NO: 1533 - protein, 565 aa, Unknown
  Description of Unknown: Integrase B1534 sequence
  PTHR30461:SF3,IPR036162,PS51737,IPR011109,PTHR30461, PS00397,PF00239,G3DSA:1.10.10.2600,IPR006119,SSF53041, SM00857,IPR025827,IPR038109,PS51736,cd03768, IPR006118,PF13408,G3DSA:3.40.50.1390,PF07508,Coil
MPEKEKVVALYVRVSTGYQVDKDSLPFQKKELKNYCEHVLHINKNRIEVFEDAGKSGKNTKRPAFERMMEKVKSGQVSHVIVYKIDRISRNLVDFSLMYDDFKYNNVTFISLNEQFDTSSAIGEAILKIILVFAELERKLTSERVTDVMIGRAQNGQWNGARVPYGWDWDEEKQMPVHSKKEAQYGIDMYHRYLNGYSTLRIARYNNEHSIPTKRGGEWSSKTVGDFLRNPMNKGDYRYNYRNSARGKKKAKEEVVYIKNVFPPLIDPTIFDEVNRRLDENYKKQNTNYMFPIRKQCNIFSGLIICGKCGAHYQVCRKDERRLDGFRPSNYVCTRKRQKAICDSLNVSEVKIGPFMINYIAAMVDISQKRKKLKDKKELEQLILSHMQFTDLAGIADDSLQETMDLLYGRSTNIWSSSPIEKESQDNENKKNKLKENLQKTDRALERLKKVYLFDDDGMDEKEFLEMKSKLEIDRVKIENEIKDIDNDAIANNVNQIDFIKTASQFLIIHKINSGEFIDYRSLAILDEESMKAFMNSVIDHIVVLNRQITEIVFKNGLSHKLLYR

SEQ ID NO: 1534 - protein, 565 aa, Unknown
  Description of Unknown: Integrase B1535 sequence
  PTHR30461:SF3,cd00338,SM00857,G3DSA:1.10.10.2600,IPR036162, PF13408,PS51737,G3DSA:3.40.50.1390,IPR025827,IPR006119, IPR038109,PF07508,SSF53041,IPR011109,PTHR30461, PS51736,Coil,PF00239
MAKKKKPAGGIAVIYARYSSHNQRDVSIEQQIEACRKHAAELGLTIIATYEDRAISGRTDNRPAFQRMMHDAENGKFSYVLAWKSNRMGRNMMQAMVNESRLMDCGIKVYYAEEDFDDSAAGRFALRSMMNVNQFYSDNLAEDVRRGLMDNANKCMVNGRQPLGYKRGKDGKVVVDEPAAAIVREVYARVASGELFTDIARDLNRRGIKTADKGEWNKNSFHRLCSNEKYRGIYIYGDVRIEGGIPTIIDDTLWYKVQEALRVKKLKRNGRHRPGDEDYLLTGKLRCGKCGGYMIGMSGRSKTGDIHYYYACQNRRVGRTCDKKNIRRDVIEPAVAQAIKEYCLTDDAIEWIADKTVEYWEKADRNLQLDSIEGDLAAVQSSISNVMKAIEMGVVTETTRDRLIELEKQRTDLKSKLSLAKEEVVHVDRKKLISSLLLFRNGDIHDRQYQEDLFKTFLISVYVYDDDDNGHLKIVFNAFGDNNTVDLPIDFGETDNQSAFSDGAEKFDYSLHRSTKKTSEHSGCLFLSYPGYGVHSALAHERSIGHGKHQEKLRFWLYAPALEGW

SEQ ID NO: 1535 - protein, 565 aa, Unknown
  Description of Unknown: Integrase B1536 sequence
  PTHR30461:SF3,IPR036162,PS51737,IPR011109,PTHR30461, PS00397,PF00239,G3DSA:1.10.10.2600,IPR006119,SSF53041, SM00857,IPR025827,IPR038109,PS51736,cd03768, IPR006118,PF13408,G3DSA:3.40.50.1390,PF07508
MTKLKKAALYIRVSTRYQIDKDSLPFQKQKLIDYCEFIGIKDYEVYADEGFSGKNTDRPSFQRMMSELRNGDISHIIVWKVDRISRNLLDFAAMYTELKKYRVTFVSMNEQFDTSSAIGEAMLKIILVFAELERNMTSERVTSIMLNRAEHGQWNGARMPMGYKWDDKIKFPVPDEEESKTVQFIFDKYEEVHSCLTVSRYLNNNNINTKRGGKWTSKTVNDIIKNPFYIGTYRYNVRESARGKMKPKSEWIVKENNHTPIIEKDQFERCAAIIQSNLKRDTSEYRRTNYVHIFSHLLKCGKCGSGFCSQKDKMRSNGYRPSMYRCAKRMHMKDCEQKIINDTTIGNFVFNYVSNVVRVQKDFSKINSLDKFEKALLKGPAFEDIAKIEEAGLQQMYNAILYNSATSNSLSFDFLSTTQADNNTAEIILLTKEKEKYAKAVDRLLDIYLYDSEAISKDEFTKKQRDLQSKIDVIDEKIENLKISEANNKNLNLLDTSFIKKATAFLVSQKILSAKYIDFVDLALNSDPQILKDFVSQIIEYITVDENKVTKIKFINGIEHSFICK

SEQ ID NO: 1536 - protein, 565 aa, Unknown
  Description of Unknown: Integrase B1537 sequence
  PTHR30461:SF3,IPR036162,PS51737,IPR011109,PTHR30461, PS00397,PF00239,G3DSA:1.10.10.2600,IPR006119,SSF53041, SM00857,IPR025827,IPR038109,PS51736,cd03768, IPR006118,PF13408,G3DSA:3.40.50.1390,PF07508,Coil
MSEKEKIVALYVRVSTGYQVDKDSLPFQKKELKNYCEHVLHINKNRIEVFEDAGKSGKNTKRPAFERMMEKVKSGQVSHVIVYKIDRISRNLVDFSLMYDDFKYNNVTFISLNEQFDTSSAIGEAILKIILVFAELERKLTSERVTDVMIGRAQNGQWNGARVPYGWDWDEEKQMPVHSKKEAQYGIDMYHRYLNGYSTLRIARYNNEHSIPTKRGGEWSSKTVGDFLRNPMNKGDYRYNYRNSARGKKKAKEEVVYIKNVFPPLIDPTIFDEVNRRLDENYKKQNTNYMFPIRKQCNIFSGLIICGKCGAHYQVCRKDERRLDGFRPSNYVCTRKRQKAICDSLNVSEVKIGPFMINYIAAMVDISQKRKKLKDKKELEQLILSHMQFTDLAGIADDSLQETMDLLYGRSTNIWSSSPIEKESQDNENKKNKLKENLQKTDRALERLKKVYLFDDDGMDEKEFLEMKSKLEIDRVKIENEIKDIDNDAIANNVNQIDFIKTASQFLIIHKINSGEFIDYRSLAILDEESMKAFMNSVIDHIVVLNRQITEIVFKNGLSHKLLYR

SEQ ID NO: 1537 - protein, 565 aa, Unknown
  Description of Unknown: Integrase B1538 sequence
  SM00857,IPR036162,PS51737,G3DSA:3.40.50.1390,IPR006119, IPR011109,SSF53041,PTHR30461,Coil,PS51736, cd00338,PF00239
MKVIGYTRVSTNNQDLKRQKDLIKDYCKQKGYMLSQILEDNGISGAVDDREGYKALLSVTKDDADLVIVSELSRISRSEDVQNTLYNIHSLLAKGIKLIMLDEPEHIYEGKLDLSQFLLLAIKAYGAAEERLKTRTRMNTGKETRMITNPMADLDAHKPYGFVSAPNPKHGLSGEPKKIWAIDEEKMAQVKEIFELVASGMSLFKTAEYMNIRYHDRGFLMKSIFEIIHRTEYKGIRKRAGKLYQLPVCPIPVELWEAANKGLKDRTAIKDNHRLYFNPLKGIGKCVCGRNLGVNQESKKLSYQCADKMINRGDKRKCHVPTTNYNLVNLVVWNICRQMVLDKDYEAKSNEAILKLEADNQRLEESKVEYHNSISELDEEINTTAEKFASSTDLNPAILNALNVRVNKLDAQKKELENRVVDIDREIALNNRRIQEERKIQTQKELSDVSLESKSKFFHQILDSVYTYSARAKSGVIAVNFKNGLQVIALWKNHFKTSVWYLPVGFQFDIEKRMIYVKTMPKTEGLDFTISEPETKFYEYRDLFKHFDLTKYQVEIPKEELERKD

SEQ ID NO: 1538 - protein, 565 aa, Unknown
  Description of Unknown: Integrase B1539 sequence
  PTHR30461:SF3,IPR036162,PS51737,IPR011109, PTHR30461,PS00397,PF00239,G3DSA:1.10.10.2600, IPR006119,SSF53041,SM00857,IPR025827,IPR038109, PS51736,cd03768,IPR006118,PF13408,G3DSA:3.40.50.1390,PF07508,Coil
MTKLKKAALYIRVSTRYQIDKDSLPFQKQKLIDYCEFMGIKDYEVYADEGFSGKNTDRPSFQRMMSELRNGDISHIIVWKVDRISRNLLDFAAMYTELKKYRVTFVSMNEQFDTSSAIGEAMLKIILVFAELERNMTSERVTSIMLNRAEHGQWNGARMPMGYKWDDKIKFPVPDEEESKTVQFIFDKYEEVHSCLTVSRYLNNNNINTKRGGKWTSKTVNDIIKNPFYIGTYRYNVRESARGKMKPKSEWIVKENNHTPIIEKDQFERCAAIIQSNLKRDTSEYRRTNYVHIFSHLLKCGKCGSGFCSQKDKMRSNGYRPSMYRCAKRMHMKDCEQKIINDTTIGNFVFNYVSNVVRVQKDFSKINSLDKFEKALLKGPAFEDIAKIEEAGLQQMYNAILYNSATSNSLSFDFLSTTQADNNTAEIILLTKEKEKYAKAVDRLLDIYLYDSEAVSKEEFAKKQKDLQSKIDVIDEKIENLKTSEANNKNLNPLDTSFIKKATAFLVSQKILSARYIDFVDLALNSDPQILKDFVSQIIEYITVDENKVTKIKFINGIEHSFIRK

SEQ ID NO: 1539 - protein, 565 aa, Unknown
  Description of Unknown: Integrase B1540 sequence
  SM00857,G3DSA:1.10.10.2600,IPR036162,PF13408,IPR025827, PS51737,G3DSA:3.40.50.1390,IPR006119,IPR038109,PF07508, SSF53041,IPR011109,PTHR30461,Coil,cd00338, PF00239
MAYRKITDIRDTIGMRAVFYARVSTAEEEQLNAIELQIEENRGCIKDHGWKLVGEYIDRSKSGTMVKGRDDYQRLYEDLYEDLFDIVVIKDQERLQRNTLDWYLFINRVVQTGKLLFMYMDGKFYSPDDALITGVRAIIAEEFSRNLSKKLHNYHDHRIEKARQGQEIALQGSGNVYGWDKKDGKYYINPEQAKVRRLMCEGIMARKGSTLIAKELNDAGYRNTVGKPWKPMDIPKFVYDCKNVGTMIINKERHDFESKQTIKLPKEEWVYVENALPPIVTQEEWDLICKIHEERVIATGSDRRGKKTSGYSFSGKLVCGICGAPYWRKQRVSKDEYWVCSTKQTKGRKTRKRDSTMGKAGEINPLGCDNENISYNSLMEIMGVVSERLQANTDTIKQDMINWLTKLRKQLLEANGGHTEADLQRELSRKSKLLDAYLDGILNKQEYQKKAEELDERIIQLKAETEKNKANSGDIAEIDKVLANIDEEVSRYVDGNEKLKVEYLLEHLEQVQIFPDKVIVIVPILSEGIVVEKAQYVSREKWCRKDYNYKNYYGCISCQFRRNIS

SEQ ID NO: 1540 - protein, 565 aa, Unknown
  Description of Unknown: Integrase B1541 sequence
  SM00857,G3DSA:1.10.10.2600,IPR036162,PF13408,IPR025827, G3DSA:3.40.50.1390,PS51737,IPR006119,IPR038109,PF07508, SSF53041,IPR011109,PTHR30461,Coil,cd00338, PF00239
MAYRKITDIKDTIGMRAVFYARVSTAEEEQLNAIELQIEENRGCIKDHGWKLVGEYIDRSKSGTMVKGRDDYQRLYEDLYEDLFDIVVIKDQERLQRNTLDWYLFINRVVQTGKLLFMYMDGKFYSPDDALITGVRAIIAEEFSRNLSKKLHNYHDHRIEKARQGQEIALQGSGNVYGWDKKDGKYYINPEQAKVRRLMCEGIMARKGSTLIAKELNEAGYRNTVGKPWKPMDIPKFVYDCKNVGTMIINKERHDFESKQTIKLPKEEWVYVENALPPIVTQEEWDLICKIHEERVIATGSDRRGKKTSGYSFSGKLVCGICGAPYWRKQRVSKDEYWVCSTKQTKGRRTRKRDSTMGKAGEINPLGCDNENISYNSLIEIMGVVSERLQANTDTIKQDMINWLTKLRKQLLEANGGHTEADLQRELSRKSKLLDAYLDGILNKQEYQKKAEELDERIIQLKAETEKNKANSGDIAEIDKVLANIDEEVARYVDGNEKLKVEYLLEHLEQVQIFPDKVIVIVPILSEGIVVEKTQYVSREKWCWKNHFDESAYNCFKTNGRNGFP

SEQ ID NO: 1541 - protein, 565 aa, Unknown
  Description of Unknown: Integrase B1542 sequence
  PTHR30461:SF3,IPR036162,PS51737,IPR011109,PTHR30461, PS00397,PF00239,G3DSA:1.10.10.2600,IPR006119,SSF53041, SM00857,IPR025827,IPR038109,PS51736,mobidb-lite, cd03768,IPR006118,PF13408,G3DSA:3.40.50.1390,PF07508,Coil
MDEDRKIVALYVRVSTGYQVDKDSLPFQKKELRAYCEHVLHIDKKRIEIFEDAGRSGKNTKRPAFERMMENVKAGLVSHVIVYKIDRITRNLVDFSLMYDDFKYNNVTFISLNEQFDTSSAIGEAILKIILVFAELERKLTSERVKDVMIGRAQNKQWNGARVPYGWDWDAEKKCPVHSKKEAPYARAMYQMYLDGGSSVTICDYNNSHNIPTKRGGEWTSKTVADFLRNPINKGDYRYNYRESARGKKKSDDEVVYIKDVFPPLIDPKIWDEVNRRMDANSQNRNTSVFHPIRKRCNVFAGLMICGKCGSGYQVKGKDSRKGDGFRPSSYACTGKYQKKNCDNLNVSDVKIGPFVLNYIAAMVDASKSRRFIKDCESLEQVILSHISFSDVAGISASSLQDTLNLLFGRSGSELLSGKPVSSETADGSKTEELKEKLQRTDRALERLKKAYLFDDDGMDEKEFLEMKSKLEVDRIKLENSIKGLESSSISENVDQAAFLKSASQFLISHKINSGDYIDYSRLAALDEDSMKAFVNSIIDHIVVLDKRITEIVFKNGLTHTLLYR

SEQ ID NO: 1542 - protein, 565 aa, Unknown
  Description of Unknown: Integrase B1543 sequence
  PTHR30461:SF3,IPR036162,PS51737,IPR011109,PTHR30461, PF00239,G3DSA:1.10.10.2600,IPR006119,PF14287,SSF53041, IPR025378,SM00857,IPR025827,cd03770,IPR038109, PS51736,PF13408,G3DSA:3.40.50.1390,PF07508,Coil
MTCNPIRFDSTEPERLGKDEKIMKSNQQKITALYCRLSQEDELEGESNSIKNQKSMLEKYAADNGFGNCRFYIDDGYSGVSFERPDFKRMIADMEKGEIGTVITKDLSRLGRDYLKTGTYIEIIFPQNDVRYIAVNDGVDSEKGCNEFIGIRNYFNDFFAADTSKKIRAVQRAKAERGERIGSKLPYGYMKSEDNRLVPDPDTAPVVKRIFDMYVNGVGTRTIAMTLERDKIMSPSAYAYYKYGRKENGLKLNNPYLWSDVTLRGMLVNEVYIGTTANYKTTTKSNKLKKQIHNDRKDWLVFENTHEPIVDKSTFEMVQKWFAGRRKPNKSGKTDVFAGLVYCADCKSRMYLRRVLKYPKENNYLCKTYQRYGNNHCTAHRISEQDLHAVILQKLREVTAYVRENPEEFYEIASRNARAEAEREMKTYLREKEAAEQRIAELESIIRCLYEDRVLGRISVERYESLSAGYETEQSELKTKLNEMNAFLDENEKREQLIQDFIENAKKYIDIQKLTPEILRAFISRIEVHEKAKWHSTVCGNDIVIYFTVERKEQLNIQHKDIKTA

SEQ ID NO: 1543 - protein, 565 aa, Unknown
  Description of Unknown: Integrase B1544 sequence
  PTHR30461:SF3,IPR036162,PS51737,IPR011109,PTHR30461, PS00397,PF00239,G3DSA:1.10.10.2600,IPR006119,SSF53041, SM00857,IPR025827,IPR038109,PS51736,cd03768, IPR006118,PF13408,G3DSA:3.40.50.1390,PF07508,Coil
MPEKEKIVALYVRVSTGYQVDKDSLPFQKKELKNYCEHVLHINKNRIEVFEDAGKSGKNTKRPAFERMMEKVKSGQVSHVIVYKIDRISRNLVDFSLMYDDFKYNNVTFISLNEQFDTSSAIGEAILKIILVFAELERKLTSERVTDVMIGRAQNGQWNGARVPYGWDWDEEKQMPVHSKKEAQYGIDMYHRYLEGYSTLRIARYNNEHNIPTKRGGEWSSKTVGDFLRNPINKGDYRYNYRNSARGKKKAKEEVVYIKNVFPPLIDPPIFDEVNRRLDENYKKQNTNYMFPIRKQCNIFSGLIICGKCGAHYQVCRKDERRLDGFRPSNYVCTRKRQKAICDSLNVSEVKIGPFMINYIAAMVDISQKRKKLKDKKELEQLILSHMQFTDLAGIADDSLQETMDLLYGRSTNIWSPSPIAKESQDNENKKSKLKENLQKTDRALERLKKAYLFDDDGMDEKEFLEMKSKLEIDRVKIENEIKDIDNDAIANNVNQIDFIKTASQFLIIHKINSGEFIDYRSLAILDEESLKAFMNSVIDHIVVLNRQITEIVFKNGLSHKLLYR

SEQ ID NO: 1544 - protein, 565 aa, Unknown
  Description of Unknown: Integrase B1545 sequence
  PTHR30461:SF3,IPR036162,PS51737,IPR011109,PTHR30461, PS00397,PF00239,G3DSA:1.10.10.2600,IPR006119,SSF53041, SM00857,IPR025827,IPR038109,PS51736,cd03768, IPR006118,PF13408,G3DSA:3.40.50.1390,PF07508,Coil
MPEKKKIVALYVRVSTGYQVDKDSLPFQKKELKNYCEHVLHIDKKRIEVFEDAGKSGKNTKRPAFERMMEKVKSGQVSHVIVYKIDRISRNLVDFSLMYDDFKYNNVTFISLNEQFDTSSAIGEAILKIILVFAELERKLTSERVTDVMIGRAQNGQWNGARVPYGWDWDEEKQMPVHSKKEAQYGIDMYHRYLNGYSTLRIARYNNEHSIPTKRGGEWSSKTVGDFLRNPMNKGDYRYNYRNSARGKKKAKEEVVYIKNVFPPLIDPQIFDEVNRRLDENYKKQNTNYMFPIRKQCNIFSGLIICGKCGAHYQVCRKDERRLDGFRPSNYVCTRKRQKAICDSLNVSEVKIGPFMINYIAAMVDISQKRKKLKDKKELEQLILSHMQFADLAGIADDSLQETMDLLYGRSTNIWSSSPIEKESQDNENKKNKLKENLQKTDRALERLKKAYLFDDDAMDEKEFLEMKSKLEIDRVKIENEIKDIDNDAIANNVNQIDFIKTASQFLIIHKINSGEFIDYRSLAILDEESMKAFMNSVIDHIVVLNRQITEIVFKNGLSHKLLYR

SEQ ID NO: 1545 - protein, 565 aa, Unknown
  Description of Unknown: Integrase B1546 sequence
  PTHR30461:SF3,cd00338,SM00857,G3DSA:1.10.10.2600,IPR036162, PF13408,IPR025827,PS51737,G3DSA:3.40.50.1390,IPR006119, IPR038109,PF07508,IPR011109,SSF53041,PTHR30461, PS51736,Coil,PF00239
MAKKKKPAGGIAVIYARYSSHNQRDVSIEQQIEACRKHAAELGLTIIATYEDRAISGRTDNRPAFQRLMHDAEKGKFSYVLAWKSNRMGRNMMQAMVNESRLMDCGIKVYYAEEDFDDSAAGRFALRSMMNVNQFYSDNLAEDVRRGLMDNANKCMVNGRQPLGYKRGKDGKVVVDEPAAAIVREVYARVASGELFTDIARDLNRRGIKTADKGEWNKNSFHRLCSNEKYRGIYIYGDVRIEGGIPTIIDDTLWYKVQEALRVKKLKRNGRHRPGDEDYLLTGKLRCGKCGGYMIGMSGRSKTGDIHYYYACQNRRVGRTCDKKNIRRDVIEPAVAQAIKEYCLTDDAIEWIADKTVEYWEKADRNLQLDSIEGDLAAVQSSISNVMKAIEMGVVTETTRDRLIELEKQRTDLKSKLALAKEEVVHVDRKKLISSLLLFRNGDIHDRQYQEDLFKTFLISVYVYDDDDNGHLKIVFNAFGDNNTVDLPIDFGETDNQSAFSDGAEKFDYSLHRSTKKTSEHSGCLFLSYPGYGVHSALAHERSIGHGKHQEKLRFWLYAPALEGW

SEQ ID NO: 1546 - protein, 565 aa, Unknown
  Description of Unknown: Integrase B1547 sequence
  SM00857,G3DSA:1.10.10.2600,IPR036162,PF13408,IPR025827, G3DSA:3.40.50.1390,PS51737,IPR006119,IPR038109,PF07508, SSF53041,IPR011109,PTHR30461,Coil,cd00338, PF00239
MAYRKITDIRDTIGMRAVFYARVSTAEEEQLNAIELQIEENRGCIKDHGWKLVGEYIDRSKSGTMVKGRDDYQRLYEDLYEDLFDIVVIKDQERLQRNTLDWYLFINRVVQTGKLLFMYMDGKFYSPDDALITGVRAIIAEEFSRNLSKKLHNYHDHRIEKARQGQEIALQGSGNVYGWDKKDGKYYINPEQAKVRRLMCEGIMARKGSTLIAKELNDAGYRNTVGKPWKPMDIPKFVYDCKNVGTMIINKERHDFESKQTIKLPKEEWVYVENALPPIVTQEEWDLICKIHEERVIATGSDRRGKKTSGYSFSGKLVCGICGAPYWRKQRVSKDEYWVCSTKQTKGRKTRKRDSTMGKAGEINPLGCDNENISYNSLMEIMGVVSERLQANTDTIKQDMINWLTKLRKQLLEANGGHTEADLQRELSRKSKLLDAYLDGILNKQEYQKKAEELDERIIQLKTETEKNKANSGDIAEIDKVLANIDEEVARYVDGNEKLKVEYLLEHLEQVQIFPDKVIVIVPILSEGIVVEKTQYVSREKWCRKDYNYKNYYGCISCQFRRNIS

SEQ ID NO: 1547 - protein, 565 aa, Unknown
  Description of Unknown: Integrase B1548 sequence
  SM00857,G3DSA:1.10.10.2600,IPR036162,PF13408,IPR025827, PS51737,G3DSA:3.40.50.1390,IPR006119,IPR038109,PF07508, SSF53041,IPR011109,PTHR30461,Coil,cd00338, PF00239
MAYRKITDIKDTIGMRAVFYARVSTAEEEQLNAIELQIEENRGCIKDHGWKLVGEYIDRSKSGTMVKGRDDYQRLYEDLYEDLFDIVVIKDQERLQRNTLDWYLFINRVVQTGKLLFMYMDGKFYSPDDALITGVRAIIAEEFSRNLSKKLHNYHDHRIEKARQGQEIALQGSGNVYGWDKKDGKYYINPEQAKVRRLMCEGIMARKGSTLIAKELNDAGYRNTVGKPWKPMDIPKFVYDCKNVGTMIINKERHDFESKQTIKLPKEEWVYVENALPPIVTQEEWDLICKIHEERVIATGSDRRGKKTSGYSFSGKLVCGICGAPYWRKQRVSKDEYWVCSTKQTKGRRTRKRDSTMGKAGEINPLGCDNENISYNSLMEIMGVVSERLQANTDTIKQDMINWLTKLRKQLIEANGGHTEADLQRDLSRKSKLLDAYLDGILNKQEYQTKAEELDERIIQLKAETEKNKANSGDIAEIDKVLANIDEEVSRYVDGNEKLKVEYLLEHLEQVQIFPDKVIVIVPILSEGIVVEKAQYVSREKWCRKNHFDEGSYNCFKTNGRNGFP

SEQ ID NO: 1548 - protein, 565 aa, Unknown
  Description of Unknown: Integrase B1549 sequence
  SM00857,G3DSA:1.10.10.2600,IPR036162,PF13408,PS51737, G3DSA:3.40.50.1390,IPR025827,IPR006119,IPR038109,PF07508, SSF53041,IPR011109,PTHR30461,Coil,cd00338, PF00239
MAYRKITDIRDTIGMRAVFYARVSTAEEEQLNAIELQIEENRGCIKDHGWKLVGEYIDRSKSGTMVKGRDDYQRLYEDLYEDLFDIVVIKDQERLQRNTLDWYLFINRVVQTGKLLFMYMDGKFYSPDDALITGVRAIIAEEFSRNLSKKLHNYHDHRIEKARQGQEIALQGSGNVYGWDKKDGKYYINPEQAKVRRLMCEGIMARKGSTLIAKELNDAGYHNTVGKPWKPMDIPKFVYDCKNVGTMIINKERHDFESKQTIKLPKEEWVYVENALPPIVTQEEWDLICKIHEERVIATGSDRRGKKTSGYSFSGKLICGICGAPYWRKQRVSKDEYWVCSTKQTKGRRTRKRDSTMGKAGEINPLGCDNENISYNSLMEIMVVVSERLQANTDTIKQDMINWLTKLRKQLLEANGGHTEVDLQRELSRKSKLLDAYLDGILNKQEYQKKAEELDERIIQLKAETEKNKANSGDIAEIDKVLANIDEEVARYVDGNEKLKVEYLLEHLEQVQIFPDKVIVIVPILSEGIVVEKTQYVSREKWCGKIYHIENVDWYDETNCRKDLL

SEQ ID NO: 1549 - protein, 565 aa, Unknown
  Description of Unknown: Integrase B1550 sequence
  PTHR30461:SF3,SM00857,G3DSA:1.10.10.2600,IPR036162,PF13408, PS51737,G3DSA:3.40.50.1390,IPR025827,IPR006119,IPR038109, PF07508,IPR011109,SSF53041,PTHR30461,Coil, PS51736,cd00338,PF00239
MNKYERLNQERKLIDTKKRVAAYCRVSTDNDDQANSFESQQRYFKQYIERNPDWELFEIFADEGISGTNTKKRKEFNRMIACAKNGDFDLIITKEISRFARNTLDSIYYTRDLKKHGVGVIFMNDNINTLDGDAELRLAIMSSIAQEESRKTSERVKWGQKRQMEQGVVFGRSMLGYDVKDGKMYINEAGAKIVRLIFHKFVNEGKGTHVIARELREEGIKPMRVKEWQNTVILRVIRNEKYCGDLVQKKTYTPDYLSHEKKYNRGQEEFVIIKDHHEPIISRELFEEANRILDAKSLSPEGKAKHSNRYPFSGKLKCGRCGASYVARYKKRQDGSRYKAWRCLEAARHGSPHTDKAGNRVGCFGESIRNEDAIHIMYLVCQTLNLDRKKIISNLTKTIGAIISMDMTGTDTNALADKIADAERKRTNLIELYTGGDIDRAEFTALRAKYDAEIESLKSMAESIEKQQAMVKKQQEVMKDIRNTLEELIKGIEYEDEFYTQILDKMVINDRDNIDVYLNLLPLKWSYTVAKASKKALAPKRNILGASLPTSLSIPATSLYGMEQR

SEQ ID NO: 1550 - protein, 565 aa, Unknown
  Description of Unknown: Integrase B1551 sequence
  PTHR30461:SF3,IPR036162,PS51737,IPR011109,PTHR30461, PS00397,PF00239,G3DSA:1.10.10.2600,IPR006119,SSF53041, SM00857,IPR025827,IPR038109,PS51736,cd03768, IPR006118,PF13408,G3DSA:3.40.50.1390,PF07508,Coil
MPEKEKVVALYVRVSTGYQVDKDSLPFQKKELKNYCEHLLHINKNRIEVFEDAGKSGKNTKRPAFERMMEKVKSGQVSHVIVYKIDRISRNLVDFSLMYDDFKYNNVTFISLNEQFDTSSAIGEAILKIILVFAELERKLTSERVTDVMIGRAQNGQWNGARVPYGWDWDEEKQMPVHSKKEAQYGIDMYHRYLNGYSTLRIARYNNEHSIPTKRGGEWSSKTVGDFLRNPMNKGDYRYNYRNSARGKKKAKEEVVYIKNVFPPLIDPTIFDEVNRRLDENYKKQNTNYMFPIRKQCNIFSGLIICGKCGAHYQVCRKDERRLDGFRPSNYVCTRKRQKAICDSLNVSEVKIGPFMINYIAAMVDISQKRKKLKDKKELEQLILSHMQFTDLAGIADDSLQETMDLLYGRSTNIWSSSPIEKESQDNENKKNKLKENLQKTDRALERLKKVYLFDDDGMDEKEFLEMKSKLEIDRVKIENEIKDIDNDAIANNVNQIDFIKTASQFLIIHKINSGEFIDYRSLAILDEESMKAFMNSVIDHIVVLNRQITEIVFKNGLSHKLLYR

SEQ ID NO: 1551 - protein, 565 aa, Unknown
  Description of Unknown: Integrase B1552 sequence
  PTHR30461:SF3,SM00857,G3DSA:1.10.10.2600,IPR036162,PF13408, PS51737,IPR025827,G3DSA:3.40.50.1390,IPR006119,IPR038109, PF07508,SSF53041,IPR011109,PTHR30461,Coil, PS51736,cd00338,PF00239
MDVRRLDEMQAQGRSIFDTELAVAYYARVSTDKDEQINSLGNQKRYFEDYIAANPHWRFAGGYVDEGISGTSVEGREQFLKMIEDAKRGRFDLIVTKEISRFARNTLDSLRYTRELLRCGVGVYFQNDNINTFDKDAELRLTIMSSIAQDEVRKLSERTRFGFKRAQENSVLLGQNNLFGYNKVDGRLEIVEPEAAVVREVFERYAAGDLGLRAIANDLDSRGVRGRQGKPLTYSTLYGMIRNPKYKGCYAGRRYASRDYRDKRSYRLSADKWLVHKDDRVPAIVPEALWEQANRLLASRGKTMKAHAQASQNRYAYSGKLICAKHGTTFHRHVYKSKSRGESECWNCKLYREKGKQGGCDSPTVYSHELDRILERVFEQITDERSAAVQEYIDNLRAFAAQQDNAPALAQVEQEIETVTRRKDKLLDLALAGALSNDEFKQRNETCNEQLAALEQQRTELQNADKTLEERIRRVENLRRIIEERWQMSCGFSREMSKALVDHIVVDSDESKTRISLDIFLTTGAEPIVSETQTSNSQLQMSFQRTRSGYQGTYEVRYCVRWHLG

SEQ ID NO: 1552 - protein, 565 aa, Unknown
  Description of Unknown: Integrase B1553 sequence
  SM00857,G3DSA:1.10.10.2600,IPR036162,PF13408,PS51737, IPR025827,G3DSA:3.40.50.1390,IPR006119,IPR038109,PF07508, IPR011109,SSF53041,PTHR30461,Coil,cd00338, PF00239
MAYRKITDIRDTIGMRAVFYARVSTAEEEQLNAIELQIEENRGCIKDHGWKLVGEYIDRSKSGTMVKGRDDYQRLYEDLYEDLFDIVVIKDQERLQRNTLDWYLFINRVVQTGKLLFMYMDGKFYSPDDALITGVRAIIAEEFSRNLSKKLHNYHDHRIEKARQGQEIALQGSGNVYGWDKKDGKYYINPEQAKIRRLMCEGIMARKGSTLIAKELNDAGYRNTVGKPWKPMDIPKFVYDCKNVGTMIINKERHDFESKQTIKLPKEEWVYVENALPPIVTQEEWDLICKIHEERVIATGSDRRGKKTSGYSFSGKLVCGICGAPYWRKQRVSKDEYWVCSTKQTKGRRTRKRDSTMGKAGEINPLGCDNENISYNSLMEIMGVVSERLQANTDTIKHDMINWLTKLRKQLLEANGGHTEADLQRELSRKSKLLDAYLDGILNKQEYQKKAEELDERIIQLKAETEKNKANSGDIAEIDKVLANIDEEVSRYVDGNEKLKVEYLLEHLEQVQIFPDKVIVIVPILSEGIVVEKTQYVSREKRGRQIHNHENAVGVDQSHKRQLYH

SEQ ID NO: 1553 - protein, 565 aa, Unknown
  Description of Unknown: Integrase B1554 sequence
  SM00857,G3DSA:1.10.10.2600,IPR036162,PF13408,PS51737, G3DSA:3.40.50.1390,IPR025827,IPR006119,IPR038109,PF07508, IPR011109,SSF53041,PTHR30461,Coil,PS51736, cd00338,PF00239
MAYRKVRSLLDTIGLRAVFYARVSTAEEEQLNAIELQIEENRNCIYKNKWKKVDEYIDRSKSGTMVKGRDDYQRLYEDLLTDKFDIVVIKDQERLMRNTKDWYLFIDRLVQTGKLLYMYLDNKFYNPDDALITGIRAIIAEEFSRNLSKKLHNYHDGRIEKARQGKEIDLQGSGNVFGWDKKDGRYYINPEQAKIRRLMCEGIMARKGSTQIAKELNEAGYRNTVGKEWKPMDIPKFVYDCKNVGTMIINKERQDFESKQTIKLPKEEWVYVKNALPPIVTEEEWELICKIHEERVVATGSDKRGKGKKVSGYSFSGKLVCGVCGAPYWRKQRSTKEEYWVCSTKQQKGRRTRKRDSVNGKAGEINEAGCDNTNISYNSLMEIMGIVSERLQANTELVKADMISKLNSFKKRIIEANRGVTEEDLQKELSRKDKLLDALLDGILTKEEYTRKAESIENKIVELRQEIEDNKTQFEDIAEIDRVLANIDEEIAVYLNENKQLKVEYILEHLDRVEIYPDKVIVIVPLFDVGFIVDKSQYVSREKRSRKNDHYENATWIDKANFRRS

SEQ ID NO: 1554 - protein, 565 aa, Unknown
  Description of Unknown: Integrase B1555 sequence
  SM00857,G3DSA:1.10.10.2600,IPR036162,PF13408,PS51737, G3DSA:3.40.50.1390,IPR025827,IPR006119,IPR038109,PF07508, SSF53041,IPR011109,PTHR30461,Coil,cd00338, PF00239
MAYRKITDIKDTIGMRAVFYARVSTAEEEQLNAIELQIEENRGCIKDHGWKLVGEYIDRSKSGTMVKGRDDYQRLYEDLYEDLFDIVVIKDQERLQRNTLDWYLFINRVVQTGKLLFMYMAGKFYSPDDALITGVRAIIAEEFSRNLSKKLHNYHDHRIEKARQGQEIALQGSGNVYGWDKKDGKYYINPEQAKVRRLMCEGIMARKGSTLIAKELNDAGYRNTVGKPWKPMDIPKFVYDCKNVGTMIINKERHDFESKQTIKLPKEEWVYVENALPPIVTQEEWDLICKIHEERVIATGSDRRGKKTSGYSFSGKLVCGICGAPYWRKQRVSKDEYWVCSTKQTKGRRTRKRDSTMGKAGEINPLGCDNENISYNSLMEIMGVVSERLQANTDTIKQDMINWLTKLRKQLLEANGGHTEADLQRELSRKSKLLDAYLDGILNKQEYQKKAEELDERIIQLKTETEKNKANSGDIAEIDKVLANIDEEVARYVDGNEKLKVEYLLEHLEQVQIFPDKVIVIVPILSEGIVVEKTQYVSREKWSGKNNPYENDCRYYDTNQRNHLL

SEQ ID NO: 1555 - protein, 565 aa, Unknown
  Description of Unknown: Integrase B1556 sequence
  SM00857,G3DSA:1.10.10.2600,IPR036162,PF13408,PS51737, G3DSA:3.40.50.1390,IPR025827,IPR006119,IPR038109,PF07508, SSF53041,IPR011109,PTHR30461,Coil,cd00338, PF00239
MAYRKITDIRDTIGMRAVFYARVSTAEEEQLNAIELQIEENRGCIKDHGWKLVGEYIDRSKSGTMVKGRDDYQRLYEDLYEDLFDIVVIKDQERLQRNTLDWYLFINRVVQTGKLLFMYMDGKFYSPDDALITGVRAIIAEEFSRNLSKKLHNYHDHRIEKARQGQEIALQGSGNVYGWDKKDGKYYINPEQAKVRRLMCEGIMARKGSTLIAKELNDAGYRNTVGKPWKPMDIPKFVYDCKNVGTMIINKERHDFESKQTIKLPKEEWVYVENALPPIVTQEEWDLICKIHEERVIATGSDRRGKKTSGYSFSGKLVCGICGAPYWRKQRVSKDEYWVCSTKQTKGRRTRKRDSTMGKAGEINPLGCDNENISYNSLMEIMGVVSERLQANTDTIKHDMINWLTKLRKQLLEANGGHTEADLQRELSRKSKLLDAYLDGILNKQEYQKKAEELDERIIQLKAETEKNKANSGDIEEIDKVLANIDEEVSRYVDGNEKLKVEYLLEHLEQVQIFPDKVIVIVPILSEGIVVEKAQYVSREKWCGKIYHIENVDRYDETHCRKDLL

SEQ ID NO: 1556 - protein, 565 aa, Unknown
  Description of Unknown: Integrase B1557 sequence
  PTHR30461:SF3,SM00857,G3DSA:1.10.10.2600,IPR036162,PF13408, IPR025827,G3DSA:3.40.50.1390,PS51737,IPR006119,IPR038109, PF07508,SSF53041,IPR011109,PTHR30461,Coil, PS51736,cd00338,PF00239
MAVFAQAVRPDFNNDVADVVIYSRYSSIGQNDQSIDGQIDACMQYAAQRGFRVVGQYIDRAMSGTHADSRPEFQRLIRDGKKGIFKYVLVWKLDRFARNRYDSAIYKNELKKHGVKVLSVTEGIDAGSDSIILEAVLEAMAEEYSRQLSQNVRRGMRQNAEKQLTLGGNTPLGYRVEDKRLVVDKDEAEIVRFAFRSYADGMTKTEIAKECNRRGWRTRSGRPFTLSSFSVMLKNQTYIGTYTFKDELAVEDAVPAIVDRSTFDKVGAMLERNRRAPGRVKAKEDYELQGKVFCGYCGSPMVGESGRGKCGNTYHYYACATRKKVHTCQKKNEKKGFLEWYIVEQITTSILTDQRIHEIAAGVVAEYNRSFDAGNVRELEKKIRAMDKEMDTLVDTLIRTTAAPAVTKINERIDLLAIQKEEAEVDLAKLKVASRITLSEDEIIAWLQQFVHGDPMDPDFRQRVIDIFVNSIYLYDDKVVMYFNIKDASQVSYIEMQENLKDLEGSDLNGCGVPARSLCSLRTQASLFFSGPSPASSLPISRHRPVKFQATSTITISSSLLSGCR

SEQ ID NO: 1557 - protein, 565 aa, Unknown
  Description of Unknown: Integrase B1558 sequence
  PTHR30461:SF3,cd00338,SM00857,G3DSA:1.10.10.2600,IPR036162, PF13408,PS51737,IPR025827,G3DSA:3.40.50.1390,IPR006119, IPR038109,PF07508,SSF53041,IPR011109,PTHR30461, PS51736,Coil,PF00239
MKITKFPIDLSMLTEEEIDQFRQDPSTLFEGDTDVSLYLRFSSERQREQSIEGQLRDCRTFCKLNSYRITAIYVDRATTARKDVEKRVHFQEMIRDSEKKPWEYVVVWKLDRFARNRTDSALFKFRLRKNGVKVISATENISEKPEGIILEAVLEGMAEFYSADLSQKITRGMRESALKCHSIGGHIPLGYKIEDHKLVINPATAHIVQEAFELYANGETVADICRMFNAKGYRTAKGVEFNRNSFKSMFRNKRYIGVYTYKDIEMEGGVPAIIDKELFETVSRRLSKNAEAPARGKAKVDYLLAGKLFCGHCGGSMNGESGTSRTGAVHNYYTCYTRKRKHACEKKPLKKEWIEYIVAQDAMELLTDDTIQELADMAISQTEQDLRENTRIPELTERMKETESGIANITNAIEKGIASDALMNRLVELEKEKKNLFRLLAEEEKYVCKIERSQIVYWLTEFKGGRIEDERYRRIIIDLMVNSVTVWDEPDGFRITTAYNLTSCKSKTFRINPSGEKGFGFEGSKSTKTRNRCSFYCGDFSLDRPISSAGGAPRKKSFNIKHRVK

SEQ ID NO: 1558 - protein, 565 aa, Unknown
  Description of Unknown: Integrase B1559 sequence
  PTHR30461:SF3,cd00338,SM00857,G3DSA:1.10.10.2600,IPR036162, PF13408,PS51737,G3DSA:3.40.50.1390,IPR025827,IPR006119, IPR038109,PF07508,IPR011109,SSF53041,PTHR30461, PS51736,Coil,PF00239
MSATIPSLMQAPRAFGYCRKSTNEQREESLEAQQRAIVTFAATAGYELVQVYKDHGNSGRRGERPEFQRMLADAAAAGVQYIIVHKLDRFFRNADQQTVVEMQLRRQGIQVISAAEHFDATPQGQFMRNVTKAINQWYSANLAQEVAKGLRENALTARTTGGPPPLGYAVDKSTGQYAIVPREAEAVQLIFKLYQQGAGYTEIIDALNAGGYVTRRGQPFGKNSLYDILRNEKYTGLYIWNRLAPADVDGRTSRRRLKPRDEWVCVENGMPQIIPTEQWQAVQDEMDKRKHRNAQYKAKAFYLLSGLVYCGGCGGVMSGEMHRYNSHGKAVEYRYYRCTAQHRQHDGGAHAHRVNADRLENAVIDYIQHIVLDPVNMDALCVAVLEALQPDGRNAERAKELKQEAGIIQQKVDRLYQAIENGLDAAGAIERINALQKQRMTLLAQANDLDVSAESAAASVDELRRVWSGINLRELQPEKMRAIVRDLIYKIVVFDDGPRGSRLRIILNPARLNPAAIPKAIETMPFSELQNFSHTGGSGLPLPSICETITVLDYGLIAAELSIVR

SEQ ID NO: 1559 - protein, 565 aa, Unknown
  Description of Unknown: Integrase B1560 sequence
  PTHR30461:SF3,IPR036162,PS51737,IPR011109,PTHR30461, PS00397,PF00239,G3DSA:1.10.10.2600,IPR006119,SSF53041, SM00857,IPR025827,IPR038109,PS51736,cd03768, IPR006118,PF13408,G3DSA:3.40.50.1390,PF07508,Coil
MSGKDKIVALYVRVSTGYQVDKDSLPFQKKELKNYCEHVLHIDKKRIEIFEDAGKSGKNTKRPAFERMMDKVKAGQVSHVIVYKIDRITRNLVDFSLMYDNFKYNNVTFISLNEQFDTSSAIGEAILKIILVFAELERKLTSERVTDVMIGRAQNGQWNGARVPYGWDWDEEKQMPVHSKKEAQYGIDMYNRYLNGYSTLRIARYNNEHSIPTKRGGEWSSKTVGDFLRNPMNKGDYRYNYRNSARGKKKAKEEVVYIKNVFPPLIDPTIFDEVNRRLDENYKKQNTNYMFPIRKQCNIFSGLIICGKCGAHYQVCRKDERRLDGFRPSNYVCTRKRQKAICDSLNVSEVKIGPFMINYIAAMVDISQKRKKLKDKKELEQLILSHMQFTDLAGIADDSLQETMDLLYGRSTNIWSSSPIEKESQDNENKKNKLKENLQKTDRALERLKKAYLFDDDAMDEKEFLEMKSKLEIDRVKIENEIKDIDNDAIANNVNQIDFIKTASQFLIIHKINSGEFIDYRSLAILDEESMKAFMNSVIDHIVVLNRQITEIVFKNGLSHKLLYR

SEQ ID NO: 1560 - protein, 565 aa, Unknown
  Description of Unknown: Integrase B1561 sequence
  PTHR30461:SF3,cd00338,SM00857,G3DSA:1.10.10.2600,IPR036162, PF13408,IPR025827,G3DSA:3.40.50.1390,PS51737,IPR006119, IPR038109,PF07508,SSF53041,IPR011109,PTHR30461, PS51736,Coil,PF00239
MAKKKKPAGGIAVIYARYSSHNQRDVSIEQQIEACRKHAAELGLTIIATYEDRAISGRTDNRPAFQRLMHDAEKGKFSYVLAWKSNRMGRNMMQAMVNESRLMDCGIKVYYAEEDFDDSAAGRFALRSMMNVNQFYSDNLAEDVRRGLMDNANKCMVNGRQPLGYKRGKDGKVVVDEPAAAIVREVYARVASGELFTDIARDLNRRGIKTADKGEWNKNSFHRLCSNEKYRGIYIYGDVRIEGGIPTIIGDTLWYKVQEALRVKKLKRNGRHRPGDEDYLLTGKLRCGKCGGYMIGMSGRSKTGDIHYYYACQNRRVGRTCDKKNIRRDVIEPAVAQAIKEYCLTDDAIEWIADKTVEYWEKADRNLQLDSIEGDLAAVQSSISNVMKAIEMGVVTETTRDRLIELEKQRTDLKSKLALAKEEVVHVDRKKLISSLLLFRNGDIHDRQYQEDLFKTFLISVYVYDDDDNGHLKIVFNAFGDNNTVDLPIDFGETDNQSAFSDGAEKFDYSLHRSTKKTSEHSGCLFLSYPGYGVHSALAHERSIGHGKHQEKLRFWLYAPALEGW

SEQ ID NO: 1561 - protein, 564 aa, Unknown
  Description of Unknown: Integrase B1562 sequence
  IPR036162,PS51737,IPR011109,PTHR30461,PS00397, PF00239,G3DSA:1.10.10.2600,IPR006119,SSF53041,cd00338, SM00857,IPR025827,IPR038109,PS51736,IPR006118, PF13408,G3DSA:3.40.50.1390,PF07508,Coil
MPRAQKAAIYCRVSTLHQVDKDSLPMQRQDMINYARYALGIEDYEVFEDAGYSGKNTDRPAFQDMMERIEAGEFSHVLVWKIDRISRNLLDFATMYARCKKLGVTFVSKNEQFDTSTAMGEAMLKIILVFAELERNMTSERVSSTMNARAAEGKWNGGRVPFAYRYDRETDSFSIRDDEARIALELKDIYLRTHSLTYTARLLNEAGRRTRRGYAWTPATVAIILRSPFYRGTYRYNYRDESETTFSFKNKNDWIMCAKHHPPLFSEADCRQIDFWLTKNQRRHGKATHVQRKLVHVFAGLIRCGFCGSNYIASIDRVRASGYQPSMYNCGGRRQKGMCKNRYVTDIRIGGFIFNYISNVIRLRDAFRPQWSKARIQRFLLHGDDFCGASLSDDALRRVRAALLGSRLSTAEYQPADEQHDDSATQTRKANLQAELEKNRRALSRLMHLFLYAEDEMPQADFLREKKHLQDTIARLQAELEKARQSSVFASSLTDEEFLDKAARLLFQSAMVRGGIDFPELAMRVGNLELKNFVNAVIKQIVVLDGHVTQITFVNGETHTFLYH

SEQ ID NO: 1562 - protein, 564 aa, Unknown
  Description of Unknown: Integrase B1563 sequence
  PTHR30461:SF3,SM00857,G3DSA:1.10.10.2600,IPR036162,PF13408, IPR025827,G3DSA:3.40.50.1390,PS51737,IPR006119,IPR038109, PF07508,SSF53041,IPR011109,PTHR30461,Coil, PS51736,cd00338,PF00239
MREVEILKKKQLKCYLYTRVSTSMQVDGYSLDAQRDKLRKYAAYEDMIVAGEYSDEGFSGKNIQGRQEFQRMLNDIQDGKDDVSYVLVFKLSRFGRNAADVLNSLQLMQDFGVNLICVEDGIDSSKDAGKLMISVLSAVAEIERENIRTQTMAGREQKAREGKWNGGFAPYGYKLENGNLVIAEDEVEVIRVIYDRYIHTNEGVAGVAKYLNRNGYTKKLRQNNTIPGFSRDFVKNVLYNPVYMGKIAYGRRRTEKKQGTRNEMHVVEQSEFPVYEGQHEAIISEEDWYLAQEKRKINSFKREKVNNPDHAHILSGILKCPCCGKSMYGNIAKAHSKDKKTRYYYYCKNTVTPTGHECSFRLNIEQTEINKFVAKVISAMVNNPRFVEAIQAKIGTAVDTEDMERQIAVLQGRLKQAFGTKSRLERQMDTLDINDAHYDRKILDLQRRYDEQYDTIEEIEVQIGELQSQIRSIQQEKISGDNIYRLLLAFDEVYHSATEAEQKEFMKAFIERIEMFPEKRKDGSWIKKIVFNFPVPIDGEEVKELPLETETTVEVCSSYIRADK

SEQ ID NO: 1563 - protein, 564 aa, Unknown
  Description of Unknown: Integrase B1564 sequence
  SM00857,G3DSA:1.10.10.2600,IPR036162,PF13408,IPR025827, G3DSA:3.40.50.1390,PS51737,IPR006119,IPR038109,PF07508, IPR011109,SSF53041,PTHR30461,Coil,PS51736, cd00338,PF00239
MNIYHTRERLRTRSIYDLNLRVAFYARVSTDSEDQQVSIEHQTQYYKEFIKSNRNWKFAKGYIDNGISGIQTKHREQFKEMLEDAKNGKFDMLITKEITRFARNTLDSIQYTRQMLSWGVCVWFQNDNINTIDEDSELRLTIMAGVAQDEVRKLSNRVKFGHKQSIKNGVVLGNSRIYGYDKKDGKLTINESEAQMVRMIFEDYASGEWTTPQLEKKLYNMGYRNYKGGKIDRNVIRHIIRNPKYKGYYAGGKVKIVDMFTKKQEFLPESEWVMFKDDGSHVPQIVDEEVWKKANEYIDARGEIVKTRRTSIKKSENVFTGMLICGNDGASYWLKQRTLRGKEDVKWVCSKKIKEGAASCDSFYIDDRELREVIAKLICESSGDIEQIAEKFIKIYHSSMNQADASTEIKRLEKQINVAERKSDKLLEYNLDGAISDAVFIEKSQKLEAQIEEYKKQIEKLSTIQDDIVPIENQIRAIAHSVKQLDGISPDDITKTVVDSFLKKIVVNPIGEKEAKLVFYLKDGITTEMSFVSGKSMRCSVNLFKKMIEQQERQMSGSSQNEQY

SEQ ID NO: 1564 - protein, 564 aa, Unknown
  Description of Unknown: Integrase B1565 sequence
  PTHR30461:SF3,SM00857,G3DSA:1.10.10.2600,IPR036162,PF13408, IPR025827,G3DSA:3.40.50.1390,PS51737,IPR006119,IPR038109, PF07508,IPR011109,SSF53041,PTHR30461,PS51736, cd00338,PF00239
MARAAKQDNNSEIIDGVIYARYSEGPNQTEASIEGQVRECKEYAKRNGIRIINVYSDSKHTGTNDNRAEFQKMLRDSRRGGFSVVVVWKIDRFGRNRAEMAQNKALLKLQGVKVVSAKEYIPDSPEGIILESVLEGMAEYYSANLSQNIKRGMKENALHCKSNGSGKSLGYIVDKDGYFEIEPNEATIVKTIFQKYDEGMKIADIWREIVASGAKTKRGKDFTQYGISRVLSNRAYIGEYRYGDIVTPGGMPRIIDDDLFNRVQERRALRKKAPASRRSNSDVDFLLTGKVFCGHCKGTMRGMSGTSKTGRKFYYYACHDKIFKHNKCTKKNVKKEWLETEVTRITKDDILNKETIEFIADRVVEIQRQEQEDTSMLRYYEQQLRDTQSAINNIMKAIEAGIITSSTKSRLFELEEQKSIIEGEIEREKIITPVIEKEQVIFSLERFFGGDINNKEYQRNIIDMFVNKVILYDDKIIITYNISSQNEISVDVVEQAAFAALDECSSKLSLAPPAGACPCTRSALLYVRRFFYCRSSILSKTQPLFRRGRHFPSSFFCKHTKSPL

SEQ ID NO: 1565 - protein, 564 aa, Unknown
  Description of Unknown: Integrase B1566 sequence
  PTHR30461:SF3,SM00857,G3DSA:1.10.10.2600,IPR036162,PF13408, IPR025827,G3DSA:3.40.50.1390,PS51737,IPR006119,IPR038109, PF07508,IPR011109,SSF53041,PF00239,PTHR30461, PS51736,Coil,cd00338
MINRYERLNQELKMVETKRKVAAYCRVSTDNEDQANSFESQQRYFRQYIERNPDWELYEIFADEGISGTNTKKRKEFNRMIACAKNGDFDLIITKEISRFARNTLDSIYYTRELKKHGVGVIFMNDNINTLDGDAELRLAIMSSIAQEESRKTSERVKWGQKRQMEQGVVFGRSMLGYDVEGGKMTINEEGAKVVRLIFHKFVNEGKGTHVIARELREEGISPMRVKEWSNTVILRVIRNEKYCGDLVQKKTYTPDFLSHEKKYNRGQEEFVIIKDHHEPIISRELFDEANRILDAKSLSQEGKAKHSNRYPFSGKIKCGCCGSSYVARYKTRKDGSRYKAWRCNEAAKHGSPHIDKAGNQVGCTGLSIRNEDATHIMYLVTKSLKYNRNKIINNLTAVIQSIIAMDTTGTDVLKLQEQIKKIEGKRANLIDLYMSNLINKDEFTATRASCDAEIEELQSIIESVDKQREMIEQQQQLLKEIEDAIKEIVSGVEYEDEFYKHILDKMVVQDKDNIDVYLNLLPMKWSYTVAKASKKAVASEWNISEASLPISVKRPLSSGYGML

SEQ ID NO: 1566 - protein, 564 aa, Unknown
  Description of Unknown: Integrase B1567 sequence
  SM00857,G3DSA:1.10.10.2600,IPR036162,PF13408,IPR025827, PS51737,G3DSA:3.40.50.1390,cd03770,IPR006119,PF14287, IPR038109,IPR011109,SSF53041,PF07508,PTHR30461, PS51736,IPR025378,PF00239
MATANYIKGQNETKITALYCRLSQDDGREGESNSISNQKEILLAYAQQNNFPNPQFFTDDGFSGTTFDRPSFIQMENLVEQGVVDTIIVKDLSRFGRNYLDVGNYLEIKYPTLGVRFIAIQENVDTLKETGTEMMPFNNIFNEWYAAQTSKKIRAVWKNKAANGKRVSPSVPFGYVRNPQNKEDWLVDEPAAEVVRKIYALCLDGRGPSQIARQLEQEKVLIPTAYYASLGRKTRKQYTDPYAWDQKTVAGILVNQQYTGCTVNFMTTTISYKVHKTVYKPKDEWQIIPNTQPAIIDEDTWKRVQELREHRIRPTATGRTSLFSGKAFCADCGSKLHFCAAKSLNANQEYYRCSNYKSGRGSCQIHFIRNVVLEKIVLEAINSLADFVRCYEPVFLYLMVQKDIVSKRTETSKLKTAIESGKRRIQDLDKLIERIYEDQVLGNISAERYARMSVNYENEQRTLINKVAEDEKKLACIEQTSLDLKTLLKVLRSSTSFDELTPTLVNSLIRRIEVHNNDKSSGHCYVKVDIYFTAIGLIDIPTEDEIKSLMAKIKANPQEYRLTA

SEQ ID NO: 1567 - protein, 564 aa, Unknown
  Description of Unknown: Integrase B1568 sequence
  PTHR30461:SF3,SM00857,G3DSA:1.10.10.2600,IPR036162,PF13408, PS51737,IPR025827,G3DSA:3.40.50.1390,IPR006119,IPR038109, PF07508,IPR011109,SSF53041,PTHR30461,Coil, PS51736,cd00338,PF00239
MREVEILKKKQLKCYLYTRVSTSMQVDGYSLDAQRDKLRKYAAYEDMIIAGEYSDEGFSGKNIQGRQDFQRMLNDIQDGKDDVSYVLVFKLSRFGRNAADVLNSLQLMQDFGVNLICVEDGIDSSKDAGKLMISVLSAVAEIERENIRTQTMAGREQKAREGKWNGGFAPYGYKLENGNLVIAEDEVEVIRVIYDRYIHTNEGVAGVAKYLNRNGYTKKLRQNNTIPGFSRDFVKNVLYNPVYMGKIAYGRRRTEKKQGTRNEMHVVEQSEFPVYEGQHEAIISEEDWYLAQEKRKINSFKREKVNNPDHAHILSGILKCPCCGKSMYGNIAKAHSKDKKTRYYYYCKNTVTPTGHECSFRLNIEQTEINKFVAKIISAMVNNPRFVEAIQAKIGTAVDTEDMEKQIAVLQGQLKQAFGTKSRLERQMDTLDINDAHYDRKILDLQRRYDEQYDTIEEIEVQIGELQSQIRSIQQEKISGDNIYRLLLAFDEVYHSATEAEQKEFMKAFIERIEMFPEKRKDGSWIKKIVFNFPVPVDGEEVKELPLETETTVETVVLMSRKDK

SEQ ID NO: 1568 - protein, 564 aa, Unknown
  Description of Unknown: Integrase B1569 sequence
  PTHR30461:SF3,SM00857,G3DSA:1.10.10.2600,IPR036162,PF13408, IPR025827,G3DSA:3.40.50.1390,PS51737,IPR006119,IPR038109, PF07508,SSF53041,IPR011109,PF00239,PTHR30461, PS51736,Coil,cd00338
MINRYERLNQELKMVETKRKVAAYCRVSTDNEDQVNSFESQQRYFRQYIERNPDWELYEIFADEGISGTNTKKRKEFNRMIACAKNGDFDLIITKEISRFARNTLDSIYYTRELKKHGVGVIFMNDNINTLDGDAELRLAIMSSIAQEESRKTSERVKWGQKRQMEQGVVFGRSMLGYDVDGGKMTINEEGAKVVRLIFHKFVNEGKGTHVIARELREEGISPMRVKEWSNTVILRVIRNEKYCGDLVQKKTYTPDFLSHEKKYNRGQEEFVIIKDHHEPIISRELFDEANRILDAKSLSQEGKAKHSNRYPFSGKIKCGCCGSSYVARYKTRKDGSRYKAWRCNEAAKHGSPHIDKAGNQVGCTGLSIRNEDATHIMYLVTKSLKYNRNKIINNLTAVIQSIIAMDTTGTDVLKLQEQIKKIEGKRANLIDLYMSNLINKDEFTATRASCDAEIEELQSIIESVDKQREMIEQQQQLLKEIEDAIKEIVSGVEYEDEFYKHILDKMVVQDKDNIDVYLNLLPMKWSYTVAKASKKAVASEWNISEASLPISVKRPLSSGYGML

SEQ ID NO: 1569 - protein, 564 aa, Unknown
  Description of Unknown: Integrase B1570 sequence
  cd03768,PTHR30461:SF3,SM00857,IPR006118,G3DSA:1.10.10.2600, IPR036162,PS51737,G3DSA:3.40.50.1390,IPR006119,IPR038109, PF07508,IPR011109,SSF53041,PTHR30461,PS00397, PS51736,Coil,PF00239
MEKKQKSALYVRVSTTHQIDKDSLPLQRSDLINYTKYVLGINDFEIFEDAGYSGGTTDRPAYQDMMNRIKMGEFTHLIVWKIDRISRNLRDFSDMYDELKKYNVTFISRNEQFDTSTAMGEAMLKIILVFAELERKLTGERVFSVMISRAQKGLWNGATVPLGYEWDPETKFPRPCDKEAKIVQYIFDQYEEIKSTTKVAKKLNIENIPTKRNGTWTPRTVGSILTNPFYIGTYRYNTKTKKTRRWKDKSEWVVLENNHQAIVNTEQFERVSQIIQNNYKGDKNYQRSSTNVHILSGLASCHKCGKKMHSGLDRARKDGFTPSRYTCYAFNVNYTCANYSSDLAILPGLINYIANYMTLQERITARHSLRDMESILLRGKYFEDIDHIEKQDLKNTYDLLINNKMVTYNSFEEKNKEAIISQNVIYEAEKEKYEKALKRLDDLYLYDVNSMSQKDFVIKRKEISDKIENINKKIQEVKFNDTPFINNKDFNLLSKASFYLLTKNLSSVKNIDVISLLNNLDRQTIKDFINTIITDVSVEKGKIYNITFKNGIVHHFIYKNEHKI

SEQ ID NO: 1570 - protein, 564 aa, Unknown
  Description of Unknown: Integrase B1571 sequence
  PTHR30461:SF3,SM00857,G3DSA:1.10.10.2600,IPR036162,PF13408, PS51737,IPR025827,G3DSA:3.40.50.1390,IPR006119,IPR038109, PF07508,IPR011109,SSF53041,PF00239,PTHR30461, PS51736,Coil,cd00338
MKSMKFPIDLSMLTEEEIDQFRQDPSTLFEGDTDVSLYLRFSSERQREQSIEGQLRDCRSFCKVNRYRIAAIYVDRATTARKDVEKRIHFQEMIRDSEKKPWKYVIVWKLDRFARNRTDSALFKFRLRKNGVRVISATEAISEKPEGIILEAVLEGMAEFYSADLSQKITRGMRESALKCHSIGGHVPLGYKIEDHKLVVDPNTAHIVQEAFQLYANGETVAEICRMFNTKGYRTAKGAEFNRNSFKSMFRNERYIGVYTYRDIRIEGGVPAIIDKELFETVSHRLSVNAEAPARGKAKVDYLLAGKLFCGHCGGSMNGESGTSKTRAVHNYYTCYSRKRHHSCDKRPLKKEWIERIVAQDAMELMTDEVIEELADMAMAQTDQDLKENTRIPELTERKKEIESGIANITKAIEKGIASDSLMERLVELEKDKKKILRLLEEEEKYVCRIDREQIIFWLEKFKGGNLEDEGFRRIIIDLIVNSVTVWDEPDGFRITTAYNLTSCKNKTYRVSPSSGKGFGFEGSESTIKSREIKRFRGFLQLFGEIYMDANRAFPANFGDFREY

SEQ ID NO: 1571 - protein, 564 aa, Unknown
  Description of Unknown: Integrase B1572 sequence
  PTHR30461:SF3,SM00857,G3DSA:1.10.10.2600,IPR036162,PF13408, PS51737,IPR025827,G3DSA:3.40.50.1390,IPR006119,IPR038109, PF07508,IPR011109,SSF53041,PTHR30461,Coil, PS51736,cd00338,PF00239
MKKFPIDLSCLTEEEISQFQEDPYTLYNGDQDVALYLRYSSTGQSDQSIEGQLRDCRTFCKANHYRIVAIYVDRATTARKDVEKRVHLMEMVADSAKQNWEYVIVWKLDRFARNRNDSAIMKMRLRKNGVKVLSATEHLTDSPESIILESVLEGMAEFFSAELSQKVTRGMRESALKCHSVGGHIPLGYKVENHKLVVDPDTAHIVQEAFSLYANGESVADICRKFNSAGYKTAKNTEFNRSSFKAMFRNTRYIGTYTYKDIVIENGIPAIIDKELFETVQRRLSKTATAPARGKAKVDYLLSGKLFCGHCGASMNGESGAGRHGKVYHYYSCYTKKRKLGCDKRPLKKDYIEGIVARDALNLLTDQLIDEIADMAIRQSEQDLINDTHIPQLTAQLSEVEKSITNITAAIEKGIASETLMNRLVQLEHEKKTLNKEIKAEEKFVYRIDRGQIVFWLSQFKYGNIEDEDFRRRLIDLLVNSVTVWDEPDGYKITTAYNLTSCKTKTFRVEKNPAAEEATGFDFGESECAKKTRNRKASGLFACISCCFLPLLFSDPNADPNGSG

SEQ ID NO: 1572 - protein, 564 aa, Unknown
  Description of Unknown: Integrase B1573 sequence
  IPR036162,PS51737,IPR011109,PTHR30461,PS00397, PF00239,G3DSA:1.10.10.2600,IPR006119,SSF53041,cd00338, SM00857,IPR025827,IPR038109,PS51736,IPR006118, PF13408,G3DSA:3.40.50.1390,PF07508,Coil
MPRAQKAAIYCRVSTLHQVDKDSLPMQRQDMINYAKYVLGIEDYEVFEDAGYSGKNTDRPAFQEMMERIERGEFSHVLVWKIDRISRNLLDFATMYARCKKLGVTFVSKNEQFDTSTAMGEAMLKIILVFAELERNMTSERVSSTMNARAAEGKWNGGRVPFAYRYDRETDSFSIRNDEAKVALELKDTYLRTHSLTYTARLLNEAGRRTRRGYAWTPATVAIILRSPFYRGTYRYNYRDESETTFSFKGRNEWIMCAKHHPPLFSEADCRQIDFWLTKNRRQHGKATHVQRKLVHVFAGLIRCGFCGSNYIASIDRVRASGYQPSMYNCGGRRQKGMCKNRYVTDIRIGGFIFNYISNVIRLRDAFRPQWSKARIQRFLLHGDDFCGASLSDDTLRRVRAALLGSRLSTAEYQPADEQHDDSPTQTHKANLQAELEKNRRALSRLMHLFLYAEDEMPQADFLREKKHLQDTIARLQAELEKARQSSVFASSLTDEEFLDKAARLLFQSAMVRGGIDFPGLAMRVGNLELKNFVNAVIGQIIVLDGRVTQITFRNGEVHTFLYA

SEQ ID NO: 1573 - protein, 564 aa, Unknown
  Description of Unknown: Integrase B1574 sequence
  cd03768,PTHR30461:SF3,SM00857,IPR006118,G3DSA:1.10.10.2600, IPR036162,PS51737,G3DSA:3.40.50.1390,IPR006119,IPR038109, PF07508,IPR011109,SSF53041,PTHR30461,PS00397, PS51736,Coil,PF00239
MEKKQKSALYVRVSTTHQIDKDSLPLQRSDLINYTKYVLGINDFEIFEDAGYSGGTTDRPAYQDMMNRIKMGEFTHLIVWKIDRISRNLRDFSDMYDELKKYNVTFISRNEQFDTSTAMGEAMLKIILVFAELERKLTGERVFSVMISRAQKGLWNGATVPLGYEWDPETKFPRPCDKEAKIVQYIFDQYEEIKSTTKVAKKLNIENIPTKRNGTWTPRTVGSILTNPFYIGTYRYNTKTKKTRRWKDKSEWVVLENNHQAIVNTEQFERVSQIIQNNYKGDKNYQRSSTNVHILSGLASCHKCGKKMHSGLDRARKDGFTPSRYTCYAFNVNYTCANYSSDLAILPSLINYIANYMTLQERITARHSLRDMESILLRGKYFEDIDHIEKQDLKNTYDLLINNKMVTYNSFEEKNKEAIISQNVIYEAEKEKYEKALKRLDDLYLYDVNSMSQKDFVIKRKEISDKIETINKKIQEVKFNDTPFINNKDFNLLSKASFYLLTKNLSSVKNIDVISLLNNLDRQTIKDFINTIITDVSVEKGKIYNITFKNGIVHHFIYKNEHKI

SEQ ID NO: 1574 - protein, 564 aa, Unknown
  Description of Unknown: Integrase B1575 sequence
  IPR036162,PS51737,IPR011109,PTHR30461,PS00397, PF00239,G3DSA:1.10.10.2600,IPR006119,SSF53041,cd00338, SM00857,IPR025827,IPR038109,mobidb-lite,PS51736, IPR006118,PF13408,G3DSA:3.40.50.1390,PF07508,Coil
MPRAQKAAIYCRVSTLHQVDKDSLPMQRQDMINYAKYVLSIKDYEVFEDAGYSGKNTDRPAFQEMMERIERGEFSHVLVWKIDRISRNLLDFATMYAKCKKLGVTFISKNEQFDTSTAMGEAMLKIILVFAELERNMTSERVASTMNARAAEGKWNGGRVPFAYAYDRETDSFSIRDDEAKVALELKDTYLRTHSLTYTARLLNEAGRRTRRGYAWTPATVAIILRSPFYRGTYRYNYRDESEVTFSFKAQKEWILCAKHHPPLFSEADCRQVDYWLDKNRRHHGKATHVQRKHVHIFAGLIRCGVCGSNYAASVDRARPSGYQPSMYNCGGRRQKGTCRNRYVTDIRIGGFVFNYISNVIRLRDAFRLQWSKARIQRFLLHGDAFHGALLSDDTLRHVRAALLGSHAGTAEYHPADEQRDGSAEQARKSNLQAELEKNRRALSRLMHLFLYAEDELPQADFLREKRYLQDNISRLQGELEKEQQPSVFASSLTDEDFLRKAAHLLFQSAMTRGGIDFPELAMHVGNLELKNFINTIIKQIVVLDGHVTQITFANDEIHTFLYH

SEQ ID NO: 1575 - protein, 564 aa, Unknown
  Description of Unknown: Integrase B1576 sequence
  cd03768,PTHR30461:SF3,SM00857,IPR006118,G3DSA:1.10.10.2600, IPR036162,PS51737,G3DSA:3.40.50.1390,IPR006119,IPR038109, PF07508,IPR011109,SSF53041,PTHR30461,PS00397, PS51736,Coil,PF00239
MEKKQKSALYVRVSTTHQIDKDSLPLQRSDLINYTKYVLGINDFEIFEDAGYSGGTTDRPAYQDMMNRIKMGEFTHLIVWKIDRISRNLRDFSDMYDELKKYNVTFISRNEQFDTSTAMGEAMLKIILVFAELERKLTGERVFSVMISRAQKGLWNGATVPLGYEWDPETKFPRPCDKEAKIVQYIFDQYEEIKSTTKVAKKLNIENIPTKRNGTWTPRTVGSILTNPFYIGTYRYNTKTKKTRRWKDKSEWVVLENNHQAIVNTEQFERVSQIIQNNYKGDKNYQRSSTNVHILSGLASCHKCGKKMHSGLDRARKDGFTPSRYTCYAFNVNYTCANYSSDLAILPGLINYIANYMTLQERITARHSLRDMESILLRGKYFEDIDHIEKQDLKNTYDLLINNKMVTYNSFEEKNKEAIISQNVIYEAEKEKYEKALKRLDDLYLYDVNSMSQKDFVIKRKEISDKIETINKKIQEVKFNDTPFINNKDFNLLSKASFYLLTKNLSSVKNIDVISLLNNLDRQTIKDFINTIITDVSVEKGKIYNITFKNGIVHHFIYKNEHKI

SEQ ID NO: 1576 - protein, 564 aa, Unknown
  Description of Unknown: Integrase B1577 sequence
  PTHR30461:SF3,SM00857,G3DSA:1.10.10.2600,IPR036162,PF13408, PS51737,IPR025827,G3DSA:3.40.50.1390,IPR006119,IPR038109, PF07508,IPR011109,SSF53041,PF00239,PTHR30461, PS51736,Coil,cd00338
MEVIKYVVAYMRYSSEGQRDGYSIEAQKAAIEEFCKRLGYIIVHFYTDEAKTGTLDNREAFQQMIADSASGNFQAVIVHKFDRFSRDKYDNAIYKRELRNNGVRVISVLEPLDDSPESLILETLLEGMAQYYSENLAREVKKGQTQKALLAQHCGGIVPYGYSVNPDTSEYEIVPSEAEVVRKIYELYNNGTPTQEIAGHLNALGLKTRLNKTKGGVPFTSQMVRGIIANEKYNGTFIYRKTKRIRAKGRYKTVKQNDDEVIVCEDKVPRIVDNETWVTANKRLRSRTYNTTRAKVEYLLTGLMFCGECGSPFVGGGSVPRYDKEGNEVARYNYYICSKKRKTHDCKCSQVSKERIEDAVIKGIIDYCYNDKSIKIFADDFSQWLETHNNADKAEIARYKSELKKLEQQKGRLVSLALEGVLTPVETKDRKRELEAKITSLQAKLQSMEKTNLPSKKDIMRFMEDTRRDIVNGTFDDYAGLIRQHLARIDVYNGYQIITLKKVPYLTEPDENDGISAYHSPAKSISDSECKPLHYHSVSLMDLPKELTITLRLEKGSHEAVFVA

SEQ ID NO: 1577 - protein, 564 aa, Unknown
  Description of Unknown: Integrase B1578 sequence
  PTHR30461:SF3,SM00857,G3DSA:1.10.10.2600,IPR036162,PF13408, IPR025827,PS51737,G3DSA:3.40.50.1390,IPR006119,IPR038109, PF07508,SSF53041,IPR011109,PF00239,PTHR30461, PS51736,Coil,cd00338
MKKFPIDLSCLTEEEISQFQEDPYTLYNGDQEVALYLRYSSTGQSDQSIEGQLRDCRAFCKANHYRIVAIYVDRATTARKDVEKRVHLMEMVADSAKQNWEYVIVWKLDRFARNRNDSAIMKMRLRKNGVKVLSATEHLTDSPESIILESVLEGMAEFFSAELSQKVTRGMRESALKCHSVGGHIPLGYKVENHKLVVDPDTAHIVQEAFSLYANGESVADICRKFNSAGYKTAKNTEFNRSSFKAMFRNTRYIGTYTYKDIVIENGIPAIIDKKLFETVQQRLSKTATAPARGKAKVDYLLSGKLFCGHCGASMNGESGAGRHGKVYHYYSCYTKKRKLGCDKRPLKKDYIEGIVARDTLNLLTDQLIDEIADMAIRQSEQDLINDTHIPQLTAQLSEVEKSIMNITAAIEKGIASETLMNRLVQLEHEKKTLNKEIKAEEKFVYRIDRDQIVFWLSQFKHGNIEDEDFRRRLIDLLVNSVTVWDEPDGYKITTAYNLTSCKTKTFRVDKNPAAEEATGFDFGESKCTKSHRNRLISMTFAFHKFRFLVLLFSDPNADPNGSG

SEQ ID NO: 1578 - protein, 564 aa, Unknown
  Description of Unknown: Integrase B1579 sequence
  SM00857,G3DSA:1.10.10.2600,IPR036162,PF13408,IPR025827, G3DSA:3.40.50.1390,PS51737,cd03770,IPR038109,IPR006119, PF07508,IPR011109,SSF53041,PF14287,PTHR30461, PS51736,IPR025378,PF00239
MATANYIKGQNEAKITALYCRLSQDDGREGESNSISNQKEILLAYAQRNNFPNPQFFTDDGFSGTTFDRPSFIQMENLVEQGVVDTIIVKDLSRFGRNYLDVGNYLEIKYPTLGVRFIAIQENVDTLKETGTEMMPFNNIFNEWYAAQTSKKIRAVWKNKAANGKRVSSSVPFGYVRNPQDKEEWLVDGAAAEVVRKIYALCLDGRGPSQIARQLEQEKVLIPTAYYASLGRKTRKQYTDPYAWDQKTVAGILVNQQYTGCTVNFMTTTVSYKVHKTVYKPKDEWQIIPNTQPAIIDEDTWKRVQELREHRIRPTATGRTSLFSGKVFCADCGSKLHFCAAKSLNTNQEHYRCANYKSGRGSCQIHFIRNVVLEKIVLEAINSLADFVRCYEPVFLYLMAQKDIVSKRTETSKLRTAIESGKRRIQDLDKLIERIYEDQVLGNISAERYARMSVNYENEQRTLINKVAEGEKKLACIEQTSLDLKTLLKVLRSSTSFEELTPTLVNSLIRRIEVHNNDKSSGHCYVKVDIYFTAIGLIDIPTEDEIKSLMAKIKANPQEYRLTA

SEQ ID NO: 1579 - protein, 564 aa, Unknown
  Description of Unknown: Integrase B1580 sequence
  PTHR30461:SF3,SM00857,G3DSA:1.10.10.2600,IPR036162,PF13408, PS51737,IPR025827,G3DSA:3.40.50.1390,IPR006119,IPR038109, PF07508,IPR011109,SSF53041,PF00239,PTHR30461, PS51736,Coil,cd00338
MRVSVNLNAQKPDTTTNAVIYARYSSHGQTEQSIEGQLAKGHEYAAAQGYTVVHEYIDRAMTGRNDNREAFQKMLSDTGKHQFQVVIVWKVDRFGRNREEIAFNKHTCKKNGVRVEYVAESLPNSPEAVILESVLEGMAEYYSIQLSQNIRRGQLESAKKCQCVGGSVPLGYTLDSDKHFVIDPQTAPVVKKIFDLYAEGATISEITGQLNEQGIRTARKQLFTKNSLTKLLKNEKYIGVYTYKDIVRVEGGVPAIVDESTFDRVQELLKINRRAPSHTWTKVEYLLTDKLFCGHCGSPMVGESGFSHTGAKYSYYGCIKRRREKACDKKPVRQDWIEALVLDETVKLLHDDELMEYIIDRTWEYYQVTDKVQEEKAVLEAQLAEVDKAINNLVRAIEAGIFNAATKSRMDELDAQKAALTASLADLELTSGIRITRDHIEYFLLRLRDLDVKDRECQKRLVQTFVNAVFIYDDGRVKITYNYSGQSSTITLNQIASAEKGKGFVCCLPCSTSSPRFPRGVAALFLFWGKSGVNRLPISAVLCNNGSEPLRGWCWMCRAAIAPG

SEQ ID NO: 1580 - protein, 564 aa, Unknown
  Description of Unknown: Integrase B1581 sequence
  PTHR30461:SF3,SM00857,G3DSA:1.10.10.2600,IPR036162,PF13408, PS51737,G3DSA:3.40.50.1390,IPR025827,IPR006119,IPR038109, PF07508,IPR011109,SSF53041,PF00239,PTHR30461, PS51736,Coil,cd00338
MKKFPIDLSCLTEEEISQFQEDPYTLYNGDQNVAIYLRYSSTGQSDQSIEGQLRDCRTFCKANHYRIVAIYVDRATTARKDVEKRVHLMEMISDSAKQNWEYVIVWKLDRFARNRNDSAIMKMRLRKNGVKVLSATEHLTDSPESIILESVLEGMAEFFSAELSQKVTRGMRESALKCHSVGGHIPLGYKVENHKLVVDPDTAHIVQEAFSLYANGESVADICRKFNSAGYKTAKNTEFNRSSFKAMFRNTRYIGTYTYKDIVIENGIPAIIDKELFETVQRRLSKTATAPARGKAKVNYLLSGKLFCGHCGASMNGESGAGRHGKVYHYYSCYTKKRKLGCNKRPLKKDYIEGIVARDALNLLTDQLIDEIADMAIRQSEQDLINDTHIPQLTAQLTEVEKSITNITAAIEKGIASETLMNRLVQLEHEKKTLNKEIKAEEKFVYRIDRDQIVFWLSQFKYGNIEDEDFRRRLIDLLVNSVTVWDEPDGYKITTAYNLTSCKAKTFRVEKNPAAEEATGFDFGESECTTRRKRRIACDEFFRFITKLIAHSLCCSSLPNRSPA

SEQ ID NO: 1581 - protein, 564 aa, Unknown
  Description of Unknown: Integrase B1582 sequence
  PTHR30461:SF3,IPR036162,PS51737,IPR011109,PTHR30461, PS00397,PF00239,G3DSA:1.10.10.2600,IPR006119,SSF53041, cd00338,SM00857,IPR025827,IPR038109,PS51736, IPR006118,PF13408,G3DSA:3.40.50.1390,PF07508,Coil
MPRAQKAAIYCRVSTLHQVDKDSLPMQRQDMINYAKYVLSIEDYEVFEDAGYSGKNTDRPAFQEMMERIEHGEFSHVLVWKIDRISRNLLDFATMYAKCKKLGVTFISKNEQFDTSTAMGEAMLKIILVFAELERNMTSERVTATMIARAADKQWNGGRVPYGYHYDKASKTFSIREDEAVVVRQIYDLYAKLKSLQYTADALNRDGLKTRRGYEWSAATCHIILSSPFYLGTLRYNYRDESEKTFSFKDKSEWVLVPNHHDPLVTQEQYDYCQYWLAKNAKRNGHQHAQRAHIHIFAGLIHCGYCGALMVASQGARHANDYRPSIYVCGSKRQHKNCPNKFTYDPEVGNFVFRYISNMIHLKAIFKPSMREQRIERVLTDGLPGLHIRDASSLSALRRMLLAQSDARTYSSTQEAPQKQNQKLMKEKTALLAEIRKQQRALSRLDELFLFADSPMPQKDYLLKKQQILDKIVACQEQLHRLRQDSIFTSTLSDEQFVFQASSLLLQKALQEQRIDIQQLTADVGRPALKDFVGFVITSIVSKDGKVMEITFRNGMTHTFQYDA

SEQ ID NO: 1582 - protein, 564 aa, Unknown
  Description of Unknown: Integrase B1583 sequence
  SM00857,G3DSA:1.10.10.2600,IPR036162,PF13408,PS51737, IPR025827,G3DSA:3.40.50.1390,IPR006119,IPR038109,PF07508, IPR011109,SSF53041,PF00239,PTHR30461,PS51736, Coil,cd00338
MNIYHTRERLRTRSIYDLNLRVAFYARVSTDSEDQQVSIEHQTQYYKEFIKSNRNWKFAKGYIDNGISGIQTKHREQFKEMLEDAKNGKFDMLITKEITRFARNTLDSIQYTRQMLSWGVCVWFQNDNINTIDEDSELRLTIMAGVAQDEVRKLSNRVKFGHKQSIKNGVVLGNSRIYGYDKKDGKLTINESEAQMVRMIFEDYASGEWTTPQLEKKLYNMGYRNYKGGKIDRNVIRHIIRNPKYKGYYAGGKVKIVDMFTKKQEFLPESEWVMFKDDGSHVPQIVDEEVWKKANEYIDARGEIVKTRRTSIKKSENVFTGMLICGNDGASYWLKQRTLRGKEDVKWVCSKKIKEGAASCDSFYIDDRELREVIAKLIRESSGDIEQIAEKFIKIYHSSMNQADASTEIKRLEKQINVAERKSDKLLEYNLDGAISDAVFIEKSQKLEAQIEEYKKQIEKLSTIQDDIVPIENQIRAIAHSIKQLDGISPDDITKTVVDSFLKKIVVNPIGEKEAKLVFYLKDGITTEMSFVSGKSMRCSVNLFKKMIEQQERQMSGSSQNEQY

SEQ ID NO: 1583 - protein, 564 aa, Unknown
  Description of Unknown: Integrase B1584 sequence
  PTHR30461:SF3,SM00857,G3DSA:1.10.10.2600,IPR036162,PF13408, IPR025827,G3DSA:3.40.50.1390,PS51737,IPR006119,IPR038109, PF07508,IPR011109,SSF53041,PTHR30461,PS51736, cd00338,PF00239
MARAAKQDSNSEIIDGVIYARYSEGPNQTEASIEGQVRECKEYAKRNGIRIINVYSDSKHTGTNDNRAEFQKMLRDSRRGGFSVVVVWKIDRFGRNRAEMAQNKALLKLQGVKVVSAKEYIPDSPEGIILESVLEGMAEYYSANLSQNIKRGMKENALHCKSNGSGKSLGYIVDKDGYFEIEPNEATIVKTIFQKYDEGMKIADIWREIVASGAKTKRGKDFTQYGISRVLSNRAYIGEYRYGDIVTPGGMPRIIDDDLFNRVQERRALSKKAPASRRSNSDVDFLLTGKVFCGHCKGTMRGMSGTSKTGRKFYYYACHDKIFKHNKCTKKNVKKEWLETEVTRITRDDILNKETIEFIADRVVEIQRQEQEDKSMLHYYEQQLRDTQSAINNIMKAIEAGIITSSTKSRLFELEEQKSIIEGEIEREKIITPVIEKEQVIFSLERFFGGDINNKEYQRNIIDMFVNKVILYDDKIIITYNISSQNEISVDVVEQAAFAALDECSSKFSLAPPAGACPCTQSALLYVGRFFYCRSSILTKIQPLFLRGGHFPSSFFCKHTKSPL

SEQ ID NO: 1584 - protein, 563 aa, Unknown
  Description of Unknown: Integrase B1585 sequence
  PTHR30461:SF3,IPR036162,PS51737,IPR011109,PTHR30461, PS00397,PF00239,G3DSA:1.10.10.2600,IPR006119,SSF53041, SM00857,IPR025827,IPR038109,PS51736,cd03768, IPR006118,PF13408,G3DSA:3.40.50.1390,PF07508,Coil
MDEKIVALYVRVSTGYQVDKDSLPFQKKELRGYCEHVLHIDKKRIEIFEDAGRSGKNTKRPAFERMMEKVKSGQVSHVIVYKIDRITRNLVDFSLMYDDFKYNNVTFISLNEQFDTSSAIGEAILKIILVFAELERKLTSERVKDVMIGRAQNKQWNGARVPYGWDWDAEKKCPVHSEKEAPYAKAMYRMYLDGGSSVTICDYNNSHNIPTKRGGEWTSKTVADFLRNPINKGDYRYNYRESARGKKKSDDEVIYIKGVFPPLIDPKIWDEVNRRMDANSQNRNTSVFHPIRKRCNVFAGLMICGKCGSGYQVKGKDSRKGDGFRPSSYACTGKYQKKNCDNLNVSDVKIGPFVLNYIAAMVDASKSRRFIKDCDSLEQVILSHISFSDVAGISASSLQDTLDLLFGRSGSELLSGKPVSSETADGSKTEELKEKLQRTDRALERLKKAYLFDDDGMDEKEFLEMKSKLEVDRIKLENSIKGLESSSISENVDQAAFLKSASQFLISHKINSGDYIDYSRLAALDEESMKAFVNSIIDHIVVLDKRITEIVFKNGLTHTLLYR

SEQ ID NO: 1585 - protein, 563 aa, Unknown
  Description of Unknown: Integrase B1586 sequence
  PTHR30461:SF3,IPR036162,PS51737,IPR011109,PTHR30461, PS00397,PF00239,G3DSA:1.10.10.2600,IPR006119,SSF53041, SM00857,IPR025827,IPR038109,PS51736,cd03768, IPR006118,PF13408,G3DSA:3.40.50.1390,PF07508,Coil
MDEKIVALYVRVSTGYQVDKDSLPFQKKELRAYCEHVLHINKKRIEVFEDAGRSGKNTKRPAFERMMEKVKSGQVSHVIVYKIDRITRNLVDFSLMYDDFKYNNVTFISLNEQFDTSSAIGEAILKIILVFAELERKLTSERVKDVMIGRAQNKQWNGARVPYGWDWDAEKKCPVHSKKEAPYAKAMYQMYLDGGSSVTICDYNNSHNIPTKRGGEWTSKTVADFLRNPINKGDYRYNYRESARGKKKSDDEVIYIKGVFPPLIDPNIWDEVNRRMDANSQNRNTSVFHPIRKRCNVFAGLMICGKCGSGYQVKGKDSRKGDGFRPSSYACTGKYQKKNCDNLNVSDVKIGPFMLNYIAAMVDASKSRRFIKDSESLERVILSHISFSDVAGISVSSLQDTLDLLFGRSGSELLSGKPISSGATDESKTTELKEKLQRTDRALERLKKAYLFDDDGMDEKEFLEMKSKLEVDRIKLENSIKGLESSSISENVDQAAFLKSASQFLISHKINSGDYIDYSRLAALDEESMKAFVNSIVDHIVVLDKRITEIVFKNGLTHTLLYR

SEQ ID NO: 1586 - protein, 563 aa, Unknown
  Description of Unknown: Integrase B1587 sequence
  PTHR30461:SF3,SM00857,G3DSA:1.10.10.2600,IPR036162,PF13408, IPR025827,G3DSA:3.40.50.1390,PS51737,IPR006119,IPR038109, PF07508,IPR011109,SSF53041,PF00239,PTHR30461, PS51736,Coil,cd00338
MEGKPDMNIIPIDLSALTDAEKALFFEYRDVLSASWTEVVCFYLRYSSDRQTEQSIEGQLRDLLMYCRLHAYRVAAIYVDRAISAHASMEKRPAFQMMLADSATSVWKTVLVYKLDRFARNREDSMVARIRLRKNGCRVESAKENISKNPEGIILESVLEGINEYYSEELRQKVMRGNRESAMKGQTLGGVTPFGYKTENKRLVPDPMTAPVVQEIFTRYAAGDRLVSIARDLNQRGYRTTKGHPFGKSSFKTIFRNTRYIGVYKYMDITKEDPSLRIVSDEQWEAVQSKLSDTASAPGRGKARNPYLLSGKLFCGHCGAPMVGECGRGRHGQTYYYYSCANRKGKKSCDKKPVPKEWIEHIVAEDAAALLTDDFIEDVAEKAAQQSEADFRANTRIPALESQIADIDSRIRNLTKAIETSGSALDVLVSRLQELTTQKSALEAELRSESAGVIHLTKEMVIFFLEGVRDKIIQPENRDAILIRMFVNSVMLYDDGPGFFKFETAYNLTGIPQKTYKIPINSASAELQKCSDFGRSGVPLDANSNQIQVVGLIFIQTKRHALP

SEQ ID NO: 1587 - protein, 563 aa, Unknown
  Description of Unknown: Integrase B1588 sequence
  PTHR30461:SF3,IPR036162,PS51737,IPR011109,PTHR30461, PF00239,G3DSA:1.10.10.2600,IPR006119,PF14287,SSF53041, IPR025378,SM00857,IPR025827,cd03770,IPR038109, PS51736,mobidb-lite,PF13408,G3DSA:3.40.50.1390,PF07508,Coil
MNQSNQIRKTALYCRLSQDDGIEGDSNSIQNQKAILQKFAEDHHFPSPCFYVDDGFSGGTFQRPAFQQMISDMENGEIGIIVTKDLSRLGRNQLHTGLYIEERFPMFGVRYIAINDNVDTDSSESNNLMPFKNLFNEWFIRDTSRKIRAVLKAKAERGERLGTRTPYGYRKDPDTKKLIVDEEAAAIVRRIFAMCAGGSGPSQIARILKKEQILTPTMYAYTRYGITHTCLDTAHPYNWSDSAIANLLENEIYLGNTVNMKYSTKSYKDKRRVEHPREECMVFENTHPALITREVWDMVQRVRKNKRRLTKMEEQSKYSGLVFCADCGSNMVLHRAHTMSASYNHFTCRTYKKDGEACTGHYIRECVLDEIVLEDLRRVTSAAREHPEKFAAYIGSKQSTELQREIRRQEKELAAMRKRKMELDTIFKKLYEDSVLGRITTEQFQMLSGSYTEEQSRITAGIPQKESEIQCLRETVSGTDSFLDKAKRYTDITELTPELLRLFIEKIVVHEKEVKWSKHAPQTVEIYYNGIGYVGSGQQDVEEALEAPESLQTQDTEKPRQAS

SEQ ID NO: 1588 - protein, 563 aa, Unknown
  Description of Unknown: Integrase B1589 sequence
  PTHR30461:SF3,SM00857,G3DSA:1.10.10.2600,IPR036162,PF13408, IPR025827,G3DSA:3.40.50.1390,PS51737,IPR006119,IPR038109, PF07508,IPR011109,SSF53041,PTHR30461,Coil, PS51736,cd00338,PF00239
MRKKFNIDLSMLTPEEQQQFRDDPTTLTKGEVNVALYLRFSSERQKEQSIEGQLRDCIAYCKRKSFRIVAIYVDRATTARKDVEKRVHFQEMISDSAHHLWNFVVVWKLDRFARNREDSAVFKMRLRKNGVRVKSATETISDNPEGIILESVLEGIAEYYSADLSQKITRGLRESAMKGHCVGGHVPLGYKIEDHRLVINPETAHIVQEAFQLYANGESMAEICRIFNGKGYRTAKNSEFNRSSFKSMFRNVRYIGTYIYKDIKKENAIPAIIDKGLFETVQRRLSLAADAPARGKAKVDYLLSGKLFCGHCGATMNGESGTSKTGAIHNYYTCYSRKRRKGCDKKPLKKDFIERIVAQDAMALLTNDVIEELADMAMSQADRDLKENTRIPELSIRLTEIEQGINNITKAIEKGIASDTLLNRLTELEKEKKDLTSQLREEEKYICRIDRDQIIFWLTKFQGGDIEDEDCRRRIIDLLVNSVTVWDEPDGYKITTAYNLTSCKTKTFRVSNNADSPSGEGFGFGELSSTKKRTCFSAGPFSMKFISAQRTKYLRPEIFAPQM

SEQ ID NO: 1589 - protein, 563 aa, Unknown
  Description of Unknown: Integrase B1590 sequence
  PTHR30461:SF3,IPR036162,PS51737,IPR011109,PTHR30461, PS00397,PF00239,G3DSA:1.10.10.2600,IPR006119,SSF53041, cd00338,SM00857,IPR025827,IPR038109,PS51736, IPR006118,PF13408,G3DSA:3.40.50.1390,PF07508
MESSKAKKAVLYVRVSTQHQVDKDSLPMQKQDLTSYCKYVLGINDFVILEDAGYSAKNTDRPAFQEMMSRIRTGEFTHILVWKIDRISRNLLDFASMYAELKELGITFISKNEQFDTSSAIGEAMLKIILVFAELERNMVSERVSAVMLDRAKNGAWNGGRSPTGYRIENGKYVIHEEEAAIVRMLFDECEHGKSLIQLAKVINGMGVKPRYGKIWHESAIRKILTNKTYYGALEYSTKKGGEVLIENHHQPLITYEQYEKCRSIMSSRSRKKGFAAKSYTRKHTHIFAGLVTCGYCGGHLVAQLDKARREGDYRPSYYICTGRRNLKICKNKLVPDMIIGQFVLRYLSNLLRAYRHFNENTTLEDVRQTILSGLEAFGVIGISEKGLSETFNAYLNSDGTQNAFTYRPKLELGGDQNSEASALVNTISKESRALERLTQLYLYSESPISESEYSKERKALEKRIYDAKVRLERIQVAEVQCNKLKDEWRTQASYLILTKELMDEQQTDFSLLLRALDKQVLKDFVQATIQNIVIKDRRIEQITLMSGITHEFVYCNETKKEG

SEQ ID NO: 1590 - protein, 563 aa, Unknown
  Description of Unknown: Integrase B1591 sequence
  PTHR30461:SF3,SM00857,G3DSA:1.10.10.2600,IPR036162,PF13408, IPR025827,G3DSA:3.40.50.1390,PS51737,IPR006119,IPR038109, PF07508,IPR011109,SSF53041,PTHR30461,Coil, PS51736,cd00338,PF00239
MRKKFNIDLSMLTPEEQQQFRDDPTTLTKGEVNVALYLRFSSERQKEQSIEGQLRDCIAYCKRKSFRIVAIYVDRATTARKDVEKRVHFQEMISDSAHHLWNFVVVWKLDRFARNREDSAVFKMRLRKNGVRVKSATETISDNPEGIILESVLEGIAEYYSADLSQKITRGLRESAMKGHCVGGHVPLGYKIEDHRLVINPETAHIVQEAFQLYANGESMAEICRIFNGKGYRTAKNSEFNRSSFKSMFRNVRYIGTYIYKDIKKENAIPAIIDKGLFETVQRRLSLAADAPARGKAKVDYLLSGKLFCGHCGATMNGESGTSKTGAIHNYYTCYSRKRRKGCDKKPLKKDFIERIVAQDAMALLTNDVIEELADMAMSQADRDLKENTRIPELSIRLTEIEQGINNITKAIEKGIASDTLLNRLTELEKEKKDLTSQLREEEKYICRIDRDQIIFWLTKFQGGDIEDEDCRRRIIDLLVNSVTVWDEPDGYKITTAYNLTSCKTKTFRVSNNADSPSGEGFGFGELSSTKSKIRTFVRRDRGSDFSCLQLVLSRNEFKKEDA

SEQ ID NO: 1591 - protein, 563 aa, Unknown
  Description of Unknown: Integrase B1592 sequence
  PTHR30461:SF3,SM00857,G3DSA:1.10.10.2600,IPR036162,PF13408, IPR025827,G3DSA:3.40.50.1390,PS51737,IPR006119,IPR038109, PF07508,SSF53041,IPR011109,PF00239,PTHR30461, PS51736,Coil,cd00338
MNREGKKCVLYPRVSTEMQVDGYSLEGQKNSLKRFADREEMEIVGIYEDAGKSGKSIDGRPAFKKMLSDIKNGLEIDYILVYKLSRFGRNAADILNSLEFVQSYGINLICIEEGIDSSQTSGKLLISVLSAVAEIERENIIEQTMNGRREKARQGGWNGGFAPYGYYLKDNQLLIEETEAEAIRIIFDKFANSDVGLGGVAKYLNLQGIKKIPRQNGTLETWSSHFIRLILDNPVYCGKIAYGRRTREKVKGTKNEYKQVHTDDYILEDGQHEGIVSEELWQKAHTKRMATGIKQPSKIGKDRSHLLTGILKCPICGSSMYTNKHAWTNKDGTYKEVYYYICGRNKQERGHHCDYKASLRKTDIEPLVIEAVKELVSDKYFAKEIEKRIGVQTDTTAIDKELANYESKLKEVDLNKARLEREIDNLPIDARFRERKIHDMTLRLDGLYDTIVELEERIEDAKLRKSSIEMETITLDNIYKLMLNFGKLYDIISDEEKKSLITYLIKEIQIYPNGESEQPLKSIEFNFPIYRDGQEVRRLLWEKGNTVETVVKLVRKIKDSEEM

SEQ ID NO: 1592 - protein, 563 aa, Unknown
  Description of Unknown: Integrase B1593 sequence
  PTHR30461:SF3,IPR036162,PS51737,IPR011109,PTHR30461, PS00397,PF00239,G3DSA:1.10.10.2600,IPR006119,SSF53041, cd00338,SM00857,IPR025827,IPR038109,PS51736, IPR006118,PF13408,G3DSA:3.40.50.1390,PF07508,Coil
MESSKAKKAVLYVRVSTQHQVDKDSLPMQKQDLTSYCKYVLGINDFVILEDAGYSAKNTDRPAFQEMMSRIRTGEFTHILVWKIDRISRNLLDFASMYAELKELGITFISKNEQFDTSSAIGEAMLKIILVFAELERNMVSERVSAVMLDRAKNGAWNGGRSPTGYRIENGKYVIHEEEAAIVRMLFDECEHGKSLIQLAKVINGMGVKPRYGKVWHESAIRKILTNKTYYGALEYSTKKGGEVLIENHHQPLITYEQYEKCRSIMSSRSRKKGFAAKSYTRKHTHIFAGLVTCGYCGGHLVAQLDKARREGDYRPSYYICTGRRNLKICKNKLVPDMIIGQFVLRYLSNLLRAYRHFNENTTLEDVRQTILSGLEAFGVIGISENGLSETFNAYLNSDGTQNAFTYRPKLELGGDQNSEASALVNTISKESRALERLTQLYLYSESPISESEYSKERKELEKRIYDAKVRLERIQVAEVQCNKLKDEWRTQASYLILTKELMDEQQTDFSLLLRALDKQVLKDFVQATIQNIVIKDRRIEQITLMSGITHEFVYGNETKKEG

SEQ ID NO: 1593 - protein, 563 aa, Unknown
  Description of Unknown: Integrase B1594 sequence
  PTHR30461:SF3,SM00857,G3DSA:1.10.10.2600,IPR036162,PF13408, IPR025827,PS51737,G3DSA:3.40.50.1390,IPR006119,IPR038109, PF07508,IPR011109,SSF53041,PF00239,PTHR30461, PS51736,Coil,cd00338
MKKTKTKCYLYTRVSTSMQVDGYSLDAQRDKLRKYAEYEDMVVAGEYSDEGFSGKNIQGRHEFQRMLQDIQDCKDGVEYVLVFKLSRFGRNAADVLNSLQLMQDFGVNLICVEDGIDSSKDSGKLMISVLSAVAEIERENIRTQTMAGREQKAREGKWNGGFAPYGYRLEKGELLIAEDEVDVIRTIFDRYIHTNDGVSGVAKYLNRQGFVKKLRQNGTIPGFSASFVKSIIDNPVYMGKIAYGRRRTEKKIGTRNEMHVVEQSEFPVYEGKHEAIISEEDWNLAQEKRKINAYRRGKVNDPTHAHILSGILKCPCCGKSLYGNIAKAHSKDKKTRYYYYCKNTVTPTGHECTFRLNIEQMEMNRMVASIISAMVSDPRFADAIKAKIGSAVDTNDLEKQLEALQAQLRQTLGTKARLERQMDGLDVNDPYYDRKISDLQRRYDEQYGAIDEIEVQIDDVQSQIRSIRQEKISGDNIYRLLLAFDQVYEAASEVERKEFMRAFIERIELFPEKQPDGNWIRKIIFNFPVPVNGTEVKELPLENETIVEVIVCLSRDPGGSSNG

SEQ ID NO: 1594 - protein, 563 aa, Unknown
  Description of Unknown: Integrase B1595 sequence
  PTHR30461:SF3,IPR036162,PS51737,IPR011109,PTHR30461, PS00397,PF00239,G3DSA:1.10.10.2600,IPR006119,SSF53041, SM00857,IPR025827,IPR038109,PS51736,cd03768, IPR006118,PF13408,G3DSA:3.40.50.1390,PF07508,Coil
MDEKIVALYVRVSTGYQVDKDSLPFQKKELRAYCEHVLHINKKRIEVFEDAGRSGKNTKRPAFERMMEKVKSGQVSHVIVYKIDRITRNLVDFSLMYDDFKYNNVTFISLNEQFDTSSAIGEAILKIILVFAELERKLTSERVKDVMIGRAQNKQWNGARVPYGWDWDAEKKCPVHSKKEAPYAKAMYQMYLDGGSSVTICDYNNSHNIPTKRGGEWTSKTVADFLRNPINKGDYRYNYRESARGKKKSDDEVIYIKGVFPPLIDPNIWDEVNRRMDANSQNRNTSVFHPIRKRCNVFAGLMICGKCGSGYQVKGKDSRKGDGFRPSSYACTGKYQKKNCDNLNVSDVRIGPFVLNYIAAMVDASKSRRFIKDCESLERVILSHVSFSDVVGISASSLQDTLDLLFGRSGSELLSGKPISSGATDESKTTELKEKLQRTDRALERLKKAYLFDDDGMDEKEFLEMKSKLEVDRIKLENSIKGLESSSISENVDQAAFLKSASQFLISHKINSGDYIDYSRLAALDEESMKAFVNSIVDHIVVLDKRIAEIVFKNGLTHTLLYR

SEQ ID NO: 1595 - protein, 563 aa, Unknown
  Description of Unknown: Integrase B1596 sequence
  PTHR30461:SF3,cd00338,SM00857,G3DSA:1.10.10.2600,IPR036162, PF13408,PS51737,IPR025827,G3DSA:3.40.50.1390,IPR006119, IPR038109,PF07508,IPR011109,SSF53041,PTHR30461, PS51736,Coil,PF00239
MEIQVIEKTNGRINRVTGTTIRERLRVCAYCRVSTDNEEQLNSYQSQLKYYDEKINSKSEWQFAGIYADEAITGTLDFKRTEFMRMIADAMSGKIDMILTKSISRFARNTLDTLKYVRMLREKNIAILFEEENLNTTTGAGELMLTILSAMAQQESENISSHVLLGLKMKKDRGELIGYNGCYGYNYNIETKEITINEDEASIVRYMFERYVEGIGSSTIAKELTAKGIKTPKGGTKWCESTIRGILKSEKYIGDVLMGKTFTIDPISHKRLSNLGEVDKHYYKEHHEPIISKELFDRVQEIRTKRAGNRETGRRNDNYSKKYPFSSKLYCAFCGSLLTRRNWNANRSCEKAVWQCIKRAKQGKEECPHCKAIAEEIIEDCFVQGYRILCNDNRKIIETFLEKIENILKENTTETLVSKLEKDKEKINKKLNNLLELNLEGRINKEQYTLKFDELDTELIKINSKIENLLKETNRTESIKQRLNKFKSLFKNIDIIPKFDKDVFECLIDKVIIGEIQEEGTINPYTIRFICKNGSEINCKDEFTATSNKQHSNNTATREKQRM

SEQ ID NO: 1596 - protein, 563 aa, Unknown
  Description of Unknown: Integrase B1597 sequence
  PTHR30461:SF3,SM00857,G3DSA:1.10.10.2600,IPR036162,PF13408, IPR025827,G3DSA:3.40.50.1390,PS51737,IPR006119,IPR038109, PF07508,SSF53041,IPR011109,PF00239,PTHR30461, PS51736,Coil,cd00338
MKKFPIDLSCLTEEEISQFQEDPYMLYNGDQDVALYLRYSSTGQSDQSIEGQLRDCRAFCKANHYRIVAIYVDRATTAHKDVEKRVHLMEMVADSAKQNWEYVIVWKLDRFARNRNDSAIMKMRLRKNGVKVLSATEHLTDSPESIILESVLEGMAEFFSAELSQKVTRGMRESALKCHSVGGHIPLGYKVENHKLVVDPDTAHIVQEAFSLYANGESVADICRKFNSAGYKTAKNTEFNRSSFKAMFRNTRYIGTYTYKDIVIENGIPAIIDKELFETVQRRLSKTATAPARGKAKVDYLLSGKLFCGHCGASMNGESGAGRHGKVYHYYSCYTKKRKLGCDKRPLKKDYIEGIVARDALNLLTDQLIDEIADMAIRQSEQDLINDTHIPQLTAQLSEVEKSIMNITAAIEKGIASETLMNRLVQLEHEKKTLNKEIKAEEKFVYRIDRDQIVFWLSQFKYGNIEDENFRRRLIDLLVNSVTVWDEPDGYKITTAYNLTSCKTKTFRVDKNPAAEEATGFDFGESECANNRITDGDPVIFLCAGHPTAHKALVPCGAACRMV

SEQ ID NO: 1597 - protein, 563 aa, Unknown
  Description of Unknown: Integrase B1598 sequence
  PTHR30461:SF3,SM00857,G3DSA:1.10.10.2600,IPR036162,PF13408, IPR025827,PS51737,G3DSA:3.40.50.1390,IPR006119,IPR038109, PF07508,IPR011109,SSF53041,PF00239,PTHR30461, PS51736,Coil,cd00338
MKKTKTKCYLYTRVSTSMQVDGYSLDAQRDKLRKYAEYEDMVVAGEYSDEGFSGKNIQGRHEFQRMLQDIQDCKDGVEYVLVFKLSRFGRNAADVLNSLQLMQDFGVNLICVEDGIDSSKDSGKLMISVLSAVAEIERENIRTQTMAGREQKAREGKWNGGFAPYGYRLEKGELLIAEDEVDVIRTIFDRYIHTNDGVSGVAKYLNRQGFVKKLRQNGTIPGFSASFVKSIIDNPVYMGKIAYGRRRTEKKIGTRNEMHVVEQSEFPVYEGKHEAIISEEDWNLAQEKRKINAYRREKVNDPTHAHILSGILKCPCCGKSLYGNIAKAHSKDKKTRYYYYCKNTVTPTGHECTFRLNIEQTEMNRMVASIISAMVSDPRFANAIKAKIGSAVDTNDLEKQLEALQAQLRQTLGTKARLERQMDGLDVNDPYYDRKISDLQRRYDEQYGRIDEIEVQIDDVQSQIRNIRQEKISGDNIYRLLLAFDQVYEAASEVERKEFMRAFIERIELFPEKQLDGNWIRKIIFNFPVPVNGTEVKELPLENETMVEVIVCLSRDPGGSSNG

SEQ ID NO: 1598 - protein, 563 aa, Unknown
  Description of Unknown: Integrase B1599 sequence
  SM00857,G3DSA:1.10.10.2600,IPR036162,PS51737,G3DSA:3.40.50.1390, IPR006119,IPR038109,PF07508,SSF53041,IPR011109, PF00239,PTHR30461,PS51736,Coil,cd00338
MKSACPSHPESYVENPSLSKIHPKLRVCAYARVSTDKDDQANSYESQVKYFTDYIRTHEDWVLVGIYSDEGISGTSVKKRKEFNRMISDAENGFVDLILTKEVSRFARNTVDTLSITRNLKKHGVYVFFVNDNINTKDNDGELRLSIMATIAQEESRKTSERVKWGQKRQMEKGVVFGRDMLGYSVKNGKLYLKEDEAEIVKLIFHKFTNEGKGTTVIAWELVEEGIRPMRVKEWSNTEILRLLRNEKYVGDLCQKKTYTPDYLSHEKKYNRGEEDKVYIRDHHPEIAIIDRELWDRTQEELDRRSLAPEQKARYSNRYWCSGKIVCGACGGKFVGRKKHLKCGTVYQSWWCLAAIRHGSAKLDPYGDPIGCDGGSIGDRTLRALTAYAINLVSVHKEEIVKKLSKTMQDVLFSVPESNSKDKIQKKIEALRRKKINIIDLAAEGLISKEDMREQNAMYTKELEELSLQLIEDEKRAATNLDRAKRIEFYISRIQELTHVEPDNEEALHNLLKKAVVYRDKFVDLYLNFTSFYFRMWYQTSGRSDNFTVNVLGYKIIDIDTQF

SEQ ID NO: 1599 - protein, 563 aa, Unknown
  Description of Unknown: Integrase B1600 sequence
  PTHR30461:SF3,SM00857,G3DSA:1.10.10.2600,IPR036162,PF13408, IPR025827,G3DSA:3.40.50.1390,PS51737,IPR006119,IPR038109, PF07508,IPR011109,SSF53041,PTHR30461, Coil,PS51736,cd00338,PF00239
MPRKKKLQEVGGLRLVAYYRYSNGGQQTEQSIEGQRRDCEAYAKAHGYKIVHEYIDRHISGKSDSRPAFQQMISDSDSHLFDAVICWKTDRLARSRYDSIIYKTRLRRNGVKILYAAETVVDGPEGIIIEGLMESLAEYYSAELAQKLRRGQRESALKCIALGGNRSFGYDIGPDKHYCINEKQAPAVRYIFEQYAAGATAADIVRELTARGYRTSRGNPFNKNSICRIITNEMYLGVYKYADIRIEGGVPAMIDRELFNRCQTQLAFNRAHGGGKGAPRADYVLVGKLDCGLCGHAMKGASATGHTGSKHYYYTCTQHVEKKCPKTSIEKNYLEQVIVDGVAKYVLTPEKISQIVDCMMELQAKEQEPKGNPERDALEAELAECRRKQNNIIEAIEEGGSARLAARLRALEEQEAQLTFALGEINNAPAPPQFSREALTFMFEQFRREEDEVDEEYRRRILDTFVSSILLYEDRAEVKFNITDQKTGDFERVILPISANKKPPEDDDIPSNSEGSTALRLVEPACCRTLGLAFSKTASSVVSQTLLEYLSSTRQRKETPKIK

SEQ ID NO: 1600 - protein, 563 aa, Unknown
  Description of Unknown: Integrase B1601 sequence
  SM00857,G3DSA:1.10.10.2600,IPR036162,PF13408,PS51737, G3DSA:3.40.50.1390,IPR025827,IPR006119,IPR038109,PF07508, SSF53041,IPR011109,PTHR30461,Coil,cd00338, PF00239
MAYRKITDIKDTIGMRAVFYARVSTAEEEQLNAIELQIEENRGCIKDHGWKLVGEYIDRSKSGTMVKGRDDYQRLYEDLYEDLFDIVVIKDQERLQRNTLDWYLFINRVVQTGKLLFMYMDGKFYSPDDALITGVRAIIAEEFSRNLSKKLHNYHDHRIEKARQGQEIALQGSGNVYGWDKKDGKYYINPEQAKVRRLMCEGIMARKGSTLIAKELNDAGYRNTVGKPWKPMDIPKFVYDCKNVGTMIINKERHDFESKQTIKLPKEEWVYVENALPPIVTQEEWDLICKIHEERVIATGSDRRGKKTSGYSFSGKLVCGICGAPYWRKQRVSKDEYWVCSTKQTKGRRTRKRDSTMGKAGEINPLGCDNENISYNSLMEIMGVVSERLQANTDTIKHDMINWLTKLRKQLLEANGGHTEADLQRELSRKSKLLDAYLDGILNKQEYQKKAEELDERIIQLKAETEKNKANSGDIAEIDKVLANIDEEVSRYVDGNEKLKVEYLLEHLEQVQIFPDKVIVIVPILSEGIVVEKAQYVSREKWCRKDDNRKIAYRSPEPVWRIM

SEQ ID NO: 1601 - protein, 563 aa, Unknown
  Description of Unknown: Integrase B1602 sequence
  PTHR30461:SF3,IPR036162,PS51737,IPR011109,PTHR30461, PS00397,PF00239,G3DSA:1.10.10.2600,IPR006119,SSF53041, cd00338,SM00857,IPR025827,IPR038109,PS51736, IPR006118,PF13408,G3DSA:3.40.50.1390,PF07508,Coil
MEPSKAKKEVLYVRVSTQHQVDKDSLPMQKQDLTSYCKYVLGIDDFVILEDAGYSAKNTDRPAFQEMMSRIRTGEFTHILVWKIDRISRNLLDFASMYAELKELGITFISKNEQFDTSSAIGEAMLKIILVFAELERNMVSERVSAVMLDRAKNGAWNGGRSPTGYRIENGKYVIHEEEAAIVRMLFDECEHGKSLIQLAKVINGMGVKPRYGKVWHESAIRKILTNKTYYGALEYSTKKGGEVLIENHHQPLITHEQYEKCRSIMSSRSRKKGFAAKSYTRKHTHIFAGLVTCGYCGGHLVAQLDKARREGDYRPSYYICTGRRNLKICKNKLVPDMIIGRFVLRYLSNLLRAYRHFNENTTLEDVRQTILSGLEAFGVIGISENGLSETFNAYLNSDGTQNAFTYRPKLEFGDDQNSEASALVNTISKESRALERLTQLYLYSESPISESEYSKERKELEKRIYDAKVRLERIQVAEVQYNKLKDEWQTQASYLILTKELMDEQQTDFSLLLRALDKQVLKDFVQATIQNIVIKDRRIEQITLMSGITHEFVYGNETKKEG

SEQ ID NO: 1602 - protein, 563 aa, Unknown
  Description of Unknown: Integrase B1603 sequence
  SM00857,G3DSA:1.10.10.2600,IPR036162,PF13408,PS51737, G3DSA:3.40.50.1390,IPR025827,IPR006119,IPR038109,PF07508, SSF53041,IPR011109,PTHR30461,Coil,mobidb-lite, cd00338,PF00239
MAYRKITDIRDTIGMRAVFYARVSTAEEEQLNAIELQIEENRGCIKDHGWKLVGEYIDRSKSGTMVKGRDDYQRLYEDLYEDLFDIVVIKDQERLQRNTLDWYLFINRVVQTGKLLFMYMDGKFYSPDDALITGVRAIIAEEFSRNLSKKLHNYHDHRIEKARQGQEIALQGSGNVYGWDKKDGKYYINPEQAKVRRLMCEGIMARKGSTLIAKELNEAGYRNTVGKLWKPMDIPKFVYDCKNVGTMIINKERHDFESKQTIKLPKEEWVYVENALPPIVTQEEWDLICKIHEERVIATGSDRRGKKTSGYSFSGKLVCGICGAPYWRKQRVSKDEYWVCSTKQTKGRRTRKRDSTMGKAGEINPLGCDNENISYNSLMEIMGVVSERLQANTDTIKHDMINWLTKLRKQLLEANGGHTEADLQRELSRKSKLLDAYLDGILNKQEYQKKAEELDERIIQLKAETEKNKANSGDIAEIDKVLANIDEEVSRYVDGNEKLKVEYLLEHLEQVQIFPDKVIVIVPILSEGIVVEKTQYVSREKRCGKDDLPEDDQWTCKTDSRRD

SEQ ID NO: 1603 - protein, 563 aa, Unknown
  Description of Unknown: Integrase B1604 sequence
  PTHR30461:SF3,IPR036162,PS51737,IPR011109,PTHR30461, PS00397,PF00239,G3DSA:1.10.10.2600,IPR006119,SSF53041, cd00338,SM00857,IPR025827,IPR038109,PS51736, IPR006118,PF13408,G3DSA:3.40.50.1390,PF07508,Coil
MESSKAKKAVLYVRVSTQHQVDKDSLPMQKQDLTSYCKYVLGINDFVILEDAGYSAKNTDRPAFQEMMSRIRTGEFTHILVWKIDRISRNLLDFASMYAELKELGITFISKNEQFDTSSAIGEAMLKIILVFAELERNMVSERVSAVMLDRAKNGAWNGGRSPTGYRIENGKYVIHEEEAAIVRMLFDECEHGKSLIQLAKVINGMGVKPRYGKVWHESAIRKILTNKTYYGALEYSTKKGGEVLIENHHQPLITYEQYEKCRSIMSSRSKKKGFAAKSYTRKHTHIFAGLVTCGYCGGHLVAQLDKARREGDYRPSYYICTGRRNLKICKNKLVPDMIIGQFVLRYLSNLLRAYRHFNENTTLEDVRQTILSGLEAFGVIGISEKGLSETFNAYLNSDGTQNAFTYRPKLELGGDQNSEASALVNTISKESRALERLTQLYLYSESPISESEYSKERKELEKRIYDAKVRLERIQVAEVQCNKLKDEWRTQASYLILTKELMDEQQTDFSLLLRALDKQVLKDFVQATIQNIVIKDRRIEQITLMSGITHEFVYCNETKKEG

SEQ ID NO: 1604 - protein, 563 aa, Unknown
  Description of Unknown: Integrase B1605 sequence
  SM00857,G3DSA:1.10.10.2600,IPR036162,PF13408,IPR025827, G3DSA:3.40.50.1390,PS51737,IPR006119,IPR038109,PF07508, SSF53041,IPR011109,PTHR30461,Coil,cd00338, PF00239
MAYRKITDIRDTIGMRAVFYARVSTAEEEQLNAIELQIEENRGCIKDHGWKLVGEYIDRSKSGTMVKGRDDYQRLYEDLYEDLFDIVVIKDQERLQRNTLDWYLFINRVVQTGKLLFMYMDGKFYSPDDALITGVRAIIAEEFSRNLSKKLHNYHDHRIEKARQGQEIALQGSGNVYGWDKKDGKYYINPEQAKVRRLMCEGIMARKGSTLIAKELNDAGYRNTVGKPWKPMDIPKFVYDCKNVGTMIINKERHDFESKQTIKLPKEEWVYVENALPPIVTQEEWDLICKIHEERVIATGSDRRGKKTSGYSFSGKLVCGICGAPYWRKQRVSKDEYWVCSTKQTKGRRTRKRDSTMGKAGEINPLGCDNENISYNSLMEIMGVVSERLQANTDTIKQDMINWLTKLRKQLLEANGGHTEADLQRELSRKSKLLDAYLDGILNKQEYQKKAEELDDRIIQLKAETEKNKANSGDIAEIDKVLANIDEEVSRYVDGNEKLKVEYLLEHLEQVQIFPDKVIVIVPILSEGIVVEKAQYVSREKRSRKNDHYENATWIDKANFRRS

SEQ ID NO: 1605 - protein, 563 aa, Unknown
  Description of Unknown: Integrase B1606 sequence
  PTHR30461:SF3,SM00857,G3DSA:1.10.10.2600,IPR036162,PF13408, IPR025827,PS51737,G3DSA:3.40.50.1390,IPR006119,IPR038109, PF07508,IPR011109,SSF53041,PTHR30461,Coil, PS51736,cd00338,PF00239
MAEVEVIKAVDGPILRKRDYEGNPVVITRQRVAAYVRVSTDGDEQLESFQSQKQYYQDKISENRDWVMVGIYADEAITGTKVDKREQFQRMIQDCMDGKIDVIMTKSVSRFSRNTVDILQYVRLLKGKGIAVIFEKENINTLTEQGEMMLTLMGTLAQNEVESTSKNVKLGIKMKMKRGELMGFNGCLGYDYHPEDKTITVNEAEAETVRLIFELYLQGYGTYTIAKRLEALGKVNKKGVVKWTDSGVRGIIKNEKYKGDLLLQKTITTDPISKRRIENFGEEEQYYVHDHHEPIVSREVWEQAKEIRLSRNHPSDTKADGKREKYTKKYAFSSMCECGFCGTKLTRRTLHSGSKYETPVWYCRNAANKGKHNCPNSKSMRESILENAFLEAYKLLAGSFDDVIDSVIDTIDGISTNNEDIGRLKKEQKALDNLEQRRKRLTDLYLDEGISKEAYDEKYEELTMKIQKTKESIRILQDNVSNQKDVSKRMSCLKKALADGDILDKFDRVVFESIVEKVIVGETNDDGTVDPFKLTFVMKGNGNSVVPNAKAWFKSEKSTTKTA

SEQ ID NO: 1606 - protein, 563 aa, Unknown
  Description of Unknown: Integrase B1607 sequence
  PTHR30461:SF3,IPR036162,PS51737,IPR011109,PTHR30461, PS00397,PF00239,G3DSA:1.10.10.2600,IPR006119,SSF53041, cd00338,SM00857,IPR025827,IPR038109,PS51736, IPR006118,PF13408,G3DSA:3.40.50.1390,PF07508,Coil
MESSKAKKAVLYVRVSTQHQVDKDSLPMQKQDLTSYCKYVLGINDFVILEDAGYSAKNTDRPAFQEMMSRIRTGEFTHILVWKIDRISRNLLDFASMYAELKELGITFISKNEQFDTSSAIGEAMLKIILVFAELERNMVSERVSAVMLDRAKNGAWNGGRSPTGYRIENGKYVIHEEEAAIVRMLFDECEHGKSLIQLAKVINGMGVKPRYGKVWHESAIRKILTNKTYYGALEYSTKKGGEVLIENHHQPLITYEQYEKCRSIMSSRSRKKGFAAKSYTRKHTHIFAGLVTCGYCGGHLVAQLDKARREGDYRPSYYICTGRRNLKICKNKLVPDMIIGQFVLRYLSNLLRAYRHFNENTTLEDVRQTILSGLEAFGVIGISENGLSETFNAYLNSDGTQNAFTYRPKLELGGDQNSEASALVNTISKESRALERLTQLYLYSESPISESEYSKERKELEKRIYDAKVRLERIQVAEVQCNKLKDEWRTQASYLILTKELMDEQQTDFSLLLRALDKQVLKDFVQATIQNIVIKDRRIEQITLMSGITHEFVYCNETKKEG

SEQ ID NO: 1607 - protein, 563 aa, Unknown
  Description of Unknown: Integrase B1608 sequence
  PTHR30461:SF3,SM00857,G3DSA:1.10.10.2600,IPR036162,PS51737, G3DSA:3.40.50.1390,IPR006119,IPR038109,PF07508,IPR011109, SSF53041,PTHR30461,Coil,PS51736,cd00338, PF00239
MRVVYYGRVSSEKDEQINALGNQIESYKTYLEQHPEYELVDEYIDEGITGTSMSKRPSFCQMMEDAQQNKFDLIITREVSRFARNTVDTLSCTRFLKKYGIGVYFMLDNINTLDSDGELRLTIMATMAQDESRKISNRVKAGLSVCVDKAQVLGSGNILGYDKVNKSYVINEEQAKTVRMIFDWYLEGKGIKEIRFLLEKNHRLTANGKTRWYSSVVLKILKRTTYCGYITYGQSYVTNFLEQERTYDKSKQVVKKCDFEPIISLEDFQKVQSMIASKSKVIENGKSVGVKPSKSVWTDILLCGNCNSKFLRLKWGRNKNGYRYGYQCGNQKSMGAIQTRINKGLPIEGCCDAPMIPEWKLQVIAKYVFTQFLSDKEQVLNEAKQILKEITPKAVEENTNSQQIEELTQQLDKVNNKIDGLIDMRAEGEITKEQFKKKKEQFDTQLIEIQQQLDELITIPQPTNIDDKITILQGVLDSYQEDMFSEDGIIPDNLIKAYIKQVVVNKDNFDIYLQNLSPDPNDTGKGNKVKTVPVCVQIKGNSRNYSLETKSPKIVNDCSGCNR

SEQ ID NO: 1608 - protein, 563 aa, Unknown
  Description of Unknown: Integrase B1609 sequence
  PTHR30461:SF3,IPR036162,PS51737,IPR011109,PTHR30461, PS00397,PF00239,G3DSA:1.10.10.2600,IPR006119,SSF53041, cd00338,SM00857,IPR025827,IPR038109,PS51736, IPR006118,PF13408,G3DSA:3.40.50.1390,PF07508,Coil
MEPSKAKKAVLYVRVSTQHQVDKDSLPMQKQDLASYCKYVLGIDDFVILEDAGYSAKNTDRPAFQEMMSRIRTGEFTHILVWKIDRISRNLLDFASMYAELKELGITFISKNEQFDTSSAIGEAMLKIILVFAELERNMVSERVSAVMLDRAKNGAWNGGRSPTGYRIENGKYVIHEEEAAIVRMLFDECEHGKSLIQLAKVINGMGVKPRYGKVWHESAIRKILTNKTYYGALEYSTKKGGEVLIENHHQPLITYEQYEKCRSIMSSRSRKKGFAAKSYTRKHTHIFAGLVTCGYCGGHLVAQLDKARREGDYRPSYYICTGRRNLKICKNKLVPDMIIGQFVLRYLSNLLRAYRHFNENTTLEDVRQTILSGLEAFGVIGISENGLSETFNAYLNSDGTQNAFTYRPKLELGGDQNSEASALVNTISKESRALERLTQLYLYSESPISESEYSKERKELEKRIYDAKVRLERIQVAEVQCNKLKDEWRTQASYLILTKELMDEQQTDFSLLLRALDKQVLKDFVQATIQNIVIKDRRIEQITLISGITHEFVYCNETKKEG

SEQ ID NO: 1609 - protein, 563 aa, Unknown
  Description of Unknown: Integrase B1610 sequence
  PTHR30461:SF3,IPR036162,PS51737,IPR011109,PTHR30461, PF00239,G3DSA:1.10.10.2600,IPR006119,PF14287,SSF53041, IPR025378,SM00857,IPR025827,cd03770,IPR038109, mobidb-lite,PS51736,PF13408,G3DSA:3.40.50.1390,PF07508,Coil
MNQSNQIRKTALYCRLSQDDGIEGDSNSIQNQKAILQKFAENHHFPSPCFYVDDGFSGGNFQRPAFQQMISDMENGEIGIIVTKDLSRLGRNQLHTGLYIEERFPMFGVRYIAINDNVDTDSSESNDLMPFKNLFNEWFIRDTSRKIRAVLKAKAERGERLGTRTPYGYRKDPDTKKLIVDEEAAAIVRRIFAMCAGGSGPSQIARILKKEQILTPTMYAYTRYGITHTCLDTAHPYNWSDSAIANLLENEIYLGNTVNMKHSSRSYKDKRRVEHPREECLVFENTHPALITREVWDMVQRVRKNKRRLTKMEEQNKYSGLVFCADCGSNMVLHRAHTMSASYNHFTCRTYKKDGEACTGHYIRECVLDEIVLEDLRRVTSAAREHPEKFAAYIGSRQSAEIQREIRRQEKELAAMRKRKMELDTIFKKLYEDSVLGRITTEQFQMLSGSYTEEQSRITAGIPQKESEIQCLRETVSGTDSFLDKAKRYTDITELTPELLRLFIEKIVVHEKEVKWSKHAPQTVEIYYNGIGYVGSGQQDVEEALEAPESLQTQDTEKPRQAS

SEQ ID NO: 1610 - protein, 563 aa, Unknown
  Description of Unknown: Integrase B1611 sequence
  PTHR30461:SF3,SM00857,G3DSA:1.10.10.2600,IPR036162,PF13408, PS51737,G3DSA:3.40.50.1390,IPR025827,IPR006119,IPR038109, PF07508,SSF53041,IPR011109,PTHR30461,Coil, PS51736,cd00338,PF00239
MAEVEVIKAVEGPILRKRDYEGKPLVITRQRVAAYVRVSTDGDEQLESFQSQKQYYQDKISENRDWVMVGIYADEAITGTKVDKREQFQRMIQDCMDGKIDVIMTKSVSRFSRNTVDILQYVRLLKERGIAVIFEKENINTLTEQGEMMLTLMGTLAQNEVESTSKNVKLGIKMKMKRGELMGFNGCLGYDYHPEDKTITVNEAEAETVRLIFELYLQGYGTYTIAKRLEALGKLNKKGVAKWTDSGVRGIIKNEKYKGDLLLQKTITTDPISKRRIENFGEEEQYYVRDHHEPIVSREVWEQAKEIRLSRNHQSDKKADGKREKYTKKYAFSSMCECGFCGTKLTRRTLHSSSKYETPVWYCRNAANRGKHNCPNSKSVHESILENAFLEAYKLLAGSFDDVIDSVIGTIESIGANNDDIARLKKEQKTLDNLEQRRKKLTDIYLDDGLTKEAYDEKYEELTVKIQKSKDSIELLQNNVSNQKDVGKRMASLKKALADGDILDEFDRVVFESIVEKVIVGETNEDGTVDPYKLTFVMKGNGNSVVPNAKEWFKAEKSAIQPA

SEQ ID NO: 1611 - protein, 563 aa, Unknown
  Description of Unknown: Integrase B1612 sequence
  PTHR30461:SF3,IPR036162,PS51737,IPR011109,PTHR30461, PF00239,G3DSA:1.10.10.2600,IPR006119,SSF53041,cd00338, SM00857,IPR025827,IPR038109,PS51736,mobidb-lite, PF13408,G3DSA:3.40.50.1390,PF07508,Coil
MREVQVLQATKTAPNSRGRNSNYAVQIDRIRVAAYCRVSTDGDEQLGSFESQKLYYEEKIRKNKEWAMAGIFADEAITGTKIDKREGFQEMIRKCLNGEIDMILTKSISRFSRNTPDTIKYVRMLRDKNIAIMFEKENINTLDMNGEMLLTILSSLAQEEVESLSSNVKMGLQMKMKRGELVGFNGCFGYDYHQDTKTITVNETEAETVRLIYDMYLQGNGCGTIAKRLVELGIKNKRGTVEWHDHGVMGMIKNEKYKGDVLLGKTFTVDPISKRRLANMGEENQYYIRDHHEAIVSREIWDKAEEIRLKRAKPKLMQTTGNRERYTRQFTFSSMLECGYCGHKLSRRTRHQTTTTKKPVWQCMNATKNGIDNCPNCKAVDEVIIENAFLEAFRLLADSFDDVLQSVLNTIEDILKDDTELKRVKQLEKDISTIESKKSRLTDLLIDGKIEQEDYDEKKLSFQRKLHKITEEKAYLEENIGQQKNISRRMSQLRQTLENENALDEFDRIVFESIVEKVIVGGYDAEGNPTPYKLTFVLKCNQTLKVDNAKADYRANQKGKKVS

SEQ ID NO: 1612 - protein, 563 aa, Unknown
  Description of Unknown: Integrase B1613 sequence
  PTHR30461:SF3,SM00857,G3DSA:1.10.10.2600,IPR036162,PF13408, PS51737,IPR025827,G3DSA:3.40.50.1390,IPR006119,IPR038109, PF07508,IPR011109,SSF53041,PF00239,PTHR30461, PS51736,Coil,cd00338
MAKKKKPAGGNAIIYARYSSHNQRDVSIEQQIEACRKHAAELGLTIIATYEDRAISGRTDNRPAFQRMMHDAENGKFSYVLAWKSNRMGRNMMQAMVNESRLMDCGIKVYYAEEDFDDSAAGRFALRSMMNVNQFYSDNLAEDVRRGLMDNASKCMANGKQPLGYKRGEDGKVAVDEPAAAIVREVYTRVASGELFTDIARDLNRRGIKTADKGEWNKNSFHRLCSNEKYRGIYIYGDVRIEGGIPTIIDDTLWYKVQEALRVKKLKRNGRHRPGDEDYLLTGKLRCGKCGGYMIGMSGRSKTGEIHYYYTCQNRRVGRTCDKKNIRRDVIEPAVAQAIKDYCLTDDAIEWIADKTVEYWEKADRNLQLDSIEGDLAAVQSSISNVMKAIEMGVVTETTRDRLIELEKQRTDLKSKLALAKEEVVHVDRKKLISSLLLFRNGNIHDRQYQEDLFKTFLISVYVYDDDDNGHLKIVFNAFGDNNTVDLPIDFGETDNQSGFSDGVEKFDYALHRSTKKEPAEHVRLVLFSLCFPYEQKCSAFKIYSICTDAANRDSGALYFMVL

SEQ ID NO: 1613 - protein, 562 aa, Unknown
  Description of Unknown: Integrase B1614 sequence
  cd00338,SM00857,G3DSA:1.10.10.2600,IPR036162,PF13408, IPR025827,PS51737,G3DSA:3.40.50.1390,IPR006119,IPR038109, PF07508,SSF53041,IPR011109,PTHR30461,Coil, PF00239
MAYRKITDIKDTIGMRAVFYARVSTAEEEQLNAIELQIEENRGCIKDHGWKLVGEYIDRSKSGTMVKGRDDYQRLYEDLYEDLFDIVVIKDQERLQRNTLDWYLFINRVVQTGKLLFMYMDGKFYSPDDALITGVRAIIAEEFSRNLSKKLHNYHDHRIEKARQGQEIALQGSGNVYGWDKKDGKYYINPEQAKVRRLMCEGIMARKGSTLIAKELNDAGYRNTVGKPWKPMDIPKFVYDCKNVGTMIINKERHDFESKQTIKLPKEEWVYVENALPPIVTQEEWDLICKIHEERVIATGSDRRGKKTSGYSFSGKLVCGICGAPYWRKQRVSKDEYWVCSTKQTKGRRTRKRDSTMGKAGEINPLGCDNENISYNSLMEIMGVVSERLQANTDTIKHDMINWLTKLRKQLLEANGGHTEADLQRELSRKSKLLDAYLDGILNKQEYQKKAEELDERIIQLKAETEKNKANSGDIAEIDKVLANIDEEVSRYVDGNEKLKVEYLLEHLEQVQIFPDKVIVIVPILSEGIVVEKAQYVSREKWKRKNNFFKSAREKRVYTDIA

SEQ ID NO: 1614 - protein, 562 aa, Unknown
  Description of Unknown: Integrase B1615 sequence
  PTHR30461:SF3,cd00338,SM00857,IPR006118,G3DSA:1.10.10.2600, IPR036162,PS51737,G3DSA:3.40.50.1390,IPR006119,IPR038109, PF07508,IPR011109,SSF53041,PTHR30461,PS00397, PS51736,Coil,PF00239
MKNKIAVYIRVSTTHQIDKESLPFQRRELENYAKYVLNIDDMEFFEDAGYSGKNIMRPAFQSMMSRIRLGEFSHILVWKIDRISRNIIDFANMFEELKKLNVTFVSKNEQFDTSSAIGEAILKIILVFAELERNLTAERVSDVMISRASTGQWNGGRVPLGYNYDKENHTFTVNQQEAEIVKFIFDYYIDNGSMVSLVNALKDKEIKTRTNGVFSLSAVATVLNNIFYTGKYRYNYRKQGDRQQVKPKSEWIVIDNHHPAIISEEVFKRAEEIKQTNLRLKNEKGKIVKKNNIHLFANLLECDVCHNNFSSSLDRPRVNQGGYRHSMYNCYGRRIGACKSKYVSDVYLGKFVFNYIANLYKAYCSFGKSTTFETFKKKMLRGNIFSDIKEVTNLEGIYNIFCSKYNDKATANIINYKNTQQDLGNELRIALSEKGKYERALARLKDAYLFSDDAMTQNEYISQKHSIEVKLSATNKKLDKLQSKDDTPFDDVEFLNILSYFILNQNLQDKREIDFVDFITSVDKKIISDFVHKMFVKFIISKGKIKSMTFRNGITNTFVYDD

SEQ ID NO: 1615 - protein, 562 aa, Unknown
  Description of Unknown: Integrase B1616 sequence
  PTHR30461:SF3,IPR036162,PS51737,IPR011109,PTHR30461, PS00397,PF00239,G3DSA:1.10.10.2600,IPR006119,SSF53041, SM00857,IPR025827,IPR038109,PS51736,cd03768, IPR006118,PF13408,G3DSA:3.40.50.1390,PF07508,Coil
MKAALYIRVSTTYQIDKDSLPVQRQDLINYAKYAFNIDDYEIFEDAGFSGKNTNRPAFQEMMERIRNKEFSHLFVWKIDRVSRNLLDFCDMYEELKKYDCTFISKNEQFDTSSAMGEAMLKIILVFAELERKLTSERVTSIMLARAERGMWNGANVPLGYDYDEETKYPVINESEAKTIHLIFDMYEDVKSTVKISNFLNDNNIATKRGGTWTSKTVGDILHNPFYYGTLRYNYRESGRGKKKSKDEWVIKEDNHIGIISKDQWNRCNKIIEFNSKRNSARWRQKNYVQHIFGGLLVCKDCGRKFEACLDRARSDGYRPTRYVCGARTKGGACHNKMSVSDVSIGDFVLHYVLNFIKSFNVVCISSEALESLLLSGDLFEDVLLTEDSIRDTFIAINYFQKTKQDITYEYNNEKEDNVNNTFIKHEHEKITSSLNNLERAKERLINLYLYSDHDMDENMYYEKKNDIDKKIKELKNKLETLEIKNNLSCDTDFLFIDNMNDFLFNLNINLDNNTVRELTLDGGRKILKDFFSNIIDKIIISNARVDSIVFKNGLTHTFIYKK

SEQ ID NO: 1616 - protein, 562 aa, Unknown
  Description of Unknown: Integrase B1617 sequence
  PTHR30461:SF3,IPR036162,PS51737,IPR011109,PTHR30461, PS00397,PF00239,G3DSA:1.10.10.2600,IPR006119,SSF53041, SM00857,IPR025827,IPR038109,PS51736,cd03768, IPR006118,PF13408,G3DSA:3.40.50.1390,PF07508,Coil
MTNPRVAIYIRVSTTHQVDKDSLPMQRQDLIAYAKLMLHTTDCVIFEDAGYSGKNMDRPRFQSMMKQIRQGLFTHVLVWKIDRISRNLLDFASMYEELKSLGVTFVSKNEQFDTSTAMGEAMLKIILVFAELERNMTSERVTATMISRASNGQWNGGRVPFGYSYDSEKKEFYINEKEAPIVRLIHDTYEQNSSLLNLTRILNDSGYKTRAGNEWSPISVRIILKNFWYTGCYQYNRLKDGCRQKEKDQSEWVTIPNHHPALISLKQKERIVEMLRSNYKLIAANNIYYTSNNVHVFGGLVTCAYCGRRYIATTDTKKGWKMGRYGCPTRRYSKTKCLNKSISDLTLGDFVFNYFVNLLKVQKHAKEITTTDELQRQLLSGYTFSSVKGLSPQSLLDTLRLIHTLNPSEKIYGKTKAIKKIAKPDKQLFTLRAKQSKLKRALDRLTTLYLYSESSMSEADFVAKKAEITDNIAKTEAEISELVKTDIHSDITDSEFLRKASEFVISQQLASRNYISYERLARTVDVNITREFIVGTIEQITVRDGHIDSILFRNGLYHKFIY

SEQ ID NO: 1617 - protein, 562 aa, Unknown
  Description of Unknown: Integrase B1618 sequence
  PTHR30461:SF3,cd00338,SM00857,IPR006118,G3DSA:1.10.10.2600, IPR036162,PS51737,G3DSA:3.40.50.1390,IPR006119,IPR038109, PF07508,IPR011109,SSF53041,PTHR30461,PS00397, PS51736,Coil,PF00239
MKNKIAVYIRVSTTHQIDKESLPFQRRELENYAKYVLNIDDMEFFEDAGYSGKNIMRPAFQSMMSRIRLGEFSHILVWKIDRISRNIIDFANMFEELKKLNVTFVSKNEQFDTSSAIGEAILKIILVFAELERNLTAERVSDVMISRASTGQWNGGRVPLGYNYDKENHTFTVNQQEAEIVKFIFDYYIDNGSMVSLVNALKDKEIKTRTNGAFSLSAVATVLNNIFYTGKYRYNYRKQGDRQQVKPESEWIVIDNHHPAIISEEVFKRAEEIKQTNLRLKNEKGKIVKKNNIHLFANLLECDVCHNNFSSSLDRPRVNQGGYRHSMYNCYGRRIGACKSKYVSDVYLGKFVFNYIANLYKAYCSFGKSTTFETFKKKMLRGNIFSDIKEVTNLEGIYNIFCSKYNDKATANIINYKNTQQDLGNELRIALSEKGKYERALARLKDAYLFSDDAMTQNEYISQKHSIEVKLSATNKKLDKLQSKDDTPFDDVEFLNILSYFILNQNLQDKREIDFVDFITSVDKKIISDFVHKMFVKFIISKGKIKSMTFRNGITNTFVYDD

SEQ ID NO: 1618 - protein, 562 aa, Unknown
  Description of Unknown: Integrase B1619 sequence
  PTHR30461:SF3,SM00857,G3DSA:1.10.10.2600,IPR036162,PF13408, IPR025827,G3DSA:3.40.50.1390,PS51737,IPR006119,IPR038109, PF07508,SSF53041,IPR011109,PTHR30461,Coil, PS51736,cd00338,PF00239
MRKKFNIDLSMLTPEEQQQFHDDPTTLTKGEVDVALYLRFSSERQTEQSIEGQLRDCIAYCKRKSFRIVAIYVDRATTARKDVEKRVHFQEMISDSAHHLWNFVVVWKLDRFARNREDSAVFKMRLRKNGVRVKSATETISDNPEGIILESVLEGIAEYYSADLSQKITRGLRESAMKGHSVGGHVPLGYKIEDHKLVINPATAHIVQEAFQLYANGESMAEICRIFNGKGYRTAKNSEFNRSSFKSMFRNVRYIGTYIYKDIKKENAIPAIIDKDLFETVQRRLSLAADAPARGKAKVDYLLSGKLFCGHCGATMNGESGTSKTGAIHNYYTCYSRKRRKGCDKKPLKKDFIERIVAQDAMALLTNDVIEELADMAMSQADRDLKENTRIPELSARLTEIEQGINNITKAVEKGIASDTLLNRLTELEKEKKDLTSQLREEEKYICRIDRDQIIFWLTKFQGGDIEDEDCRRRIIDLLVNSVTVWDEPDGYKITTAYNLTSCKTKTFRVSTAGSPSSEGFGFGELSSTKKRTCFSAGPFSMKFISAQRTKYLRPEIFAPQM

SEQ ID NO: 1619 - protein, 562 aa, Unknown
  Description of Unknown: Integrase B1620 sequence
  PTHR30461:SF3,IPR036162,PS51737,IPR011109,PTHR30461, PS00397,PF00239,G3DSA:1.10.10.2600,IPR006119,SSF53041, SM00857,IPR025827,IPR038109,PS51736,cd03768, IPR006118,PF13408,G3DSA:3.40.50.1390,PF07508,Coil
MTDPRVAIYIRVSTTHQIDKDSLPMQRQDLIAYTKLMLHTTNYVIFEDAGYSGKNMDRPRFQSMMKQIRQGLFTHVLVWKIDRISRNLLDFASMYEELKSLGVTFVSKNEQFDTSTAMGEAMLKIILVFAELERNMTSERVTATMISRASNGQWNGGRVPFGYSYNSEKKEFYINEKEAPIVRLIHDTYEQNSSLLNLTRILNDSGYKTRAGNEWSPISVRIILKNFWYTGCYQYNRLKDGCRQKEKDQSEWVTIPNHHPALISLKQKERIVEMLRSNYKLIAANNIYYTSNNVHVFGGLVTCAYCGRRYIATTDTKKGWKMGRYGCPTRRYSKTKCTNNSVSDLTLGDFVFNYFVNLLKVQKHAKDITTTDELQRQLLSGYTFSSVKGLSPQSLLDTLRLIHTLNPSEKIYGKTKAIKKIAKPDKQLFTLRAKQSKLKRALDRLTTLYLYSESSMSEADFVAKKAEITDNIAKTEAEISELVKTDIHSDITDSEFLRKASEFVISQQLASRNYISYERLARTVDVNITREFIVGTIEQITVRDGHIDSILFRNGLYHKFIY

SEQ ID NO: 1620 - protein, 562 aa, Unknown
  Description of Unknown: Integrase B1621 sequence
  PTHR30461:SF3,SM00857,G3DSA:1.10.10.2600,IPR036162,PF13408, PS51737,G3DSA:3.40.50.1390,IPR025827,IPR006119,IPR038109, PF07508,IPR011109,SSF53041,PTHR30461,Coil, PS51736,cd00338,PF00239
MRKKFNIDLSMLTPEEQQQFHDDPTTLTKGEVDVALYLRFSSERQKEQSIEGQLRDCIAYCKRKSFRIVAIYVDRATTARKDVEKRVHFQEMISDSAHHLWNFVVVWKLDRFARNREDSAVFKMRLRKNGVRVKSATETISENPEGIILESVLEGIAEYYSADLSQKITRGLRESAMKGHSVGGHVPLGYKIEDHRLVINPATAHIVQEAFQLYANGESMAEICRIFNSKGYRTAKNSEFNRSSFKSMFKNVRYIGTYIYKDIKKENAIPAIIDKDLFETVQRRLSLAADAPARGKAKVDYLLSGKLFCGHCGATMNGESGTSKTGAIHNYYTCYSRKRRKGCDKKPLKKDFIERIVAQDAMALLTNDVIEELADMAMSQANRDLKENTRIPELSTRLTEIEQGINNITKAIEKGIASDTLLNRLTELEKEKKDLTSQLREEEKYICRIDRDQIIFWLTKFQGGDIEDEDCRRRIIDLLVNSVTVWDEPDGYKITTAYNLTSCKTKTFRVSTAGSPSSEGFGFGELSSTKSKIRTFVRRDRGSDFSCLQLVLSRNEFKKEDA

SEQ ID NO: 1621 - protein, 562 aa, Unknown
  Description of Unknown: Integrase B1622 sequence
  PTHR30461:SF3,cd00338,SM00857,G3DSA:1.10.10.2600,IPR036162, PF13408,PS51737,IPR025827,G3DSA:3.40.50.1390,IPR006119, IPR038109,PF07508,IPR011109,SSF53041,PTHR30461, PS51736,Coil,PF00239
MARKKNIAAGQNAVIYARYSSHNQREVSIEQQVRECMKHAAELGLHVVGTYEDRAISGKTDKRPNFQRMMRDAEKGKFQAVVAWKSNRIGRNMLQAMVNEAKLEDCGVKVFYAEEDFDDTAAGRFALRNMMNVNQFYSENMAEDITRGLYDNASKCMANGRQPLGYKRGEDGRVVLDEANAAVVREIFTRVAAGDLFVDIARDLNAQGIKTSKGANWNKGSFQSICQNERYRGIYIYGDVRVADGIPRIVSDDLWYRVQEAMRMKKNPVGTRHRVGAEDYLLTGKLRCGHCGSYMTGVSGTSRNGELHYYYTCQKRRTEHACDKKNIRRDVIEPAVAQAIKMYCLTDDVIEWMADRTVEYWEKHDNDLQIEALEQQLEENKKATSNMLKAIEMGIITEATRTRMVELETEQSRLSVQLNAAKEDVVKIDREQIISYLELLQQGDIHDRDFQMELFKNFLVAVYVYDDNRMKLVFSCMGDQNSVEIPLETGEDPPDGGLSPDAKMFVLTPDSSTIQFVLEPDSLRKRVRVRFLFIGSSAEGLHRALNEQRQGITMTVVSCLLL

SEQ ID NO: 1622 - protein, 562 aa, Unknown
  Description of Unknown: Integrase B1623 sequence
  PTHR30461:SF3,IPR036162,PS51737,IPR011109,PTHR30461, PF00239,G3DSA:1.10.10.2600,IPR006119,PF14287,SSF53041, IPR025378,SM00857,IPR025827,cd03770,IPR038109, mobidb-lite,PF13408,G3DSA:3.40.50.1390,PF07508,Coil
MAGQENQQYTVLYGRLSQEDERAGESNSIQHQRTLLEKYAKEEGFENTIFLADDGYSGTNFERPSWKKIVEMIEAGQVANLIVKDASRLGREYLQVGYYMEIYFPQKNVRFIAVNDGVDSTVESSNDFNPIRNWANELHAKDTSRKVRAVMKMKAEQGERLGGRPPYGYRKSDGDANTLVPDEDTAPVVKRIFSLCAAGNGPKRIATILTKEQVVNPSNAYYRKTGKSHRGLDTTRPCLWSSNSVTSILNNEVYLGHSVGLRTTTISYKNKQRVERPESERFVVKNTHEALVTQEQWDIVQEVRQHKKRVPKHMDEPNIFSGLVFCADCGKPLVLHRASTMKRAEYNFKCYTYGKKGKTVCTPHHIREFELKAVVLEDLRRVTHFARMKEKQFAAYISSKNTLELRREMNTIQKDLDTMRRRREELSKLFKRLYEDNVLGRVTDEQYRMLAGDYTIEQKALEEQIPKKEARLEKLKAASANVNTFVEKAKQYTAIDELTPELLRLFIQRIEVGERTEKYSRSSHQSIRIVYRDIGTVDSAMEQGEAQPHIAPPLSEVFELPA

SEQ ID NO: 1623 - protein, 562 aa, Unknown
  Description of Unknown: Integrase B1624 sequence
  PTHR30461:SF3,cd00338,SM00857,G3DSA:1.10.10.2600,IPR036162, PF13408,IPR025827,PS51737,G3DSA:3.40.50.1390,IPR006119, IPR038109,PF07508,SSF53041,IPR011109,PTHR30461, PS51736,Coil,PF00239
MKLPIDLSCLTEEEISQFQEDPYTLYNGDQNVTLYLRYSSAGQSDQSIEGQLRDCRAFCKANHYRIVAIYVDRATTARKDVEKRVHLMEMIADSAKQNWEYVIVWKLDRFARNRNDSAIMKMRLRKNGVKVLSATEHLSDNPEGILLESVLEGMAEFFSAELSQKVTRGMRESALKCHSVGGHVPLGYKIENHKLVINPDTAHIVREAFSLYANGESVADIARKFNAAGYRTAKNTEFNRSSFKVMFRNVRYIGTYTYKDIEIENGVPAIIDKELFEAVQRRLSKAAEAPARGKAKVDYLLSGKLFCGHCGASMNGESGIGRGGKVYHYYSCYTKKRKLGCKKRPLKKDYIEEVVARDALNLLTDQLIDEIADMAIRQSEQDLIDDTRIPQLTAQLSEVEKSIMNITAAIEKGIASETLMNRLVQLEHEKKTLNKEIKSEEKFAYRIDRDQIVFWLSQFKYGNIEDEDFRRRLIDLLINSVTVWDEPDGYKITTAYNLTSCETKTFRIKKNPAAGEATGFGFGELECANNRITDGDPVIFLCAGHPTARKALVPCGAACRMA

SEQ ID NO: 1624 - protein, 562 aa, Unknown
  Description of Unknown: Integrase B1625 sequence
  PTHR30461:SF3,cd00338,SM00857,G3DSA:1.10.10.2600,IPR036162, PF13408,PS51737,G3DSA:3.40.50.1390,IPR025827,IPR006119, IPR038109,PF07508,IPR011109,SSF53041,PTHR30461, Coil,PF00239
MAEQIIQLAKNVLKRVVCLYRVSTVGQVEKDDIPMQKQFCREFVQRQPGWEIVKEFSEKGVSGFKVSAKKRDAVQEIQRMALQGEFDILLVFMFDRLGRKDDETPFVVEWFVKNGIEVWSAMEGQQRFDNHVDKLLNYIRYWQASGESIKTSVRVKTRISQLTEEGYYTGGIVPYGYRLENRGRTNKRNKEVCDLAIDLDEAEVVKVIFQKYVYEGYGSQRISRYLAEQGFRNRKGGNIPTTSINRIIKNPLYIGILCNGESRSENVLTELQIIDVDLFERAQKMIESRAKPRTAHKEIPLNTRGQSLLVGNVYCGHCGKRLTLATSGRKYQKKDGTVVNKTYARYQCSYNIQHPGGCDGPSGYGAAKLDDLVDQIIRIQFERIKTAPPQALIREQQSREVEIAKAKLNLLNGQYQQKQRDYQDLRAETLRVIRGDSRLNVDFLNSIVDETITQLKELGQQVKEAEAELRELVSGAEQVKEEYAQLMNWAELYDKCTFEAKKMIAAQFVKAVHVKRDYEIDVEFNVAFDEFQSIYLEPEKEDEKKRGASTLLALGENVGQAV

SEQ ID NO: 1625 - protein, 562 aa, Unknown
  Description of Unknown: Integrase B1626 sequence
  PTHR30461:SF3,SM00857,G3DSA:1.10.10.2600,IPR036162,PF13408, IPR025827,G3DSA:3.40.50.1390,PS51737,IPR006119,IPR038109, PF07508,SSF53041,IPR011109,PF00239,PTHR30461, PS51736,Coil,cd00338
MNEVQVLHATKTAPNSRGRSSYAVQLDRIRVAAYCRVSTDGDEQLGSFESQKLYYEEKIRQNKEWAMAGIFADEAITGTKIDKREGFQEMIRKCQNGEIDMILTKSISRFSRNTQDTIKYVRMLRDKNIAIMFEKENINTLDMKGEMLLTILSSLAQEEVESLSSNVKMGLQMKMKRGELIGFNGCFGYDYHQDTKTITVNETEAETVRMIFDMYLQGYGCATIAKRLEEKGIKNKRGIVKWHDNGVLGMIKNEKYKGDILLGKTFTVDPISKRRLANMGEENQYYIKDHHEAIVSREVWDEAQETRLKRARPQTMHTTGNRERYTRQYTFSSMLVCGFCGHKLTRRTRHQTTTTKKFVWQCANAVKNGIDVCPNCKAIDEVIIEKAFLESFHLLADNYDDVLQSVLDTIKDSLKGDSDLKRVRQVEKDISTIESRKNKLTDLLIDGIIEQKDYDTKKLAFQRKLQKLEEEKKYLATNIEKKKNINRRMELLKRTLENEEILDEFDRVVFDSIVEKVIVGGYDEDGNPSPYKLAFIFKCNQSLKVENAKKDYKANQKGKKVS

SEQ ID NO: 1626 - protein, 562 aa, Unknown
  Description of Unknown: Integrase B1627 sequence
  PTHR30461:SF3,cd00338,SM00857,IPR006118,G3DSA:1.10.10.2600, IPR036162,PS51737,G3DSA:3.40.50.1390,IPR006119,IPR038109, PF07508,IPR011109,SSF53041,PTHR30461,PS00397, PS51736,Coil,PF00239
MKNKIAVYIRVSTTHQIDKESLPFQRRELENYAKYVLNIDDMEFFEDAGYSGKNIMRPAFQSMMSRIRLGEFSHILVWKIDRISRNIIDFANMFEELKKLNVTFVSKNEQFDTSSAIGEAILKIILVFAELERNLTAERVSDVMISRASTGQWNGGRVPLGYNYDKENHTFTVNQQEAEIVKFIFDYYIDNGSMVSLVNALKDKEIKTRTNGAFSLSAVATVLNNIFYTGKYRYNYRKQGDRQQVKPESEWIVIDNHHPAIISEEVFKKAEEIKQTNLRLKNEKGKIVKKNNIHLFANLLECDVCHNNFSSSLDRPRVNQGGYRHSMYNCYGRRIGACKSKYVSDVYLGKFVFNYIANLYKAYCSFGKSTTFETFKKKMLRGNIFSDIKEVTNLEGIYNIFCSKYNDKATANIINYKNTQQDLGNELRIALSEKGKYERALARLKDAYLFSDDAMTQNEYISQKHSIEIKLSATNKKLDKLQSKDDTPFDDVEFLNVLSYFILNQNLQDKREIDFVDFITSVDKKIISDFVHKMFVKFIISKGKIKSMTFRNGITNTFVYDD

SEQ ID NO: 1627 - protein, 562 aa, Unknown
  Description of Unknown: Integrase B1628 sequence
  PTHR30461:SF3,SM00857,G3DSA:1.10.10.2600,IPR036162,PF13408, PS51737,IPR025827,G3DSA:3.40.50.1390,IPR006119,IPR038109, PF07508,SSF53041,IPR011109,PTHR30461,Coil, PS51736,cd00338,PF00239
MRQKFKIDLSMLTPEEQQQFRDDPTTLTKGEVDVALYLRFSSERQKEQSIEGQLRDCIAYCKRKSFRIVAIYVDRATTARKDVEKRVHFQEMISDSIHHLWDFVVVWKLDRFARNREDSAVFKMRLRKNGVRVKSATETISENPEGIILESVLEGIAEYYSADLSQKITRGLRESAMKGHSVGGHVPLGYKIEDHRLVINPATAHIVQEAFQLYANGESMAEICRIFNSKGYRTAKNSEFNRSSFKSMFKNVRYIGTYIYKDIKKENAIPAIIDKDLFETVQRRLSLAADAPARGKAKVDYLLSGKLFCGHCGATMNGESGTSKTGAIHNYYTCYSRKRRKGCDKKPLKKDFIERIVAQDAMALLTDDVIEELADMAMSQADRDLKENTRIPELSTRLTEIEQGINNITKAVEKGIASDALLNRLTELEKEKKDLTSQLLEEEKYICRIDRDQIIFWLTKFQGGDIEDEDCRRRIIDLLVNSVTVWDEPDGYKITTAYNLTSCKTKTFRVSNTGSPSSEGFGFEELSSTKSKIRTFVRRDRGSDFSCLQLVLSRNEFKKEDA

SEQ ID NO: 1628 - protein, 562 aa, Unknown
  Description of Unknown: Integrase B1629 sequence
  PTHR30461:SF3,SM00857,G3DSA:1.10.10.2600,IPR036162,PF13408, PS51737,IPR025827,G3DSA:3.40.50.1390,IPR006119,IPR038109, PF07508,IPR011109,SSF53041,PTHR30461,Coil, cd00338,PF00239
MARTATKHPAKPKRGKKLEAEEPGVLYGRYSSHNQKDISVEQQFEKGYGLAGEYGIRIVETYADRAVSGRTDKRKDFQRMMADAAKGKFRYVIAWKSNRMGRNMLEALVNEAKLQELGVRVLYVEEDFDDTAAGRFAARSMMNVNQFYSENMAEDIKRGLYDNASNCMVANGHLPYGYKRDDTLHYVIDEAKAAVIREIFVRVSCGEPLVDIYDSLNARGIKTSYGRPWGRSSFQKILSNERYRGIYIYGDVRKEGGIPRIVSDELYFKVQEVLKTKKNPQGRHRVNGDYLLTGKLFCGNCKSPMIGISGTGRTGKLHYYYVCQKKRSEKTCDKKNVRRDEVEYQIAKAIFDNALQDQVIEWIADSTIAYNDRKEAEGHIGILEDQLADVQRSLKNIMSAIEQGIVTETTKSRLLELESERSEIEGKIAAAKADIVPVNREQLIEWLLSLREGDIHDKKYQARLFDTFLIAAYLYDDGTAKLVFSFAGDKNTVTVPLAEAVDSVEENTAEGSFKLCLAPPKRLIFFEYQAFLQLFLLFCFCKKSAFLSIYAAGFPLKMSVLF

SEQ ID NO: 1629 - protein, 562 aa, Unknown
  Description of Unknown: Integrase B1630 sequence
  PTHR30461:SF3,SM00857,G3DSA:1.10.10.2600,IPR036162,PF13408, IPR025827,G3DSA:3.40.50.1390,PS51737,IPR006119,IPR038109, PF07508,IPR011109,SSF53041,PF00239,PTHR30461, PS51736,Coil,cd00338
MTTLPIDLSALTAEERKQFDAAPAVLSPDCDAVCCLYMRYSSDRQTEQSIEGQLRDLISHCKQHRYRIAAVYVDRAISAHAAMEKRPAFQQMLLDSARAPWKTVLVWKLDRFARNREDSAIARMRLRKNGCNVESAKEGISKNPEGVILESLLEGMAEYYSLELSQKVKRGMSETARKGQSTGGPIPLGYTVSNKRLTADPATAPLVVEAFTRYAAGETVAAICKSFNARGLRTARGTQFNKSSFQNVFRNEKYIGVYKYDGIQTENAVPRLIDDDLWAAVQSRLKTNAQAPARGKAKVPYLLAGKIFCGHCGAPMIGECGRGKAGRTYNYYSCSTRRRAHTCDKKPVPKDWIEDIVARDALDVLTDEVIDYVSTVAARQSEKEIQETTQIPVLRQQLKDTDVKLRNLLKALESSASAPDIIVTRIAELESQKKALTAQLSAESRSVLPLTKEMVTCFLETVRARAIPLETQKPMLLDLLVNSVTLYDDTPGFLTIKTAYNLTNLPPKTFRLPTSECSDINQIGSPNRKRADAKASASFFTQCAAGFPAAFAYRCSCCFNAA

SEQ ID NO: 1630 - protein, 562 aa, Unknown
  Description of Unknown: Integrase B1631 sequence
  PTHR30461:SF3,SM00857,G3DSA:1.10.10.2600,IPR036162,PF13408, IPR025827,PS51737,G3DSA:3.40.50.1390,IPR006119,IPR038109, PF07508,IPR011109,SSF53041,PF00239,PTHR30461, PS51736,Coil,cd00338
MKRVNCLYRVSSKQQLHGDDIPVQREECMAYLGEHTDWEFNREYVEKAVSGFKTSVKDRDILQEILTDAREKTFDVLLVFMSDRIGRKEDESPAFVTTLNDLGIEVWSVKEGQLKTAEHVDKLMNYIRFWQAEGESRKTSMRVKAAQETFVRDGKFVGGKAPFGYRLEYSGAISNHGRALKHLVIDKEKAKIVQQIYDYAYYYHYGALKIAKTLNEQNIQAPVDTWKACTISQILQNPVYMGYIAYNRRQHSKCGGSFERTPMEQWIMSDEQNTELVIVSREKWEKVQEIRESRKKNMKDARDDKQGKYVYTSSGQLVLMGLVYCGYCGKRLTNGSKYDYWETKEGERRKKFVGRYRCTQMANGSLTCSGKAYYRAEEIEPIVYTVVTSYLNSLKEADTYDDILKLQEEQRILVKHELEQLQKEIKAIKKDIETLEQNIPSALRGEGNFSPVQLSALMDKNKQQLIELEHRLEIKNKEYKEMECKKKDIKNIGNMISNWGELFMECSIPERKVMLSKLIERIDVKENDIKIKFKISLEEYIGEKDGRKGIGSPTTLYTPCSA

SEQ ID NO: 1631 - protein, 562 aa, Unknown
  Description of Unknown: Integrase B1632 sequence
  PTHR30461:SF3,IPR036162,PS51737,IPR011109,PTHR30461, PF00239,G3DSA:1.10.10.2600,IPR006119,PF14287,SSF53041, IPR025378,SM00857,IPR025827,cd03770,IPR038109, PS51736,PF13408,G3DSA:3.40.50.1390,PF07508,Coil
MLELQTANKNKRTKNGGDGITALYCRLSVDDNGSEGESNSIKNQRDILGRYAKQHGYRNIEYYIDDGYSGTNFNRPDFQRMMSDVDEGKVKTIIVKDMSRLGRDYLKVGYLTEFTFAEKNIHFIAINDNVDSENGSDNELIPFKNVFNEWLARDTSKKIRAVIRNKGESGKPLTNTPSLGYMKDPNDKNKWLIDERCAPTIREIFRLSVNGYNALAIAKILTEKGYDTPKAFYLKQGRNMYRNDTTAPYFWHRSTVYKILRNPNYIGYLVNFKTTRKSYKNKRFIYRDPSEWKIIENHHEAIVDKETFDLAQKLTQVKRVVKNHFDDINIFAGLLYCADCGFPITLRRVAKNRNYDFYACSKYNRRTKIQCTAHSILKRVLNELVLEDIKRVMNEVKTHESEFIEKYRKCSVKEMRSVRLSAQTKITKAENRIKTLDDIIANLYEDNVTGKISDERFDLLAKKYEAEQTALKSEVVELKKALDVVNDEESNIREFLKVVNSYTEIEELTPEILNNFIDRIYIGEKYADGSAHKQEIRIIYKFIGAESTHGYKVKGSRVAEIF

SEQ ID NO: 1632 - protein, 562 aa, Unknown
  Description of Unknown: Integrase B1633 sequence
  PTHR30461:SF3,IPR036162,PS51737,IPR011109,PTHR30461, PF00239,G3DSA:1.10.10.2600,PF14287,IPR006119,SSF53041, IPR025378,SM00857,IPR025827,cd03770,IPR038109, mobidb-lite,PF13408,G3DSA:3.40.50.1390,PF07508,Coil
MAGQENQQYTVLYGRLSQEDERAGESNSIQHQRTLLEKYAKEKGFENTIFLADDGYSGTNFERPSWKKIVEMIEAGQVANLIVKDASRLGREYLQVGYYMEIYFPQKNVRFIAVNDGVDSTVESSNDFNPIRNWANELHAKDTSRKVRAVMKMKAEQGERLGGRPPYGYRKSDGDANTLVPDEDTAPVVKRIFSLCAAGNGPKRIATILTKEQVVNPSNAYYRKTGKSHRGLDTTRPCLWSSNSVTSILNNEVYLGHSVGLRTTTISYKNKQRVERPESERFVVKNTHEALVTQEQWDIVQEVRQHKKRVPKHMDEPNIFSGLVFCADCGKPLVLHRASTMKRTEYNFKCYTYGKKGKTVCTPHHIREFELKAIVLEDLRRVTHFARMKEKQFAAYIGSKNTLELRREMNTIQKDLDTMRRRREELSKLFKRLYEDNVLGRVTDEQYRMLAGDYTVEQKALEEQIPEKEARLEKLKAASANVNTFVEKAKQYTAIDELTPELLRLFIQRIEVGERTEKYSRSSHQSIRIVYRDIGTVDSAMEQGEAQPHIAPPLSEVFQLPA

SEQ ID NO: 1633 - protein, 562 aa, Unknown
  Description of Unknown: Integrase B1634 sequence
  PTHR30461:SF3,IPR036162,PS51737,IPR011109,PTHR30461, PF00239,G3DSA:1.10.10.2600,IPR006119,SSF53041,cd00338, SM00857,IPR025827,IPR038109,PS51736,mobidb-lite, PF13408,G3DSA:3.40.50.1390,PF07508,Coil
MRAKKKPAMLEPDMQDAVIYTRYSSHNQRDCSIEQQVADCEIFARQNNLRVVKVYADRHLSGTTDNRPQFQQMLKDAAHGHWAYVICWKIDRFARNRYDSATYKFRLKKAGVRVLYAKESIPDGPEGILLESVLEGSAEYYSAALAQNIRRGMKYNAEQCKVNSGSIPFGYCKGPDGRFAIHEANAEVVREIFRKAAAGMPFVDIANDLNSRGLKTSRGGRWNKGSFRLLMNEAYIGVYHFSDTRIEGGMPALIDQGTFWAANERLKANSSVRGRHQDGGDYLLTGKLKCAHCGSYMIGFSGTGKSGELHYYYGCQKRRRERACKKANVPREWIERVVVKAALDYVLRPDVMEWIADAVMEYQEREAASAQLAALTAELEENQKATDNVMKAIEAGIITSTTKQRLLDLEAKAQDLKRAIELEKLSHVRLERDQVLFWLDRFRGGSLQSQEFRRKVIDAFVSVVYLSDDHLRIAFNYSGGSNAEADFDLVMDAEAAAGELSKKFAQGHVASTSKKTTRKLTFSGGFFYTCYSVTPTPDLAGYPTTEPAPAARHQSSSPDTFC

SEQ ID NO: 1634 - protein, 562 aa, Unknown
  Description of Unknown: Integrase B1635 sequence
  PTHR30461:SF3,SM00857,G3DSA:1.10.10.2600,IPR036162,PS51737, G3DSA:3.40.50.1390,IPR006119,IPR038109,PF07508,IPR011109, SSF53041,PF00239,PTHR30461,PS51736,Coil, cd00338
MDLYAIRNMLGQGKSIYDLPLRVTFYARVSTDRYEQLNSLENQVTYFSNFIKEQENWTFVEGYVDEGISGTSVKKREDFLRMVDDAKKKKFDLILTKEISRFSRNTLDSIKYTQELLSNGVGVHFLSDSINTFQPDSELRLTIMSSIAQEEIRKLSERVRFGYKRSVEKGIVPGSNNIYGYTKNKGKLVIDEEQAKFIRLIFETYVSENIGVYRLGFKLFDEYGVTNYSGKPIAGTVIKNIIRNPKYKGYFCAHKETTVDYHDRKRKRFKRDEWIVYKDNETCPPIVSEELWDKANEILDVRSKKHDQINKNNKYNKFPFSGLMHCYFDGATFVRGTYQIGKGDRSRRRKFWACNNYRIHGKKKTEGCNSPVLYYEELVEVCKKILNMILVCQDDLISEINDMISDIRTKKDYKKEIKLIDEKLFKTNNEKKELIMMRMRKEIDLKEYNSLKDDLDDKINSLEENKRKLIEEEQNEQSSEKNYEDFKKKINDMVLNDDEKILEIAQLFFEDIRVESIKDDETDQKVILHAKLNVSNSKDDTFDFNKFLLLFCSRQGCGCCDC

SEQ ID NO: 1635 - protein, 562 aa, Unknown
  Description of Unknown: Integrase B1636 sequence
  PTHR30461:SF3,IPR036162,PS51737,IPR011109,PTHR30461, PF00239,G3DSA:1.10.10.2600,IPR006119,PF14287,SSF53041, IPR025378,SM00857,IPR025827,cd03770,IPR038109, mobidb-lite,PF13408,G3DSA:3.40.50.1390,PF07508,Coil
MAGQENQQYTVLYGRLSQEDERAGESNSIQHQRTLLEKYAKEKGFENTIFLADDGYSGTNFERPSWKKIVEMIEAGQVANLIVKDASRLGREYLQVGYYMEIYFPQKNVRFIAVNDGVDSTVESSNDFNPIRNWANELHAKDTSRKVRAVMKMKAEQGERLGGRPPYGYRKSDGDANTLVPDEDTAPVVKRIFSLCAAGNGPKRIATILTKEQVVNPSNAYYRKTGKSHRGLDTTRPCLWSSNSVTSILNNEVYLGHSVGLRTTTISYKNKQRVERPESERFVVKNTHEALVTQEQWDIVQEVRQHKKRVPKHMDEPNIFSGLVFCADCGKPLVLHRASTMKRTEYNFKCYTYGKKGKTVCTPHHIREFELKAVVLEDLRRVTHFARMKEKQFAAYIGSKNTLELRREMNTIQKDLDTMRRRREELSKLFKRLYEDNVLGRVTDEQYRMLAGDYTVEQKALEEQIPEKEARLEKLKAASANVNTFVEKAKQYTAIDELTPELLRLFIQRIEVGERTEKYSRSSHQSIRIVYRDIGTVDSAMEQGEAQPRIAPPLSEVFQLPA

SEQ ID NO: 1636 - protein, 562 aa, Unknown
  Description of Unknown: Integrase B1637 sequence
  PTHR30461:SF3,IPR036162,PS51737,IPR011109,PTHR30461, PF00239,G3DSA:1.10.10.2600,PF14287,IPR006119,SSF53041, IPR025378,SM00857,IPR025827,cd03770,IPR038109, PS51736,PF13408,G3DSA:3.40.50.1390,PF07508,Coil
MATNKNIQGQEVKITALYCRLSQDDNLEGESNSISNQKKILMTYAKKNGYLHPQFFVDDGISGTTFNRPGFQEMESLIEAGKVSTVIVKDLSRFGREHLLCGHYTEIVYPTLGVNFIAIQENVDTTKGMGTEMMPFHNIFNEWYAAQTSKKIRAVNEMKASKGMRISSTVPYGYKKVEGNKEQWYIDEPAAEIVRKIFSLCISGKGPSQIARQLEAEKVLTPTAYFNSVGKKTSNPMPVNIYHWRENSIVHILENRQYTGCTVNGKSTTVSYKVHKTVERPVEDYQVIPNTQEAIISENTWLRVQELRKNKRRNTATGRKSLFSGLVYCADCGFKLHFCASKSLKKNQEFWRCSSYKDGRGTCTIHFIRDVVLETIVKEAISELADFVRCYNSAFLYLISEKKGAESVCREKSLRVKTESAKQRISDLDKLFSRIYEDNILGKLSDERYSRMANEYEAEQKRLISEVEENEKSLIELQKQTVDMKMLYQGLMEFTEMKQLTPTVVNKLIERIEIHNNEKKHSHNNVKVDIYFTAVGLFDIPTEQQLIDTMERVKQKNAEKSA

SEQ ID NO: 1637 - protein, 562 aa, Unknown
  Description of Unknown: Integrase B1638 sequence
  PTHR30461:SF3,IPR036162,PS51737,IPR011109,PTHR30461, PS00397,PF00239,G3DSA:1.10.10.2600,IPR006119,SSF53041, SM00857,IPR025827,IPR038109,PS51736,cd03768, IPR006118,PF13408,G3DSA:3.40.50.1390,PF07508,Coil
MTDPRVAIYIRVSTTHQIDKDSLPMQRQDLIAYTKLMLHTTNYVIFEDAGYSGKNMDRPRFQSMMKQIRQGLFTHVLVWKIDRISRNLLDFASMYEELKSLGVTFVSKNEQFDTSTAMGEAMLKIILVFAELERNMTSERVTATMISRASNGQWNGGRVPFGYSYNSEKKEFYINEKEAPIVRLIHDTYEQNSSLLNLTRILNDSGYKTRAGNEWSPISVRIILKNFWYTGCYQYNRLKDGCRQKEKDQSEWVTIPNHHPALISLKQKERIVEMLRSNYKLIAANNIYYTSNNVHVFGGLVTCAYCGRRYIATTDTKKGWKMGRYGCPTRRYSKTKCTNNSVSDLTLGDFVFNYFVNLLKVQKHAKDITTTDELQRQLLSGYTFSSVKGLSPQSLLDTLRLIHTLNPSEKIYGKTKAIKKIAKPDKQLFTLRAKQSKLKRALDRLTTLYLYSESSMSEADFVAKKAEITDNITKTEAEISELVKTDIHSDITDSEFLRKASEFVISQQLASRNYISYERLARTVDVNITREFIVGTIEQITVRDGHIDSILFRNGLYHKFIY

SEQ ID NO: 1638 - protein, 562 aa, Unknown
  Description of Unknown: Integrase B1639 sequence
  PTHR30461:SF3,IPR036162,PS51737,IPR011109,PTHR30461, PS00397,PF00239,G3DSA:1.10.10.2600,IPR006119,SSF53041, SM00857,IPR025827,IPR038109,PS51736,cd03768, IPR006118,PF13408,G3DSA:3.40.50.1390,PF07508,Coil
MTSARVAIYIRVSTTHQVDKDSLPMQRQDLIAYAKLMLHTTDCVIFEDAGYSGKNMDRPRFQSMMKQIRQGLFTHVLVWKIDRISRNLLDFASMYEELKSLGVTFVSKNEQFDTSTAMGEAMLKIILVFAELERNMTSERVTATMISRASNGQWNGGRVPFGYSYDSEKKEFYINEKEAPIVRLIHDTYEQNSSLLNLTRILNDSGYKTRAGNEWSPISVRIILKNFWYTGCYQYNRLKDGCRQKEKDQSEWVTIPNHHPALISLKQKERIVEMLRSNYKLIAANNIYYTSNNVHVFGGLITCAFCGRRYIATTDTKKGWKMGRYGCPTRRYSKTKCLNKSISDLTLGDFVFNYFVNLLKVQKHAKEITTTEELQRQLLSGYTFSSVKGLSPQSLLDTLRLIHTLNPSEKIYGKTKAIKKIAKPDKQLFTLRAKQSKLKRALDRLTTLYLYSESSMSEADFVAKKAEITDNIAKTEAEISELVKTDIHSDITDSEFLRKASEFVISQQLVSRNHISYERLARTVDVNITREFIVGTIEQITVRDGHIDSILFRNGLYHKFIY

SEQ ID NO: 1639 - protein, 562 aa, Unknown
  Description of Unknown: Integrase B1640 sequence
  PTHR30461:SF3,cd00338,SM00857,IPR006118,G3DSA:1.10.10.2600, IPR036162,PS51737,G3DSA:3.40.50.1390,IPR006119,IPR038109, PF07508,IPR011109,SSF53041,PTHR30461,PS00397, PS51736,Coil,PF00239
MKNKIAVYIRVSTTHQIDKESLPFQRRELENYAKYVLNIDDMEFFEDAGYSGKNIMRPAFQSMMSRVRLGEFSHILVWKIDRISRNIIDFANMFEELKKLNVTFVSKNEQFDTSSAIGEAILKIILVFAELERNLTAERVSDVMISRASTGQWNGGRVPLGYNYDKENHTFTVNQQEAEIVKFIFDYYIDNGSMVSLVNALKDKEIKTRTNGAFSLSAVATVLNNIFYTGKYRYNYRKQGDRQQVKPESEWIVIDNHHPAIISEEVFKRAEEIKQTNLRLKNEKGKIVKKNNIHLFANLLECDVCHNNFSSSLDRPRVNQGGYRHSMYNCYGRRIGACKSKYVSDVYLGKFVFNYIANLYKAYCSFGKSTTFETFKKKMLRGNIFSDIKEVTNLEGIYNIFCSKYNDKATANIINYKNTQQDLGNELRIALSEKGKYERALARLKDAYLFSDDAMTQNEYISQKHSIEVKLSATNKKLDKLQSKDDTPFDDVEFLNILSYFILNQNLQDKREIDFVDFITSVDKKIISDFVHKMFVKFIISKGKIKSMTFRNGITNTFVYDD

SEQ ID NO: 1640 - protein, 562 aa, Unknown
  Description of Unknown: Integrase B1641 sequence
  PTHR30461:SF3,IPR036162,PS51737,IPR011109,PTHR30461, PS00397,PF00239,G3DSA:1.10.10.2600,IPR006119,SSF53041, SM00857,IPR025827,IPR038109,PS51736,cd03768, IPR006118,PF13408,G3DSA:3.40.50.1390,PF07508,Coil
MTSARVAIYIRVSTTHQVDKDSLPMQRQDLIAYAKLMLHTTDCVIFEDAGYSGKNMDRPRFQSMMKQIRQGLFTHVLVWKIDRISRNLLDFASMYEELKSLGVTFVSKNEQFDTSTAMGEAMLKIILVFAELERNMTSERVTATMISRASNGQWNGGRVPFGYSYDSEKKEFYINEKEAPIVRLIHDTYEQNSSLLNLTRILNDSGYKTRAGNEWSPISVRIILKNFWYTGCYQYNRLKDGCRQKEKDQSEWVTIPNHHPALISLKQKERIVEMLRSNYKLIAANNIYYTSNNVHVFGGLITCAFCGRRYIATTDTKKGWKMGRYGCPTRRYSKTKCLNKSISDLTLGDFVFNYFVNLLKVQKHAKEITTTEELQRQLLSGYTFSSVKGLSPQSLLDTLRLIHTLNPSEKIYGKTKAIKKIAKPDKQLFTLRAKQSKLKRALDRLTTLYLYSESSMSEADFVAKKAEITDNIAKTEAEISELVKTDIHSDITDSEFLRKASEFVISQQLVSRNYISYERLARTVDVNITREFIVGTIEQITVRDGHIDSILFRNGLYHKFIY

SEQ ID NO: 1641 - protein, 562 aa, Unknown
  Description of Unknown: Integrase B1642 sequence
  PTHR30461:SF3,cd00338,SM00857,G3DSA:1.10.10.2600,IPR036162, PF13408,PS51737,IPR025827,G3DSA:3.40.50.1390,IPR006119, IPR038109,PF07508,IPR011109,SSF53041,PTHR30461, PS51736,Coil,PF00239
MARKKVTESEGNAVAYARYATRKQVELPQEDAAIYARYSSHMQNDASIEQQVEECREYARTHNLRIVEVYADRALSGRNDKRPEFQKMLRHAEAGKFRVVLSYKSNRIARNMLHALSYEDKLAQMGVRVVYAKEEFGDNAAGRFALRTMMNVNQFYSENMAEDIKRGLMDAAMQCKVVSMIPLGYRKGADGKYEIDENEAAIVREIFQRVAAGESYAAIADDLNARKISTKHGKTWGKNSFRVLLSNERYIGVYLYGDLRIENGMPVIIEKELFNTVQHIVAKKPTKVNGRRRDNGDYLLTGKLFCGYCESPMVGVSGTSKTGILHHYYACQKQRLEKACHKKIVRRDWAERMVTEALMAYVLNDESIEWIADMVMSFKKKFIEEDSQIDYLEERLSESMKASENIMKAIEAGIFNNKTQERMLELEAEQRDLNSQLTAERALIPNVNREQIVYWLQSLRNGNAESRTFQAKLFDIFLLRVYLYDDHVKFIFNWDKENSGVEIPMEATSDDDPGACDDASCVRIESPRLHFFTAIPKRGRGTFFVLGQIGCESTTNFNCFVL

SEQ ID NO: 1642 - protein, 562 aa, Unknown
  Description of Unknown: Integrase B1643 sequence
  cd00338,SM00857,G3DSA:1.10.10.2600,IPR036162,PF13408, PS51737,IPR025827,G3DSA:3.40.50.1390,IPR006119,IPR038109, PF07508,IPR011109,SSF53041,PTHR30461,Coil, PF00239
MAYRKITDIRDTIGMRAVFYARVSTAEEEQLNAIELQIEENRGCIKDHGWKLVGEYIDRSKSGTMVKGRDDYQRLYEDLYEDLFDIVVIKDQERLQRNTLDWYLFINRVVQTGKLLFMYMDGKFYSPDDALITGVRAIIAEEFSRNLSKKLHNYHDHRIEKARQGQEIALQGSGNVYGWDKKDGKYYINPEQAKVRRLMCEGIMARKGSTLIAKELNDAGYRNTVGKPWKPMDIPKFVYDCKNVGTMIINKERHDFESKQTIKLPKEEWVYVENALPPIVTQEEWDLICKIHEERVIATGSDRRGKKTSGYSFSGKLVCGICGAPYWRKQRVSKDEYWVCSTKQTKGRRTRKRDSTMGKAGEINPLGCDNENISYNSLMEIMGVVSERLQANTDTIKHDMINWLTKLRKQLLEANGGHTEADLQRELSRKSKLLDAYLDGILNKQEYQKKAEELDERIIQLKAETEKNKANSGDIAEIDKVLANIDEEVSRYVDGNEKLKVEYLLEHLEQVQIFPDKVIVIVPILSEGIVVEKAQYVSREKWKRKNDFFKSVRQKRVYSDIA

SEQ ID NO: 1643 - protein, 562 aa, Unknown
  Description of Unknown: Integrase B1644 sequence
  PTHR30461:SF3,SM00857,IPR006118,G3DSA:1.10.10.2600,IPR036162, PS51737,G3DSA:3.40.50.1390,IPR006119,IPR038109,PF07508, IPR011109,SSF53041,PF00239,PTHR30461,PS00397, PS51736,Coil,cd00338
MKNKIAVYIRVSTTHQIDKESLPFQRRELENYAKYVLNIDDMEFFEDAGYSGKNIMRPAFQSMMSRIRLGEFSHILVWKIDRISRNIIDFANMFEELKKLNVTFVSKNEQFDTSSAIGEAILKIILVFAELERNLTAERVSDVMISRASTGQWNGGRVPLGYNYDKENHTFTVNQQEAEIVKFIFDYYIDNGSMVSIVNALKDKEIKTRTNGAFSLSAVATVLNNIFYTGKYRYNYRKQGDRQQVKPESEWIVIDNHHPAIISEEVFKRAEEIKQTNLRLKNEKGKIVKKNNIHLFANLLECDVCHNNFSSSLDRPRVNQGGYRHSMYNCYGRRIGSCKSKYVSDVYLGKFVFNYIANLYKAYCSFGKSTTFETFKKKMLRGNIFSDIKEVTNLEGIYNIFCSKYNDKATANIINYKNTQQDLGNELRIALSEKGKYERALARLKDAYLFSDDAMTQNEYISQKHSIEVKLSATNKKLDKLQSKDDTPFDDVEFLNILSYFILNQNLQDKREIDFVDFITSVDKKIISDFVHKMFVKFIISKGKIKSMTFRNGITNTFVYDD

SEQ ID NO: 1644 - protein, 562 aa, Unknown
  Description of Unknown: Integrase B1645 sequence
  PTHR30461:SF3,SM00857,G3DSA:1.10.10.2600,IPR036162,PF13408, IPR025827,G3DSA:3.40.50.1390,PS51737,IPR006119,IPR038109, PF07508,SSF53041,IPR011109,PTHR30461,Coil, PS51736,cd00338,PF00239
MRKKFNIDLSMLTPEEQQQFHDDPTTLTKGEVDVALYLRFSSERQKEQSIEGQLRDCIAYCKRKSFRIVAIYVDRATTARKDVEKRVHFQEMISDSIHHLWDFVVVWKLDRFARNREDSAVFKMRLRKNGVRVKSATETISENPEGIILESVLEGIAEYYSADLSQKITRGLRESAMKGHSVGGHVPLGYKIEDHKLVINPATAHIVQEAFQLYANGESMAEICRIFNGKGYRTAKNSEFNRSSFKSMFRNVRYIGTYIYKDIKKENAIPAIIDKDLFETVQRRLSLAADAPARGKAKVDYLLSGKLFCGHCGATMNGESGTSKTGAIHNYYTCYSRKRRKGCDKKPLKKDFIERIVAQDAMALLTNDVIEELADMAMSQADRDLKENTRIPELSTRLTEVEQGINNITKAIEKGIASDTLLNRLTELEKEKKDLTSQLREEEKYICRIDRDQIIFWLTKFQGGDIEDEDCRRRIIDLLVNSVTVWDEPDGYKITTAYNLTSCKTKTFRVSNTGSPSSEGFGFGELSSTKSKIRTFVRRDRGSDFSCLQLVLSRNEFKKEDA

SEQ ID NO: 1645 - protein, 562 aa, Unknown
  Description of Unknown: Integrase B1646 sequence
  PTHR30461:SF3,IPR036162,PS51737,IPR011109,PTHR30461, PF00239,G3DSA:1.10.10.2600,IPR006119,SSF53041,cd00338, SM00857,SSF57997,IPR025827,IPR038109,PS51736, PF13408,G3DSA:3.40.50.1390,PF07508,Coil
MENAYIYTRVSTLIQVDGFSLEAQEAEIRAFAEARKINIVGKYTDEGKSGKNAEHRPAFTQMMEDIRSKKDNIRYVLVFKLSRFARNTSDTAKYLQELSSYGIGLLGIKDGIDTSTVTGKMIANIMGAVAEVELENIHEQTLAGRQQKARNGLWNGAQAPFGYSLKDKKLMIYQKEAETVKEIFRLYTEEGQSISYIAKKLNDENIQREQRGNVKISGFTDRTVRIILSNPVYAGMISYGRRHTVKVEGKNNETKVVKQDDESKIILVDGVHEPIVSKETFAKAAERLKKNVAHRKTRSDSTTVYPLTGLIRCPDCGKNIFGYTAPPRKKKNGKEGYYPRYISYRCISGRDRNGISCSLANKYYSGTKLETEVKEVISSMVTIPEFVELISQKIDIQTDVNSLRKKQTAIRNEITKYSGNLFQTEKRLTELDIADRHYQSKVDSLNRILDDLYEKIEDAQTRLDEVDQEIAMVEKSAMTKKSIFEMLEGFSKYYDVMSPEDKKALLQAMVSFIELYPEKRDDKHLIKTIHFTFPVTYDGESGALFVRTNELQVECVVKLTRG

SEQ ID NO: 1646 - protein, 562 aa, Unknown
  Description of Unknown: Integrase B1647 sequence
  PTHR30461:SF3,cd00338,SM00857,IPR006118,G3DSA:1.10.10.2600, IPR036162,PS51737,G3DSA:3.40.50.1390,IPR006119,IPR038109, PF07508,IPR011109,SSF53041,PTHR30461,PS00397, PS51736,Coil,PF00239
MKNKIAIYIRVSTTHQIDKESLPFQRRELENYAKYVLNIDDMEFFEDAGYSGKNIMRPAFQSMMSRVRLGEFSHILVWKIDRISRNIIDFANMFEELKKLNVTFVSKNEQFDTSSAIGEAILKIILVFAELERNLTAERVSDVMISRASTGQWNGGRVPLGYNYDKENHTFTVNQQEAEIVKFIFDYYIDNGSMVSLVNALKDKEIKTKTNGAFSLSAVATVLNNIFYTGKYRYNYRKQGDRQQVKPKSEWIVIDNHHPAIISEEVFKRAEEIKQTNLRLKNEKGKIVKKNNIHLFSNLLECDVCHNNFSSSLDRPRVNQGGYRHSMYNCYGRRIGACKSKYVSDVYLGKFVFNYIANLYKAYCSFGKSTTFETFKKKMLRGNIFSDIKEVTNLEGIYNIFCSKYNDKATANIINYKNTKQDFGNELRIALSEKGKYERALARLKDAYLFSDDAMTQNEYISQKHSIEVKLSATNKKLDKLQSKDDTPFDDVEFLNVLSYFILNQNLQDKREIDFVDFITSVDKKIISDFVHKMFIKFIISNGKIKSMTFRNGITNTFVYDD

SEQ ID NO: 1647 - protein, 562 aa, Unknown
  Description of Unknown: Integrase B1648 sequence
  PTHR30461:SF3,SM00857,G3DSA:1.10.10.2600,IPR036162,PF13408, IPR025827,G3DSA:3.40.50.1390,PS51737,IPR006119,IPR038109, PF07508,IPR011109,SSF53041,PTHR30461,cd00338, PF00239
MPTGKNTARKYAAGGGSDNSCGVEPLRAVIYARYSSSGQREESIEGQLRDCYEFAKKHGIIVIGEYIDKAMTGRVDRRPDFQRMMKDSEKGRFNCVLLWKMDRFARNRYDSAMYKYKLKKNGIRIFYAKETIPDGPEGIILESVMEGYAEYYSENLAQNVKRGNYDSALELKTLGKTCLGLKTGPDGRYMIDQAEAVIIRRIFEEYAEGERAKDIYERLNSEGYRTSRGGKFNKNSLRRILSNKKYIGVYEYEDIYVENGIPAIITDRDLFERVQKMLKINHDAPARGKAQNFLLTTKLFCGLCGSPMIGDGGTSHTGKAYAYYSCTKRKRGRSCKKESVPKDWIEDLVVGELVKIVHNDELIEQIADRVMEYQKREKDQSGLHALEIRQKENEKAISNMLAAIEAGIITPSTKTRLMELEADRADIEKGIAHELLAEPEFERDQIIYFLERFRSGDINDEAYRIMLVDTFLNSVYLYDDDHLVLVMNYSGENCKVDLKLVEGAVSGDGCKGSAFAPSSAVEQEKSGRQDLNLFKLLLPAVEQETERRIRREVFGFYGRFRE

SEQ ID NO: 1648 - protein, 562 aa, Unknown
  Description of Unknown: Integrase B1649 sequence
  cd03768,PTHR30461:SF3,SM00857,IPR006118,G3DSA:1.10.10.2600, IPR036162,PS51737,G3DSA:3.40.50.1390,IPR006119,IPR038109, PF07508,IPR011109,SSF53041,PTHR30461,PS00397, PS51736,Coil,PF00239
MKNKIAVYIRVSTTHQIDKESLPFQCRELENYAKYVLNIDDMEFFEDAGYSGKNIMRPAFQSMMSRIRLGEFSHILVWKIDRISRNIIDFANMFEELKKLNVTFVSKNEQFDTSSAIGEAILKIILVFAELERNLTAERVSDVMISRASTGQWNGGRVPLGYNYDKENHTFTVNQQESEIVKFIFDYYIDNGSMVSLVNALKDKEIKTKTNGAFSLSAVATVLNNIFYTGKYRYNYRKQGDRQQVKPKSEWIVIDNHHPAIISEEVFKKAEEIKQTNLRLKNEKGKIVKKNNIHLFANLLECDVCHNNFSSSLDRPRVNQGGYRHSMYNCYGRRIGACKSKYVSDVYLGKFVFNYIANLYKAYCSFGKSTTFETFKKKMLRGNIFSDIKEVTNLEGIYNIFCSKYNDKATANIINYKNTQQDLGNELRIALSEKGKYERALARLKDAYLFSDDAMTQNEYISQKHSIEVKLSATNKKLDKLQSKDDTPFDDVEFLNVLSYFILNQNLQDKREIDFVDFITSVDKKIISDFVHKMFVKFIISKGKIKSMTFRNGITNTFVYDD

SEQ ID NO: 1649 - protein, 562 aa, Unknown
  Description of Unknown: Integrase B1650 sequence
  PTHR30461:SF3,SM00857,G3DSA:1.10.10.2600,IPR036162,PF13408, IPR025827,PS51737,G3DSA:3.40.50.1390,IPR006119,IPR038109, PF07508,IPR011109,SSF53041,PTHR30461,Coil, PS51736,cd00338,PF00239
MRKKFNIDLSMLTPEEQQQFHDDPTTLTKGEVDVALYLRFSSERQTEQSIEGQLRDCIAYCKRKSFRIVAIYVDRATTARKDVEKRVHFQEMISDSAHHLWNFVVVWKLDRFARNREDSAVFKMRLRKNGVRVKSATETISENPEGIILESVLEGIAEYYSADLSQKITRGLRESAMKGHSVGGHVPLGYKIEDHRLVINPATAHIVQEAFQLYANGESMAEICRIFNSKGYRTAKNSEFNRSSFKSMFKNVRYIGTYIYKDIKKENAIPAIIDKGLFETVQRRLSLAADAPARGKAKVDYLLSGKLFCGHCGATMNGESGTSKTGAIHNYYTCYSRKRRKGCNKKPLKKDFIERVVAQDAMALLTDDVIEELADMAMSQADRDLKENTRIPELSARLTEIEQGINNITKAVEKGIASDALLNRLTELEKEKKDLTSQLREEEKYIYRIDRDQVVFWLTKFQGGDIEDEDCRRRIIDLLVNSVTVWDEPDGYKITTAYNLTSCKTKTFRVSTAGSPSSEGFGFGELSSTKSKIRTFVRRDRGSDFSCLQLVLSRNEFKKEDA

SEQ ID NO: 1650 - protein, 562 aa, Unknown
  Description of Unknown: Integrase B1651 sequence
  PTHR30461:SF3,IPR036162,PS51737,IPR011109,PTHR30461, PF00239,G3DSA:1.10.10.2600,IPR006119,PF14287,SSF53041, IPR025378,SM00857,IPR025827,cd03770,IPR038109, PS51736,PF13408,G3DSA:3.40.50.1390,PF07508,Coil
MATNKNIQGQEEKITALYCRLSQDDNLEGESNSISNQKEILMTYAKKNGYLHPQFFVDDGISGTTFNRPGFQEMESLIEAGKVSTVIVKDLSRFGREHLLCGHYTEIVYPTLGVNFIAIQENVDTTKGIGTEMMPFHNIFNEWYAAQTSKKIRAVNEMKASKGMRISSTVPYGYKKIEGDKEQWYIDEPAAEIVRKIFNLCISGKGPSQIARQLEAEKVLTPTAYFNSVGKKTSNLMPTNIYAWRSNSIVHILENRQYTGCTVNGKSTTVSYKVHKKIEKSQEDYQIISNTQDAIISENTWLRAQELRRNKRRNTATGRRSLFSGLVYCADCGSKLHFCASKSLKKNQEFWRCSSYKDGRGTCTIHFIRDVVLEAIVKEAISELADFVRCYNSVFLYLISENKGAESINREKSLRAKTESAKQRISDLDKLFSRIYEDNILGKLSDERYSRMANEYEAEQKRLISEVEENEKVLIELQKQTVDMKMLYQGLMEFTEMKQLTPTVVNKLIERIEIHNNEKKHSHNNVKVDIYFTAAGLFDIPTEQQLIDTMERVKQKKAEKSA

SEQ ID NO: 1651 - protein, 562 aa, Unknown
  Description of Unknown: Integrase B1652 sequence
  PTHR30461:SF3,SM00857,G3DSA:1.10.10.2600,IPR036162,PF13408, IPR025827,G3DSA:3.40.50.1390,PS51737,IPR006119,IPR038109, PF07508,IPR011109,SSF53041,PTHR30461,Coil, PS51736,cd00338,PF00239
MKKQQKCYIYTRVSTSMQVEGYSLDAQKDKLKKYADYQEMYIVGEYSDEGKFGKSVEGRPQFKQMLADVESGKDNVDYVLVFKLSRFGRNAADVLSSLQKMQDYGVNLICVEDGIDSSKDVGKLMISVLSAVAEIERENILVQTMEGRRQKAREGRWNGGFAPYGYQLINGELIIAEDEAEIIRIIYDKFVNTTMGMAAIAAFLNNSGYKKKLRQNNTIEGFSTSFVKGVLDNPIYCGKLAFGRRKNEKIPGTRNEYHIVKQKDYLLSDGVHEAIISEEMWNQAHRKRQETGVLQVKTHSLEHEHILSGIIKCPVCGSGMYGNVNRKKHPDGGYYKDYFYYACKHRKLVDGHRCTYKRQWNEDRINAAVEEIIRKFVKNPKFEQEIRKQIGSSIDTSELDKEYDGLKDRLSQTTGAKNRLADQMDHLSVSDKNYDKKYNDMQERLDKLYDEITDIEDAMEEVETRLYNIRQDKISEDNVYQFLLFFDKLYDKFTDLEKKTFLKSFLSDVFIYEEEQKDGRILKGLRFKFPIYMNGRNVLGVDWDNESTDETVCQIIPQKRYT

SEQ ID NO: 1652 - protein, 562 aa, Unknown
  Description of Unknown: Integrase B1653 sequence
  PTHR30461:SF3,SM00857,G3DSA:1.10.10.2600,IPR036162,PF13408, IPR025827,G3DSA:3.40.50.1390,PS51737,IPR006119,IPR038109, PF07508,SSF53041,IPR011109,PTHR30461,Coil, PS51736,cd00338,PF00239
MRKKFNIDLSMLTPEEQQQFHDDPTTLTKGEVDVALYLRFSSERQKEQSIEGQLRDCIAYCKRKSFRIVAIYVDRATTARKDVEKRIHFQEMISDSAHHLWNFVVVWKLDRFARNREDSAVFKMRLRKNGVRVKSATETISENPEGIILESVLEGIAEYYSADLSQKITRGLRESAMKGHSVGGHVPLGYKIEDHKLVINPATAHIVQEAFQLYANGESMAEICRIFNGKGYRTAKNSEFNRSSFKSMFRNVRYIGTYIYKDIKKENAIPAIIDKDLFETVQRRLSLAADAPARGKAKVDYLLSGKLFCGHCGATMNGESGTSKTGAIHNYYTCYSRKRRKGCDKKPLKKDFIERIVAQDAMALLTNDVIEELADMAMSQADRDLKENTCIPELSTRLTEVEQGINNITKAIEKGIASDTLLNRLTELEKEKKDLTSQLREEEKYICRIDRDQIIFWLTKFQGGDIEDEDCRRRIIDLLVNSVTVWDEPDGYKITTAYNLTSCKTKTFRVSTAGSPSSEGFGFGELSSTKSKIRTFVRRDRGSDFSCLQLVLSRNEFKKEDA

SEQ ID NO: 1653 - protein, 562 aa, Unknown
  Description of Unknown: Integrase B1654 sequence
  PTHR30461:SF3,SM00857,G3DSA:1.10.10.2600,IPR036162,PF13408, IPR025827,PS51737,G3DSA:3.40.50.1390,IPR006119,IPR038109, PF07508,IPR011109,SSF53041,PTHR30461,cd00338, PF00239
MPTSKNTARKYAAGGSSDNSCGVEPLRAVIYARYSSSGQREESIEGQLRDCYEFAKKHGIIVIGEYIDKAMTGRVDRRPDFQRMMKDSEKGRFNCVLLWKMDRFARNRYDSAMYKYKLKKNGIRIFYAKETIPDGPEGIILESVMEGYAEYYSENLAQNVKRGNYDSALELKTLGKTCLGLKTGPDGRYMIDQAEATIVRRIFEEYAEGERAKDIYERLNSEGYRTSRGGKFNKNSLRRILSNKKYIGVYEYEDIYVENGIPAIITDRDLFERVQKMLKINHDAPARGKAQNFLLTTKLFCGLCGSPMIGDGGTSHTGKAYAYYSCTKRKRGRSCKKESVPKDWIEDLVVGELVKIVHNDELIEQIADRVMEYQKREKDQSGLHALEIRQKENEKAISNMLAAIEAGIITPSTKTRLMELEADRADIEKGIAHELLAEPEFERDQIIYFLERFRSGDINDEAYRIMLVDTFLNSVYLYDDDHLVLVMNYSGENCKVDLKLVEGAVSGDGCKGSAFAPSSAVEQEKSGRQDLNLFKLLLPAVEQETERRIRREVFGFYGRFRE

SEQ ID NO: 1654 - protein, 561 aa, Unknown
  Description of Unknown: Integrase B1655 sequence
  cd03768,PTHR30461:SF3,SM00857,IPR006118,G3DSA:1.10.10.2600, IPR036162,PS51737,G3DSA:3.40.50.1390,IPR006119,IPR038109, PF07508,IPR011109,SSF53041,PTHR30461,PS00397, PS51736,Coil,PF00239
MDKKKKSALYVRVSTTHQIDKDSLPLQRSDLTNYTKYVLGIEDFEIFEDAGYSGGTTDRPAYQDMMNRIKKGEFTHLIVWKIDRISRNLRDFSEMYDELKKYNVTFISKNEQFDTSTAMGEAMLKIILVFAELERKLTGERVFSVMISRAQKGLWNGATVPLGYEWDAETKFPRPYDSEAKVVQYIYDQYEIIKSTTKLAKKLNIEKIPTKRNGTWTPRTVGSILTNPFYIGTYRYNTKTRKTRRWKNKSEWVVVEDNHQAIINKEQFERVVNIIQSNYKGDKNYQRTNNKVHILSGIASCHKCGKKMHSGLDRARKEGFTPSRYTCYAFNVNYTCANYSSDLAILPGLINYIANYITLQERITPKHSLRDMESILLRGKYFEDIDHIEKQDLKNTYNLLINNTLVTYNSLEDEKKEAIVSQNAIYEAEKEKYIKALKRLDDLYLYDINSMSQKDFVIKRKEISDKIESVNKKIQEVKLNDTPFINNDDFGVLSKASFYLLTKNLSSVKNIDVISLLNNLDKQTVKDFINAIITDVSVERGKIYNITFKNGIVHHFIYKNQ

SEQ ID NO: 1655 - protein, 561 aa, Unknown
  Description of Unknown: Integrase B1656 sequence
  PTHR30461:SF3,cd00338,SM00857,G3DSA:1.10.10.2600,IPR036162, PF13408,PS51737,IPR025827,G3DSA:3.40.50.1390,IPR006119, IPR038109,PF07508,IPR011109,SSF53041,PTHR30461, PS51736,Coil,PF00239
MKKEKIKVYTYTRVSTAMQIDGYSLDAQKSRMKAFAEFNDYEIAHEYEDAGKSGKSIEGRTQFNQMMEDIKTGKDGVSFVLVFKLSRFGRNAADVLSTLQVMQDFGVNLICVEDGIDSSKDAGKLMISVLSAVAEIERENIRVQTMEGRIQKAREGKWNGGFAPYGYKLVDGKLEINEEEAPAIRTIYEQYVTTDSGANGIAKYLENHGISKVQRQNGKNPLFDARLIRMILKNPVYCGKIAYGRRKTEKVHGTRNEYRLVEQENFLLVDGLHEAIIPEDVWQAAQVKLAAQAKRYEHVNKGKNECTHLLSGIVKCPICGVGMYGNKCVKRKADGSKYKDFYYYGCKHRSMTRGHKCDYKKQIRKELLDDAVAEVICKLVSNPKFAAMMQEKINMKVDTTAIEQEISNYEKRLRQAYSTKSKLIEEIDSLDPDDRHYSRRKSDLDDRLYGMYDKIEELESLLIAARAKKQAIEAEKLTGDNIYKVLIYFDQLYGKMNDREKRQLIEELISEIQIYPERQPNGQWLKSIKFRLPIIEEDMNISLDNEQQVETVVELSRKIKD

SEQ ID NO: 1656 - protein, 561 aa, Unknown
  Description of Unknown: Integrase B1657 sequence
  PTHR30461:SF3,cd00338,SM00857,G3DSA:1.10.10.2600,IPR036162, PF13408,PS51737,G3DSA:3.40.50.1390,IPR025827,IPR006119, IPR038109,PF07508,IPR011109,SSF53041,PTHR30461, PS51736,Coil,PF00239
MKNKKIKCDIYTRVSTTMQVDGYSLDAQKEKLKRYAEFQNMEIVNEYSDEGKSGKSVEGRPEFQRMLDNIENGTDEVQFVLVFKLSRFGRNAADVLNSLQRMQDFGVNLICVEDGIDSSKDSGKLMISVLSAVAEIERENILVQTMEGRKQKAREGKWNGGFAPYGYELVNGELQIAEDEAEIIRLIYDKFIHTNMGISAIAAWLNQHGYKKKKRQNNTLDAFASSFIKGVLDNPVYCGKLAYGRRKNEKVSGTRNEYRIVKQENYMLHDGIHEGIISETDWELAHQKREKTGVKYEKTHSLDHEHILSGILRCPLCGSGMYGNVNRKKKKDGTLYKDYFYYACKHRRLVDGHKCGYRKQWSEEKINNAVEEVIRKLVKNPKFEEAILNKIGSRIDTEEIEKEIEGLEKQHKQLTGAKARLGQQMDSLDIMDKFYEKKYQDMETRLYRLYDEIEGVENSIEEVKNRLLNIQQQKISEENVYQFLLYFDKLYDKFTDLEKKEFLNSFVEQVDIYEQEQPDGRFLKHIKFRFPVYFGDRETQELCWDNESTVETVCLLARKDK

SEQ ID NO: 1657 - protein, 561 aa, Unknown
  Description of Unknown: Integrase B1658 sequence
  cd03768,PTHR30461:SF3,SM00857,IPR006118,G3DSA:1.10.10.2600, IPR036162,PS51737,G3DSA:3.40.50.1390,IPR006119,IPR038109, PF07508,IPR011109,SSF53041,PTHR30461,PS00397, PS51736,Coil,PF00239
MDKKKKSALYVRVSTTHQIDKDSLPLQRSDLTNYTKYVLGIEDFEIFEDAGYSGGTTDRPAYQDMMNRIKKGEFTHLIVWKIDRISRNLRDFSEMYDELKKYNVTFISKNEQFDTSTAMGEAMLKIILVFAELERKLTGERVFSVMISRAQKGLWNGATVPLGYEWDAETKFPRPCDSEAKVVQYIYDQYEIIKSTTKLAKKLNIEKIPTKRNGTWTPRTVGSILTNPFYIGTYRYNTKTRKTRRWKNKSEWVVVEDNHQAIINKEQFERVVNIIQSNYKGDKNYQRTNNKVHILSGIASCHKCGKKMHSGLDRARKEGFTPSRYTCYAFNVNYTCANYSSDLAILPGLINYIANYITLQERITPKHSLRDMESILLRGKYFEDIDHIEKQDLKNTYNLLINNTLVTYNSLEDEKKEAIVSQNAIYEAEKEKYIKALKRLDDLYLYDINSMSQKDFVIKRKEISDKIESVNKKIQEVKLNDTPFINNDDFGVLSKASFYLLTKNLSSVKNIDVISLLNNLDKQTVKDFINAIITDVSVERGKIYNITFKNGIVHHFNYKNQ

SEQ ID NO: 1658 - protein, 561 aa, Unknown
  Description of Unknown: Integrase B1659 sequence
  SM00857,G3DSA:1.10.10.2600,IPR036162,PF13408,PS51737, IPR025827,G3DSA:3.40.50.1390,IPR006119,IPR038109,PF07508, SSF53041,IPR011109,PTHR30461,Coil,cd00338, PF00239
MAYRKITDIKDTIGMRAVFYARVSTAEEEQLNAIELQIEENRGCIKDHGWKLVGEYIDRSKSGTMVKGRDDYQRLYEDLYEDLFDIVVIKDQERLQRNTLDWYLFINRVVQTGKLLFMYMDGKFYSPDDALITGVRAIIAEEFSRNLSKKLHNYHDHRIEKARQGQEIALQGSGNVYGWDKKDGKYYINPEQAKVRRLMCEGIMARKGSTLIAKELNEAGYRNTVGKPWKPMDIPKFVYDCKNVGTMIINKERHDFESKQTIKLPKEEWVYVENALPPIVTQEEWDLICKIHEERVIATGSDRRGKKTSGYSFSGKLVCGICGAPYWRKQRVSKDEYWVCSTKQTKGRRTRKRDSTMGKAGEINPLGCDNENISYNSLMEIMGVVSERLQANTDTIKHDMINWLTKLRKQLLEANGGHTEADLQRELSRKSKLLDAYLDGILNKQEYQKKAEELDERIIQLKAETEKNKANSGDIAEIDKVLANIDEEVSRYVDGNKKLKVEYLLEHLEQIQIFPDKVIVIVPILSEGIVVEKTQYVSREKWRGKKYVIKDYCRSLKTNCW

SEQ ID NO: 1659 - protein, 561 aa, Unknown
  Description of Unknown: Integrase B1660 sequence
  PTHR30461:SF3,cd00338,SM00857,G3DSA:1.10.10.2600,IPR036162, PF13408,PS51737,IPR025827,G3DSA:3.40.50.1390,IPR006119, IPR038109,PF07508,IPR011109,SSF53041,PTHR30461, mobidb-lite,Coil,PF00239
MPRKPAKHPAKPKRGKKLEVEEPGVLYGRYSSHNQKDISVEQQFEKGYELAAEYGIRIIDTYADRAVSGRTDKRRDFQRMMTDAAKGKFRYVIAWKSNRMGRNMLEALINEARLQDLGVRVLYVEEDFDDTAAGRFAARSMMNVNQFYSENMAEDIKRGLYDNAANCMVANGHLPYGYKADETLHYAIDEPKAAVIREIFTRVSCGEAFVDIMASLNARGIKTSYGRPWGRSSFQKILSNERYRGIYIYGDVRKEGGIPRIISDELYFKVQEVITTKKNPQGRHRVNGDYLLTGKLFCGHCKSPMTGISGTSRSGNLHYYYVCQKRRTEKTCEKKNLRRDDIELQVAKAIKRRTLDDDTINWIADSVVEYSQHQESASGIGLLEDQLKDTQRSIKNLMAAIEQGIITPTTKARLMELEKEQSDIDRKITMAKADVIPVNRDQLVGWLKKLQAGDVHDKKYQAELFDTFLIAVYVYDNPDGQDYMKVVFNYAGSKNTVEIPLDPSVIDNVENIETGAVRLSSAQVHQSRARRTERSPGSAPISAIYMVGGVFVLVCPLDAEE

SEQ ID NO: 1660 - protein, 561 aa, Unknown
  Description of Unknown: Integrase B1661 sequence
  PTHR30461:SF3,cd00338,SM00857,G3DSA:1.10.10.2600,IPR036162, PF13408,PS51737,G3DSA:3.40.50.1390,IPR025827,IPR006119, IPR038109,PF07508,IPR011109,SSF53041,PTHR30461, Coil,PF00239
MYEEIKTACLYLRYSSSNQTEQSIEGQMHVCQDFCQRHNIRIVEMYIDRATSASKDIEKRVEFLKMIKDSEKGNFNAVIVYKLDRFARSRYDSATYKYRLKRNGVQLISATENITQDPEGIILESVLEGMAEFYSAELSQKINRGMRESAMKHNSIGGAIPLGYKTVDKKLVIDETTAPIVREAFQMYADGESVAEICRTFNNRGYKTSKGTRFGKSSFTKIFRNEKYIGVYKYHDYRAEDVIPPIIDKDLWDRVQVRVGKIKKAPARNKARHTYLLTGKLFCGHCGSAMNADGNSQGYLYYRCYGKKNLDKQCNKRNMEKNLIERLVAQDAMSFLTDEYIEKIATIACDRNKQEIESDSPIPVIRDRIRQVDVSLNNLLKAIETGSAPDMLVKRMGELETEKKDMEVQLKKEMAHQVYIDKEQVIFWLEKFREGDINDEEFCQTVIDLFVNSVTVWDEPDDKFKITIAYNLTSIPQKTYRLSKDGRLSDYASNTPQKRSHKKIFSFCGTDFSVFVLVFAIIPSPSEPDTDTAADGSFPRLPRRCHSYSEVLLRLYRQTAV

SEQ ID NO: 1661 - protein, 561 aa, Unknown
  Description of Unknown: Integrase B1662 sequence
  PTHR30461:SF3,SM00857,G3DSA:1.10.10.2600,IPR036162,PF13408, IPR025827,G3DSA:3.40.50.1390,PS51737,IPR006119,IPR038109, PF07508,SSF53041,IPR011109,PTHR30461,Coil, PS51736,cd00338,PF00239
MREVEILKKKQLKCYLYTRVSTSMQVDGYSLDAQRDKLRKYAAYEDMIVAGEYSDEGFSGKNIQGRQDFQRMLNDIQDGKDDVSYVLVFKLSRFGRNAADVLNSLQLMQDFGVNLICVEDGIDSSKDAGKLMISVLSAVAEIERENIRTQTMAGREQKAREGKWNGGFAPYGYKLEDGNLVIAEDEVEVIRVIYDRYIHTNEGVAGVAKYLNRNGYVKKLRQNNTIPGFSRDFVKNVLYNPVYMGKIAYGRRRTEKKQGTRNEMHVVEQSEFPVYEGQHEAIISEEDWHLAQEKRKINSFKREKVNNPDHAHILSGILKCPCCGKSMYGNIAKAHSKDKKTRYYYYCKNTVTPTGHECSFRLNIEQTEINKFVAKIISAMVNNPRFVEAIQAKIGTAVDTEDMEKQIAVLQGQLKQAFGTKSRLERQMDTLDINDVHYDRKILDLQRRYDEQYDTIEEIEVQIGELQSQIRNIQQEKISGDNIYRLLLAFDEVYHSATEAEQKEFMKAFIERIEMFPEKRKDGSWIKKIVFNFPVPVDGEEVKELPLETETTVETVCLLVK

SEQ ID NO: 1662 - protein, 561 aa, Unknown
  Description of Unknown: Integrase B1663 sequence
  PTHR30461:SF3,SM00857,G3DSA:1.10.10.2600,IPR036162,PF13408, IPR025827,G3DSA:3.40.50.1390,PS51737,IPR006119,IPR038109, PF07508,SSF53041,IPR011109,PTHR30461,Coil, PS51736,cd00338,PF00239
MAKPEVSELAVVYARYSSHSQGEQSIEGQLSNARDYAAAHGYTIVHEYVDRAKSGRTDNRAEFQQMLKDTAKRQFSVIILWKVDRFGRNREEIAINKMKCRKNGVRVEYVAETIPDSPEGVILESVLEGFAEYYSLQLSQNIRRGRAESAEKCQSLGGNRPLGYKTGPDKKFVIDENTAPTVKMIFTMYADGKTVTEIVDKLNELGLRTLRGGPFTKNSLHSILKNKKYIGIYEYQGREIKDGVPRIIEDDVFNKVQEMLKINKRAPAKTWSRADYILTDKLFCGKCGALMFGESGTSKTGAKHNYYICSNKKRFRSCDKKAVRQADIEDTVLNATHELLQDDELLDYIVDRTWEYYLAQDNSQEELRNLQRQLAQTDTAISNLIRAIEAGILTEETKKRMDELTQQKADLKASIADREIARGFHLQKSHIAFYLRSLRDADWSDKEAQKRLIQTFVNAVFVYDDHITLTYNFSGDKNTITLRDMQRFEDGEEFGCRASRSTTYEKSELIPHRECVRIFHFYQGYFLLMFIPGGFFILRVFLLFAHSIPDRSPATMIAENH

SEQ ID NO: 1663 - protein, 561 aa, Unknown
  Description of Unknown: Integrase B1664 sequence
  cd00338,SM00857,G3DSA:1.10.10.2600,IPR036162,PF13408, PS51737,G3DSA:3.40.50.1390,IPR025827,IPR006119,IPR038109, PF07508,SSF53041,IPR011109,PTHR30461,PS51736, Coil,PF00239
MKAKIVRMLLRVSSDQQLEADGDLSVQRDILKEYINRHPDWILDEKEYFEGSNSAYKNTAEERDTLQEILQDAKNNEFDILVPYKDDRVGRLMMNTPEYILELKKNNVDVYSAKDGCISPKSADDIEGMMMLVFRYFNAQKSSKDTGMRVKDTMKKLVERGRFVGGKAPYGYSLEPSGEISKHGRVLKCLVVIPEKAKVVQYIYDLSLNKEYGSSKIASILNENDYWKSLAPNDYWKGGTITSILTNPIYTGRVAYNRRERIDGHYRTTDSKNWLISPVVNEKIIIIDEATWNMVQLKRSKRNFKYSKSLEERGINVIKRNDGMLSLVDVLHCGYCGSKMVNGSKYNYWEIKGTGEKRASKTPVYRCQAAKEGIPHDSTKQFRADKIEPIIFESLTTYIEFLQKNTTVLDVIQNKQIGEKKAKEKELLQAKRELQKIQHKISSMEDKMPDAIVGDYDLTPKQLNLYIQKEKDKERDQKNIIKFKQEALDKFSITNEEWSKLCENIPTWKEVFMNGDNFSKRVLVNSLVERIDIKSDSIKIRFKINLDDYLPESRMTNNDMV

SEQ ID NO: 1664 - protein, 561 aa, Unknown
  Description of Unknown: Integrase B1665 sequence
  PTHR30461:SF3,SM00857,G3DSA:1.10.10.2600,IPR036162,PF13408, PS51737,G3DSA:3.40.50.1390,IPR025827,IPR006119,IPR038109, PF07508,SSF53041,IPR011109,PF00239,PTHR30461, PS51736,Coil,cd00338
MRKKNKFPIDLSMLTDLEIQQFVDDPSTLYDGDIDVCLYLRFSSERQGEQSIEGQLRDCREYCKRNSFRIVAIYVDRAKTARQKVEKRVFFQQMVQDSAKRAWKMVVVWKLDRFSRNRTDSAIYKSRLRKNGVRVMSATESITDSPEGIILESVLEGMAEFYSAELSQKITRGMRESALKHQNVGGHVPLGYRIESKKLVINPVTAPIVLEAFTRYADGESVADICARFNDLGYKTAKGAEFNKNSFHAMFRNERYIGTYTYKDIREEGVIPAIVPQEVWERVQDRLKENSLAPARGKALVDYMLVGKLFCGHCDSMMVGESGTGKSGKKYNYYTCAGRKRKKNCRKRPLKKDWFETLVAEDTKALLTDELINELADMAIQQSEKDLQNNTIIPELEAKLSETSSGISNIISMVEKGVASETLARRLTELEKEKRDLERRLVKEKKNIVVLEKPHIVHWLKQFQSGNIDDPDFRRKLIDLLVNSVTVWDGPDDDELTITYVYNLTEGNRKTVRVKNGGNPSDARTCGGSNMALISPPLKGYPNTMFMIGMLFGYTAKHRHP

SEQ ID NO: 1665 - protein, 561 aa, Unknown
  Description of Unknown: Integrase B1666 sequence
  SM00857,G3DSA:1.10.10.2600,IPR036162,PF13408,IPR025827, G3DSA:3.40.50.1390,IPR006119,IPR038109,SSF53041,PF00239, PTHR30461,Coil,cd00338
MKAIIYARQSSGSDDISESVENQIANCKKQAEKENYQVIGIFSDLNTSGKTYPEGAESIAENDSAFLNWYDQQTGTKKYRHGLGEVIKLLDQADVLIIDEMTRLYRPVTRSFLESYVNQKITEANVKIIQVKGGKLDLSQFDQSLIQMLKNAIQDEAIANQKAKAKQQFQKLRDNGYLCNGARAFGLKYLGNKRIEVDSEAAKCIKFVFESIAAYRPYNQIIKEANQRFRHLFPKCFYSSNLYHIAENPLYCGLLRNTEGQLVKAVQLEGQEVVSYDLWQTVQRIINRNREQQPRRAKKHWLPFSGKLHCGNCGSRLVCINDKGKIIYWCKSGYYTSNSQCSSSRIRFIGTDKEFGLYQCSFPFFIIAMIERQKKAIAIWEDRKQYDSIKMQIDQIETNEQSLIDLVFDGIISADELKERLKKHKVKKLELQEKLRSLEMTTDDQWEDYKNLALAEELDSITECHLPNQWYEQYLNQVIDKITINYDCITYSTIYGECSIPRLRYKNRNFLPQWEVSLLKELNHSISDYNLIDSQTKFLITFKTGTKQTLADWGRLIIQTL

SEQ ID NO: 1666 - protein, 561 aa, Unknown
  Description of Unknown: Integrase B1667 sequence
  SM00857,G3DSA:1.10.10.2600,IPR036162,PF13408, IPR025827,G3DSA:3.40.50.1390,PS51737,IPR006119, IPR038109,PF07508,SSF53041,IPR011109, PTHR30461,Coil,cd00338,PF00239
MAYRKITDIKDTIGMRAVFYARVSTAEEEQLNAIELQIEENRGCIKDHGWKLVGEYIDRSKSGTMVKGRDDYQRLYEDLYEDLFDIVVIKDQERLQRNTLDWYLFINRVVQTGKLLFMYMDGKFYSPDDALITGVRAIIAEEFSRNLSKKLHNYHDHRIEKARQGQEIALQGSGNVYGWDKKDGKYYINPEQAKVRRLMCEGIMARKGSTLIAKELNDAGYRNTVGKLWKPMDIPKFVYDCKNVGTMIINKERHDFESKQTIKLPKEEWVYVENALPPIVTQEEWDLICKIHEERVIATGSDRRGKKTSGYSFSGKLVCGICGAPYWRKQRVSKDEYWVCSTKQTKGRRTRKRDSTMGKAGEINPLGCDNENISYNSLMEIMEVVSERLQANTDTIKQDMINWLTKLRKQLLEANGGHTEADLQRELSRKSKLLDAYLDGILNKQEYQKKAEELDERIIQLKTETEKNKANSGDIAEIDKVLANIDEEVARYVDGNEKLKVEYLLEHLEQVQIFPDKVIVIVPILSEGIVVEKTQYVSREKRSRKNHNYENAVGFNEAYFR

SEQ ID NO: 1667 - protein, 561 aa, Unknown
  Description of Unknown: Integrase B1668 sequence
  PTHR30461:SF3,SM00857,IPR036162,PF13408,PS51737, IPR025827,G3DSA:3.40.50.1390,PF14287,cd03770,PF07508, IPR006119,SSF53041,IPR011109,PTHR30461,Coil, IPR025378,PF00239
MFHQSNTAAALQFPYNAMSVEAITALYCRLSRDDELQGDSNSIINQKKILQKYALEHGYTNFRFYIDDGISGTTFNRPGFQEMIADVEAGIVKRVIIKDMSRFGRDYLQVGMYTEIMFPEHDVHFIAVNDGVDSTQGDNEFTPFRNIINEWYAKDTSKKIRAVMKVKGNAGEHLTTSAPYGYMKDPEDSKHWIPDREAADVVYEIGLYVMDGFGPSQIARKLRERKILTPAAYYESKGIPCNVKKQGDPYGWDNTTIAGIMDRWREYLGHTVNFKTTKKSYKSKKKIKNPESEWVIFENTHEPIWTEAIAEAVKQARQSRRRPTKMGEMGMFSGMMYCADCGSILYQCRATGFRKDQEYYICSGYRKGKQVCNTPHSIRTVILEELILQNLREIVSFARSHENRFAQMVMDMDVKERNKGLAQKRRLLSESKKRITELDMIFKRLYEDNISGKLTDERFHKLSTDYEAEQAGLQAQAAMLREEIEEAESKSANVDRFLSVVRQYTDIPELTPRILHEFVEKIVIHAATDPHSKINRRQEVDIYYKGIGILEMSKVFDSRQK

SEQ ID NO: 1668 - protein, 561 aa, Unknown
  Description of Unknown: Integrase B1669 sequence
  SM00857,G3DSA:1.10.10.2600,IPR036162,PF13408,IPR025827, G3DSA:3.40.50.1390,PS51737,IPR006119,IPR038109,PF07508, SSF53041,IPR011109,PTHR30461,Coil,cd00338, PF00239
MAYRKITDIKDTIGMRAVFYARVSTAEEEQLNAIELQIEENRGCIKDHGWKLVGEYIDRSKSGTMVKGRDDYQRLYEDLYEDLFDIVVIKDQERLQRNTLDWYLFINRVVQTGKLLFMYMDGKFYSPDDALITGVRAIIAEEFSRNLSKKLHNYHDHRIEKARQGQEIALQGSGNVYGWDKKDGKYYINPEQAKVRRLMCEGIMARKGSTLIAKELNEAGYRNTVGKPWKPMDIPKFVYDCKNVGTMIINKERHDFESKQTIKLPKEEWVYVENALPPIVTQEEWDLICKIHEERVIATGSDKRGKKTSGYSFSGKLVCGICGAPYWRKQRVSKDEYWVCSTKQTKGRKTRKRDSTMGKAGEINPLGCDNENISYNSLMEIMGVVSERLQANTDTIKQDMINWLTKLRKQLLEANGGHTEADLQRELSRKSKLLDAYLDGILNKQEYQKKAEELDERIIQLKAETEKNKANSGDIAEIDKVLANIDEEVARYVDGNEKLKVEYLLEHLKQVQIFPDKVIVIVPILSEGIVVEKTQYVSREKRSRKDNTVQLHQFRYYQGCR

SEQ ID NO: 1669 - protein, 561 aa, Unknown
  Description of Unknown: Integrase B1670 sequence
  PTHR30461:SF3,cd00338,SM00857,G3DSA:1.10.10.2600,IPR036162, PF13408,PS51737,G3DSA:3.40.50.1390,IPR025827,IPR006119, IPR038109,PF07508,IPR011109,SSF53041,PTHR30461, PS51736,Coil,PF00239
MARSKKTECLPLERIGVIYARYSSHNQKEESIEQQVEECTSFALLNGIKIVHVYADKALSGRTDKRPQFQRLMRDAEKRSFSVVVAYKSNRIARDMLNALKYEDRLGKYGIETLYAKEEFGNTAAGRFALRTMMNVNQFYSENMAEDIKRGMLDNAENCKVNGALPLGYVSGPDKRYAIEPKEAEIVRGIYDKVLEGVSFADIANDLNACGVRTKHGSLWNKCSFHRILTNDVYIGVYRHSGVVKEGGVPPILEREVFIAMQKYLETKKNPRGRHRENGDYLLTGKLRCGYCESFMVGVSGTSKTGDKHYYYTCNSRHAGSGCKKENVRRDTIEYTVAALTQQVVFKEDIIEWIATAAVKLAKEASGQNEIDAMEAELAEDRKATKNIMAAIEQGIFTATTKSRLLELEADIASLEQSIRDAKAISEGKLLEKERVVYFLTSLREGNLHSKTYQKRLIDTFVRAVYLWDDRIGIDYYYAGKDSMVKYSLSEIEADIGENIREVLKDSLTGHHVAADCISFAATFYASHEKSLLTHFVAAPPKIAIADAGLRFCCSNLIIDP

SEQ ID NO: 1670 - protein, 561 aa, Unknown
  Description of Unknown: Integrase B1671 sequence
  SM00857,G3DSA:1.10.10.2600,IPR036162,PF13408,PS51737, IPR025827,G3DSA:3.40.50.1390,IPR006119,IPR038109,PF07508, SSF53041,IPR011109,PTHR30461,Coil,cd00338, PF00239
  MOD_RES (542)..(545): Any amino acid
MAYRKITDIKDTIGMRAVFYARVSTAEEEQLNAIELQIEENRGCIKDHGWKLVGEYIDRSKSGTMVKGRDDYQRLYEDLYEDLFDIVVIKDQERLQRNTLDWYLFINRVVQTGKLLFMYMDGKFYSPDDALITGVRAIIAEEFSRNLSKKLHNYHDHRIEKARQGQEIALQGSGNVYGWDKKDGKYYINPEQAKVRRLMCEGIMARKGSTLIAKELNDAGYRNTVGKPWKPMDIPKFVYDCKNVGTMIINKERHDFESKQTIKLPKEEWVYVENALPPIVTQEEWDLICKIHEERVIATGSDRRGKKTSGYSFSGKLVCGICGAPYWRKQRVSKDEYWVCSTKQTKGRRTRKRDSTMGKAGEINPLGCDNENISYNSLMEIMGVVSERLQANTDTIKQDMINWLTKLRKQLLEANGGHTEADLQREISRKSKLLDAYLDGILNKQEYQKKAEELDERIIQLKAETEKNKANSGDIAEIDKVLANIDEEVARYIDGNEKLKVEYLLEHLEQVQIFPDKVIVIVPILSEGIVVEKTQYVSREKXXXXKVRFTDLSEEMFQDTY

SEQ ID NO: 1671 - protein, 561 aa, Unknown
  Description of Unknown: Integrase B1672 sequence
  cd03768,PTHR30461:SF3,SM00857,IPR006118,G3DSA:1.10.10.2600, IPR036162,PS51737,G3DSA:3.40.50.1390,IPR006119,IPR038109, PF07508,IPR011109,SSF53041,PTHR30461,PS00397, PS51736,Coil,PF00239
MDKKKKSALYVRVSTTHQIDKDSLPLQRSDLTNYTKYVLGIEDFEIFEDAGYSGGTTDRPAYQDMMNRIKKGEFTHLIVWKIDRISRNLRDFSEMYDELKKYNVTFISKNEQFDTSTAMGEAMLKIILVFAELERKLTGERVFSVMISRAQKGLWNGATVPLGYEWDAETKFPRPCNSEAKVVQYIYDQYEIIKSTTKLAKKLNIEKIPTKRNGTWTPRTVGSILTNPFYIGTYRYNTKTRKTRRWKNKSEWVVVEDNHQAIINKEQFERVVNIIQSNYKGDKNYQRTNNKVHILSGIASCHKCGKKMHSGLDRARKEGFTPSRYTCYAFNVNYTCANYSSDLAILPGLINYIANYITLQERITPKHSLRDMESILLRGKYFEDIDHIEKQDLKNTYNLLINNTLVTYNSLEDEKKEAIVSQNAIYEAEKEKYIKALKRLDDLYLYDINSMSQKDFVIKRKEISDKIESVNKKIQEVKLNDTPFINNDDFGVLSKASFYLLTKNLSSVKNIDVISLLNNLDKQTVKDFINAIITDVSVERGKIYNITFKNGIVHHFNYKNQ

SEQ ID NO: 1672 - protein, 560 aa, Unknown
  Description of Unknown: Integrase B1673 sequence
  PTHR30461:SF3,IPR036162,PS51737,IPR011109,PTHR30461, PF00239,G3DSA:1.10.10.2600,IPR006119,PF14287,SSF53041, IPR025378,SM00857,IPR025827,cd03770,IPR038109, PF13408,G3DSA:3.40.50.1390,PF07508,Coil
MKEKQLQDITALYGRLSRDDEVGGESMSIQSQRAILGQYAKEHGFTNCQFFMDDGYSGTNFDRPAFTEMMELVEQRRVRTIIVKDLSRLGRNYLEVGRYTEVIFPENKVRFIAITDGVDSAAGDNEFAPFKNIINEWYAKDISRKVKSAFKAKALREEYTGAYPPYGYDRDPNDRHKLVPNQYAWVIKEIFQMALAGKSCSIIAKELGEKQVLRPQAYLHEKFGTFASDIVLTYPYAWDHSTVRAILMNQVYIGNMVHFRTGTQNFKSKKMIWKPETDWVVVEGTHEALVDAETFWTVQERIKVKQPGKKRSENNIFRGIMFCGECGKRMAFCSRKKDERRKSLGTFSCNANRRYGGKVCTTHYISLEQVKAIVLADIRRHAMLAAEDTDAYADYLMGLSQAGQLNEQKAMKKELDAAQRRLSELTTLVQRIYEDNVFGRLSDDLYQTLSAKYEAETKELKTRAAEIQALLTEATTKTQGIQDFADLVAPYADITELDEELVHTLIEKIIVHEKEIIDGETVMRIEIYYRFIGKTSDCLNRSVAPIKTKTESVVATDSIA

SEQ ID NO: 1673 - protein, 560 aa, Unknown
  Description of Unknown: Integrase B1674 sequence
  PTHR30461:SF3,SM00857,G3DSA:1.10.10.2600,IPR036162,PF13408, PS51737,G3DSA:3.40.50.1390,IPR025827,IPR006119,IPR038109, PF07508,IPR011109,SSF53041,PF00239,PTHR30461, PS51736,Coil,cd00338
MAKKKKPAGGIAVIYARYSSHNQRDVSIEQQIEACRKHAAELGLTIIATYEDRAISGRTDNRPAFQRLMHDAEKGKFSYVLAWKSNRMGRNMMQAMVNESRLMDCGIKVYYAEEDFDDSAAGRFALRSMMNVNQFYSDNLAEDVRRGLMDNANKCMVNGRQPLGYKRGKDGKVVVDEPAAAIVREVYTRVASGELFTDIARDLNRRGIKTADKGEWNKNSFHRLCSNEKYRGIYIYGDVRIEGGIPTIIDDTLWYKVQEALRVKKLKRNGRHRPGDEDYLLTGKLRCGKCGGYMIGMSGRSKTGDIHYYYACQNRRVGRTCDKKNIRRDVIEPAVAQAIKEYCLTDDAIEWIADKTVEYWEKADRNLQLDSIEGDLAAVQSSISNVMKAIEMGVVTETTRDRLIELEKQRTDLKSKLALAKEEVVHVDRKKLISSLLLFRNGDIHDRQYQEDLFKTFLISVYVYDDDDNDNGHLKIVFNAFGDNNTVDLPIDFGETDNQSAFSDGAEKFDYSLHRSTKKPSGLCRMVFLFYIVIQKQRTVFATVRPFLCSYYRMLMRPAP

SEQ ID NO: 1674 - protein, 560 aa, Unknown
  Description of Unknown: Integrase B1675 sequence
  PTHR30461:SF3,SM00857,IPR036162,PF13408,IPR025827, PS51737,G3DSA:3.40.50.1390,PF14287,IPR006119,PF07508, cd03770,IPR011109,SSF53041,PTHR30461,Coil, IPR025378,PF00239
MYYQSNTAAALQFPYTAMSSEELTALYCRLSRDDELQGDSNSIVNQKKILEKYAREHGYSNFKFYVDDGISGTTFNRPGFQQMITDIEAGLVKRVIIKDMSRFGRDYLQVGMYTEIMFPEHDIHFIAVNDGVDSTQGDNEFTPFRNIINEWYAKDTSKKIRAVMKVKGNAGEHLATMPPYGYMKSSDDKKQWVKDEEAAQVVYEIGLYIMDGLGPSQIARKLTERKILTPAAYYESKGRTTNVTKKGSPYAWDSSTIADIMDRWREYLGHTVNFKTRKKSYKSKKTLLNPETEWKIFENTHEAIWTEAIADAARLARQTRRRPTKMGEMGMFSGMMFCADCGSIMYQCRATNFRRDQEYYLCSGYRKSRDVCGQTHSIRTVILEELVLQNLREIVSFASQRKDDFVKMVMDADMRQRNRGLAKRKKTLADAERRIAELDTIFKRLYEDTISGKLSDERFQKLSTDYEKEQHQLQDVATALRDEIETEERKSANVERFLSVVERYTEIPELTPCILHEFVEKIVVHAASDPKGKNRTQEIDIYYKGIGALEVSKVTSSRQE

SEQ ID NO: 1675 - protein, 560 aa, Unknown
  Description of Unknown: Integrase B1676 sequence
  PTHR30461:SF3,SM00857,G3DSA:1.10.10.2600,IPR036162,PF13408, IPR025827,PS51737,G3DSA:3.40.50.1390,IPR006119,IPR038109, PF07508,SSF53041,IPR011109,PTHR30461,Coil, PS51736,cd00338,PF00239
MKKQQKCYIYTRVSISMQVDGYSLDAQKDKLRKYAEYQEMSIVGEYSDEGKSGKSVEGRPQFKQMLADVESGKDNVDYVLVFKLSRFGRNAADVLSSLQKMQDYGVNLICVEDGIDSSKDAGKLMISVLSAVAEIERENILVQTMEGRRQKAREGRWNGGFAPYGYQLVNGELIIAEDEAEIIRIIYDKFVNTTMGMAAIATFLNNSGYKKKLRQNNTIEDFSTSFVKGVLDNPIYCGKLAFGRRKNEKISGTRNEYHIVKQKEYMLSDGIHEAIISEEMWNQAHRKRQETGVLQVKTHSLEHEHILSGIIKCPVCGSGIYGNVNRKKHPYGGYYKDYFYYACKHRKLVDGHRCTYKRQWNEDRINAAVEEIIRKFVKNPKFEQEIRKQIGSSIDTSELDKEYDGLKDRLSQTTGAKNRLADQMDHLSVSDKNYDKKYNDMQERLDKLYDEITDIEDAMEEVETRLYNIRQDKISEDNVYQFLLFFDKLYDKFTDLEKKTFLRSFLSDVFIYEEEQKDGRILKGLRFKFPIYMNGRNVLGVDWDNESTDETEVGLHRKDM

SEQ ID NO: 1676 - protein, 560 aa, Unknown
  Description of Unknown: Integrase B1677 sequence
  PTHR30461:SF3,IPR036162,PS51737,IPR011109,PTHR30461, PF00239,G3DSA:1.10.10.2600,IPR006119,SSF53041,cd00338, SM00857,IPR025827,IPR038109,mobidb-lite,PS51736, PF13408,G3DSA:3.40.50.1390,PF07508,Coil
MLRGVVKPRKENFMNAVIYARYSSHSQTEQSIEGQLRDCYEYAKRYDINVVGEYIDRATSGTTDDRPDFQRMIADAPKKQFDRIIVWKLDRFARNRYDSALYKHKLKQYGIRVISAMENVGEGDESILLEALLEASAEYYSLDLKKKIKRGQRESIAKGKYCGGPIPYGYKLSDGKLLVDEKNAPVIRYLFEQYASGVPMKEIIDELTRRGVRGSRGGALTYNTFSRALTNTTYIGQYKYNGEVVPGLAEQMIDKELFDKVQVVVKANAHAPAANKAEVEYLLQGKAFCGNCGAHMVGECGRGNNGSVYYYYSCANRKKRHSCRKKNEKKDFIEWYVVEQTLQYVLTPPRIKQIAKAVVAEYDKEFAGSKIDDCEKSIRQLDHELNKLVDALVEAPKVAHKRIYERMESLEAQKTAMESDLVKLRIAHDIRFTEEEVRAWLKKFCTGDLFDPEFRRNIIDVFINSVYLYDDRVIIFYNIKGGKQVSYIDVAAALDAAPEAKVSDFITNAPPKPLAICKRFFVAVHSHDRLKDKTPAGRYLPRRKKVSSRSETDEGERSSR

SEQ ID NO: 1677 - protein, 560 aa, Unknown
  Description of Unknown: Integrase B1678 sequence
  PTHR30461:SF3,SM00857,G3DSA:1.10.10.2600,IPR036162,PF13408, IPR025827,PS51737,G3DSA:3.40.50.1390,IPR006119,IPR038109, PF07508,SSF53041,IPR011109,PTHR30461,Coil, PS51736,cd00338,PF00239
MKKQQKCYIYTRVSISMQVDGYSLDAQKDKLRKYAEYQEMSIVGEYSDEGKSGKSVEGRPQFKQMLADVESGKDNVDYVLVFKLSRFGRNAADVLSSLQKMQDYGVNLICVEDGIDSSKDAGKLMISVLSAVAEIERENILVQTMEGRRQKAREGRWNGGFAPYGYQLVNGELIIAEDEAEIIRIIYDKFVNTTMGMAAIATFLNNSGYKKKLRQNNTIEDFSTSFVKGVLDNPIYCGKLAFGRRKNEKISGTRNEYHIVKQKEYMLSDGIHEAIISEEMWNQAHRKRQETGVLQVKTHILEHEHILSGIIKCPVCGSGIYGNVNRKKHPYGGYYKDYFYYACKHRKLVDGHRCTYKRQWNEDRINAAVEEIIRKFVKNPKFEQEIRKQIGSSIDTSELDKEYDGLKDRLSQTTGAKNRLADQMDHLSVSDKNYDKKYNDMQERLDKLYDEITDIEDAMEEVETRLYNIRQDKISEDNVYQFLLFFDKLYDKFTDLEKKTFLRSFLSDVFIYEEEQKDGRILKGLRFKFPIYMNGRNVLGVDWDNESTDETEVGLHRKDM

SEQ ID NO: 1678 - protein, 560 aa, Unknown
  Description of Unknown: Integrase B1679 sequence
  PTHR30461:SF3,cd00338,SM00857,G3DSA:1.10.10.2600,IPR036162, PF13408,PS51737,IPR025827,G3DSA:3.40.50.1390,IPR006119, IPR038109,PF07508,IPR011109,SSF53041,PTHR30461, PS51736,Coil,PF00239
MARKKNIAAGLDAVIYARYSSHNQREVSIEQQVRECMKHAAELGLHVVGTYEDRAISGKTDKRPNFQRMMRDAEKGKFQAVVAWKSNRIGRNMLQAMVNEAKLEDCGVKVFYAEEDFDDTAAGRFALRNMMNVNQFYSENMAEDITRGLYDNASKCMANGRQPLGYKRGEDGRVVLDEANAAVVREIFTRVAAGDLFVDIARDLNAQGIKTSKGANWNKGSFQSICQNERYRGIYIYGDVRVADGIPRIVSDDLWYRVQEAMRMKKNPVGTRHRVGAEDYLLTGKLRCGHCGSYMTGVSGTSRNGELHYYYTCQKRRTEHACDKKNIRRDVIEPAVAQAIKMYCLTDDVIAWIADRTVEYWEKHDNDLQIEALEQQLEENKKATSNMLKAIEMGIITEATRTRMVELETEQSRLSVQLNVAKEDVVKIDREQIISYLELLQQGDIHDRDFQMELFKNFLVAVYVYDDNRMKLVFSCMGDQNSVEIPLETGEDPPDGGLSPDAKMFVLTPDSSTKKALYFVGSMVLFFLLKPILEGCIASPAYLLGFLRKTGMFPQISGSP

SEQ ID NO: 1679 - protein, 560 aa, Unknown
  Description of Unknown: Integrase B1680 sequence
  cd00338,SM00857,G3DSA:1.10.10.2600,IPR036162,PF13408, PS51737,G3DSA:3.40.50.1390,IPR025827,IPR006119,IPR038109, PF07508,SSF53041,IPR011109,PTHR30461,PS51736, Coil,PF00239
MVQEKLRAVFYARVSTEEERQLNALEKQVAECKDAVLQKGWKLVDQYVDEGKSGTQIKRRDEYRRLFEDLENDKFDIVVIKSQDRLQRNTLDWYIWIDRLTTHGKRLYMYLEDTFYSPDNALISGIKAILAEEYSRELSKKINNSYKRRIEAAKNGEKISIVNNSRSLGYDKVNGELVINEKEADVVRMIFNMYASGEGLRAISNTLYDMGYRNRSGNEIDPTTISRMLSSEKYKGVYVINQRHYDFDTKKTVLNPKSEWVHIPGAVPAIVEPELWDRVQEIKGSKVQSIKNEKRGRNCGKSIFSGKIYCAKCGAKYWRSLENGYVKFKCSSYSKYGKIPGKGCDNKSFSENALYSILQSLSEQIVEVNTAEVRKSLLNWLESLRERLRASQGDDTIKEEIRKQTARKEKLTDAYMDGIISKEDYSKRYKELEKTLEDLKDKLLTLEVNEDLQSIEEVIQNIDKEMEEYLQTQSFNESRVEFLNQHLTKVTVNKDSFLLEFDLIGGAILTGKDFYLFVDNPRRDGQCRGDLYCTLWCGRKQCEPDGTGKAGKRWQKEAEW

SEQ ID NO: 1680 - protein, 560 aa, Unknown
  Description of Unknown: Integrase B1681 sequence
  PTHR30461:SF3,SM00857,G3DSA:1.10.10.2600,IPR036162,PF13408, IPR025827,PS51737,G3DSA:3.40.50.1390,IPR006119,IPR038109, PF07508,SSF53041,IPR011109,PTHR30461,Coil, PS51736,cd00338,PF00239
MKKQQKCYIYTRVSISMQVDGYSLDAQKDKLRKYAEYQEMSIVGEYSDEGKSGKSVEGRPQFKQMLADVESGKDNVDYVLVFKLSRFGRNAADVLSSLQKMQDYGVNLICVEDGIDSSKDAGKLMISVLSAVAEIERENILVQTMEGRRQKAREGRWNGGFAPYGYQLVNGELIIAEDEAEIIRIIYDKFVNTTMGMAAIATFLNNSGYKKKLRQNNTIEDFSTSFVKGVLDNPIYCGKLAFGRRKNEKISGTRNEYHIVKQKEYMLSDGIHEAIISEEMWNQAHRKRQETGVLQVKTHILEHEHILSGIIKCPVCGSGIYGNVNRKKHPYGGYYKDYFYYACKHRKLVDGHRCTYKRQWNEDRINAAVEEIIRKFVKNPKFEQEIRKQIGSSIDTSELDKEYDGLKDRLSQTTGAKNRLADQMDHLSVSDKNYDKKYNDMQERLDKLYDEITDIEDAMEEVETRLYNIRQDKISEDNVYQFLLFFDKLYDKFTDLEKKTFLKSFLSDVFIYEEEQKDGRILKGLRFKFPIYMNGRNVLGVDWDNESTDETEVGLHRKDM

SEQ ID NO: 1681 - protein, 560 aa, Unknown
  Description of Unknown: Integrase B1682 sequence
  PTHR30461:SF3,SM00857,G3DSA:1.10.10.2600,IPR036162,PF13408, IPR025827,G3DSA:3.40.50.1390,PS51737,IPR006119,IPR038109, PF07508,SSF53041,IPR011109,PTHR30461,PS51736, cd00338,PF00239
MNTVIYARYSAGPRQTDQSIEGQLRVCTDFCKQRGLTVIDTYCDRHISGRTDERPEFQRLIADAKRKKFEAVVVYKTDRFARNKYDSAVYKRELKRNGIQIFYAAEAIPDGPEGIILESLMEGLAEYYSAELAQKIKRGMHESALKCQSTGSGRPLGYRVDEQKRFQIDPESAQTVQAIFERYIKGESNAAICELLNSRGLRTAQGKPFNKNSINRIIKNRKYIGEYRYHDIVVEGGMPAIISKDTFNLAQAEMERRRTRKAPKSPKAEYLLAGRLFCGHCKGPMQGVSGTGKSGNKWYYYYCGNTRGKNKTCDKKQVSRDRLERAVVDFTVRYILQEDILEELARKVHAAQEHQNDTASEIAFYEKKLADNKKSIANVLRAIESGAATQTLPARLQELENEQAVILGELSFLKGKHLAFTEDQILFALMKHLEPYPGESEQDYRRRIISDFVSEVYLYDDRLLIYFNISSEDGKLKSADLSNIEGGEFDEGLVSSTNDRKSRKPLSLRDFLCFQGVCEFLAVFKSVHYARFCALCARFKTPFCRRICRRNQSLPLTMLQ

SEQ ID NO: 1682 - protein, 560 aa, Unknown
  Description of Unknown: Integrase B1683 sequence
  SM00857,G3DSA:1.10.10.2600,IPR036162,PS51737,G3DSA:3.40.50.1390, IPR006119,IPR038109,PF07508,IPR011109,SSF53041, PF00239,PTHR30461,Coil,cd00338
MKNTVKVCAYCRVSTNKSEQKLSFENQKKYFESILTKDKGYELINIYADEGLSGTKFRKREQFNKMLFDAGLNMVTNSLKINEDRNKYISTDYVLSDREPLFNLIFVKDSSRFARNTEVNRILNRLKDKGVYVYFEDLCKTTENEADRIIIDFLFGMSYQESVDKSNKTKFGMKRSSENGKVRCGHELFGYTFNKDENTLRVISEEAEVIKLIFKLRLEGNGTRRIAKYLNDNGYRTRNNKQYCISRINTILKNATYTGKQVYNKTEMQNLGDGSSKKRKHIDDWIIKDTDKIDQIIDEDTFYKVQQLIADNTTSNKGVYNGASELCNYLYCGKCGAKYYKFNSRCRVYYRCKNKININAEVKCDNKNVKLDYIYSILNSYCDDYKNTCISYFNMVKNSVNKQIVNIKEDTDNEAVLAIKEQIRAKEAILEELLDNMLNNSSETVKKVFMKKQKLIDDELKELEGQLKQYTATDEEKQDKINYINNTLNQLDYHIKHIPDDLDLDKFIKTCLDRIIVYEDKIEISTIFDMLAKAICELLGISILDVIQEDISNNEGLRLL

SEQ ID NO: 1683 - protein, 560 aa, Unknown
  Description of Unknown: Integrase B1684 sequence
  PTHR30461:SF3,SM00857,G3DSA:1.10.10.2600,IPR036162, PF13408,IPR025827,PS51737,G3DSA:3.40.50.1390, IPR006119,IPR038109,PF07508,IPR011109, SSF53041,PF00239,PTHR30461,PS51736,Coil,cd00338
MKFPIDLSTLTKEEISQFEEDPFTLYNGDHDVALYLRYSSSGQSDQSIEGQLRDCRAFCKANHYRIVAIYIDRATTARKDVEKRIHLMEMIADSAKQRWDYVVVWKLDRFSRNRNDSAIMKMRLRKNGVKVLSATEHLSDNPESILLESVLEGMAEFFSAELSQKVTRGMRESALKCHSVGGHVPLGYKIENHKLVVNPDTAHIVQEAFALYANGVSVAEIARKFNAAGYKTAKNTEFNRSSFKVMFQNVRYIGTYTYKDIRIENGVPAIIDRELFDAVQRRLSKTATAPARGKAKVDYLLSGKLFCGHCGASMNGESGVGRSGKTYHYYSCYTKKRRLGCEKRPLRKDYIEEIVARSAFELLTDQLIDEIADMAIKQSEQDMVNETRIPQLTEQLSEIEKSIANITTAIEKGIASETLMNRLVQLEHEKKTINKEIKSEEKYVYRIDRDQIVFWLSQFKCGNIEDENFRRRLIDLLVNSVTVWDEPDGYKITTAYNLTSCKTKTFRVEKSPATENVTGFGFGESECTTKRKHPDWMLPFCCDERDFPFLRSMLGNFVLC

SEQ ID NO: 1684 - protein, 560 aa, Unknown
  Description of Unknown: Integrase B1685 sequence
  PTHR30461:SF3,SM00857,IPR036162,PF13408,IPR025827, PS51737,G3DSA:3.40.50.1390,cd03770,IPR006119,PF14287, PF07508,IPR011109,SSF53041,PTHR30461,PS51736, Coil,IPR025378,PF00239
MYHQSNTAAALQFPYSAMSVEAVTALYCRLSRDDELQGDSNSIINQKKILQRYALDHGYKNYRFYIDDGISGTTFNRPGFQQMIADIEAGLVKRVIIKDMSRLGRDYLQVGMYTEIMFPEHDIHFIAVNDGVDSTQGDNEFTPFRNIINEWYAKDTSKKIRAVMKVKGNAGEHLTTLPPYGYMKSPDNKKLWVRDEDAAAVVYEIGLYVMDGFGPSQIARKLTERRILTPAAYYASKGRKASNIKRGLPYAWDASTVADIMDRWREYLGHTVNFKTRKKSYKSKKVIHNPESEWMIFENTHDPIWTEAIADAARAARQTRRRPTKMGEMGMFSGMMFCADCGSVMYQCRATNFRREQEYYLCAGYRKSRDFCGQTHSIRTVILEELILENLREIVSFASRSKDEFVRLVMDSDLRQRDRDLAKRKRQLADSEKRITELDAIFKRLYEDNISGKLSDERFQKLSADYEKEEQELKVLASSLRKEVELEESKSADVDRFLSVVERYTDIPELTPCILHEFVEKIIVHAASDPKGKNRTQEIDIYYKGIGALEMSKVTASMEK

SEQ ID NO: 1685 - protein, 560 aa, Unknown
  Description of Unknown: Integrase B1686 sequence
  PTHR30461:SF3,SM00857,IPR036162,PF13408,PS51737, IPR025827,G3DSA:3.40.50.1390,PF14287,cd03770,PF07508, IPR006119,SSF53041,IPR011109,PTHR30461,PS51736, Coil,IPR025378,PF00239
MYYQSNTAAALQFPYTAMSSEELTALYCRLSRDDELQGDSNSIVNQKKILEKYAREHGYSNFKFYVDDGISGTTFNRPGFQQMIADIEAGLVKRVIIKDMSRFGRDYLQVGMYTEIMFPEHDIHFIAVNDGVDSTQGDNEFMPFRNIINEWYAKDTSKKIRAVMKVKGNAGEHLTVLPPYGYMKSSDDKKQWVKDEEAAQVVYEIGLYIMDGLGPSQIARKLTERKILTPAAYYASKGRTTNVTKKGSPYAWDSSTIADIMDRWREYLGHTVNFKTRKKSYKSKKTLHNPESEWKIFDNTHEAIWTEAIADAARLARQTRRRPTKMGEMGMFSGMMFCADCGSIMYQCRATNFRRDQEYYLCSGYRKSRDVCGQTHSIRTVILEELVLQNLREIVSFASQRKDDFVKMVMDADMRQRNQDLAKRQKTLADAEKRIAELDTIFKRLYEDTISGKLSDERFQKLSTDYEKEQHQLQDVAAALRDEIEAEEQKSANVERFLSVVERYTEIPELTPCILHEFVEKIVVHAASDPKGKNRTQEIDIYYKGIGALEVSKVTSSRQE

SEQ ID NO: 1686 - protein, 560 aa, Unknown
  Description of Unknown: Integrase B1687 sequence
  SM00857,G3DSA:1.10.10.2600,IPR036162,PF13408,PS51737, G3DSA:3.40.50.1390,IPR025827,PS51736,IPR006119,IPR038109, PF07508,SSF53041,IPR011109,PTHR30461,Coil, mobidb-lite,cd00338,PF00239
MENNKKLRVAAYVRVSEETKETQHSLQAQEEFYRRQIHEKVEWELAEIYKDNGISGTDIKRREGFVRLISDCKAGKIDLILVKSVSRFARNTLDLLRIVRYLKQLGVSVRFEEQNIDSLTEEGELMLTLIASVAQAESESISENIKWAIHKAFQNGIGNTRRRTLGYHWVDGKLTVIPEEAEVVKRIFTNFLAGGSHTKTAEELTGEGITSINGKPISVSAIGNILRNITYTGNTLLQKTFIQDPISKKKVMNTGELPQYFVQDTHEAIIDMDTFEQVQEKLARNKEMGRFPYNHTGKKYPFTMKVICGCCGRHYTRQLWNTSEKGKKRPTWVCTGKKAEKYRRCDSKNIPEAKLMEASAKVLGISEFDEDIFFDKVESITVQGTHELLFCLKDGAEVTQHWEHTAQKASWTPERKARHAANRTASPAKTKGASCMTGRIRCELCGMNYNKQTRKVARAGMVTFWKCRGIGNGGSCASEQITHDHLNSILAEALGVAQMTDEIFTGQIDHIGMCEPGKLIIYKKNDGTIPGSYELLPMEKRQKPYRPRNRKGNVRSQGDT

SEQ ID NO: 1687 - protein, 560 aa, Unknown
  Description of Unknown: Integrase B1688 sequence
  PTHR30461:SF3,SM00857,G3DSA:1.10.10.2600,IPR036162,PF13408, PS51737,G3DSA:3.40.50.1390,IPR025827,IPR006119,IPR038109, PF07508,IPR011109,SSF53041,PF00239,PTHR30461, PS51736,Coil,cd00338
MPRKKKLQEVGGLRLVAYYRYSNGGQQTEQSIEGQRRDCEAYAKAHGYKIVHEYIDRHISGKSDSRPAFQQMISDSDSHLFDAVICWKTDRLARSRYDSIIYKTRLRRNGVKILYAAETVVDGPEGIIIEGLMESLAEYYSAELAQKLRRGQRESALKCIALGGNRSFGYDIGPDKHYCINEKQAPAVRYIFEQYAAGATAADIVRELTARGYRTSRGNPFNKNSICRIITNEMYLGVYKYADIRIEGGVPAMIDRELFNRCQTQLAFNRAHGGGKGAPRADYVLVGKLDCGLCGHAMKGASATGHTGSKHYYYTCTQHVEKKCPKTSIEKNYLEQVIVDGVAKYVLTPEKISQIVDCMMELQAKEQEPKGNPERDALEAELAECRRKQNNILEAIEEGGSARLAARLRTLEEQEAQLTFALGEINNAPAPPQFSREALTFMFEQFRREEDEVDEEYRRRILDTFVSSILLYEDRAEVKFNITDQKTGDFERVILPISANKKPPEDDDIPSNSEGSTALRLVEAMGVEPMSEKSSVQVSPGAGDLQHSRRATPIVRLAHW

SEQ ID NO: 1688 - protein, 560 aa, Unknown
  Description of Unknown: Integrase B1689 sequence
  PTHR30461:SF3,cd00338,SM00857,G3DSA:1.10.10.2600,IPR036162, PF13408,PS51737,IPR025827,G3DSA:3.40.50.1390,IPR006119, IPR038109,PF07508,IPR011109,SSF53041,PTHR30461, PS51736,Coil,PF00239
MARKKNIAAGQNAVIYARYSSHNQREVSIEQQVRECMKHAAELGLHVVGTYEDRAISGKTDKRPNFQRMMRDAEKGKFQAVVAWKSNRIGRNMLQAMVNEAKLEDCGVKVFYAEEDFDDTAAGRFALRNMMNVNQFYSENMAEDITRGLYDNASKCIANGRQPLGYKRGEDGRVVLDEANAAVVREIFTRVAAGDLFVDIARDLNAQGIKTSKGANWNKGSFQSICQNERYRGIYIYGDVRVVDGIPRIVSDDLWYRVQEAMRMKKNPVGTRHRVGAEDYLLTGKLRCGHCGSYMTGVSGTSRNGELHYYYTCQKRRTEHACDKKNIRRDVIEPAVAQAIKMYCLTDDVIEWMADRTVEYWEKHDNDLQIEALEQQLEENKKATSNMLKAIEMGIITEATRTRMVELETEQSRLSVQLNAAKEDVVKIDREQIISYLELLQQGDIHDRDFQMELFKNFLVAVYVYDDNRMKLVFSCMGDQNSVEIPLETGEDPPDGGLSPDAKMFVLTPDSSTKKALYFVGSMVLFFLLKPILEGCIASPAYLLGFLRKTEMFPQISGPP

SEQ ID NO: 1689 - protein, 560 aa, Unknown
  Description of Unknown: Integrase B1690 sequence
  PTHR30461:SF3,SM00857,G3DSA:1.10.10.2600,IPR036162,PF13408, IPR025827,PS51737,G3DSA:3.40.50.1390,IPR006119,IPR038109, PF07508,SSF53041,IPR011109,PTHR30461,Coil, PS51736,cd00338,PF00239
MKKQQKCYIYTRVSISMQVDGYSLDAQKDKLRKYAEYQEMSIVGEYSDEGKSGKSVEGRPQFKQMLADVESGKDNVDYVLVFKLSRFGRNAADVLSSLQKMQDYGVNLICVEDGIDSSKDAGKLMISILSAVAEIERENILVQTMEGRRQKAREGRWNGGFAPYGYQLVNGELIIAEDEAEIIRIIYDKFVNTTMGMAAIATFLNNSGYKKKLRQNNTIEDFSTSFVKGVLDNPIYCGKLAFGRRKNEKISGTRNEYHIVKQKEYMLSDGIHEAIISEEMWNQAHRKRQETGVLQVKTHSLEHEHILSGIIKCPVCGSGIYGNVNRKKHPYGGYYKDYFYYACKHRKLVDGHRCTYKRQWNEDRINAAVEEIIRKFVKNPKFEQEIRKQIGSSIDTSELDKEYDGLKDRLSQTTGAKNRLADQMDHLSVSDKNYDKKYNDMQERLDKLYDEITDIEDAMEEVETRLYNIRQDKISEDNVYQFLLFFDKLYDKFTDLEKKTFLKSFLSDVFIYEEEQKDGRILKGLRFKFPIYMNGRNVLGVDWDNESTDETEVGLHRKDM

SEQ ID NO: 1690 - protein, 559 aa, Unknown
  Description of Unknown: Integrase B1691 sequence
  IPR036162,PS51737,IPR011109,PTHR30461,PS00397, PF00239,G3DSA:1.10.10.2600,IPR006119,SSF53041,cd00338, SM00857,IPR025827,IPR038109,PS51736,IPR006118, PF13408,G3DSA:3.40.50.1390,PF07508,Coil
MSKTVAIYVRVSTGKQADRDSIPFQIQECSNYVKHFLKTENFEVFKDAGRSGKNTHRPEYQRMIEKVKSGMISHVVVYKIDRISRNLVDFSIMYNDFKEHKVAFISLNEQFDTSSAIGEAVLKIILVFAELERKLTGERVRDIMMNRALEGKWNGARVPYGWDWDTKKQCPVHSDTEAEYARMMYRLYDESHSTCVVRDYCNAHDIPTKRGGEWTSKTVADFLRNPMNVGDYRYNYRKSARGKRNDPSEVVYVKDVFPPLIDRELYERVTHQMDLNTFGLGKDGRKVVSKKTHVFAGLIVCGLCGAFYHSDSDTPRADGFLPSQYRCGAHNRKIHCMAKGTSDVKLGPFIFNYVSNLVKASKSRRLLHSVSDLEHMLLTGPEFEQVAGIADTGLDVTFDTIIHGFKPKRYAAAPYTVIRSGDSDALTAKRDKTIRALERLKKLFLFEDDAMSEKEYLMSKRELESTLSDIENELSALEADTADTKYDDMSFISTASGFLIAHQIASGEHINYRELACAVDAKVLKDFVNSVVERIVLLDGRVASIEFKNGLIHEFLYRE

SEQ ID NO: 1691 - protein, 559 aa, Unknown
  Description of Unknown: Integrase B1692 sequence
  cd00338,SM00857,IPR006118,G3DSA:1.10.10.2600,IPR036162, PS51737,G3DSA:3.40.50.1390,IPR006119,IPR038109,PF07508, IPR011109,SSF53041,PTHR30461,PS00397,PS51736, Coil,PF00239
MSKTVAIYVRVSTGKQADRDSIPFQIQECSNYVKHFLKTENFEVFKDAGRSGKNTHRPEYQRMIEKVKSGMISHVVVYKIDRISRNLVDFSIMYNDFKEHKVAFISLNEQFDTSSAIGEAVLKIILVFAELERKLTGERVRDIMMNRALEGKWNGARVPYGWDWDAKKQCPVHSDAEAEYARMMYRLYDECHSTCVVRDYCNAHDIPTKRGGEWTSKTVADFLRNPMNVGDYRYNYRKSARGKRNDPSEVIYVKDVFPPLIDRELYERVTHQMDLNTFGLGKDGRKVVSKKTHVFGGLVVCGLCGAFYHSDADVVRADGFRPSNYRCGAHNKKIHCKAKGTSDVKLGPFIFNYISNLVKASKSKKLLHSVSDLEQILLTGPEFEQVAGIADAGLDVTFDTIMHGFKPKRYTAAPYTVIRSGDSDALTAKRDKTIRALERLKKLFLFEDDAMSEKEYLMSKRELEGTLSDIENELSALEADTADTKYDDMSFISTASGFLIAHQIASGEHINYRELACAVDAKVLKDFVNSVIERIVLLDGRVASIEFKNGLVHEFLYRE

SEQ ID NO: 1692 - protein, 559 aa, Unknown
  Description of Unknown: Integrase B1693 sequence
  cd00338,SM00857,IPR006118,G3DSA:1.10.10.2600,IPR036162, PS51737,G3DSA:3.40.50.1390,IPR006119,IPR038109,PF07508, SSF53041,IPR011109,PTHR30461,PS00397,PS51736, Coil,PF00239
MSKTVAIYVRVSTGKQADRDSIPFQIQECSNYVKHFLKTENYEIFKDAGRSGKNTHRPEYQRMIEKVKAGMISHVVVYKIDRISRNLVDFSIMYNDFKEHKVAFISLNEQFDTSSAIGEAVLKIILVFAELERKLTGERVHDIMMNRALEGKWNGARVPYGWDWDTKNRCPVHSETEAEYARMMYRLYDESHSTCVVRDYCNAHDIPTKRGGEWTSKTVADFLRNPMNVGDYRYNYRKSARGKRNDPSDVIYVKDVFPPLIDRELYERVTHQMDLNTFGLGKDGRKVVSKKTHVFGGLVVCGLCGAFYHSDADVVRADGFRPSNYRCGAHNKKIHCKAKGTSDVKLGPFIFNYISNLVKASKSKKLLHSVSDLEQILLTGPEFEQVAGIADIGLDVTFDTIMHGFKPKRYTAAPYTVIRSGDSDALTAKRDKTIRALERLKKLFLFEDDAMSEKEYLMSKRELEGTLSDIENELSALEADTADTKYDDMSFISTASGFLIAHQIASGEHINYRELACAVDAKVLKDFVNSVIERIVLLDGRVASIEFKNGLVHEFLYRE

SEQ ID NO: 1693 - protein, 559 aa, Unknown
  Description of Unknown: Integrase B1694 sequence
  SM00857,IPR006118,G3DSA:1.10.10.2600,IPR036162,PS51737, G3DSA:3.40.50.1390,IPR006119,IPR038109,PF07508,SSF53041, IPR011109,PF00239,PTHR30461,PS00397,PS51736, Coil,cd00338
MSKTVAIYVRVSTGKQADRDSIPFQIQECSNYVKHFLKTENFEVFKDAGRSGKNTHRPEYQRMIEKVKSGMISHVVVYKIDRISRNLVDFSIMYNDFKEHKVAFISLNEQFDTSSAIGEAVLKIILVFAELERKLTGERVRDIMMNRALEGKWNGARVPYGWDWDTKKQCPVHSDTEAEYARMMYRLYDECHSTCVVRDYCNAHDIPTKRGGEWTSKTVADFLRNPMNVGDYRYNYRKSARGKRNDPSEVIYVKDVFPPLIDRELYERVTHQMDLNTFGLGKDGRKVVSKKTHVFGGLVVCGLCGAFYHSDADVVRADGFRPSNYRCGAHNKKIHCKAKGTSDVKLGPFIFNYISNLVKASKSKKLLHSVSDLEQILLTGPEFEQVAGIADIGLDVTFDTIMHGFKPKRYTAAPYTVIRSGDSDALTAKRDKTIRALERLKKLFLFEDDAMSEKEYLMSKRELEGTLSDIENELSALETDATDTKYDDMSFISTASGFLIAHQIASGEHINYRELACAVDAKVLKDFANSVIERIVLLDGRVASIEFKNGLVHEFLYRE

SEQ ID NO: 1694 - protein, 559 aa, Unknown
  Description of Unknown: Integrase B1695 sequence
  IPR036162,PS51737,IPR011109,PTHR30461,PS00397, PF00239,G3DSA:1.10.10.2600,IPR006119,SSF53041,cd00338, SM00857,IPR025827,IPR038109,PS51736,IPR006118, PF13408,G3DSA:3.40.50.1390,PF07508,Coil
MSKIVAIYVRVSTGKQADRDSIPFQIQECSNYVKHFLKTENFEVFKDAGRSGKNTQRPEYQRMIEKVKSGMVSHVVVYKIDRISRNLVDFSIMYNDFKEHKVAFISLNEQFDTSSAIGEAVLKIILVFAELERKLTGERVHDIMMNRALEGKWNGARVPYGWDWDTKNRCPVHSETEAEYARMMYRLYDESHSTCVVRDYCNAHDIPTKRGGEWTSKTVADLLRNPMNVGDYRYNYRKSARGKRNDPSEVIYVKDVFPPLIDRELYERVTHQMDLNTLGLGKDGRKVVSKKTHVFGGLIVCGLCGAFYHSDSDTPRADGFLPTKYRCGAHNRKIHCKAKGISDVMLGPFIFNYISNLVKASKSRKLLHSVSDLEQILLTGPEFEQVAGIADVGLDVTFDTIMHGFRPKRYTAAPYTVIRSGDSDALNAKRDKTIRALERLKKLFLFEDDAMSEKEYLMSKRELEGTLSDIENELSALEADTADTKYDDMSFISTASGFLIAHQIASGEHINYRELACAVDAKVLKDFANSVIERIVLLDGRVASIEFKNGLVHEFLYRE

SEQ ID NO: 1695 - protein, 559 aa, Unknown
  Description of Unknown: Integrase B1696 sequence
  cd00338,SM00857,IPR006118,G3DSA:1.10.10.2600,IPR036162, PS51737,G3DSA:3.40.50.1390,IPR006119,IPR038109,PF07508, IPR011109,SSF53041,PTHR30461,PS00397,PS51736, Coil,PF00239
MSKTVAIYVRVSTGKQADRDSIPFQIQECSNYVKHFLKTENFEVFKDAGRSGKNTHRPEYQRMIEKVKAGMISHVVVYKIDRISRNLVDFSIMYNDFKEHKVAFISLNEQFDTSSAIGEAVLKIILVFAELERKLTGERVRDIMMNRALDGKWNGARVPYGWDWDTKKQCPVHSDTEAEYARMMYRLYDECHSTCVVRDYCNAHDIPTKRGGEWTSKTVADFLRNPMNVGDYRYNYRKSARGKRNDPSEVIYVKDVFPPLIDRELYERVTHQMDLNTFGLGKDGRKVVSKKTHVFGGLVVCGLCGAFYHSDADVVRADGFRPSNYRCGAHNKKIHCKAKGTSDVKLGPFIFNYISNLVKASKSKKLLHSVSDLEQILLTGPEFEQVAGIADIGLDVTFDTIMHGFKPKRYTAAPYTVIRSGDSDALTAKRDKTIRALERLKKLFLFEDDAMSEKEYLMSKRELEGTLSDIENELSALEADTADTKYDDMSFISTASGFLIAHQIASGEHINYRELSCAVDAKVLKDFVNSVIERIVLLDGRVASIEFKNGLVHEFLYRE

SEQ ID NO: 1696 - protein, 559 aa, Unknown
  Description of Unknown: Integrase B1697 sequence
  SM00857,IPR006118,G3DSA:1.10.10.2600,IPR036162,PS51737, G3DSA:3.40.50.1390,IPR006119,IPR038109,PF07508,IPR011109, SSF53041,PF00239,PTHR30461,PS00397,PS51736, Coil,cd00338
MSKTVAIYVRVSTGKQADRDSIPFQIQECSNYVKHFLKTENYEIFKDAGRSGKNTHRPEYQRMIEKVKAGMISHVVVYKIDRISRNLVDFSIMYNDFKEHKVAFISLNEQFDTSSAIGEAVLKIILVFAELERKLTGERVRDIMMNRALEGKWNGARVPYGWDWDAKKQCPVHSDTEAEYARMMYRLYDESHSTCVVRDYCNAHDIPTKRGGEWTSKTVADFLRNPMNVGDYRYNYRKSARGKRNDPSEVIYVKDVFPPLIDRELYERVTHQMDMNTFGLGKDGRKVVSKKTHVFGGLIVCGLCGAFYHSDADVVRADGFRPSNYRCGAHNKKIHCKAKGTSDVKLGPFIFNYISNLVKASKSKKLLHFVSDLEQILLTGPEFEQVAGIADIGLDVTFDTIMHGFKPKRYTAAPYTVIRSGDSDALTAKRDKTIRALERLKKLFLFEDDAMSEKEYLMSKRELEGTLSDIENELSALEADTADTKYDDMSFISTASGFLIAHQIASGEHINYRELSCAVDAKVLKDFVNSVIERIVLLDGRVASIEFKNGLVHEFLYRE

SEQ ID NO: 1697 - protein, 559 aa, Unknown
  Description of Unknown: Integrase B1698 sequence
  cd00338,SM00857,IPR006118,G3DSA:1.10.10.2600,IPR036162, PS51737,G3DSA:3.40.50.1390,IPR006119,IPR038109,PF07508, SSF53041,IPR011109,PTHR30461,PS00397,PS51736, Coil,PF00239
MSKTVAIYVRVSTGKQADRDSIPFQIQECSNYVKHFLKTENFEVFKDAGRSGKNTHRPEYQRMIEKVKSGMISHVVVYKIDRISRNLVDFSIMYNDFKEHKVAFISLNEQFDTSSAIGEAVLKIILVFAELERKLTGERVRDIMMNRALEGKWNGARVPYGWDWDTKKQCPVHSDTEAEYARMMYRLYDESHSTCVVRDYCNAHDIPTKRGGEWTSKTVADFLRNPMNVGDYRYNYRKSARGKRNDPSEVIYVKDVFPPLIDRELYERVTHQMDLNTFGLGKDGRKVVSKKTHVFGGLVVCGLCGAFYHSDADVVRADGFRPSNYRCGAHNKKIHCKAKGTSDVKLGPFIFNYISNLVKASKSKKLLHSVSDLEQILLTGPEFEQVAGIADIGLDVTFDTIMHGFKPKRYTAAPYTVIRSGDSDALTAKRDKTIRALERLKKLFLFEDDAMSEKEYLMSKRELEGTLSDIENELSALEADTADTKYDDMSFISTASGFLIAHQIASGEHINYRELACAVDAKVLKDFVNSVIERIVLLDGRVASIEFKNRLVHEFLYRE

SEQ ID NO: 1698 - protein, 559 aa, Unknown
  Description of Unknown: Integrase B1699 sequence
  IPR036162,PS51737,IPR011109,PTHR30461,PS00397, PF00239,G3DSA:1.10.10.2600,IPR006119,SSF53041,cd00338, SM00857,IPR025827,IPR038109,PS51736,IPR006118, PF13408,G3DSA:3.40.50.1390,PF07508,Coil
MSKTVAIYVRVSTGKQADRDSIPFQIQECSNYVKHFLKTENFEVFKDAGRSGKNTQRPEYQRMIEKVKSGMVSHVVVYKIDRISRNLVDFSIMYNDFKEHKVAFISLNEQFDTSSAIGEAVLKIILVFAELERKLTGERVHDIMMNRALEGKWNGARVPYGWDWDTKNRCPVHSETEAEYARMMYRLYDESHSTCVVRDYCNAHDIPTKRGGEWTSKTVADLLRNPMNVGDYRYNYRKSARGKRNDPSEVIYVKDVFPPLIDRELYERVTHQMDLNTLGLGKDGRKVVSKKTHVFGGLIVCGLCGAFYHSDSDTPRADGFLPTKYRCGAHNRKIHCKAKGISDVMLGPFIFNYISNLVKASKSRKLLHSVSDLEQILLTGPEFEQVAGIADVGLDVTFDTIMHGFRPKRYTAAPYTVIRSGDSDALNAKRDKTIRALERLKKLFLFEDDAMSEKEYLMSKRELEGTLSDIENELSALEADTADTKYDDMSFISTASGFLIAHQIASGEHINYRELACAVDAKVLKDFANSVIERIVLLDGRVASIEFKNGLVHEFLYRE

SEQ ID NO: 1699 - protein, 559 aa, Unknown
  Description of Unknown: Integrase B1700 sequence
  SM00857,IPR006118,G3DSA:1.10.10.2600,IPR036162,PS51737, G3DSA:3.40.50.1390,IPR006119,IPR038109,PF07508,IPR011109, SSF53041,PF00239,PTHR30461,PS00397,PS51736, Coil,cd00338
MSKTVAIYVRVSTGKQADRDSIPFQIQECSNYVKHFLKTENFEVFKDAGRSGKNTHRPEYQRMIEKVKSGMISHVVVYKIDRISRNLVDFSIMYNDFKEHKVAFISLNEQFDTSSALGEAVLKIILVFAELERKLTGERVRDIMMNRALEGKWNGARVPYGWDWDAKKQCPVHSDAEAEYARMMYRLYDECHSTCVVRDYCNAHDIPTKRGGEWTSKTVADFLRNPMNVGDYRYNYRKSARGKRNDPSEVIYVKDVFPPLIDRELYERVTHQMDLNTFGLGKDGRKVVSKKTHVFGGLVVCGLCGAFYHSDADVVRADGFRPSNYRCGAHNKKIHCKAKGTSDVKLGPFIFNYISNLVKASKSKKLLHSVSDLEQILLTGPEFEQVAGIADIGLDVTFDTIMHGFKPKRYTAAPYTVIRSGDSDALTAKRDKTIRALERLKKLFLFEDDAMSEKEYLMSKRELEGTLSDIENELSALEADTADTKYDDMSFISTASGFLIAHQIASGEHINYRELACAVDAKVLKDFVNSVIERIVLLDGRVASIEFKNGLVHEFLYRE

SEQ ID NO: 1700 - protein, 559 aa, Unknown
  Description of Unknown: Integrase B1701 sequence
  SM00857,G3DSA:1.10.10.2600,IPR036162,PF13408,PS51737, G3DSA:3.40.50.1390,IPR025827,IPR006119,IPR038109,PF07508, IPR011109,SSF53041,PF00239,PTHR30461,Coil, cd00338
MAYRKITDIRDTIGMRAVFYARVSTAEEEQLNAIELQIEENRGCIKDHGWKLVGEYIDRSKSGTMVKGRDDYQRLYEDLYEDLFDIVVIKDQERLQRNTLDWYLFINRVVQTGKLLFMYMDGKFYSPDDALITGVRAIIAEEFSRNLSKKLHNYHDHRIEKARQGQEIALQGSGNVYGWDKKDGKYYINPEQAKVRRLMCEGIMARKGSTLIAKELNDAGYRNTVGKPWKPMDIPKFVYDCKNVGTMIINKERHDFESKQTIKLPKEEWVYVENALPPIVTQEEWDLICKIHEERVIATGSDRRGKKTSGYSFSGKLVCGICGAPYWRKQRVSKDEYWVCSTKQTKGRRTRKRDSTMGKAGEINPLGCDNENISYNSLMEIMEVVSERLQANTDTIKQDMINWLTKLRKQLLEANGGHTEADLQRELSRKSKLLDAYLDGILNKQEYQTKAEELDERIIQLKAETEKNKANSGDIAEIDKVLANIDEEVSRYVDGNEKLKVEYLLEHLEQVQIFPDKVIVIVPILSEGIVVEKAQYVSREKWSGKDNNASHVSNADQTG

SEQ ID NO: 1701 - protein, 559 aa, Unknown
  Description of Unknown: Integrase B1702 sequence
  PTHR30461:SF3,cd00338,SM00857,IPR036162,PF13408, IPR025827,G3DSA:3.40.50.1390,IPR006119,PF07508,IPR011109, SSF53041,PTHR30461,PS51736,Coil,PF00239
MKTKLYSYIRFSSMRQNDGSSYERQIRMAREIAVKYDLELVNDYQDLGVSAFKGANSKTGALSRFLDAIGRSVPVGSWLFIENLDRLSRADIVSAQELFLSIIRRGITIVTGMDNKIYSLDTVTANPMDLMFSILLFIRGNEESQTKRNRTNSSALIKIKAHQENPQNPAVAIEEIGKNMWWTDTTSGYVLPHPVFFPIVQEVVELRRNGRSTAEILDHLNATYTPPPAASHKRHSNWSRAMIERLFHTRALIGIKEISVDGVKYELKDYYPRVLDDAEFYHLKKSIGVRACNFGDKEEAKPIPLLSGVGLLKCEHCGSAMVKVKGTNRRPNQYRYSCDAMRSSRIECVHTNWSFRGDQLEKAVLQLLADKIWIAEDKANPVPALKVQIDEISRKIDNLITLSAMTGATKELADQITTLNSERETLYNQLKMAEEEMYSVDSQGWEKLAEFDLEDVYNEDRIKVRFKIKQALKRIGCSRIDKYKNLFVLEYIDGKTQRVVIENSRGPRKGRIFVDLKTINDRQILESNGLVLHPCLDMLTDKNWKPEEEIPGPLQEFGI

SEQ ID NO: 1702 - protein, 559 aa, Unknown
  Description of Unknown: Integrase B1703 sequence
  SM00857,IPR006118,G3DSA:1.10.10.2600,IPR036162, PS51737,G3DSA:3.40.50.1390,Coil,IPR006119, IPR038109,PF07508,IPR011109,SSF53041, PTHR30461,PS00397,PS51736,cd00338,PF00239
MSKTVAIYVRVSTGKQADRDSIPFQIQECSNYVKHFLKTENFEVFKDAGRSGKNTHRPEYQRMIEKVKSGMISHVVVYKIDRISRNLVDFSIMYNDFKEHKVAFISLNEQFDTSSAIGEAVLKIILVFAELERKLTGERVRDIMMNRALEGKWNGARVPYGWDWDTKKQCPVHSDTEAEYARMMYRLYDECHSTCVVRDYCNAHDIPTKRGGEWTSKTVADFLRNPMNVGDYRYNYRKSARGKRNDPSEVIYVKDVFPPLIDRELYERVTHQMDLNTFGLGKDGRKVVSKKTHVFGGLIVCGLCGAFYHSDADVVRADGFRPSNYRCGAHNKKIHCKAKGTSDVKLGPFIFNYISNLVKASKSKKLLHFVSDLEQILLTGPEFEQVAGIADIGLDVTFDTIMHGFKPKRYTAAPYTVIRSGDSDALTAKRDKTIRALERLKKLFLFEDDAMSEKEYLMSKRELEGTLSDIENELSALEADTADTKYDDMSFISTASGFLIAHQIASGEHINYRELACAVDAKVLKDFVNSVIERIVLLDGRVASIEFKNGLVHEFLYRE

SEQ ID NO: 1703 - protein, 559 aa, Unknown
  Description of Unknown: Integrase B1704 sequence
  PTHR30461:SF3,cd00338,SM00857,IPR036162,PF13408, IPR025827,G3DSA:3.40.50.1390,IPR006119,PF07508,IPR011109, SSF53041,PTHR30461,PS51736,Coil,PF00239
MKTKLYSYIRFSSMRQNDGSSYERQIRMAREVAAKYDLELVNDYQDLGVSAFKGANSKTGALSRFLDAIGRSVPVGSWLFIENLDRLSRADIVSAQELFLSIIRRGITIVTGMDNKIYSLDTVTANPMDLMFSILLFIRGNEESQTKRNRTNSSALIKIKAHQENPQNPAVAIEEVGKNMWWTDTTSGYVLPHPVYFPVVQEIVELRKNGRSTAEILDHLNETYAPPPAVSNKKHSKWSRAMVERLFHTRALIGIKEISVDGVNYELKDYYPRVIDDPTFYHLKKNIGARAWNFGDKEEVKPIPLLSGIGLLKCDHCGCAMVKVKGTNKRSDQYRYTCDATRSRRLDCEHPNWSFRGDQLEKAVLQLLADKIWIAEDKANPVPALKVQVDEISRKIDNLIALSAMTGATKELADQITTLNSERETLYNQIKMAEEEMYSVDSQGWEKLAEFDLEDVYNEERLKVRFKIKQALKRIGCSRIDRNKNLFVLEYIDGKTQRVVIENSRGTRKGQIFVDLKTINDRQILESNGLVLHPCLDMLTDKNWKPEEEIPGPLQEFGI

SEQ ID NO: 1704 - protein, 559 aa, Unknown
  Description of Unknown: Integrase B1705 sequence
  SM00857,IPR006118,G3DSA:1.10.10.2600,IPR036162, PS51737,G3DSA:3.40.50.1390,IPR006119,IPR038109, PF07508,SSF53041,IPR011109,PF00239, PTHR30461,PS00397,PS51736,Coil,cd00338
MSKTVAIYVRVSTGKQADRDSIPFQIQECSNYVKHFLKTENFEVFKDAGRSGKNTHRPEYQRMIEKVKSGMISHVVVYKIDRISRNLVDFSIMYNDFKEHKVAFISLNEQFDTSSAIGEAVLKIILVFAELERKLTGERVRDIMMNRALEGKWNGARVPYGWDWDTKKQCPVHSDTEAEYARMMYRLYDECHSTCVVRDYCNAHDIPTKRGGEWTSKTVADFLRNPMNVGDYRYNYRKSARGKRNDPSEVIYVKDVFPPLIDRELYERVTHQMDLNTFGLGKDGRKVVSKKTHVFGGLVVCGLCGAFYHSDADVVRADGFRPSNYRCGAHNKKIHCKAKGTSDVKLGPFIFNYISNLVKASKSKKLLHSVSDLEQILLTGPEFEQVAGIADIGLDVTFDTIMHGFKPKRYTAAPYTVIRSGDSDALTAKRDKTIRALERLKKLFLFEDDAMSEKEYLMSKRELEGTLSDIENELSALEADTADTKYDDMSFISTASGFLIAHQIASGEHINYRELACAVDAKVLKDFVNSVIERIVLLDGRVASIEFKNGLVHEFLYRE

SEQ ID NO: 1705 - protein, 559 aa, Unknown
  Description of Unknown: Integrase B1706 sequence
  cd00338,SM00857,IPR006118,G3DSA:1.10.10.2600,IPR036162, PS51737,G3DSA:3.40.50.1390,IPR006119,IPR038109,PF07508, SSF53041,IPR011109,PTHR30461,PS00397,PS51736, Coil,PF00239
MSKTVAIYVRVSTGKQADRDSIPFQIQECSNYVKHFLKTENFEVFKDAGRSGKNTHRPEYQRMIEKVKSGMISHVVVYKIDRISRNLVDFSIMYNDFKEHKVAFISLNEQFDTSSAIGEAVLKIILVFAELERKLTGERVRDIMMNRALEGKWNGARVPYGWDWDTKKQCPVHSDTEAEYARMMYRLYDECHSTCVVRDYCNAHDIPTKRGGEWTSKTVADFLRNPMNVGDYRYNYRKSARGKRNDPSEVIYVKDVFPPLIDRELYERVTHQMDLNTFGLGKDGRKVVSKKTHVFGGLVVCGLCGAFYHSDADVVRADGFRPSNYRCGAHNKKIHCKAKGTSDVKLGPFIFNYISNLVKASKSKKLLHSVSNLEQILLTGPEFEQVAGIADIGLDVTFDTIMHGFKPKRYTAAPYTVIRSGDSDALTAKRDKTIRALERLKKLFLFEDDAMSEKEYLMSKRELEGTLSDIENELSALEADTADTKYDDMSFISTASGFLIAHQIASGEHINYRELACAVDAKVLKDFVNSVIERIVLLDGRVASIEFKNGLVHEFLYRE

SEQ ID NO: 1706 - protein, 559 aa, Unknown
  Description of Unknown: Integrase B1707 sequence
  cd00338,SM00857,IPR006118,G3DSA:1.10.10.2600,IPR036162, PS51737,G3DSA:3.40.50.1390,IPR006119,IPR038109,PF07508, SSF53041,IPR011109,PTHR30461,PS00397,PS51736, Coil,PF00239
MSKTVAIYVRVSTGKQADRDSIPFQIQECSNYVKHFLKTENFEVFKDAGRSGKNTHRPEYQRMIEKVKSGMISHVVVYKIDRISRNLVDFSIMYNDFKEHKVAFISLNEQFDTSSAIGEAVLKIILVFAELERKLTGERVRDIMMNRALEGKWNGARVPYGWDWDTKKQCPVHSDTEAEYARMMYRLYDECHSTCVVRDYCNAHDIPTKRGGEWTSKTVADFLRNPMNVGDYRYNYRKSARGKRNDPSEVIYVKDVFPPLIDRELYERVTHQMDLNTFGLGKDGRKVVSKKTHVFGGLVVCGLCGAFYHSDADVVRADGFRPSNYRCGAHNKKIHCKAKGTSDVKLGPFIFNYISNLVKASKSKKLLHSVSDLEQILLTGPEFEQVAGIADDGLDVTFDTIMHGFKPKRYTAAPYTVIRSGDSDALTAKRDKTIRALERLKKLFLFEDDAMSEKEYLMSKRKLEGTLSDIENELSALEADTADTKYDDMSFISTASGFLIAHQIASGEHINYRELARAVDAKVLKDFVNSVIERIVLLDGRVASIEFKNGLVHEFLYRE

SEQ ID NO: 1707 - protein, 559 aa, Unknown
  Description of Unknown: Integrase B1708 sequence
  cd00338,SM00857,IPR006118,G3DSA:1.10.10.2600,IPR036162, PS51737,G3DSA:3.40.50.1390,IPR006119,IPR038109,PF07508, SSF53041,IPR011109,PTHR30461,PS00397,PS51736, Coil,PF00239
MSKTVAIYVRVSTGKQADRDSIPFQIQECSNYVKHFLKTENFEVFKDAGRSGKNTHRPEYQRMIEKVKSGMISHVVVYKIDRISRNLVDFSIMYNDFKEHKVAFISLNEQFDTSSAIGEAVLKIILVFAELERKLTGERVRDIMMNRALEGKWNGARVPYGWDWDTKKQCPVHSDTEAEYARMMYRLYDESHSTCVVRDYCNAHDIPTKRGGEWTSKTVADFLRNPMNVGDYRYNYRKSARGKRNDPSEVIYVKDVFPPLIDRELYERVTHQMDLNTFGLGKDGRKVVSKKTHVFGGLVVCGLCGAFYHSDADVVRADGFRPSNYRCGAHNKKIHCKAKGTSDVKLGPFIFNYISNLVKASKSKKLLHSVSDLEQILLTGPEFEQVAGIADIGLDVTFDTIIHGFKPKRYTAAPYTVIRSGDSDALTAKRDKTIRALERLKKLFLFEDDAMSEKEYLMSKRELEGTLSDIENELSALEADTADTKYDDMSFISTASGFLIAHQIASGEHINYRELACAVDAKVLKDFVNSVIERIVLLDGRVASIEFKNGLVHEFLYRE

SEQ ID NO: 1708 - protein, 559 aa, Unknown
  Description of Unknown: Integrase B1709 sequence
  cd00338,SM00857,IPR006118,G3DSA:1.10.10.2600,IPR036162, PS51737,G3DSA:3.40.50.1390,IPR006119,IPR038109,PF07508, IPR011109,SSF53041,PTHR30461,PS00397,PS51736, Coil,PF00239
MSKTVAIYVRVSTGKQADRDSIPFQIQECSNYVKHFLKTENFEVFKDAGRSGKNTHRPEYQRMIEKVKAGMISHVVVYKIDRISRNLVDFSIMYNDFKEHKVAFISLNEQFDTSSAIGEAVLKIILVFAELERKLTGERVHDIMMNRALEGKWNGARVPYGWDWDTKNRCPVHSETEAEYARMMYRLYDESHSTCVVRDYCNAHDIPTKRGGEWTSKTVADFLRNPMNVGDYRYNYRKSARGKRNDPSDVIYVKDVFPPLIDRELYERVTHQMDLNTFGLGKDGRKVVSKKTHVFGGLVVCGLCGAFYHSDADVVRADGFRPSNYRCGAHNKKIHCKAKGTSDVKLGPFIFNYISNLVKASKSKKLLYSVSDLEQILLTGPEFEQVAGIADIGLDVTFDTIMHGFKPKRYTAAPYTVIRSGDSDALTAKRDKTIRALERLKKLFLFEDDAMSEKEYLMSKRELEGTLSDIENELSALEADTADTKYDDMSFISTASGFLIAHQIASGEHINYRELACAVDAKVLKDFVNSVIERIVLLDGRVASIEFKNGLVHEFLYRE

SEQ ID NO: 1709 - protein, 559 aa, Unknown
  Description of Unknown: Integrase B1710 sequence
  PTHR30461:SF3,SM00857,IPR036162,PF13408,IPR025827, G3DSA:3.40.50.1390,IPR006119,PF07508,IPR011109,SSF53041, PF00239,PTHR30461,PS51736,Coil,cd00338
MKTKLYSYIRFSSMRQNDGSSYERQIRMAREIAAKYDLELVNDYQDLGVSAFKGANSKTGALSRFLDAIGRSVPVGSWLFIENLDRLSRADIVSAQELFLSIIRRGITIVTGMDNKIYSLDTVTANPMDLMFSILLFIRGNEESQTKRNRTNSSALIKIKAHQENPQNPAVAIEEVGKNMWWTDTTSGYVLPHPVYFPVVQEIVELRKNGRSTAEILDHLNETYTPPPAVSNKKHSKWSRAMVERLFHTRALIGIKEVSVDGVNYELKDYYPRVIDDPTFYHLKKNIGARAWNFGDKEEVKPIPLLSGIGLLKCDHCGCAMVKVKGTNKRSDQYRYTCDATRSRRLDCEHPNWSFRGDQLEKAVLQLLADKIWIAEDKANPVPALKVQVDEISRKIDNLIALSAMTGATKELADQITTLNSERETLYNQIKMAEEEMYSVDSQGWEKLAEFDLEDVYNEERLKVRFKIKQALKRIGCSRIDRNKNLFVLEYIDGKTQRVVIENSRGTRKGQIFVDLKTINDRQILESNGLVLHPCLDMLTDKNWKPEEEIPGPLQEFGI

SEQ ID NO: 1710 - protein, 559 aa, Unknown
  Description of Unknown: Integrase B1711 sequence
  PTHR30461:SF3,SM00857,G3DSA:1.10.10.2600,IPR036162,PF13408, PS51737,G3DSA:3.40.50.1390,IPR025827,IPR006119,IPR038109, PF07508,IPR011109,SSF53041,PF00239, PTHR30461,PS51736,Coil,cd00338
MSEARTYEPTVTRVKTVRVIPPTIQPLSDIPAFSARPRRVAAYARVSTSSEEQLTSYEAQVKHYTEYIKSKETSDNWQFVDVYTDKGITGVSTKKREGFNRMIQDALAGRIDLIITKSVSRFARNTVDTLTAIRKLKEYGVEVYFEEQNIYTLDGKGELLLTIMSSIAQEESRNISENVTWGMRKRFADGKVTMPYGQFMGYRRGKDGTPEVVEAEADVVRTIFRRFLEGATPAMISRELNLAGVPCPSRKSLLSENEAEIAKARKKTSRWGTSTVENILTNEKYKGDAILQKTYCTDYLLKTFVVNDGSVVPKYYAQNSHPAIVSPEVFDLAQQELAWRRSLNGRYSGRSCFASRVVCGDCGAFYGSKVWHSTDEYRRTIWRCNNKYAGETKCATPHVTQEALEKAFVQVIQQMLSQKDRILTACREALDEAFDTMELDKAATRLQDQALGMAARVRQLVDENARVQRDQDEFKNDYEALLAEHARLSEKIRTIAEQKKDKAERRRRIEIFLHMLEEQKECADFEPGMFVALVDKVIIQHDGHMGFCFRNGMKCEYPQ

SEQ ID NO: 1711 - protein, 559 aa, Unknown
  Description of Unknown: Integrase B1712 sequence
  PTHR30461:SF3,SM00857,G3DSA:1.10.10.2600,IPR036162,PF13408, IPR025827,G3DSA:3.40.50.1390,PS51737,IPR006119,IPR038109, PF07508,SSF53041,IPR011109,PTHR30461,Coil, PS51736,cd00338,PF00239
MKTKKPARKRENLIGVNYCRYSSHSQRDASIEQQMAAAQAYAAANGITIIETYADRAITGRTDDRHEFQRMLRDAERGKFECVIAWKSDRLGRNMLQAMQNEARLNAYGVICVYVEENFDDSAAGRFALRNMMNVNQFYSESMAENVTRGMRYNAENCMVTNGQLPFGYKVDSSLHYELDHPKDDIVREIFTRIANGEPIVDIYTDLNNRNILTGRGKPWTKSGFHRLLHNERYKGIYIYDDIRIENGIPRIVSDELFDKVQKVLKMKNNPSGRHRSVAEYLLTGKLFCGYCKSPMTGMSGRSKTGDIHYYYACSYKRANGAASCKKKTVRKDKIEFEIASTIKQRLNDPEVQEWLIDRLMERQERYHRIPELEILKSRQAEVNTSIKNLLTAIEAGIVTSSTKSRLEELEAENANLSENIRVLSELKNKHFTREQILNWFSSLQNGKIEDKQYQKQIFQLFLKKAYLYDDKITIVFDTAEFSGTDSDELEFDLDDIDELVEEARIGKSVRLTSTLAHQKEKPPARRFFFLYFYLFTLLSSLFSTVSGRLFQIKDKREK

SEQ ID NO: 1712 - protein, 559 aa, Unknown
  Description of Unknown: Integrase B1713 sequence
  SM00857,IPR006118,G3DSA:1.10.10.2600,IPR036162,PS51737, G3DSA:3.40.50.1390,IPR006119,IPR038109,PF07508,SSF53041, IPR011109,PF00239,PTHR30461,PS00397,PS51736, Coil,cd00338
MSKTVAIYVRVSTGKQADRDSIPFQIQECSNYVKHFLKTENFEVFKDAGRSGKNTHRPEYQRMIEKVKSGMISHVVVYKIDRISRNLVDFSIMYNDFKEHKVAFISLNEQFDTSSAIGEAVLKIILVFAELERKLTGERVRDIMMNRALEGKWNGARVPYGWDWDTKKQCPVHSDTEAEYARMMYRLYDECHSTCVVRDYCNAHDIPTKRGGEWTSKTVADFLRNPMNVGDYRYNYRKSARGKRNDPSEVIYVKDVFPPLIDRELYERVTHQMDLNTFGLGKDGRKVVSKKTHVFGGLVVCGLCGAFYHSDADVVRADGFRPSNYRCGAHNKKIHCKAKGTSDVKLGPFIFNYISNLVKASKSKKLLHSVSDLEQILLTGPEFEQVAGIADDGLDVTFDTIMHGFKPKRYTAAPYTVIRSGDSDALTAKRDKTIRALERLKKLFLFEDDAMSEKEYLMSKRELEGTLSDIENELSALEADTADTKYDDMSFISTASGFLIAHQIASGEHINYRELACAVDAKVLKDFVNSVIERIVLLDGRVASIEFKNGLVHEFLYRE

SEQ ID NO: 1713 - protein, 559 aa, Unknown
  Description of Unknown: Integrase B1714 sequence
  PTHR30461:SF3,cd00338,SM00857,G3DSA:1.10.10.2600,IPR036162, PF13408,PS51737,G3DSA:3.40.50.1390,IPR025827,IPR006119, IPR038109,PF07508,IPR011109,SSF53041,PTHR30461, PS51736,Coil,PF00239
MLKTDDRVLRVAAYCRVSTDKTDQANSLESQQRYFNEYIKRNPLWELYDIYVDDGITGTSTKKRVAFNQMIEDAKGGKFDLIITKEISRFARNILDSIGYTRELKNLGVGVIFLNDNINTLDNDAEMRLAFFSTMAQEESRKTSERVKWGLRRQMEKGVVLGRDMLGYDVRNGQLIINEEGAETVRMIYHKFLDEGKGAHRIARELREEGVKTSTRMKDWSYTVILRILRNEKYCGDLVQQKTYTPDYLSHKKKRNYGEIETVEIHNHHEPIISRERFDAVQRELERRRPAESTVKAFANRYALSGKIVCGECGAGFVRRQKKRKDGSFNVKWVCAESQKNGSKHEEKDGTYTGCTTNSINDRDIKEILQSVVADTMEGRAEVTSYMLQTVEAVIEAVGKSNIIDHFEKEIERSKEKKKRLLDMCLNGYIEAKEYREACDEITMQIIDLEEKLNRGKSNQKIIEDKEKIINDIREFVENVSCGAEWNDTFYRNIVDKIVVYRDRKIDIHLKLIPGKWQAKILAGSGEINAYESEKSSCVCSTPMSVSNPLSSGYGIEYR

SEQ ID NO: 1714 - protein, 559 aa, Unknown
  Description of Unknown: Integrase B1715 sequence
  PTHR30461:SF3,SM00857,IPR036162,PF13408,IPR025827, G3DSA:3.40.50.1390,IPR006119,PF07508,IPR011109,SSF53041, PF00239,PTHR30461,PS51736,Coil,cd00338
MKTKLYSYIRFSSMRQSDGSSYERQIRMAREIAAKYDLELVNDYQDLGVSAFKGANSKTGALSRFLDAIGRSVPVGSWLFIENLDRLSRADIVSAQELFLSIIRRGITIVTGMDNKIYSLDTVTANPMDLMFSILLFIRGNEESQTKRNRTNSSALIKIKAHQENPQNPAVAIEEVGKNMWWTDTTSGYVLPHPVFFPVVQEIVELRKNGRSTAEILDHLNETYAPPPAVSNKKHSKWSRAMVERLFHTRALIGIKEVSVDGVNYELKDYYPRVIDDATFYHLKKNIGARAWNFGDKEEVKPIPLLSGIGLLKCDHCGCAMVKVKGTNKRSDQYRYTCDATRSRRLDCEHPNWSFRGDQLEKAVLQLLADKIWIAEDKANPVPALKVQVDEISRKIDNLIALSAMTGATKELADQITTLNSERETLYNQIKMAEEEMYSVDSQGWEKLAEFDLEDVYNEERLKVRFKIKQALKRIGCSRIDRNKNLFVLEYIDGKTQRVVIENSRGTRKGRIFIDLKTINDRQILESNGLVLHPCLDMLTDKNWKPEEEIPGPLQEFGI

SEQ ID NO: 1715 - protein, 559 aa, Unknown
  Description of Unknown: Integrase B1716 sequence
  IPR036162,PS51737,IPR011109,PTHR30461, PS00397,PF00239,G3DSA:1.10.10.2600,IPR006119, SSF53041,cd00338,SM00857,IPR025827,IPR038109 ,PS51736,IPR006118,PF13408,G3DSA:3.40.50.1390,PF07508,Coil
MSKIVAIYVRVSTGKQADRDSIPFQIQECSNYVKHFLKTENFEVFKDAGRSGKNTHRPEYQRMIEKVKSGMISHVVVYKIDRISRNLVDFSIMYNDFKEHKVAFISLNEQFDTSSAIGEAVLKIILVFAELERKLTGERVRDIMMNRALEGKWNGARVPYGWDWDAKKQCPVHSDAEAEYARMMYRLYDECHSTCVVRDYCNAHDIPTKRGGEWTSKTVADFLRNPMNVGDYRYNYRKSARGKRNDPSEVVYVKDVFPPLIDRELYERVTHQMDLNTFGLGKDGRKVVSKKTHVFGGLIVCGLCGAHYHSDSDAPRADGFLPSQYRCGAHNRKIHCKAKGTSDVKLGPFIFNYISNLVKASKSKKLLHSVSDLEQILLNGPEFEQVAGIADIGLDVTFDTIMHGFKPKRYTAAPYTVIRSGDSDALTAKRDKTIRALERLKKLFLFEDDAMSEKEYLMSKRELEGTLSDIENELSALEADTADTKYDDMSFISTASGFLIAHQIASGEHINYRELACAVDAKVLKDFANSVIERIVLLDGRVASIEFKNGLVHEFLYRE

SEQ ID NO: 1716 - protein, 559 aa, Unknown
  Description of Unknown: Integrase B1717 sequence
  IPR036162,PS51737,IPR011109,PTHR30461,PS00397, PF00239,G3DSA:1.10.10.2600,IPR006119,SSF53041,cd00338, SM00857,IPR025827,IPR038109,PS51736,IPR006118, PF13408,G3DSA:3.40.50.1390,PF07508,Coil
MSKTVAIYVRVSTGKQADRDSIPFQIQECSNYVKHFLKTENFEVFKDAGRSGKNTHRPEYQRMIEKVKSGMISHVVVYKIDRISRNLVDFSIMYNDFKEHKVAFISLNEQFDTSSAIGEAVLKIILVFAELERKLTGERVRDIMMNRALEGKWNGARVPYGWDWDTKKQCPVHSDTEAEYARMMYRLYDEFHSTCVVRDYCNAHDIPTKRGGEWTSKTVADFLRNPMNVGDYRYNYRKSARGKRNDPSEVIYVKDVFPPLIDRELYERVTHQMDLNTFGLGKDGRKVVSKKTHVFGGLIVCGLCGAFYHSDSDTPRADGFLPSQYRCGAHNRKIHCKAKGTSDVKLGPFIFNYISNLVKASKSKKLLHSVSDLEQILLTGPEFEQVAGIADIGLDVTFDTIMHGFKPKRYTAAPYTVIRSGDSDALTAKRDKTIRALERLKKLFLFEDDAMSEKEYLMSKRELEGTLSDIENELSVLEADTADTKYDDMSFISTASGFLIAHQIASGEHINYRELACAVDAKVLKDFANSVIERIVLLDGRVASIEFKNGLVHEFLYRE

SEQ ID NO: 1717 - protein, 559 aa, Unknown
  Description of Unknown: Integrase B1718 sequence
  SM00857,G3DSA:1.10.10.2600,IPR036162,PF13408,IPR025827, PS51737,G3DSA:3.40.50.1390,IPR006119,IPR038109,PF07508, IPR011109,SSF53041,PTHR30461,Coil,PS51736, cd00338,PF00239
MVKNRAAIYARFSSHNQRSESIEIQVENSRAYCEREGLQVVREYCDYAQTGRNIDRAEFQRMMSDARHGLFDYVVIYKVTRIMRNRDEMSLARIMLRKAGVEILYAGEDISSGSSGVLQLGMLEVLAEYESALDSERIRDGIQKNAQRCMANGRTLYGWDIVEGRYVINEREASVLRRMKNMLFAGSSVADIVRAVSTERSKRGAKFNQDTVTKLLKRVQNAGVYKYAGHEVQDGMPAIWSQVEQDMIDNILGDRHKPRRKINSTLEFPLSGKLYCAKCGAPMAGTSGTSCTGATYHYYKCRKCRRTVRRDLVEDVVCDMTLQAVAREDVRQRIASGMVAFQAEQPKEQSRSYAIKKELKRIDRTFERIWQAIEDGIAPPGGRERTEELKHRKSELEAELRIAEREETFNIGVDELMLWLDDAAENLTPEVILGTFVRFVEIDGKTLNVYFAFDHYGDDFRPKQKKAEPCPEGNSSTNSLMVEVRRIELRSTVENREVSTGLVAVRIGRPSGTPTSATSFRRFRLSSGHTDYVPEGNPLIMIPYSSQGFNRRLGGLDLN

SEQ ID NO: 1718 - protein, 559 aa, Unknown
  Description of Unknown: Integrase B1719 sequence
  SM00857,IPR006118,G3DSA:1.10.10.2600,IPR036162,PS51737, G3DSA:3.40.50.1390,IPR006119,IPR038109,PF07508,IPR011109, SSF53041,PF00239,PTHR30461,PS00397,PS51736, Coil,cd00338
MSKTVAIYVRVSTGKQADRDSIPFQIQECSNYVKHFLKTENYEIFKDAGRSGKNTHRPEYQRMIEKVKAGMISHVVVYKIDRISRNLVDFSIMYNDFKEHKVAFISLNEQFDTSSAIGEAVLKIILVFAELERKLTGERVRDIMMNRALEGKWNGARVPYGWDWDAKKQCPVHSDTEAEYARMMYRLYDESHSTCVVRDYCNAHDIPTKRGGEWTSKTVADFLRNPMNVGDYRYNYRKSARGKRNDPSEVIYVKDVFPPLIDRELYERVTHQMDMNTFGLGKDGRKVVSKKTHVFGGLIVCGLCGAFYHSDADVVRADGFRPSNYRCGAHNKKIHCKAKGTSDVKLGPFIFNYISNLVKASKSKKLLHFVSDLEQILLTGPEFEQVAGIADIGLDVTFDTIIHGFKPKRYTAAPYTVIRSGDSDALTAKRDKTIRALERLKKLFLFEDDAMSEKEYLMSKRELEGTLSDIENELSALEADTADTKYDDMSFISTASGFLIAHQIASGEHINYRELACAVDAKVLKDFVNSVIERIVLLDGRVASIEFKNGLVHEFLYRE

SEQ ID NO: 1719 - protein, 559 aa, Unknown
  Description of Unknown: Integrase B1720 sequence
  IPR036162,PS51737,IPR011109,PTHR30461,PS00397, PF00239,G3DSA:1.10.10.2600,IPR006119,SSF53041,cd00338, SM00857,IPR025827,IPR038109,PS51736,IPR006118, PF13408,G3DSA:3.40.50.1390,PF07508,Coil
MSKTVAIYVRVSTGKQADRDSIPFQIQECSNYVKHFLKTENFEVFKDAGRSGKNTHRPEYQRMIEKVKAGMISHVVVYKIDRISRNLVDFSIMYNDFKEHKVAFISLNEQFDTSSAIGEAVLKIILVFAELERKLTGERVRDIMMNRALDGKWNGARVPYGWDWDTKKQCPVHSDTEAEYARMMYRLYDESHSTCVVRDYCNAHDIPTKRGGEWTSKTVADFLRNPMNVGDYRYNYRKSARGKRNDPSEVIYVKDVFPPLIDRELYERVTHQMDLNTFGLGKDGRKVVSKKTHVFGGLIVCGLCGAFYHSDSDTPRADGFLPSQYRCGAHNRKIHCKAKGTSDVKLGPFIFNYISNLVKASKSKKLLHSVSDLEQILLTGPEFEQVAGIADIGLDVTFDTIMHGFKPKRYTAAPYTVIRSGDSDALTAKRDKTIRALERLKKLFLFEDDAMSEKEYLMSKRELEGTLSDIENELSVLEADTADTKYDDMSFISTASGFLIAHQIASGEHINYRELACAVDAKVLKDFANSVIERIVLLDGRVASIEFKNGLVHEFLYRE

SEQ ID NO: 1720 - protein, 559 aa, Unknown
  Description of Unknown: Integrase B1721 sequence
  IPR036162,PS51737,IPR011109,PTHR30461,PS00397, PF00239,G3DSA:1.10.10.2600,IPR006119,SSF53041,cd00338, SM00857,IPR025827,IPR038109,PS51736,IPR006118, PF13408,G3DSA:3.40.50.1390,PF07508,Coil
MSKTVAIYVRVSTGKQADRDSIPFQIQECSNYVKHFLKTENFEVFKDAGRSGKNTHRPEYQRMIEKVKAGMISHVVVYKIDRISRNLVDFSIMYNDFKEHKVAFISLNEQFDTSSAIGEAVLKIILVFAELERKLTGERVRDIMMNRALEGKWNGARVPYGWDWDTKKQCPVHSDTEAEYARMMYRLYDESHSTCVVRDYCNAHDIPTKRGGEWTSKTVADFLRNPMNVGDYRYNYRKSARGKRNDPSEVVYVKDVFPPLIDRELYERVTHQMDLNTFGLGKDGRKVVSKKTHVFGGLIVCGLCGAFYHSDSDTPRADGFLPSQYRCGAHNRKIHCKAKGTSDVKLGPFIFNYISNLVKASKSKKLLHSVSDLEQILLTGPEFEQVAGIADAGLDVTFDTIMHGFKPKRYTAAPYTVIRSGDSDALTAKRDKTIRALERLKKLFLFEDDAMSEKEYLMSKRELEGTLSDIENELSALEADTADTKYDDMSFISTASGFLIAHQIASGEHINYRELACAVDAKVLKDFANSVIERIVLLDGRVASIEFKNGLVHEFLYRE

SEQ ID NO: 1721 - protein, 559 aa, Unknown
  Description of Unknown: Integrase B1722 sequence
  IPR036162,PS51737,IPR011109,PTHR30461,PS00397, PF00239,G3DSA:1.10.10.2600,IPR006119,SSF53041,cd00338, SM00857,IPR025827,IPR038109,PS51736,IPR006118, PF13408,G3DSA:3.40.50.1390,PF07508,Coil
MSKTVAIYVRVSTGKQADRDSIPFQIQECSNYVKHFLKTENFEVFKDAGRSGKNTHRPEYQRMIEKVKSGMISHVVVYKIDRISRNLVDFSIMYNDFKEHKVAFISLNEQFDTSSAIGEAVLKIILVFAELERKLTGERVRDIMMNRALEGKWNGARVPYGWDWDSKKQCPVHSDTEAEYARMMYRLYDECHSTCVVRDYCNAHNIPTKRGGEWTSKTVADFLRNPMNVGDYRYNYRKSARGKRNDPSEVIYVKDVFPPLIDRELYERVTHQMDLNTFGLGKDGRKVVSKKTHVFGGLIVCGLCGAFYHSDSDTPRADGFLPSQYRCGAHNRKIHCKAKGTSDVKLGPFIFNYISNLVKASKSKKLLHSVSDLEQILLTGPEFEQVAGIADIGLDVTFDTIMHGFKPKRYTAAPYTVIRSGDSDALTAKRDKTIRALERLKKLFLFEDDAMSEKEYLMSKRELEGTLSDIENELSVLEADTADTKYDDMSFISTASGFLIAHQIASGEHINYRELACAVDAKVLKDFANSVIERIVLLDGRVASVEFKNGLVHEFLYRE

SEQ ID NO: 1722 - protein, 559 aa, Unknown
  Description of Unknown: Integrase B1723 sequence
  PTHR30461:SF3,cd00338,SM00857,IPR036162,PF13408, IPR025827,G3DSA:3.40.50.1390,IPR006119,PF07508,IPR011109, SSF53041,PTHR30461,PS51736,Coil,PF00239
MKTKLYSYIRFSSMRQSDGSSYERQIRMAREIAAKYDLELVNDYQDLGVSAFKGANSKTGALSRFLDAIGRSVPVGSWLFIENLDRLSRADIVSAQELFLSIIRRGITIVTGMDNKIYSLDTVTANPMDLMFSILLFIRGNEESQTKRNRTNSSALIKIKAHQENPQNPAVAIEEVGKNMWWTDTTSGYVLPHPVYFPVVQEIVELRKNGRSTAEILDHLNETYAPPPAVSNKKHSKWSRAMVERLFHTRALIGIKEISVDGVNYELNNYYPRVIDDPTFYHLKKNIGARAWNFGDKEEVKPIPLLSGIGLLKCDHCGCAMVKVKGTNKRSDQYRYTCDATRSRRLDCEHPNWSFRGDQLEKAVLQLLADKIWIAEDKANPVPALKVQVDEISRKIDNLIALSAMTGATKELADQITTLNSERETLYNQIKMAEEEMYSVDSQGWEKLAEFDLEDVYNEDRIKVRFKIKQALKRIGCSRIDRNKNLFVLEYVDGKTQRVVIENSRGTRKGRIFIDLKTINDRQILESNGLVLHPCLDMLTDKNWKPEEEIPGPLQEFGI

SEQ ID NO: 1723 - protein, 559 aa, Unknown
  Description of Unknown: Integrase B1724 sequence
  PTHR30461:SF3,cd00338,SM00857,G3DSA:1.10.10.2600,IPR036162, PF13408,PS51737,IPR025827,G3DSA:3.40.50.1390,IPR006119, IPR038109,PF07508,IPR011109,SSF53041, PTHR30461,PS51736,Coil,PF00239
MKNIKIKCNIYTRVSTTMQVDGYSLDAQKEKLRRYAEFQNMEIVNEYSDEGKSGKSVEGRPEFQRMLDNIENGTDEIQFVLVFKLSRFGRNAADVLNSLQRMQDFGVNLICVEDGIDSSKDSGKLMISVLSAVAEIERENILVQTMEGRKQKAREGKWNGGFAPYGYELVNGELQIAEDEAEVIRLIYDKFIHTNMGIAAIAIWLNQHGYKKKKRQNNTLDAFAASFIKGVLDNPVYCGKLAYGRRKNEKVAGTRNEYRIVKQENYMLYDGIHEGIISETDWELAHQKRVKNGVKYEKIHSLDHEHILSGILKCPLCGSGMYGNVNRKKKKDGTLYKDYFYYACKHRRLMNGHRCDYHKQWSEDKVNNAVEEVIRKLVQNPKFEEAIRKKIGSRIDTDEIEREIENLEKQHRQLTGAKARLGQQMDNLDIMDKFYEKKYQDMETRLYRLYDEIEGVENSIEEVKKRLLNIQQQKISEENVYQFLLYFDKLYDKFTDLEKKEFLNSFVERVDIYDQEQPDGRFLKHIKFRFPVYFGDRETQELCWDNESTVETVCKLVRK

SEQ ID NO: 1724 - protein, 559 aa, Unknown
  Description of Unknown: Integrase B1725 sequence
  SM00857,G3DSA:1.10.10.2600,IPR036162,PF13408,IPR025827, G3DSA:3.40.50.1390,PS51737,IPR006119,IPR038109,PF07508, SSF53041,IPR011109,PTHR30461,Coil,cd00338, PF00239
MAYRKITDIRDTIGMRAVFYARVSTAEEEQLNAIELQIEENRGCIKDHGWKLVGEYIDRSKSGTMVKGRDDYQRLYEDLYEDLFDIVVIKDQERLQRNTLDWYLFINRVVQTGKLLFMYMDGKFYSPDDALITGVRAIIAEEFSRNLSKKLHNYHDHRIEKARQGQEIALQGSGNVYGWDKKDGKYYINPEQAKVRRLMCEGIMARKGSTLIAKELNDAGYRNTVGKPWKPMDIPKFVYDCKNVGTMIINKERHDFESKQTIKLPKEEWVYVENALPPIVTQEEWDLICKIHEERVIATGSDRRGKKTSGYSFSGKLVCGICGAPYWRKQRVSKDEYWVCSTKQTKGRRTRKRDSTMGKAGEINPLGCDNENISYNSLMEIMGVVSERLQANTNTIKQDMINWITKLRKQLLEANGGHTEADLQRELSRKSKLLDAYLDGILNKQEYQKKAEELDERIIQLKAETEKNKANSGDIAEIDKVLANIDEEVSRYVDGNEKLKVEYLLEHLEQVQIFPDKVIVIVPILSEGIVVEKAQYVSREKRSRKDNTFKYLSRNQARL

SEQ ID NO: 1725 - protein, 559 aa, Unknown
  Description of Unknown: Integrase B1726 sequence
  cd00338,SM00857,IPR006118,G3DSA:1.10.10.2600,IPR036162, PS51737,G3DSA:3.40.50.1390,IPR006119,IPR038109,PF07508, SSF53041,IPR011109,PTHR30461,PS00397,PS51736, Coil,PF00239
MSKTVAIYVRVSTGKQADRDSIPFQIQECSNYVKHFLKTENFEVFKDAGRSGKNTHRPEYQRMIEKVKSGMISHVVVYKIDRISRNLVDFSIMYNDFKEHKVAFISLNEQFDTSSAIGEAVLKIILVFAELERKLTGERVRDIMMNRALEGKWNGARVPYGWDWDAKKQCPVHSDTEAEYARMMYRLYDESHSTCVVRDYCNAHDIPTKRGGEWTSKTVADFLRNPMNVGDYRYNYRKSARGKRNDPSEVIYVKDVFPPLIDRELYERVTHQMDMNTFGLGKDGRKVVSKKTHVFGGLIVCGLCGAFYHSDADVVRADGFRPSNYRCGAHNKKIHCKAKGTSDVKLGPFIFNYISNLVKASKSKKLLHFVSNLEQILLTGPEFEQVAGIADIGLDVTFDTIMHGFKPKRYTAAPYTVIRSGDSDALTAKRDKTIRALERLKKLFLFEDDAMSEKEYLMSKRELEGTLSDIENELSALEADTADTKYDDMSFISTASGFLIAHQIASGEHINYRELSCAVDAKVLKDFVNSVIERIVLLDGRVASIEFKNGLVHEFLYRE

SEQ ID NO: 1726 - protein, 559 aa, Unknown
  Description of Unknown: Integrase B1727 sequence
  IPR036162,PS51737,IPR011109,PTHR30461,PS00397, PF00239,G3DSA:1.10.10.2600,IPR006119,SSF53041,cd00338, SM00857,IPR025827,IPR038109,PS51736,IPR006118, PF13408,G3DSA:3.40.50.1390,PF07508,Coil
MSKTVAIYVRVSTGKQADRDSIPFQIQECSNYVKHFLKTENFEVFKDAGRSGKNTHRPEYQRMIEKVKSGMISHVVVYKIDRISRNLVDFSIMYNDFKEHKVAFISLNEQFDTSSAIGEAVLKIILVFAELERKLTGERVRDIMMNRALEGKWNGARVPYGWDWDTKKQCPVHSDTEAEYARMMYRLYDESHSTCVVRDYCNAHDIPTKRGGEWTSKTVADFLRNPMNVGDYRYNYRKSARGKRNDPSEVIYVKDVFPPLIDRELYERVTHQMDLNTFGLGKDGRKVVSKKTHVFGGLIVCGLCGAFYHSDSDTPRADGFLPSQYRCGAHNKKIHCKAKGTSDVKLGPFIFNYISNLVKASKSKKLLHSVSDLEQILLAGPEFEQVAGIADIGLDVTFDTIMHGFKPERYTAAPYTVIRSGDSDALTAKRDKTIRALERLKKLFLFEDDAMSEKEYLMSKRELEGTLSDIENELSALEADTADTKYDDMSFISTASGFLIAHQIASGEHINYRELACAVDAKVLKDFANSVIERIVLLDGRVASIEFKNGLVHEFLYRE

SEQ ID NO: 1727 - protein, 559 aa, Unknown
  Description of Unknown: Integrase B1728 sequence
  cd00338,SM00857,IPR006118,G3DSA:1.10.10.2600,IPR036162, PS51737,G3DSA:3.40.50.1390,IPR006119,IPR038109,PF07508, IPR011109,SSF53041,PTHR30461,PS00397,PS51736, Coil,PF00239
MSKTVAIYVRVSTGKQADRDSIPFQIQECSNYVKHFLKTENYEIFKDAGRSGKNTHRPEYQRMIEKVKAGMISHVVVYKIDRISRNLVDFSIMYNDFKEHKVAFISLNEQFDTSSAIGEAVLKIILVFAELERKLTGERVRDIMMNRALEGKWNGARVPYGWDWDAKKQCPVHSDTEAEYARMMYRLYDESHSTCVVRDYCNAHDIPTKRGGEWTSKTVADFLRNPMNVGDYRYNYRKSARGKRNDPSEVIYVKDVFPPLIDRELYERVTHQMDLNTFGLGKDGRKVVSKKTHVFGGLVVCGLCGAFYHSDADVVRADGFRPSNYRCGAHNKKIHCKAKGTSDVKLGPFIFNYISNLVKASNSKKLLHSVSDLEQILLTGPEFEQVAGIADAGLDVTFDTIMHGFKPKRYTAAPYTVIRSGDSDALTAKRDKTIRALERLKKLFLFEDDAMSEKEYLMSKRELEGTLSDIENELSALETDATDTKYDDMSFISTASGFLIAHQIASGEHINYRELACAVDAKVLKDFANSVIERIVLLDGRVASIEFKNGLVHEFLYRE

SEQ ID NO: 1728 - protein, 559 aa, Unknown
  Description of Unknown: Integrase B1729 sequence
  IPR036162,PS51737,IPR011109,PTHR30461,PS00397, PF00239,G3DSA:1.10.10.2600,IPR006119,SSF53041,cd00338, SM00857,IPR025827,IPR038109,PS51736,IPR006118, PF13408,G3DSA:3.40.50.1390,PF07508,Coil
MSKTVAIYVRVSTGKQADRDSIPFQIQECSNYVKHFLKTENFEVFKDAGRSGKNTHRPEYQRMIEKVKSGMISHVVVYKIDRISRNLVDFSIMYNDFKEHKVAFISLNEQFDTSSAIGEAVLKIILVFAELERKLTGERVRDIMMNRALEGKWNGARVPYGWDWDSKKQCPVHSDTEAEYARMMYRLYDECHSTCVVRDYNNSHNIPTKRGGEWTSKTVADFLRNPMNVGDYRYNYRKSARGKRNDPSEVIYVKDVFPPLIDRELYERVTHQMDLNTFGLGKDGRKVVSKKTHVFGGLIVCGLCGAFYHSDSDTPRADGFLPSQYRCGAHNRKIHCKAKGTSDVKLGPFIFNYISNLVKASKSKKLLHSVSDLEQILLTGPEFEQVAGIADIGLDVTFDTIMHGFKPKRYTAAPYTVIRSGDSDALTAKRDKTIRALERLKKLFLFEDDAMSEKEYLMSKRELEGTLSDIENELSVLEADTADTKYDDMSFISTASGFLIAHQIASGEHINYRELACAVDAKVLKDFANSVIERIVLLDGRVASVEFKNGLVHEFLYRE

SEQ ID NO: 1729 - protein, 559 aa, Unknown
  Description of Unknown: Integrase B1730 sequence
  SM00857,IPR006118,G3DSA:1.10.10.2600,IPR036162,PS51737, G3DSA:3.40.50.1390,IPR006119,IPR038109,PF07508,SSF53041, IPR011109,PF00239,PTHR30461,PS00397,PS51736, Coil,cd00338
MSKTVAIYVRVSTGKQADRDSIPFQIQECSNYVKHFLKTENFEVFKDAGRSGKNTHRPEYQRMIEKVKSGMISHVVVYKIDRISRNLVDFSIMYNDFKEHKVAFISLNEQFDTSSAIGEAVLKIILVFAELERKLTGERVRDIMMNRALEGKWNGARVPYGWDWDTKKQCPVHSDTEAEYARMMYRLYDECHSTCVVRDYCNAHDIPTKRGGEWTSKTVADFLRNPMNVGDYRYNYRKSARGKRNDPSEVIYVKDVFPPLIDRELYERVTHQMDLNTFGLGKDGRKVVSKKTHVFGGLVVCGLCGAFYHSDADVVRADGFRPSNYRCGAHNRKIHCKAKGTSDVKLGPFIFNYISNLVKASKSKKLLHSVSDLEQILLTGPEFEQVAGIADAGLDVTFDTIMHGFKPKRYTAAPYTVIRSGDSDALTAKRDKTIRALERLKKLFLFEDDAMSEKEYLMSKRELEGTLSDIENELSALEADTADTKYDDMSFISTASGFLIAHQIASGEHINYRELACAVDAKVLKDFANSVIERIVLLDGRVASIEFKNGLVHEFLYRE

SEQ ID NO: 1730 - protein, 559 aa, Unknown
  Description of Unknown: Integrase B1731 sequence
  PTHR30461:SF3,SM00857,G3DSA:1.10.10.2600,IPR036162,PF13408, PS51737,G3DSA:3.40.50.1390,IPR025827,IPR006119,IPR038109, PF07508,SSF53041,IPR011109,PTHR30461,Coil, PS51736,cd00338,PF00239
MPQKFKIDLSMLTPEEQQQFRDDPTTLTKGEVDVALYLRFSSERQKEQSIEGQLRDCIAYCKRKSFRIVAIYVDRATTARKDVEKRVHFQEMISDSAHHLWNFVVVWKLDRFARNREDSAVFKMRLRKNGVRVKSATETISDNPEGIILESVLEGIAEYYSADLSQKITRGLRESAMKGHCVGGHVPLGYKIEDHRLVINPETAHIVQEAFQLYANGESVAEICRIFNGKGYRTAKNSEFNRSSFKSIFKNVRYIGTYIYKDIEKENAIPAIIDKDLFETVQRRLSLAADAPARGKAKVDYLLSGKLFCGHCGAAMHGESGTSKTGAIHNYYTCYSRKRRKGCNKKPLKKDFIERVVAQDAMALLTDDVIEELADMAMSQADRDLKENTRIPELSARLTEIEQGINNITKAVEKGIASDALLNRLTELEKEKKDLTSQLREEEKYIYRIDRDQVVFWLTKFQGGDIEDEDCRRRIIDLLVNSVTVWDEPDGYKITTAYNLTSCKTKTFRVSNNADSPSGGGFGFGELSSTKTTLDELKSSMVTSEWLSCVLCRTVILSS

SEQ ID NO: 1731 - protein, 559 aa, Unknown
  Description of Unknown: Integrase B1732 sequence
  PTHR30461:SF3,SM00857,G3DSA:1.10.10.2600,IPR036162,PF13408, PS51737,G3DSA:3.40.50.1390,IPR025827,IPR006119,IPR038109, PF07508,IPR011109,SSF53041,PTHR30461,Coil, cd00338,PF00239
MARTATKHPAKPKRGKKLEAEEPGVLYGRYSSHNQKDISVEQQFEKGYGLAGEYGIRIVETYADRAVSGRTDKRKDFQRMMADAAKGKFRYVIAWKSNRMGRNMLEALVNEAKLQELGVRVLYVEEDFDDTAAGRFAARSMMNVNQFYSENMAEDIKRGLYDNASNCMVANGHLPYGYKRDDTLHYVIDEAKAAVIREIFVRVSCGEPLVDIYDSLNARGIKTSYGRPWGRSSFQKILSNERYRGIYIYGDVRKEGGIPRIVSDELYFKVQEVLKTKKNPQGRHRVNGDYLLTGKLFCGNCKSPMIGISGTGRTGKLHYYYVCQKKRSEKTCDKKNVRRDEVEYQIAKAIFDNALQDQVIEWIADSTIAYNDRKEAEGHIGILEDQLADVQRSLKNIMSAIEQGIVTETTKSRLLELESERSEIEGKIAAAKADIVPVNREQLIEWLLSLREGDIHDKKYQARLFDTFLIAAYLYDDGTAKLVFSFAGDKNTVTVPLAEAVDSVEENTAEGSFKLCLAPPCEKPPLVGGFSHGETEWREKSCGFDRMQSAAFTRPLREM

SEQ ID NO: 1732 - protein, 559 aa, Unknown
  Description of Unknown: Integrase B1733 sequence
  SM00857,IPR006118,G3DSA:1.10.10.2600,IPR036162,PS51737, G3DSA:3.40.50.1390,Coil,IPR006119,IPR038109,PF07508, SSF53041,IPR011109,PTHR30461,PS00397,PS51736, cd00338,PF00239
MSKTVAIYVRVSTGKQADRDSIPFQIQECSNYVKHFLKTENFEVFKDAGRSGKNTHRPEYQRMIEKVKSGMISHVVVYKIDRISRNLVDFSIMYNDFKEHKVAFISLNEQFDTSSAIGEAVLKIILVFAELERKLTGERVRDIMMNRALEGKWNGARVPYGWDWDSKKQCPVHSDTEAEYARMMYRLYDESHSTCVVRDYCNAHDIPTKRGGEWTSKTVADFLRNPMNVGDYRYNYRKSARGKRNDPSEVIYVKDVFPPLIDRELYERVTHQMDLNTFGLGKDGRKVVSKKTHVFGGLVVCGLCGAFYHSDADVVRADGFRPSNYRCGAHNKKIHCKAKGTSDVKLGPFIFNYISNLVKASKSKKLLHSVSDLEQILLTGPEFEQVAGIADIGLDVTFDTIMHGFKPKRYTAAPYTVIRSGDSDALTAKRDKTIRALERLKKLFLFEDDAMSEKEYLMSKRELEGTLSDIENELSALETDAADTKYDDMSFISTASGFLIAHQIASGEHINYRELACAVDAKVLKDFANSVIERIVLLDGRVASIEFKNGLVHEFLYRE

SEQ ID NO: 1733 - protein, 559 aa, Unknown
  Description of Unknown: Integrase B1734 sequence
  SM00857,IPR006118,G3DSA:1.10.10.2600,IPR036162,PS51737, G3DSA:3.40.50.1390,IPR006119,IPR038109,PF07508,SSF53041, IPR011109,PF00239,PTHR30461,PS00397,PS51736, Coil,cd00338
MSKTVAIYVRVSTGKQADRDSIPFQIQECSNYVKHFLKTENFEVFKDAGRSGKNTHRPEYQRMIEKVKSGMISHVVVYKIDRISRNLVDFSIMYNDFKEHKVAFISLNEQFDTSSAIGEAVLKIILVFAELERKLTGERVRDIMMNRALEGKWNGARVPYGWDWDAKKQCPVHSDTEAEYARMMYRLYDECHSTCVVRDYCNAHDIPTKRGGEWTSKTVADFLRNPMNVGDYRYNYRKSARGKRNDPSEVIYVKDVFPPLIDRELYERVTHQMDLNTFGLGKDGRKVVSKKTHVFGGLVVCGLCGAFYHSDADVVRADGFRPSNYRCGAHNKKIHCKAKGTSDVKLGPFIFNYISNLVKASKSKKLLHSVSDLEQILLTGPEFEQVAGIADIGLDVTFDTIMHGFKPKRYTAAPYTVIRSGDSDALTAKRDKTIRALERLKKLFLFEDDAMSEKEYLMSKRELEGTLSDIENELSALETDATDTKYDDMSFISTASGFLIAHQIASGEHINYRELACAVDAKVLKDFANSVIERIVLLDGRVASIEFKNGLVHEFLYRE

SEQ ID NO: 1734 - protein, 559 aa, Unknown
  Description of Unknown: Integrase B1735 sequence
  SM00857,IPR006118,G3DSA:1.10.10.2600,IPR036162,PS51737, G3DSA:3.40.50.1390,IPR006119,IPR038109,PF07508,SSF53041, IPR011109,PF00239,PTHR30461,PS00397,PS51736, Coil,cd00338
MSKTVAIYVRVSTGKQADRDSIPFQIQECSNYVKHFLKTENFEVFKDAGRSGKNTHRPEYQRMIEKVKSGMISHVVVYKIDRISRNLVDFSIMYNDFKEHKVAFISLNEQFDTSSAIGEAVLKIILVFAELERKLTGERVRDIMMNRALEGKWNGARVPYGWDWDSKKQCPVHSDTEAEYARMMYRLYDESHSTCVVRDYCNAHDIPTKRGGEWTSKTVADFLRNPMNVGDYRYNYRKSARGKRNDPSEVIYVKDVFPPLIDRELYERVTHQMDLNTFGLGKDGRKVVSKKTHVFGGLVVCGLCGAFYHSDADVVRADGFRPSNYRCGAHNKKIHCKAKGTSDVKLGPFIFNYISNLVKASNSKKLLHSVSDLEQILLTGPEFEQVAGIADAGLDVTFDTIMHGFKPKRYTAAPYTVIRSGDSDALTAKRDKTIRALERLKKLFLFEDDAMSEKEYLMSKRELEGTLSDIENELSALETDATDTKYDDMSFISTASGFLIAHQIASGEHINYRELACAVDAKVLKDFANSVIERIVLLDGHVASIEFKNGLVHEFLYRE

SEQ ID NO: 1735 - protein, 559 aa, Unknown
  Description of Unknown: Integrase B1736 sequence
  PTHR30461:SF3,IPR036162,PS51737,IPR011109,PTHR30461, PF00239,G3DSA:1.10.10.2600,IPR006119,PF14287,SSF53041, IPR025378,SM00857,IPR025827,cd03770,IPR038109, PF13408,G3DSA:3.40.50.1390,PF07508,Coil
MASNKKYAVLYGRLSQEDTQKTNKTDDSNSIQNQKLLLEKYAAEKGFTNTLFLYDDGYSGTNFNRPGWQQVMELMENGQVETLIVKDMSRLGREYLQVGQYTELIFPSYGVRFIAVNDGVDSLYESTNDFTPFRNLMNEFYAKDCSKKGRSVVRLKAETGARVSSRPRYGYMKDPADPKRHMVPDPETAPVVRYIFDLCVSGKGPAQIAKQLKKDKIPTPGYSYYQKHGVELTGVDITQPYNWSTNTVAGILEDETYLGHTINLKSTTLSFKNKKRIERPESEQLRFENTHEALITQQTWEIVQDIRKHKRRRANMAEQNIFSGLVYCLDCGGTMVLHRAHTMDAVKNNFMCSTYKKKGKDVCSGHYIREQELSAILLDDIRRVTHFARQNELRFAEHIRKKQGKEAQQEIAMLQKKIDTMQKRQVELTKLFKRLYEDSVLGRIPEEQYRILSQEYTAEQKEIQEQLPAMEARLQDLKDSSSNIARFIENAKRYSEIPELTAEILRTFIKRVEVGERAEKYSRTAPQEVRIYYRDIGLVDELPQSMADSVAEAIQNEVA

SEQ ID NO: 1736 - protein, 559 aa, Unknown
  Description of Unknown: Integrase B1737 sequence
  cd00338,SM00857,IPR006118,G3DSA:1.10.10.2600,IPR036162, PS51737,G3DSA:3.40.50.1390,IPR006119,IPR038109,PF07508, SSF53041,IPR011109,PTHR30461,PS00397,PS51736, Coil,PF00239
MSKTVAIYVRVSTGKQADRDSIPFQIQECSNYVKHFLKTENYEIFKDAGRSGKNTHRPEYQRMIEKVKAGMISHVVVYKIDRISRNLVDFSIMYNDFKEHKVAFISLNEQFDTSSAIGEAVLKIILVFAELERKLTGERVRDIMMNRALEGKWNGARVPYGWDWDTKKQCPVHSDTEAEYARMMYRLYDESHSTCVVRDYCNAHDIPTKRGGEWTSKTVADFLRNPMNVGDYRYNYRKSARGKRNDPSEVIYVKDVFPPLIDRELYERVTHQMDLNTFGLGKDGRKVVSKKTHVFGGLVVCGLCGAFYHSDADVVRADGFRPSNYRCGAHNKKIHCKAKGTSDVKLGPFIFNYISNLVKASKSKKLLHSVSDLEQILLTGPEFEQVAGIADIGLDVTFDTIIHGFKPKRYTAAPYTVIRSGDSDALTAKRDKTIRALERLKKLFLFEDDAMSEKEYLMSKRELEGTLSDIENELSALEADTADTKYDDMSFISTASGFLIAHQIASGEHINYRELACAVDAKVLKDFVNSVIERIVLLDGRVASIEFKNGLVHEFLYRE

SEQ ID NO: 1737 - protein, 559 aa, Unknown
  Description of Unknown: Integrase B1738 sequence
  IPR036162,PS51737,IPR011109,PTHR30461,PS00397, PF00239,G3DSA:1.10.10.2600,IPR006119,SSF53041,cd00338, SM00857,IPR025827,IPR038109,PS51736,IPR006118, PF13408,G3DSA:3.40.50.1390,PF07508,Coil
MSKTVAIYVRVSTGKQADRDSIPFQIQECSNYVKHFLKTENYEVFKDAGRSGKNTHRPEYQRMIEKVKSGMVSHVVVYKIDRISRNLVDFSIMYNDFKEHKVAFISLNEQFDTSSAIGEAVLKIILVFAELERKLTGERVRDIMMNRALEGKWNGARVPYGWDWDSKKQCPVHSDTEAEYARMMYRLYDESHSTCVVRDYCNAHDIPTKRGGEWTSKTVADFLRNPMNVGDYRYNYRKSARGKRNDPSEVIYVKDVFPPLIDRELYERVTHQMDLNTFGLGKDGRKVVSKKTHVFGGLIVCGLCGAFYHSDSDTPRSDGFLPSQYRCGAHNRKIHCKAKGTSDVKLGPFIFNYISNLVKASKSKKLLHSVSDLEQILLTGPEFEQVAGIADIGLDVTFDTIMHGFKPKRYTAAPYTVIRSGDSDALTAKRDKTIRALERVKKLFLFEDDAMSEKEYLMSKRELEGTLSDIENELSALEADTADAKYDDMSFISTASGFLIAHQISSGEHINYRELACAVDAKVLKDFVNSVIERIVLLDGRVASIEFKNGLVHEFLYRE

SEQ ID NO: 1738 - protein, 559 aa, Unknown
  Description of Unknown: Integrase B1739 sequence
  cd00338,SM00857,IPR006118,G3DSA:1.10.10.2600,IPR036162, PS51737,G3DSA:3.40.50.1390,IPR006119,IPR038109,PF07508, SSF53041,IPR011109,PTHR30461,PS00397,PS51736, Coil,PF00239
MSKTVAIYVRVSTGKQADRDSIPFQIQECSNYVKHFLKTENFEVFKDAGRSGKNTHRPEYQRMIEKVKSGMISHVVVYKIDRISRNLVDFSIMYNDFKEHKVAFISLNEQFDTSSAIGEAVLKIILVFAELERKLTGERVRDIMMNRALEGKWNGARVPYGWDWDTKKQCPVHSDTEAEYARMMYRLYDESHSTCVVRDYCNAHDIPTKRGGEWTSKTVADFLRNPMNVGDYRYNYRKSARGKRNDPSEVIYVKDVFPPLIDRELYERVTHQMDLNTFGLGKDGRKVVSKKTHVFGGLIVCGLCGAFYHSDADVVRADGFRPSNYRCGAHNKKIHCKAKGTSDVKLGPFIFNYISNLVKASKSKKLLHSVSDLEQILLTGPEFEQVAGIADIGLDVTFDTIMHGFKPKRYTAAPYTVIRSGDSDALTAKRDKTIRALERLKKLFLFEDDAMSEKEYLMSKRELEGTLSDIENELSALEADTADTKYDDMSFISTASGFLIAHQIASGEHINYRELACAVDAKVLKDFVNSVIERIVLLDGRVASIEFKNGLVHEFLYRE

SEQ ID NO: 1739 - protein, 559 aa, Unknown
  Description of Unknown: Integrase B1740 sequence
  cd00338,SM00857,IPR006118,G3DSA:1.10.10.2600,IPR036162, PS51737,G3DSA:3.40.50.1390,IPR006119,IPR038109,PF07508, IPR011109,SSF53041,PTHR30461,PS00397,PS51736, Coil,PF00239
MSKIVAIYVRVSTGKQADRDSIPFQIQECSNYVKHFLKTENFEVFKDAGRSGKNTQRPEYQRMIEKVKSGMVSHVVVYKIDRISRNLVDFSIMYNDFKEHKVAFISLNEQFDTSSAIGEAVLKIILVFAELERKLTGERVHDIMMNRALEGKWNGARVPYGWDWDAKKQCPVHSDAEAEYARMMYRLYDECHSTCVVRDYCNAHDIPTKRGGEWTSKTVADFLRNPMNVGDYRYNYRKSARGKRNDPSEVIYVKDVFPPLIDRELYERVTHQMDLNTFGLGKDGRKVVSKKTHVFGGLIVCGLCGAFYHSDADVVRADGFRPSNYRCGAHNKKIHCKAKGTSDVKLGPFIFNYISNLVKASKSKKLLHSVSDLEQILLTGPEFEQVAGIADIGLDVTFDTIMHGFKPKRYTAAPYTVIRSGDSDALTAKRDKTIRALERLKKLFLFEDDAMSEKEYLMSKRELEGTLSDIENELSALEADTADTKYDDMSFISTASGFLIAHQIASGEHINYRELACAVDAKVLKDFANSVIERIVLLDGRVASIEFKNGLVHEFLYRE

SEQ ID NO: 1740 - protein, 559 aa, Unknown
  Description of Unknown: Integrase B1741 sequence
  SM00857,IPR006118,G3DSA:1.10.10.2600,IPR036162,PS51737, G3DSA:3.40.50.1390,IPR006119,IPR038109,PF07508,SSF53041, IPR011109,PF00239,PTHR30461,PS00397,PS51736, Coil,cd00338
MSKTVAIYVRVSTGKQADRDSIPFQIQECSNYVKHFLKTENFEVFKDAGRSGKNTHRPEYQRMIEKVKSGMISHVVVYKIDRISRNLVDFSIMYNDFKEHKVAFISLNEQFDTSSAIGEAVLKIILVFAELERKLTGERVRDIMMNRALEGKWNGARVPYGWDWDTKKQCPVHSDTEAEYARMMYRLYDESHSTCVVRDYCNAHDIPTKRGGEWTSKTVADFLRNPMNVGDYRYNYRKSARGKRNDPSEVIYVKDVFPPLIDRELYERVTHQMDLNTFGLGKDGRKVVSKKTHVFGGLVVCGLCGAFYHSDADVVRADGFRPSNYRCGAHNKKIHCKAKGTSDVKLGPFIFNYISNLVKASKSKKLLHSVSDLEQILLTGPEFEQVAGIADIGLDVTFDTIMHGFKPKRYTAAPYTVIRSGDSDALTAKRDKTIRALERLKKLFLFEDDAMSEKEYLMSKRELEGTLSDIENELSALETDATDTKYDDMSFISTASGFLIAHQIASGEHINYRELACAVDAKVLKDFANSVIERIVLLDGRVASIEFKNGLVHEFLYRE

SEQ ID NO: 1741 - protein, 559 aa, Unknown
  Description of Unknown: Integrase B1742 sequence
  PTHR30461:SF3,cd00338,SM00857,G3DSA:1.10.10.2600,IPR036162, PF13408,PS51737,IPR025827,G3DSA:3.40.50.1390,IPR006119, IPR038109,PF07508,IPR011109,SSF53041,PTHR30461, PS51736,Coil,PF00239
MARKKNIAAGQNAVIYARYSSHNQREVSIEQQVRECMKHAAELGLHVVGTYEDRAISGKTDKRPNFQRMMRDAEKGKFQAVVAWKSNRIGRNMLQAMVNEAKLEDCGVKVFYAEEDFDDTAAGRFALRNMMNVNQFYSENMAEDITRGLYDNASKCMANGRQPLGYKRGEDGRVVLDEANAAVVREIFTRVAAGDLFVDIARDLNAQGIKTSKGANWNKGSFQSICQNERYRGIYIYGDVRVADGIPRIVSDDLWYRVQEAMRMKKNPVGTRHRVGAEDYLLTGKLRCGHCGSYMTGVSGTSRNGELHYYYTCQKRRTEHACDKKNIRRDVIEPAVAQAIKMYCLTDDVIAWIADRTVEYWEKHDNDLQIEALEQQLEENKKATSNMLKAIEMGIITEATRTRMVELETEQSRLSVQLNVAKEDVVKIDREQIISYLELLQQGDIHDRDFQMELFKNFLVAVYVYDDNRMKLVFSCMGDQNSVEIPLETGEDPPDGGLSPDAKMFVLTPDSSTKKALYFVGSMVLFFLLKPIFGGCIHPTALSTGTKMNMVFGFFHKLP

SEQ ID NO: 1742 - protein, 559 aa, Unknown
  Description of Unknown: Integrase B1743 sequence
  SM00857,IPR006118,G3DSA:1.10.10.2600,IPR036162,PS51737, G3DSA:3.40.50.1390,IPR006119,IPR038109,PF07508,SSF53041, IPR011109,PF00239,PTHR30461,PS00397,PS51736, Coil,cd00338
MSKTVAIYVRVSTGKQADRDSIPFQIQECSNYVKHFLKTENFEVFKDAGRSGKNTHRPEYQRMIEKVKSGMISHVVVYKIDRISRNLVDFSIMYNDFKEHKVAFISLNEQFDTSSAIGEAVLKIILVFAELERKLTGERVRDIMMNRALEGKWNGARVPYGWDWDTKKQCPVHSDTEAEYARMMYRLYDESHSTCVVRDYCNAHDIPTKRGGEWTSKTVADFLRNPMNVGDYRYNYRKSARGKRNDPSEVIYVKDVFPPLIDRELYERVTHQMDLNTFGLGKDGRKVVSKKTHVFGGLVVCGLCGAFYHSDADVVRADGFRPSNYRCGAHNKKIHCKAKGTSDVKLGPFIFNYISNLVKASKSKKLLHSVSDLEQILLTGPEFEQVAGIADIGLDVTFDTIMHGFKPKRYTAAPYTVIRSGDSDALTAKRDKTIRALERLKKLFLFEDDAMSEKEYLISKRELEGTLSDIENELSALEADTADTKYDDMSFISTASGFLIAHQIASGEHINYRELACAVDAKVLKDFVNSVIERIVLLDGRVASIEFKNGLVHEFLYRE

SEQ ID NO: 1743 - protein, 559 aa, Unknown
  Description of Unknown: Integrase B1744 sequence
  SM00857,G3DSA:1.10.10.2600,IPR036162,PF13408,PS51737, IPR025827,G3DSA:3.40.50.1390,IPR006119,IPR038109,PF07508, SSF53041,IPR011109,PTHR30461,Coil,cd00338, PF00239
MAYRKITDIRDTIGMRAVFYARVSTAEEEQLNAIELQIEENRGCIKDHGWKLVGEYIDRSKSGTMVKGRDDYQRLYEDLYEDLFDIVVIKDQERLQRNTLDWYLFINRVVQTGKLLFMYMDGKFYSPDDALITGVRAIIAEEFSRNLSKKLHNYHDHRIEKARQGQEIALQGSGNVYGWDKKDGKYYINPEQARVRRLMCEGIMARKGSTLIAKELNDAGYRNTVGKPWKPMDIPKFVYDCKNVGTMIINKERHDFESKQTIKLPKEEWVYVENALPPIVTQEEWDLICKIHEERVIATGSDRRGKKTSGYSFSGKLVCGICGAPYWRKQRVSKDEYWVCSTKQTKGRRTRKRDSTMGKAGEINPLGCDNENISYNSLMEIMGVVSERLQANTDTIKQDMINWLTKLRKQLLEANGGHTEADLQRELSRKSKLLDAYLDGILNKQEYQKKAEELDERIIQLKTETEKNKANSGDIAEIDKVLANIDEEVARYVDGNEKLKVEYLLEHLEQVQIFPDKVIVIVPILSEGIVVEKTQYVSREKWSGKDNNASHVSNVDQTG

SEQ ID NO: 1744 - protein, 559 aa, Unknown
  Description of Unknown: Integrase B1745 sequence
  PTHR30461:SF3,SM00857,G3DSA:1.10.10.2600,IPR036162,PF13408, IPR025827,G3DSA:3.40.50.1390,PS51737,IPR006119,IPR038109, PF07508,SSF53041,IPR011109,PTHR30461,Coil, PS51736,cd00338,PF00239
MNKKIKCDTYTRVSTTMQVDGYSLDAQKEKLKRYAEFQNMEIVNEYSDEGKSGKSVEGRPEFQRMLDNIENGTDEVQFVLVFKLSRFGRNAADVLNSLQRMQDFGVNLICVEDGIDSSKDSGKLMISVLSAVAEIERENILVQTMEGRKQKAREGKWNGGFAPYGYELVNGELQIAEDEAEIIRLIYNKFIHTNMGISAIAAWLNQHGYKKKKRQNNTLDAFAASFIKGVLDNPVYCGKLAYGRRKNEKVSGTRNEYRIVKQENYMLHDGIHEGIISETDWELAHQKREKTGVKYEKTHSLDHEHILSGILRCPLCGSGMYGNVNRKKKKDGTLYKDYFYYACKHRRLVDGHKCGYRKQWSEEKINNAVEEVIRKLVKNPKFEEAILNKIGSRIDTEEIEKEIERLEKQYRQLTGAKARLGQQMDSLDIMDKFYEKKYQDMETRLYRLYDEIEGVENRIEEVKNRLLNIRQQKISEENVYQFLLYFDKLYDKFTDLEKKEFLNSFVEQVDIYEQEQPDGRFLKHIKFRFPVYFGDRETQELCWDNESTVETVCLLSKKP

SEQ ID NO: 1745 - protein, 559 aa, Unknown
  Description of Unknown: Integrase B1746 sequence
  cd00338,SM00857,IPR006118,G3DSA:1.10.10.2600,IPR036162, PS51737,G3DSA:3.40.50.1390,IPR006119,IPR038109,PF07508, SSF53041,IPR011109,PTHR30461,PS00397,PS51736, Coil,PF00239
MSKTVAIYVRVSTGKQADRDSIPFQIQECSNYVKHFLKTENFEVFKDAGRSGKNTHRPEYQRMIEKVKSGMISHVVVYKIDRISRNLVDFSIMYNDFKEHKVAFISLNEQFDTSSAIGEAVLKIILVFAELERKLTGERVRDIMMNRALEGKWNGARVPYGWDWDTKKQCPVHSDTEAEYARMMYRLYDESHSTCVVRDYCNAHDIPTKRGGEWTSKTVADFLRNPMNVGDYRYNYRKSARGKRNDPSEVIYVKDVFPPLIDRELYERVTHQMDLNTFGLGKDGRKVVSKKTHVFGGLVVCGLCGAFYHSDADVVRADGFRPSNYRCGAHNKKIHCKAKGTSDVKLGPFIFNYISNLVKASKSKKLLHSVSDLEQILLTGPEFEQVAGIADIGLDVTFDTIMHGFKPKRYTAAPYTVIRSGDSDALTAKRDKTIRALERLKKLFLFEDDAMSEKEYLMSKRELEGTLSDIENELSALEADTADTKYDDMSFISTASGFLIAHQIASGEHINYRELACAVDAKVLKDFVNSVIERIVLLDGRVASIEFKNGLVHEFLYRE

SEQ ID NO: 1746 - protein, 559 aa, Unknown
  Description of Unknown: Integrase B1747 sequence
  IPR036162,PS51737,IPR011109,PTHR30461,PS00397, PF00239,G3DSA:1.10.10.2600,IPR006119,SSF53041,cd00338, SM00857,IPR025827,IPR038109,PS51736,IPR006118, PF13408,G3DSA:3.40.50.1390,PF07508,Coil
MSKTVAIYVRVSTGKQADRDSIPFQIQECSNYVKHFLKTENFEVFKDAGRSGKNTHRPEYQRMIEKVKSGMISHVVVYKIDRISRNLVDFSIMYNDFKEHKVAFISLNEQFDTSSAIGEAVLKIILVFAELERKLTGERVRDIMMNRALEGKWNGARVPYGWDWDSKKQCPVHSDTEAEYARMMYRLYDECHSTCVVRDYNNSHNIPTKRGGEWTSKTVADFLRNPMNVGDYRYNYRKSARGKRNDPSEVIYVKDVFPPLIDRELYERVTHQMDLNTFGLGKDGRKVVSKKTHVFGGLIVCGLCGAFYHSDSDTPRADGFLPSQYRCGAHNRKIHCKAKGTSDVKLGPFIFNYISNLVKASKSKKLLHSVSDLEQILLTGPEFEQVAGIADIGLDVTFDTIMHGFKPKRYTAAPYTVIRSGDSDALTAKRDKTIRALERLKKLFLFEDDAMSEKEYLMSKRELEGTLSDIENELSVLEADTADTKYDDMSFISTASGFLIAHQIASGEHINYRELACAVDAKVLKDFANSVIERIVLLDGRVASIEFKNGLVHEFLYRE

SEQ ID NO: 1747 - protein, 559 aa, Unknown
  Description of Unknown: Integrase B1748 sequence
  IPR036162,PS51737,IPR011109,PTHR30461,PS00397, PF00239,G3DSA:1.10.10.2600,IPR006119,SSF53041,cd00338, SM00857,IPR025827,IPR038109,PS51736,IPR006118, PF13408,G3DSA:3.40.50.1390,PF07508,Coil
MSKTVAIYVRVSTGKQADRDSIPFQIQECSNYVKHFLKTENFEVFKDAGRSGKNTHRPEYQRMIEKVKAGMISHVVVYKIDRISRNLVDFSIMYNDFKEHKVAFISLNEQFDTSSAIGEAVLKIILVFAELERKLTGERVRDIMMNRALEGKWNGARVPYGWDWDTKKQCPVHSDTEAEYARMMYRLYDESHSTCVVRDYCNAHDIPTKRGGEWTSKTVADFLRNPMNVGDYRYNYRKSARGKRNDPSEVIYVKDVFPPLIDRELYERVTHQMDLNTFGLGKDGRKVVSKKTHVFGGLIVCGLCGAFYHSDSDTPRADGFLPSQYRCGAHNRKIHCKAKGTSDVKLGPFIFNYISNLVKASKSKKLLHSVSDLEQILLTGPEFEQVAGIADAGLDVTFDTIMHGFKPKRYTAAPYTVIRSGDSDALTAKRDKTIRALERLKKLFLFEDDAMSEKEYLMSKRELEGTLSDIENELSALEADTADTKYDDMSFISTASGFLIAHQIASGEHINYRELACAVDAKVLKDFANSVIERIVLLDGRVASIEFKNGLVHEFLYRE

SEQ ID NO: 1748 - protein, 559 aa, Unknown
  Description of Unknown: Integrase B1749 sequence
  PTHR30461:SF3,SM00857,G3DSA:1.10.10.2600,IPR036162,PF13408, IPR025827,G3DSA:3.40.50.1390,PS51737,IPR006119,IPR038109, PF07508,IPR011109,SSF53041,PTHR30461,PS51736, cd00338,PF00239
MLRAVIYARFSSDMQREESIDAQVRACKAYCQRKGYAVVGVYSDEAKSGRSTVNRDGYNRMLADAVQGNFDVIIFHKIDRNSRNELNYYKFKDQLARLGVSYEYASQSIDCTPEGQMMESVLVGMAAYYSRNLAKEVRKGQNENAYKAISNGGIAPFGLKLVDQRYVIDEREADGVRMIFAMYLDGHGYGTIAKALADAGYTTRTGKPFAKNSMHDILANEKYAGVYVFGKASNDGVKRNTHAANTDVIRVEDAIPAIISKADFAAVKARMERNKRAPGHYNQCVHYLLAGRIFCGECGAAMVGHRCLGKKRKDGTRKEYLYYLCGNRQRNSVAPCSAKMVDKAAVENAVLEMIQAKVLAPTIRADLAAGIAEQYRAAASSSADELTALRQAKTGAERRMSHLYDLVEEGIADQFDLERLKAVKCELLEINKKLATQSKNSRLPALSEEQISAVLDNFYEKLEQDDKLSQQRLIDLFLHRVTVYVDHIHIELTIKSVYDWLVEMRGVEPLSENIAIQLSPSADVILCFALRLPDDGPSHCYPTEFPLKPIGISLKVSHY

SEQ ID NO: 1749 - protein, 559 aa, Unknown
  Description of Unknown: Integrase B1750 sequence
  SM00857,IPR006118,G3DSA:1.10.10.2600,IPR036162,PS51737, G3DSA:3.40.50.1390,IPR006119,IPR038109,PF07508,SSF53041, IPR011109,PF00239,PTHR30461,PS00397,PS51736, Coil,cd00338
MSKTVAIYVRVSTGKQADRDSIPFQIQECSNYVKHFLKTENFEVFKDAGRSGKNTHRPEYQRMIEKVKSGMISHVVVYKIDRISRNLVDFSIMYNDFKEHKVAFISLNEQFDTSSAIGEAVLKIILVFAELERKLTGERVRDIMMNRALEGKWNGARVPYGWDWDTKKQCPVHSDTEAEYARMMYRLYDECHSTCVVRDYCNAHDIPTKRGGEWTSKTVADFLRNPMNVGDYRYNYRKSARGKRNDPSEVIYVKDVFPPLIDRELYERVTHQMDLNTFGLGKDGRKVVSKKTHVFGGLVVCGLCGAFYHSDADMVRADGFRPSNYRCGAHNKKIHCKAKGTSDVKLGPFIFNYISNLVKASKSKKLLHSVSDLEQILLTGPEFEQVAGIADIGLDVTFDTIMHGFKPKRYTAAPYTVIRSGDSDALTAKRDKTIRALERLKKLFLFEDDAMSEKEYLMSKRELEGTLSDIENELSALETDATDTKYDDMSFISTASGFLIAHQIASGEHINYRELACAVDAKVLKDFANSVIERIVLLDGRVASIEFKNGLVHEFLYRE

SEQ ID NO: 1750 - protein, 559 aa, Unknown
  Description of Unknown: Integrase B1751 sequence
  IPR036162,PS51737,IPR011109,PTHR30461,PS00397, PF00239,G3DSA:1.10.10.2600,IPR006119,SSF53041,cd00338, SM00857,IPR025827,IPR038109,PS51736,IPR006118, PF13408,G3DSA:3.40.50.1390,PF07508,Coil
MSKIVAIYVRVSTGKQADRDSIPFQIQECSNYVKHFLKTENFEVFKDAGRSGKNTQRPEYQRMIEKVKSGMVSHVVVYKIDRISRNLVDFSIMYNDFKEHKVAFISLNEQFDTSSAIGEAVLKIILVFAELERKLTGERVHDIMMNRALEGKWNGARVPYGWDWDTKNRCPVHSETEAEYARMMYRLYDESHSTCVVRDYCNAHDIPTKRGGEWTSKTVADLLRNPMNVGDYRYNYRKSARGKRNDPSEVIYVKDVFPPLIDREIYERVTHQMDLNTLGLGKDGRKVVSKKTHVFGGLIVCGLCGAFYHSDSDTPRADGFLPTKYRCGAHNRKIHCKAKGISDVMLGPFIFNYISNLVKASKSRKLLHSVSDLEQILLTGPEFEQVAGIADVGLDVTFDTIMHGFRPKRYTAAPYTVIRSGDSDALNAKRDKTIRALERLKKLFLFEDDAMSEKEYLMSKRELEGTLSDIENELSALEADTADTKYDDMSFISTASGFLIAHQIASGEHINYRELACAVDAKVLKDFANSVIERIVLLDGRVASIEFKNGLVHEFLYRE

SEQ ID NO: 1751 - protein, 559 aa, Unknown
  Description of Unknown: Integrase B1752 sequence
  PTHR30461:SF3,cd00338,SM00857,G3DSA:1.10.10.2600,IPR036162, PF13408,IPR025827,PS51737,G3DSA:3.40.50.1390,IPR006119, IPR038109,PF07508,IPR011109,SSF53041,PTHR30461, PS51736,Coil,PF00239
MSQGKTKVYIYTRVSTTMQIDGYSLDAQKARMKAYADFNDYQIVGEYEDAGKSGKSIEGRASFCRMMEDIKSGKDGVSYVLVFKLSRFGRNAADVLSTLQVMQDFGVNLICVEDGIDSSKDAGKLMISVLSAVAEIERENIRVQTMEGRIQKAQEGRWNGGFAPYGYRLVDGELQINEDEAPAIQTIFEQYVNTDTGANGLSKYLAAHGFQKLARQNGTSPLFSATLIRSILRNPVYCGKIAFGRRKLEKVHGTRNEYRQVPQDNYLLVDGLHEGIVSEELWNAAQVKLLAQSKRYEPVTRNKTEQAHLLSALVKCPVCGAGMYSNKCTKHKKDGTAYKSFSYYSCKHRKMQRGQKCDFTKQIQEEVLDSAVVEVIIKLVSNPKFAVLMQSKINSKVDTTAIEQEITAAEKQLRQYYSVKSKLMDEIDTLDPDDRHYIMRKSDLDERLYKMYDKIEGTENQLVTARAKKQAIEADKITGDNIYKILLCFEKLYNVMNPVERKKLMEHLISEVHIYPERQPNGQWLKSIKFRLPIIENGADLCLDNGSHVECITAFARMK

SEQ ID NO: 1752 - protein, 559 aa, Unknown
  Description of Unknown: Integrase B1753 sequence
  PTHR30461:SF3,cd00338,SM00857,IPR036162,PF13408, IPR025827,G3DSA:3.40.50.1390,IPR006119,PF07508,IPR011109, SSF53041,PTHR30461,PS51736,Coil,PF00239
MKTKLYSYIRFSSMRQNDGSSYERQIRMAREIAVKYDLELVNDYQDLGVSAFKGANSKTGALSRFLDAIGRSVPVGSWLFIENLDRLSRADIVSAQELFLSIIRRGITIVTGMDNKIYSLDTVTANPMDLMFSILLFIRGNEESQTKRNRTNSSALIKIKAHQENPQNPAVAIEEIGKNMWWTDTTSGYVLPHPVFFPIVQEVVELRRNGRSTAEILDHLNATYTPPPAASHKRHSNWSRAMIERLFHTRALIGIKEISVDGVKYELKDYYPRVLDDAEFYHLKKSIGVRACNFGDKEEVKPIPLLSGVGLLKCEHCGSAMVKVKGTNRRPNQYRYSCDAMRSSRIECVHTNWSFRGDQLEKAVLQLLADKIWIAEDKANPVPALKVQIDEISRKIDNLITLSAMTGATKELADQITTLNSERETLYNQIKMAEEEMYSVDSQGWEKLAEFDLEDVYNEDRIKVRFKIKQALKRIGCSRIDKYKNLFVLEYIDGKTQRVVIENSRGPRKGRIFIDLKTINDRQILESNGLVLHPCLDMLTDKNWKPEEEIPGPLQEFGI

SEQ ID NO: 1753 - protein, 559 aa, Unknown
  Description of Unknown: Integrase B1754 sequence
  cd00338,SM00857,IPR006118,G3DSA:1.10.10.2600, IPR036162,PS51737,G3DSA:3.40.50.1390,IPR006119, IPR038109,PF07508,IPR011109,SSF53041, PTHR30461,PS00397,PS51736,Coil,PF00239
MSKTVAIYVRVSTGKQADRDSIPFQIQECSNYVKHFLKTENFEVFKDAGRSGKNTHRPEYQRMIEKVKSGMISHVVVYKIDRISRNLVDFSIMYNDFKEHKVAFISLNEQFDTSSAIGEAVLKIILVFAELERKLTGERVRDIMMNRALEGKWNGARVPYGLDWDTKKQCPVHSDTEAEYARMMYRLYDESHSTCVVRDYCNAHDIPTKRGGEWTSKTVADFLRNPMNVGDYRYNYRKSARGKRNDPSEVIYVKDVFPPLIDRELYERVTHQMDLNTFGLGKDGRKVVSKKTHVFGGLVVCGLCGAFYHSDADVVRADGFRPSNYRCGAHNKKIHCKAKGTSDVKLGPFIFNYISNLVKASKSKKLLHSVSDLEQILLTGPEFEQVAGIADIGLDVTFDTIMHGFKPKRYTAAPYTVIRSGDSDALTAKRDKTIRALERLKKLFLFEDDAMSEKEYLMSKRELEGTLSDIENELSALEADTADTKYDDMSFISTASGFLIAHQIASGEHINYRELACAVDAKVLKDFVNSVIERIVLLDGRVASIEFKNRLVHEFLYRE

SEQ ID NO: 1754 - protein, 559 aa, Unknown
  Description of Unknown: Integrase B1755 sequence
  PTHR30461:SF3,SM00857,G3DSA:1.10.10.2600,PS51736,PF13408, PS51737,IPR025827,IPR036162,G3DSA:3.40.50.1390,IPR006119, IPR038109,PF07508,IPR011109,SSF53041,PTHR30461, mobidb-lite,cd00338,PF00239
MRTIRKIERRIPNLKQRKKVAAYARVSMESERMHHSLSAQVSYYSSLIQKNPDWEYAGVYADYGISGTGMKKRQEFLRMLEDAEAGKIDSILTKSIQRFARNTVDLLRTVRHLKELGIEVWFEKENIHTMSGDGELMMTILASFAQEESRSISENIRWRIKKQFEQGNPNGRFRVYGYRWEGDNLVVVPEEAAVVRRIFQNFLDGKSRLETEREFAAEGITTRNGCRWMDSNIRVVLTNVTYTGNMLFQKEYVTDPILKKRKKNRGELPRYYVENTHEPIIDKETFDYVQQEMARRKELGALANKSLNTTCFTGKIKCGICGRSYMHNRRTDRGFEEFWDCGSHKLKGRNCGAKGSIPHAVLVKESTEVLGLDDFDEQAFLDRVEKIVVPEYHVMVFCMKNGQKLIRHWVSTAKKDCWTDEYKDRQRAWMKNYMANGKGTRFSVFTTRIRCALCGSSFRRCKTKHDRPVYWRCSKGGKCESVSIREDDLKRVAAETMGLEDFDEDRFRGKVESIEAGKPDCLTVHFKSGRTEEISYTPTPSKRRPKARRKESGEKWQRQ

SEQ ID NO: 1755 - protein, 559 aa, Unknown
  Description of Unknown: Integrase B1756 sequence
  IPR036162,PS51737,IPR011109,PTHR30461,PS00397, PF00239,G3DSA:1.10.10.2600,IPR006119,SSF53041,cd00338, SM00857,IPR025827,IPR038109,PS51736,IPR006118, PF13408,G3DSA:3.40.50.1390,PF07508,Coil
MSKTVAIYVRVSTGKQADRDSIPFQIQECSNYVKHFLKTENFEVFKDAGRSGKNTHRPEYQRMIEKVKSGMISHVVVYKIDRISRNLVDFSIMYNDFKEHKVAFISLNEQFDTSSAIGEAVLKIILVFAELERKLTGERVRDIMMNRALEGKWNGARVPYGWDWDTKKQCPVHSDTEAEYARMMYRLYDESHSTCVVRDYCNAHDIPTKRGGEWTSKTVADFLRNPMNVGDYRYNYRKSARGKRNDPSEVIYVKDVFPPLIDRELYERVTHQMDLNTFGLGKDGRKVVSKKTHVFGGLIVCGLCGAHYHSDSDTPRADGFLPSQYRCGAHNRKIHCKAKGTSDVKLGPFIFNYISNLVKASKSKKLLHSVSDLEQILLTGPEFEQVAGIADIGLDVTFDTIMHGFKPKRYTAAPYTVIRSGDSDALTAKRDKTIRALERLKKLFLFEDDAMSEKEYLMSKRELEGTLSDIENELSALEADTADTKYDDMSFISTASGFLIAHQIASGEHINYRELACAVDAKVLKDFANSVIERIVLLDGRVASIEFKNGLVHEFLYRE

SEQ ID NO: 1756 - protein, 559 aa, Unknown
  Description of Unknown: Integrase B1757 sequence
  PTHR30461:SF3,cd00338,SM00857,IPR036162,PF13408, IPR025827,G3DSA:3.40.50.1390,IPR006119,PF07508,IPR011109, SSF53041,PTHR30461,PS51736,Coil,PF00239
MKTKLYSYIRFSSMRQNDGSSYERQIRMAREIAVKYDLELVNDYQDLGVSAFKGANSKTGALSRFLDAIGRSVPVGSWLFIENLDRLSRADIVSAQELFLSIIRRGITIVTGMDNKIYSLDTVTANPMDLMFSILLFIRGNEESQTKRNRTNSSALIKIKAHQENPQNPAVAIEEVGKNMWWTDTTSGYVCPDPVFFPIVQEVVELRRNGRSTAEILDHLNATYTPPPAASHKRHSNWSRAMIERLFHTRALIGIKEISVDGVKYELKDYYPRVLDDAEFYHLKKSIGVRACNYGDKEEAKPIPLLSGVNLLKCEHCGSAMVKVKGTNRRPNQYRYSCDAMRSSRIECVHTNWSFRGDQLEKAVLQLLADKIWIAEDKANPVPALKVQIDEISRKIDNLITLSAMTGATKELADQITTLNSERETLYNQLKMAEEEMYSVDSQGWEKLAEFDLEDVYNEDRIKVRFKIKQALKRIGCSRIDKYKNLFVLEYIDGKTQRVVIENSRGPRKGRIFVDLKTINDRQILESNGLVLHPCLDMLTDKNWKPEEEIPGPLQEFGI

SEQ ID NO: 1757 - protein, 559 aa, Unknown
  Description of Unknown: Integrase B1758 sequence
  SM00857,IPR006118,G3DSA:1.10.10.2600,IPR036162, PS51737,G3DSA:3.40.50.1390,Coil,IPR006119, IPR038109,PF07508,SSF53041,IPR011109, PTHR30461,PS00397,PS51736,cd00338,PF00239
MSKTVAIYVRVSTGKQADRDSIPFQIQECSNYVKHFLKTENFEVFKDAGRSGKNTHRPEYQRMIEKVKAGMISHVVVYKIDRISRNLVDFSIMYNDFKEHKVAFISLNEQFDTSSAIGEAVLKIILVFAELERKLTGERVRDIMMNRALEGKWNGARVPYGWDWDTKKQCPVHSDTEAEYARMMYRLYDECHSTCVVRDYCNAHDIPTKRGGEWTSKTVADFLRNPMNVGDYRYNYRKSARGKRNDPSEVIYVKDVFPPLIDRELYERVTHQMDLNTFGLGKDGRKVVSKKTHVFGGLVVCGLCGAFYHSDADVVRADGFRPSNYRCGAHNKKIHCKAKGTSDVKLGPFIFNYISNLVKASKSKKLLHSVSDLEQILLTGPEFEQVAGIADIGLDVTFDTIMHGFKPKRYTAAPYTVIRSGDSDALTAKRDKTIRALERLKKLFLFEDDAMSEKEYLMSKRELEGTLSDIENELSALETDATDTKYDDMSFISTASGFLIAHQIASGEHINYRELACAVDAKVLKDFANSVIERIVLLDGRVASIEFKNGLVHEFLYRE

SEQ ID NO: 1758 - protein, 559 aa, Unknown
  Description of Unknown: Integrase B1759 sequence
  PTHR30461:SF3,SM00857,G3DSA:1.10.10.2600,IPR036162,PF13408, IPR025827,PS51737,G3DSA:3.40.50.1390,IPR006119,IPR038109, PF07508,IPR011109,SSF53041,PTHR30461,Coil, PS51736,cd00338,PF00239
MHIDLSMLTPEEQQQFRDDPTTLTKGEVDVALYLRFSSERQKEQSIEGQLRDCIAYCKRKSFRIVAIYVDRATTARKDVEKRVHFQEMISDSAHHLWNFVVVWKLDRFARNREDSAVFKMRLRKNGVRVKSATETISDNPEGIILESVLEGIAEYYSADLSQKITRGLRESAMKGHSVGGHVPLGYKIEDHRLVINPATAHIVQEAFQLYANGESMAEICRIFNSKGYRTAKNSEFNRSSFKSMFKNVRYIGTYIYKDIKKENAIPAIIDKDLFETVQRRLSLAADAPARGKAKVDYLLSGKLFCGHCGATMNGESGTSKTGAIHNYYTCYSRKRRKGCDKKPLKKDFIERIVAQDAMALLTNDVIEELADMAMSQADRDLKENTCIPELSARLTEVEQGINNITKAIEKGIASDALLNRLTELEKEKKDLTSQLREEEKYICRIDRDQIIFWLTKFQGGDIEDEDCRRRIIDLLVNSVTVWDEPDGYKITTAYNLTSCKTKTFRVSNNADSPSGGEFGFGELSSTKSKIRTFVRRDRGSDFSCLQLVLSRNEFKMEDA

SEQ ID NO: 1759 - protein, 558 aa, Unknown
  Description of Unknown: Integrase B1760 sequence
  PTHR30461:SF3,SM00857,G3DSA:1.10.10.2600,IPR036162,PF13408, PS51737,G3DSA:3.40.50.1390,IPR025827,IPR006119,IPR038109, PF07508,IPR011109,SSF53041,PF00239,PTHR30461, PS51736,Coil,cd00338
MAKKKKPAGGIAVIYARYSSHNQRDVSIEQQIEACRKHAAELGLTIIATYEDRAISGRTDNRPAFQRLMHDAEKGKFSYVLAWKSNRMGRNMMQAMVNESRLMDCGIKVYYAEEDFDDSAAGRFALRSMMNVNQFYSDNLAEDVRRGLMDNANKCMVNGRQPLGYKRGKDGKVVVDEPAAAIVREVYTRVASGELFTDIARDLNRRGIKTADKGEWNKNSFHRLCSNEKYRGIYIYGDVRIEGGIPTIIDDTLWYKVQEALRVKKLKRNGRHRPGDEDYLLTGKLRCGKCGGYMIGMSGRSKTGDIHYYYACQNRRVGRTCDKKNIRRDIIEPAVAQAIKEYCLTDDAIEWIADKTVEYWEKADRNLQLDSIEGDLAAVQSSISNVMKAIEMGVVTETTRDRLIELEKQRTDLKSKLALAKEEVVHVDRKKLISSLLLFRNGDIHDRQYQEDLFKTFLISVYVYDDDDNGHLKIVFNAFGDNDTVDLPIDFGETDNQSAFSDGAEKFDYSLHRSTKKPSGLCRMVFLFYIVIQKQRTVFATVRPFLCSYYRMLMRPAP

SEQ ID NO: 1760 - protein, 558 aa, Unknown
  Description of Unknown: Integrase B1761 sequence
  SM00857,G3DSA:1.10.10.2600,IPR036162,PS51737,G3DSA:3.40.50.1390, IPR006119,IPR038109,PF07508,IPR011109,SSF53041, PF00239,PTHR30461,PS51736,Coil,cd00338
MHPADHNRTLFCCGLHFYTRLYRTNVLFLSIFPSHILKKGDFMAYLIYLRKSRADAEAEARGEGETLARHRAALLALARRMGLEIGGVYEEIVSGETIAARPQMQRLLTEVEAGQWDGVLVMEIERLARGDSIDQGIVAQAFKYSGTRIITPTKTYDPANEFDEEYFEFGLFMSRREYKTIKRRMIAGRIASVKEGKYMGKTDPYGYFRVKVRDGKGYTLEPNPPQAAIVREIFDLRLQGVGCYVIACRLNARGERTSAGVAWSAQSVRNVLRNCLYAGYVTWGRKAAQPTVRDGVLTKPRRYVDDYVKARGLHEALVSDEDFDTVQRLLDNTPGLPLKKNHELKNPFVGLLYCAKCGHVMTYGAPAAALPCTGRLDCRWADCNNVSSFCADVEDAVLHALRLWLAEYEVDIDHQNTVERELDARAAQAHEEIRAIHAAQRKLRAQLDRAAELVEQEVYTPEYFVSRRRQLDSQLAELDRALAKASARALTIDQERRGAPAMRPRLEHVIEAYPNAATAQERNDLLKSVVNRITYEKNAAERSAGDATIYIQIERRFE

SEQ ID NO: 1761 - protein, 558 aa, Unknown
  Description of Unknown: Integrase B1762 sequence
  PTHR30461:SF3,IPR036162,PS51737,IPR011109,PTHR30461, PF00239,G3DSA:1.10.10.2600,PF14287,IPR006119,SSF53041, IPR025378,SM00857,IPR025827,cd03770, IPR038109,PS51736,PF13408,G3DSA:3.40.50.1390,PF07508,Coil
MLQQSNNTITSIYPIGNQTEELTALYCRLSQDDKQEGDSNSIINQKKILKRYAIEHGYQPYVFFVDDGFSGTNFNRPDFQRMIAEVEAGRIKRVIVKDMSRLGRDYLQVGMYTEIMFPNMDVHFIAVNDGVDSHVGENEFTPFRNIINEWYAKDTSKKIRAVKRSKGMAGEHIGSHAPYGYMKNPDNKKEWLIDEEAAEVVREIFRLCVNGYGPTRIANILTERKILCPTYYALEHGEKPRTVLPPDKYLWSATVVSHILERMDYLGHTVNFKTHVKSYKNRKKIDNSPEQWRIFENTHEAIIDKETFEIVQKIRSGKRRPTKMGDMPMFSGLLYCADCGSKMTFHRQMAQSAEKHNFVCSNYRHNSKSCTMHYIRNVVVEQIVLENLKEVIRYVSDYEDEFVQMVMDTDMRQRNKELSQKKKRLTEIHSRIQELDKIFQRIYEDNISGKLSDERFMKLSKGYEEEQHTLQEEQTSLEKELQKEEKQSVDVKQFLSVVRKYTNLTELTPEIVHEFIDKIIVHAPDKSSGKRLQEIEIIYNHIGVFDHSKVTLWKGKAV

SEQ ID NO: 1762 - protein, 558 aa, Unknown
  Description of Unknown: Integrase B1763 sequence
  PTHR30461:SF3,SM00857,G3DSA:1.10.10.2600,IPR036162,PF13408, IPR025827,G3DSA:3.40.50.1390,PS51737,IPR006119,IPR038109, PF07508,IPR011109,SSF53041,PTHR30461,PS51736, cd00338,PF00239
MNKLRAAAYCRVSTDRAEQSGSLASQRSFFDDYIRNSDSMTLVGVFYDEGTSGTTTLNRYGFNKMISLAVSGGIDIILTKEVSRFARNTVDTLNITRMLRAKGVGIIFINDNIDTRDSDGELRLSIMATIAQEESRKISERVKWGQQRKMEQGVVFGRSCLGYDVKDGKITVNADSAEIVKRIFTEYTVLLKGAESIADGLNAEQIRTVNGGRWSGAFIRKVLRNVKYVGDLEQKKTCTPDFLTHKKRLNRSEHIYIRNHHEPIISRELWEQTQAEISRRKPTDTSRHSDRYVFSGKVYCGVCGSVMVSRVKTLKNGKIYHALRCSGRIGGKSCNNETLNVTALKACVKRIFTDIPIDKTAVINAVIKGLSRTDKPDIPALRRKIETLNAKKRRAVDLMLDGLITQQELIEQKSYYDSIIEKLSQEISSDRSVFETDKIRKNAERFFDFTSDPIWLLVIRADYIHGTLTVYLKGIEKGFTTCFTATGRGDSYRVITGNTVRSQGIIPGTMQVPKNWFHHDVNDKLIKKSAPDIFQVHFVLICRLFCSLCVAGHSAPTL

SEQ ID NO: 1763 - protein, 558 aa, Unknown
  Description of Unknown: Integrase B1764 sequence
  PTHR30461:SF3,SM00857,G3DSA:1.10.10.2600,IPR036162,PF13408, IPR025827,G3DSA:3.40.50.1390,PS51737,IPR006119,IPR038109, PF07508,IPR011109,SSF53041,PTHR30461,PS51736, cd00338,PF00239
MNKLRAAAYCRVSTDRTEQSGSLASQRSFFDNYIRNSDSMTLVGVFYDEGTSGTTTLNRYGFNKMISLAVSGGIDIILTKEVSRFARNTVDTLNITRMLRAKGVGIIFINDNIDTRDSDGELRLSIMATIAQEESRKISERVKWGQQRRMEQGVVFGRSCLGYDVKDGKITVNADSAEIVKRIFTEYTVLLKGAESIADGLNAEQIRTVNGGRWSGAFIRKVLRNVKYVGDLEQKKTCTPDFLTHKKRLNSSEHIYIRNHHEPIISRELWEQTQAEISRRKPTDTSRHSDRYVFSGKVYCGVCGSVMVSRVKTLKNGKIYHALRCSGRIGGKSCNNETLNVTALKACVKRIFTDIPIDKTAVINAVIKGLSRTDKPDIPALRKKIETLNTKKRRAVDLMLDGLITQQELIEQKSYYDSIIEKLSQEISSDRSVLETDKIRKSAERFLDFTSDPLWLLVIRADYIHGTLTVYLNGIEKGFTTCFTATGRGDSYRVITGNTVRSQGIIPGTMQVQKNWFHHDVNDKSIKKSAPDTFQVHFVLICRLFCFLFVAGYLAPTL

SEQ ID NO: 1764 - protein, 558 aa, Unknown
  Description of Unknown: Integrase B1765 sequence
  PTHR30461:SF3,SM00857,G3DSA:1.10.10.2600,IPR036162,PF13408, PS51737,IPR025827,G3DSA:3.40.50.1390,IPR006119,IPR038109, PF07508,IPR011109,SSF53041,PF00239,PTHR30461, PS51736,Coil,cd00338
MAKKKKPAGGIAVIYARYSSHNQRDVSIEQQIEACRKHAAELGLTIIATYEDRAISGRTDNRPAFQRLMHDAEKGKFSYVLAWKSNRMGRNMMQAMVNESRLMDCGIKVYYAEEDFDDSAAGRFALRSMMNVNQFYSDNLAEDVRRGLMDNANKCMVNGRQPLGYKRGKDGKVVVDEPAAAIVREVYTRVASGELFTDIARDLNRRGIKTADKGEWNKNSFHRLCSNEKYRGIYIYGDVRIEGGIPIIIDDPLWYKVQEALRVKKLKRNGRHRPGDEDYLLTGKLRCGKCGGYMIGMSGRSKTGDIHYYYACQNRRVGRTCDKKNIRRDVIEPAVAQAIKEYCLTDDAIEWIADKTVEYWEKADRNLQLDSIEGDLVAVQSSISNVMKAIEMGVVTETTRDRLIELEKQRTDLKSKLALAKEEVVHVDRKKLISSLLLFRNGDIHDRQYQEDLFKTFLISVYVYDDDNNGHLKIVFNAFGDNNTVDLPIDFGETDNQSAFSDGAEKFDYSLHRSTKKPSGLCRMVFLFYIVIQKQRTVFATVRPFLCSYYRMLMRPAP

SEQ ID NO: 1765 - protein, 558 aa, Unknown
  Description of Unknown: Integrase B1766 sequence
  PTHR30461:SF3,IPR036162,PS51737,IPR011109,PTHR30461, PF00239,G3DSA:1.10.10.2600,IPR006119,PF14287,SSF53041, IPR025378,SM00857,IPR025827,cd03770,IPR038109, PS51736,PF13408,G3DSA:3.40.50.1390,PF07508,Coil
MLQTSKITALYCRLSQEDMQAGESESIQNQKLILQKYADEHHFFNTRFFVDDGFSGVSFERDGLQAMLREVEAGNVATVITKDLSRLGRNYLKTGELIEIVFPEYEVRYIAINDGVDTAREDNEFTPLRNWFNEFYARDTSKKIRAVKQAKAQKGERVNGEVPYGYIADPNDRNHLLPDPETAHVVKQIFAMYVRGDRICEIQNWLREHEILTVSELRYRRSGSCRHPRPHPNCIYNWPDKTLYDILGRKEYLGHTITGKSYKVSYKSKKTKKNPEEKQYFFPNTHEPLIDEETFELAQKRIATKHRPTKCEEIDLFSGLLFCGDCGYKMYLQQGAGTPERKHAYTCGKYRNRIRTGELCTTHYIRKSVLKELVLADLQRVLSYVQSHEQEFIQTANEYNAKAVQRTLAQQRKELDKAQGRMSELNVLFRKLYEDNALGKLSDEQFAFLTSGYDEEKKTLTRRIAELSQELDTATERSADVKKFVALVHKHTKVTELTYENVHEFIDRILIHELDKETNTRKIEIFYSFVGRVDTGDKPTESISYFRQIGADVKSYAI

SEQ ID NO: 1766 - protein, 558 aa, Unknown
  Description of Unknown: Integrase B1767 sequence
  PTHR30461:SF3,SM00857,G3DSA:1.10.10.2600,IPR036162,PF13408, PS51737,G3DSA:3.40.50.1390,IPR025827,IPR006119,IPR038109, PF07508,SSF53041,IPR011109,PF00239,PTHR30461, PS51736,Coil,cd00338
MTNAVIYARYSPGPNQTDQSIEGQIHECTRFCEDNNLRIVGTYIDRKQTGRNDNRADFQKMLRDSSRHGFSTVVVWKIDRFGRNREEIAKNKAVLRMNGVRVLSAKEHIPDGPEGIILESVLEGLAEYYSANLSQNIKRGMRESALKCQFNGSGLSTGYTVDADHKYRIDPDGAAVVRTIFEMYDSGKKIAYIQRYLQQSNIKTMRGKEYTHYGISRILRNRVYIGEYHWHDIVVPGGVPQIIDNDLFDRVQKRLEANKHAPAARRGDVDFLLTSKLICGNCKSTMIGDCGTGKNGARWYYYTCRAKKTKSSKCRKKSVPKEALEREVTALTAAYVLRDDVIDYIADKVVEIQKSEHDDKSMLRYFESQLKDTNKAIANIMRAIEAGIITETTRSRLEELEDTKRDLETEIIKEKVARPTIEREQVIFFLEKFRGGNVDDKEYQRKIIDTFVHKVILYDDKITITYNYSTDSTKNAENTVESIESAASAAECKCSNKPSSSPPVTRILLLQCSCYFFRRGSNRTVLRSRIPSVRWTVGKSACVSAHGSAPSVPLRLHQ

SEQ ID NO: 1767 - protein, 558 aa, Unknown
  Description of Unknown: Integrase B1768 sequence
  PTHR30461:SF3,SM00857,G3DSA:1.10.10.2600,IPR036162,PF13408, IPR025827,PS51737,G3DSA:3.40.50.1390,IPR006119,IPR038109, PF07508,SSF53041,IPR011109,PTHR30461,PS51736, cd00338,PF00239
MNKLRAAAYCRVSTDRTEQSGSLASQRSFFDNYIRNSDSMTLVGVFYDEGTSGTTTLNRYGFNKMISLAVSGGIDIILTKEVSRFARNTVDTLNITRMLRAKGVGIIFINDNIDTRDSDGELRLSIMATIAQEESRKISERVKWGQQRKMEQGVVFGRSCLGYDVKDGKITVNADSAEIVKRIFTEYTVLLKGAESIADGLNAEQIRTVNGGRWSGAFIRKVLRNVKYVGDLEQKKTCTPDFLTHKKRLNSSEHIYIRNHHEPIISRELWEQTQAEISRRKPTDTSRHSDRYVFSGKVYCGVCGSVMVSRVKMLKNGKIYHALRCSGRIGGKSCNNETLNVTALKACVKRIFTDIPIDKTSVINAVIKGLSRTDKPDIPALRRKIETLNAKKRRAVDLMLDGLITQQELIEQKSYYDSIIEKLSQEISSDRSVFETDKIRKNAERFLDFTSDPLWLLVIRADYIHGTLTVYLKDIEKGFTTCFTATGRGDSYRVITGNTVRSQGIISGTMQVQKNWFHHDVNDKSIKKSAPDTFQVHFVLICRLFCFLFVAGYLAPTL

SEQ ID NO: 1768 - protein, 558 aa, Unknown
  Description of Unknown: Integrase B1769 sequence
  PTHR30461:SF3,cd00338,SM00857,G3DSA:1.10.10.2600,IPR036162, PF13408,PS51737,G3DSA:3.40.50.1390,IPR025827,IPR006119, IPR038109,PF07508,IPR011109,SSF53041,PTHR30461, PS51736,Coil,PF00239
MRNCTIDLSSLTPEERRQFSENPGVLSFDCPEACCLYMRYSSDRQTEQSIEGQLRELVAYCLQHDLRIAAVYVDRAVSAHTSMAKRAAFQKMLADSKRSVWNTVLVWKLDRFARNRQDSAAARAILIKNGCMVVSATENITNSPEGRLLESVLEGLNEYYSEDLKQKIKRGNRESALKGQALGGSVPLGYKIEKKKWVIDPLTAPLVEEAFTRYASGETAAAICSDFNARGYRTSKGAEFNKSSFKNIFRNEKYIGVYKYTDIRQENAVPRIVTDDVWNLVQSRLKDNAAAPARGKAKVAYLLTGKIFCGKCGSPMTGEAGTGKGGGKYNYYTCANRKRRHACDKRPVRKDWLEDIVARDALEALTDEIIDYVATIAAQQSEDEISQNTNIPAIQKAIAEIERKIRNLTKAIEAAGTAPDALVGRISELESQKKGLQGQLKEAQRSVMPLTKEQVVFFLESVREQAVPLESQKYMLIDMFINSVTVYDDEPGYLTIKTAYNLTNLPGKTYRIPTSKDETVFGFDGECTTIRHKSEHNSHFTIAVFWTVFVQTRRHALP

SEQ ID NO: 1769 - protein, 558 aa, Unknown
  Description of Unknown: Integrase B1770 sequence
  PTHR30461:SF3,SM00857,G3DSA:1.10.10.2600,IPR036162,PF13408, IPR025827,PS51737,G3DSA:3.40.50.1390,IPR006119,IPR038109, PF07508,IPR011109,SSF53041,PTHR30461,PS51736, cd00338,PF00239
MNKLRAAAYCRVSTDRAEQSGSLASQRSFFDDYIRNSDSMTLVGVFYDEGTSGTTTLNRYGFNKMISLAVSGGIDIILTKEVSRFARNTVDTLNITRMLRAKGVGIIFINDNIDTRDSDGELRLSIMATIAQEESRKISERVKWGQQRKMEQGVVFGRSCLGYDVKDGKITVNADSAKIVKRIFTEYTVLLKGAESIADGLNAEQIRTVNGGRWSGAFIRKVLRNVKYVGDLEQKKTCTPDFLTHKKRLNSSEHIYIRNHHEPIISRELWEQTQAEISRRKPTDTSRHSDRYVFSGKVYCGVCGSVMVSRVKTLKNGKIYHALRCSGRIGGKSCNNETLNVTALKACVKRIFTDIPIDKTAVINAVIKGLSRTDKPDIPALRRKIETLNAKKRRAVDLMLDGLITQQELIEQKSYYDSIIEKLSQEISSDRSVFETDKIRKNAERFLDFTSDPIWLLVIRADYIHGTLTVYLKGIEKGFTTCFTATGRGDSYRVITGNTVRSQGIIPVTMQVQKNWFHHDVNDKLIKKSAPDIFQVHFVLICRLFCSLCVAGHSAPTL

SEQ ID NO: 1770 - protein, 558 aa, Unknown
  Description of Unknown: Integrase B1771 sequence
  PTHR30461:SF3,SM00857,G3DSA:1.10.10.2600,IPR036162,PF13408, IPR025827,PS51737,G3DSA:3.40.50.1390,IPR006119,IPR038109, PF07508,SSF53041,IPR011109,PTHR30461,PS51736, cd00338,PF00239
MNKLRAAAYCRVSTDRAEQSGSLASQRSFFDDYIRNSDSMTLVGVFYDEGTSGTTTLNRYGFNKMISLAVSGGIDIILTKEVSRFARNTVDTLNITRMLRAKGVGIIFINDNIDTRDSDGELRLSIMATIAQEESRKISERVKWGQQRKMEQGVVFGRSCLGYDVKDGKITINADSAEIVKRIFTEYTVLLKGAESIADGLNAEQIRTVNGGRWSGAFIRKVLRNVKYVGDLEQKKTCTPDFLTHKKRLNRSEHIYIRNHHEPIISRELWEQTQAEISRRKPTDTSRHSDRYVFSGKVYCGVCGSVMVSRVKTLKNGKIYHALRCSGRIGGKSCNNETLNVTALKACVKRIFTDMPIDKTAVINAVIKGLSRTDKPDIPALRRKIETLNAKKRRAVDLMLDGLITQQELIEQKSYYDSIIEKLSQEISSDRSVFETDKIRKNAERFLDFTSDPLWLLVIRADYIHGTLTVYLKGIENGFTTCFTATGRGDSYRVITGNTVRSQGIIPGTMQVQKNWFHHDVNDKSIKKSAPDTFQVHFVLICRLFCFLFVAGYLAPTL

SEQ ID NO: 1771 - protein, 558 aa, Unknown
  Description of Unknown: Integrase B1772 sequence
  PTHR30461:SF3,cd00338,SM00857,G3DSA:1.10.10.2600,IPR036162, PF13408,PS51737,G3DSA:3.40.50.1390,IPR025827,IPR006119, IPR038109,PF07508,SSF53041,IPR011109,PTHR30461, PS51736,Coil,PF00239
MAKKKKPAGGIAVIYARYSSHNQRDVSIEQQIEACRKHAAELGLTIIATYEDRAISGRTDNRPAFQRLMHDAEKGKFRYVLAWKSNRMGRNMMQAMVNESRLMDCGIKVYYAEEDFDDSAAGRFALRSMMNVNQFYSDNLAEDVRRGLMDNANKCMVNGRQPLGYKRGKDGKVVVDEPAAAIVREVYARVASGELFTDIARDLNRRGIKTADKGEWNKNSFHRLCSNEKYRGIYIYGDVRIEGGIPTIIDDTLWYKVQEALRVKKLKRNGRHRPGDEDYLLTGKLRCGKCGGYMIGMSGRSKTGDIHYYYACQNRRVGRTCDKKNIRRDVIEPAVAQAIKEYCLTDDAIEWIADKTVEYWEKADRNLQLDSIEGDLAAVQSSISNVMKAIEMGVVTETTRDRLIELEKQRTDLKSKLALAKEEVVHVDRKKLISSLLLFRNGDIHDRQYQEDLFKTFLISVYVYDDDDNGHLKIVFNAFGDNNTVDLPIDFGETDNQSAFSDGAEKFDYSLHRSTKSHPVYAGWLFSFYIVIQKQRTVFATVRPFLCSYYRMLMRPAP

SEQ ID NO: 1772 - protein, 558 aa, Unknown
  Description of Unknown: Integrase B1773 sequence
  PTHR30461:SF3,SM00857,G3DSA:1.10.10.2600,IPR036162,PF13408, IPR025827,G3DSA:3.40.50.1390,PS51737,IPR006119,IPR038109, PF07508,SSF53041,IPR011109,PTHR30461,PS51736, cd00338,PF00239
MNKLRAAAYCRVSTDRAEQSGSLASQRSFFDDYIRNSDSMTLVGVFYDEGTSGTTTLNRYGFNKMISLAVSGGIDIILTKEVSRFARNTVDTLNITRMLRAKGVGIIFINDNIDTRDSDGELRLSIMATIAQEESRKISERVKWGQQRKMEQGVVFGRSCLGYDVKDGKITVNADSAEIVKRIFTEYTVLLKGAESIADGLNAEQIRTVNGGRWSGAFIRKVLRNVKYVGDLEQKKTCTPDFLTHKKRLNRSEHIYIRNHHEPIISRELWEQTQAEISRRKPTDTSRHSDRYVFSGKVYCGVCGSVMVSRVKTLKNGKIYHALRCSGRIGGKSCNNETLNVTALKACVKRIFTDMPIDKTAVINAVIKGLSRTDKPDIPALRRKIETLNAKKRRAVDLMLDGLITQQELIEQKSYYDSIIEKLSQEISSDRSVLETDKIRKNAERFLDFTSDPLWLLVIRADYIHGTLTVYLKGIENGFTTCFTATGRGDSYRVITGNTVRSQGIIPGTMQVQKNWFHHDVNDKLIKKSAPDIFQVHFVLICRLFCSLCVAGHSAPTL

SEQ ID NO: 1773 - protein, 558 aa, Unknown
  Description of Unknown: Integrase B1774 sequence
  PTHR30461:SF3,SM00857,G3DSA:1.10.10.2600,IPR036162,PS51737, G3DSA:3.40.50.1390,IPR006119,IPR038109,PF07508,IPR011109, SSF53041,PF00239,PTHR30461,Coil,cd00338
MSKRVRTLLRVSSRQQLHDDDIPIQRAEATEFIAKHEDWVFDREYLEKGVSAYHNGVEDREILQEIVKDAKNKEFEILLAYMSDRIGRQEEYSFYVAELNRMGIEVWTIKDGQLKTEEHIDKLLNYIRFWQNEGESKKTGMRVHDTMVEMVKDGKFVGGKAPYGYKLVLSGEISNHGRALHKFVIVPEQADNVRKIFSYAVNQGMGFQKIAKTLNEENIPAPILAEWKSGTVRSILTNPIYMGYIAYNRRKNSHSSSTYLDRKEWTYSRERNPEITIVSQDIWERAQEIREARKKRINASKQATNELYMEQYNVPFSTRGRLALTGLVYCGYCGKKLKNTGYANHWTCKKTGEKKVAYVGRYGCPNQCKPRHTYTQKYLEEVVFATVGTYLENLKKIDISDELEEMQSQQDKNIKREIKDLEREIKGLSADIMTLEEKLPEAIRGEFAFSVDKLSAIISDKESLKKEKEAGKNKLQKQLDEINVQGSELKAFIDAMPKWDEIFFESDVQTKQMILSTLIDRIIVKDDNITINFKIRLENFLDEKLLENNGSDLSRKGL

SEQ ID NO: 1774 - protein, 558 aa, Unknown
  Description of Unknown: Integrase B1775 sequence
  cd00338,SM00857,G3DSA:1.10.10.2600,IPR036162, PS51737,G3DSA:3.40.50.1390,IPR006119,IPR038109, PF07508,IPR011109,SSF53041,PTHR30461, PS51736,Coil,PF00239
MDKKILCIIRASTEKQETESQKKELVAYCITKGYAVEEMEFIEVAGASAVKLNKKYIQMLEDIKATILSIPTITAVALWHLNRLGRVESKLHEMKEWFLQHKIQVYCKNPDFPLLDDTGKESAAGSLAFSMFASVVKFETDEMFAKMKRGRERNKVNGIFYGGKIKFGYTLDATKHFIINEEEAQTVRLIFNLYSSGKYSFYDLIEELKARGITKGGMKITYEMIQNALADEAYYSSKILPSIIDKELFDKCAAIKANTVAVKRTKESVNVNFAVGLLKCKCGNNFIANGDFYRCYSKINQQRKKKVVKCDAPIIRRDIMDDTLWLVTRLLQQRFLMDKDSVDISEQKDKINVLTAKLSTAQKGLSSIKDRKEKLEDAYYVDGEMNEAQFKKRLASLHSKEVQTESLIRNYKTEIEDIQKVIKQIELPSNDRYLQSLLLSDLDVEELEDRKKIKEMMFNHIDKVTVNRVMKGNHKCVEITITSKTKLTFVFLYDSWLNSHRKGECNLFYEDKPVYEIDGAIIRQNKAVTKMLYQKIGLPELTSRELGEAAARYAKKQE

SEQ ID NO: 1775 - protein, 558 aa, Unknown
  Description of Unknown: Integrase B1776 sequence
  SM00857,G3DSA:1.10.10.2600,IPR036162,PF13408,PS51737, G3DSA:3.40.50.1390,IPR025827,IPR006119,IPR038109,PF07508, SSF53041,IPR011109,PTHR30461,Coil,PS51736, cd00338,PF00239
MAYRKITDIKDTIGMRAVFYARVSTAEEEQLNAIELQIEENRGCIKDHGWKLVGEYIDRSKSGTMVKGRDDYQRLYEDLYEDLFDIVVIKDQERLQRNTLDWYLFINRIVQTGKLLFMYMDGKFYSPDDALITGVRAIIAEEFSRNLSKKLHNYHDHRIEKARQGQEIALQGSGNVYGWDKKDGKYYINPEQAKVRRLMCEGIMARKGSTLIAKELNEAGYRNTVGKLWKPMDIPKFVYDCKNVGTMIINKERHDFESKQTIKLPKEEWVYVENALPPIVTQEEWDLICKIHEERVIATGSDRRGKKTSGYSFSGKLVCGICGAPYWRKQRVSKDEYWVCSTKQTKGRRTRKRDSTMGKAGEINPLGCDNENISYNSLMEIMGVVSERLQANTNTIKQDMINWLTKLRKQLLEANGGHTEADLQRELSRKSKLLDAYLDGILNKQEYQKKAEELDERIIQLKTETEKNKANSGDIAEIDKVLANIDEEVARYVDGNEKLKVEYLLEHLEQVQIFPDKVIVIVPILSEGIVVEKTQYVSREKWCRKDYNNKLHLKNDKT

SEQ ID NO: 1776 - protein, 558 aa, Unknown
  Description of Unknown: Integrase B1777 sequence
  PTHR30461:SF3,SM00857,G3DSA:1.10.10.2600,IPR036162,PF13408, IPR025827,G3DSA:3.40.50.1390,PS51737,IPR006119,IPR038109, PF07508,IPR011109,SSF53041,PTHR30461,Coil, PS51736,cd00338,PF00239
MDIHETRQKLKLKNIFDINLRVTFYARVSSEKDEQLNSLDNQISYYKNLIKKNKNWQYVDGYIDEGISGISVKKRENFHNMIKDAKAGKFDLILTKEITRFARNTLDSIKYTRDLLSYGVGVFFQNDNINTLDEDSELRLTIMSGIAQDELRKLSSRIKFGHQQAIKNNVVLGNSRIFGYVKDGKRLVIDETEAEMVKELFTLYATDNYSMKQIENIFWEKGYRNLNGNKIVHSTMSNMISNPKYKGYYCGNKVKIVDMFTKKQKFLPPEEWVMFKDETGEIVPAIVDEDLWERANKVLQKRSNDVKNRKGICNHDNLLTGKLFCTHCGKPYYRRDSKDRNGNKNSIWVCSGKVKNGKDSCPSFSIYESEIKPILFQVFKDTSADVDSLIEQYIEMYKSLDEDNCISKSIKSIRNKVDLANRKKSKLLEYNISGKLSDNDFINMNTQISKDITKFEEEIAALEEQKNSKDKLKEHIEKMKKLLKQAEAEAQEKIIDKEFIKKYIDKIYVSPENGHLKLSIKIFTGEVTEKYLEDFKSRTGHTFKTNCRTFAKNFQVSN

SEQ ID NO: 1777 - protein, 558 aa, Unknown
  Description of Unknown: Integrase B1778 sequence
  PTHR30461:SF3,IPR036162,PS51737,IPR011109,PTHR30461, PF00239,G3DSA:1.10.10.2600,PF14287,IPR006119,SSF53041, IPR025378,SM00857,IPR025827,cd03770,IPR038109, PS51736,PF13408,G3DSA:3.40.50.1390,PF07508,Coil
MLQQSNNTITSIYPIGNQTEELTALYCRLSQDDKQEGDSNSIINQKKILKRYAIEHGYQPYVFFVDDGFSGTNFNRPDFQRMIAEVEAGRIKRVIVKDMSRLGRDYLQVGMYTEIMFPNLDVHFIAVNDGVDSHVGENEFTPFRNIINEWYAKDTSKKIRAVKRSKGMAGEHIGSHAPYGYMKNPDNKKEWLIDEEAAEVVREIFRLCVNGYGPTRIANILTERKILCPTYYALEHGEKPRTVLPPDKYLWSATVVSHILERMDYLGHTVNFKTHVKSYKNRKKIDNSPEQWRIFENTHEAIIDKETFEIVQKIRSGKRRPTKMGDMPMFSGLLYCADCGSKMTFHRQMAQSAEKHNFVCSNYRHNSKSCTMHYIRNVVVEQIVLENLKEVIRYVSDYEDEFVQMVMDTDMRQRNKELSQKKKRLTEIHSRIQELDKIFQRIYEDNISGKLSDERFMKLSKGYEEEQHTLQEEQTSLEKELQKEEKQSVDVKQFLSVVRKYTNLTELTPEIVHEFIDKIIVHAPDKSSGKRLQEIEIIYNHIGVFDHSKVTLWKGKAV

SEQ ID NO: 1778 - protein, 558 aa, Unknown
  Description of Unknown: Integrase B1779 sequence
  PTHR30461:SF3,SM00857,G3DSA:1.10.10.2600,IPR036162,PF13408, PS51737,IPR025827,G3DSA:3.40.50.1390,IPR006119,IPR038109, PF07508,IPR011109,SSF53041,PTHR30461,Coil, PS51736,cd00338,PF00239
MDIYKVRQLLKEQSIFDIPLRVVYYVRVSTDKEEQKNSTVNQDTFFEDLIASHPAWTFVGKYIDDGASGIMADKREDFQRMISDGQNKMYDLILTKEISRFARNTLDSIRYTRLLLNCGVGVWFYTDNVNTINEDAELHLAILSSIAQNESLKTSTRVRMGHAQSIKRGVVMGNSMLYGYNKDHGRLVIDPYEAEMVRSIYEKYATGVYTTPMLEREIYASGYRNHYGEKISRTVIGHIITNPKYKGYYVGGKVKIIDMFTKKRKFIPKDEWIMYKDETGERVPAIIDEETWELANKYFVERGDAIKARRKVCTTPNTFTGKIYCGTDGAPYWLKHRVLRGKDDSTWYCSDKLKNGTDSCKSFPIKEDEIRSMVVDLITLSPSDIQKYCEMYLEMLRKSIDSSVDKSAKIAELNKEIENNMAKKQKLLDYNLQGILSDDEFISNTKLLNRKIERAQSLIDSFTSKSPVELKSNSVLDKAAKLLNDFSGVKSEDLDNKIVDELIDKIVITPQDTDYASVEFYLKTSEKVHKTYDRKAVLRNDNLLKKMIEEQEKKMAGK

SEQ ID NO: 1779 - protein, 558 aa, Unknown
  Description of Unknown: Integrase B1780 sequence
  PTHR30461:SF3,SM00857,G3DSA:1.10.10.2600,IPR036162,PF13408, PS51737,IPR025827,G3DSA:3.40.50.1390,IPR006119,IPR038109, PF07508,IPR011109,SSF53041,PTHR30461,Coil, PS51736,cd00338,PF00239
MTNAVIYARYSPGPNQTDQSIEGQIHECTRFCEDNDLRIVGTYIDRKQTGRNDNRADFQKMLRDSSRHGFSTVVVWKIDRFGRNREEIAKNKAVLRMNGVRVLSAKEHIPDGPEGIILESVLEGLAEYYSANLSQNIKRGMRESALKCQFNGSGLSTGYTVDADHKYRIDPDGAAVVRTIFEMYDSGKKIADIQRYLQQSNIKTMRGKEYTHYGISRILRNRVYIGEYHWHDIVVPGGVPQIIDNDLFDRVQKRLEANKHAPAARRGDVDFLLTSKLICGNCKSTMIGDCGTGKNGARWYYYTCRAKKTKSSKCRKKSVPKEALEREVTALTAAYVLRDDVIDYIANKVVEIQKSEHDDKSMLRYFESQLKDTNKAIANIMRAIEAGIITETTRSRLEELEDTKRDLETEIIKEKVARPTIEREQVIFFLEKFRGGNVDDKEYQRKIIDTFVHKVILYDDKITITYNYSTDSTKNAENTVESIESAASAAECKCSNKPSSSPPITRILLLRCSCYFFRRGSNRTVLRSRISSVRWTVGKSACVSAHGSAPSDPLRLHQ

SEQ ID NO: 1780 - protein, 558 aa, Unknown
  Description of Unknown: Integrase B1781 sequence
  PTHR30461:SF3,SM00857,G3DSA:1.10.10.2600,IPR036162,PF13408, IPR025827,PS51737,G3DSA:3.40.50.1390,IPR006119,IPR038109, PF07508,IPR011109,SSF53041,PTHR30461,Coil, PS51736,cd00338,PF00239
MRKKFNIDLSMLTPEEQQQFHDDPTTLTKGEVDVALYLRFSSERQTEQSIEGQLRDCIAYCKRKSFRIVAIYVDRATTARKDVEKRVHFQEMISDSAHHLWNFVVVWKLDRFARNREDSAVFKMRLRKNGVRVKSATETISENPEGIILESVLEGIAEYYSADLSQKITRGLRESAMKGHSVGGHVPLGYKIEDHKLVINPATAHIVQEAFQLYANGESMAEICRIFNSKGYRTAKNSEFNRSSFKSMFKNVRYIGTYIYKDIKKENAIPAIIDKDLFETVQRRLSLAADAPARGKAKVDYLLSGKLFCGHCGATMNGESGTSKTGAIHNYYTCYSRKRRKGCDKKPLKKDFIERIVAQDAMALLTNDVIEELADMAMSQADRDLKENTCIPELSTRLTEIEQGINNITKAIEKGIASDTLLNRLTELEKEKKDLTSQLREEEKYICRIDRDQIIFWLTKFQGGNIEDEDCRRRIIDLLVNSVTVWDEPDGYKITTAYNLTSCKTKTFRVSNTGSPSSEGFGFGELSSTKTTLDELKSSMVTSEWLSCVLYRTVILSS

SEQ ID NO: 1781 - protein, 558 aa, Unknown
  Description of Unknown: Integrase B1782 sequence
  PTHR30461:SF3,SM00857,G3DSA:1.10.10.2600,IPR036162,PF13408, PS51737,G3DSA:3.40.50.1390,IPR025827,IPR006119,IPR038109, PF07508,SSF53041,IPR011109,PTHR30461,Coil, PS51736,cd00338,PF00239
MTNAVIYARYSPGPNQTDQSIEGQIHECTRFCEDNDLRIVGTYIDRKQTGRNDNRADFQKMLRDSSRHGFSTVVVWKIDRFGRNREEIAKNKAVLRMNGVRVLSAKEHIPDGPEGIILESVLEGLAEYYSANLSQNIKRGMRESALKCQFNGSGLSTGYTVDADHKYRIDPDGAVVVRTIFEMYDGGKKIADILRYLQQSNIKTMRGKEYTHYGISRILRNRVYIGEYHWHDIVVPGGVPQIIDNDLFDRVQKRLEANKHAPAARRGDVDFLLTSKLICGNCKSTMIGDCGTGKNGARWYYYTCRAKKTKSSKCRKKSVPKEALEREVTALTAAYVLRDDVIDYIANKVVEIQKSEHDDKSMLRYFESQLKDTNKAIANIMRAIEAGIITETTRSRLEELEDTKRDLETEIIKEKVARPTIEREQVIFFLEKFRGGNVDDKEYQRKIIDTFVHKVILYDDKITITYNYSTDSTKNAENTVESIESAASAAECKCSNKFSSSPPVTRILLLQCSCYFFRRGSNRMVLRSRIPSVRWTVGKSACVSAHGSAPSDPLRLHQ

SEQ ID NO: 1782 - protein, 558 aa, Unknown
  Description of Unknown: Integrase B1783 sequence
  PTHR30461:SF3,SM00857,G3DSA:1.10.10.2600,IPR036162,PF13408, PS51737,G3DSA:3.40.50.1390,IPR025827,IPR006119,IPR038109, PF07508,SSF53041,IPR011109,PF00239,PTHR30461, PS51736,Coil,cd00338
MRNCTIDLSSLTPEERRQFSENPGVLSFDCPEACCLYMRYSSDRQTEQSIEGQLRELVAYCLQHDLRIAAVYVDRAVSAHTSMAKRAAFQKMLADSKRSAWNTVLVWKLDRFARNRQDSAAARAILIKNGCMVVSATENITNSPEGRLLESVLEGLNEYYSEDLKQKIKRGNRESALKGQALGGSVPLGYKIEKKKWVIDPLTAPLVEEAFTRYASGETAAAICSDFNARGYRTSKGAEFNKSSFKNIFRNEKYIGVYKYTDIRQENAVPRIVTDDVWNLVQSRLKDNAAAPARGKAKVAYLLTGKIFCGKCGSPMTGEAGTGKGGGKYNYYTCANRKRRHACDKRPVPKDWLEDIVARDALEALTDEIIDYVATVAAQQSEDEISQNTNIPAIQKAIAEIERKIRNLTKAIEAAGTAPDALVGRISELESQKKGLQGQLKEAQRSVMPLTKEQVVFFLESVREQAVPLESQKYMLIDMFINSVTVYDDEPGYLTIKTAYNLTNLPGKTYRIPISKDKTVFGFDGECTTIRHKSEHNSHFTIAVIGTVFVQTRRHALP

SEQ ID NO: 1783 - protein, 558 aa, Unknown
  Description of Unknown: Integrase B1784 sequence
  cd00338,SM00857,G3DSA:1.10.10.2600,IPR036162,PS51737, G3DSA:3.40.50.1390,IPR006119,IPR038109,PF07508,IPR011109, SSF53041,PTHR30461,PS51736,Coil,PF00239
MSENTIQIIKIAQGIPGRNHEYTEMVIRGDIMIEEKRYCIYLRKSRADADAEARGEGETLLRHEKTLLELSERMHIKVEKIYREIVSGDTIAARPVMQELLTDVESMTWTGVLVMEVERLARGDTIDQGIVARTFQITNTQIITPLKTYDPQNESDEEYFEFGLFMSRREYKTINRRLNRGRIQSVKEGKYIASVAPYGYIRVKLPNEKGYTLSPHPEQADVVRMIFDLYVNGLNGEEYGATKIARYLDSLGIKPMVADKWSPASIRDILQNEVYVNKIVWGKRKEVKTVENGVVKIMRPTAADYLCNNALHEGLVTQEIFDKAQYKRTHSPHSIKVNVKKPLQNPLAGLIYCDKCGSLMTRLGESKKTPYAFLKCPNRYCDNVSVPLFLVEKNLIAFLQDWIKNYQIEIESGANTSYESQLTLLQSSEQALDKEKQNLLKQLNNAYNLVEQGVYTADIFKSRNQILTSQIHDVDIRLSEIREKISEANEHYRMRTELVPRAYTLIQSYNQLSTAAEKNALLNQLVSKATILKTERNTRGKRDNSNFTLNVWPKLPHA

SEQ ID NO: 1784 - protein, 558 aa, Unknown
  Description of Unknown: Integrase B1785 sequence
  PTHR30461:SF3,cd00338,SM00857,G3DSA:1.10.10.2600,IPR036162, PF13408,IPR025827,G3DSA:3.40.50.1390,PS51737,IPR006119, IPR038109,PF07508,IPR011109,SSF53041, PTHR30461,PS51736,Coil,PF00239
MAKKKKPAGGIAVIYARYSSHNQRDVSIEQQIEACRKHAAELGLTIIATYEDRAISGRTDNRPAFQRLMHDAEKGKFSYVLAWKSNRMGRNMMQAMVNESRLMDCGIKVYYAEEDFDDSAAGRFALRSMMNVNQFYSDNLAEDVRRGLMDNANKCMVNGRQPLGYKRGKDGKVVVDEPAAAIVREVYARVASGELFTDIARDLNRRGIKTADKGEWNKNSFHRLCSNEKYRGIYIYGDVRIEGGIPTIIDDTLWYNVQEALRVKKLKRNGRHRPGDEDYLLTGKLRCGKCGGYMIGMSGRSKTGDIHYYYACQNRRVGRTCDKKNIRRDVIEPAVAQAIKEYCLTDDAIEWIADKTVEYWEKADRNLQLDSIEGDLAAVQSSISNVMKAIEMGVVTETTRDRLIELEKQRTDLKSKLALAKEEVVHVDRKKLISSLLLFRNGDIHDRQYQEDLFKTFLISVYVYDDDDNGHLKIVFNAFGDNNTVDLPIDFGETDNQSAFSDGAEKFDYSLHRSTKKPSGLCRMVFLFYIVIQKQRTVFATVRPFLCSYYRMLMRPAP

SEQ ID NO: 1785 - protein, 558 aa, Unknown
  Description of Unknown: Integrase B1786 sequence
  PTHR30461:SF3,SM00857,G3DSA:1.10.10.2600,IPR036162,PF13408, PS51737,G3DSA:3.40.50.1390,IPR025827,IPR006119,IPR038109, PF07508,SSF53041,IPR011109,PTHR30461,PS51736, cd00338,PF00239
MSKRESKSSQKCLAAEQIGVIYARYSSHNQKEESIEQQIAECSDFAAKNGIRIVGIYADKAVSGRSDRRPNFQRMMRDAEKRHFQIVVAYKSNRIARNMLNALQYEARLDLFGIKTLYAKEEFGNTAAGRFALRTMMNVNQFYSENMGEDIKRGMVDNANECKVNGMLPLGYVKSKEGKYAVAPGEAAVVREIFDSFLKDVPVAEIARSLNQRGIRTKLGREWNKNSFHIMLKNDNYIGVYRHSGVVVEDGIPPILEKEVFAAVQEKLANKKKTAGRRSANGEYLLTGKLFCGYCGSYMIGVSGTGENGTVHNYYQCQKRHAENRCEKKNVRRDFIEKLIARLTQDYILQDETIEWIADSTMSFQAVARRQSGITQLERDLADNRKIAKNIMAAIEQGIITETTKARLLEVEGTIRDLERSLSIAKAASQPIERERVVFSLEQMREGNVGSKEHQKKLIDTFVKSVTLWDDRIQIDYYHTPGKHKFSYSLEELTSKVENESNAADVRAESLEVHHCRRELHRFTTAFYWQLHLCGYMARSKRRRNQIPASFLHVLMGV

SEQ ID NO: 1786 - protein, 558 aa, Unknown
  Description of Unknown: Integrase B1787 sequence
  PTHR30461:SF3,SM00857,G3DSA:1.10.10.2600,IPR036162,PF13408, PS51737,IPR025827,G3DSA:3.40.50.1390,IPR006119,IPR038109, PF07508,IPR011109,SSF53041,PTHR30461,Coil, PS51736,cd00338,PF00239
MTNAVIYARYSPGPNQTDQSIEGQIHECTRFCEDNDLRIVGTYIDRKQTGRNDNRADFQKMLRDSSRHGFSTVVVWKIDRFGRNREEIAKNKAVLRMNGVRVLSAKEHIPDGPEGIILESVLEGLAEYYSANLSQNIKRGMRESALKCQFNGSGLSTGYTVDADHKYRIDPDGAAVVRTIFEMYDGGKKIADILRYLQQSNIKTMRGKEYTHYGISRILRNRVYIGEYHWHDIVVPGGVPQIIDNDLFDRVQKRLEVNKHAPAARRGDVDFLLTSKLICGNCKSTMIGDCGTGKNGARWYYYTCRAKKTKSSKCRKKSVPKEALEREVTALTAAYVLRDDVIDYIANKVVEIQKSEHDDKSMLRYFESQLKDTNKAIANIMRAIEAGIITETTRSRLEELEDTKRDLETEIIKEKVARPTIEREQVIFFLEKFRGGNVDDKEYQRKIIDTFVHKVILYDDKITITYNYSTDSTKNAENTVESIESAASAAECKCSNKPSSSPPVTRILLLQCSCYFFRRGSNRTVLRSRIPSVRWTVGKSACVSAHGSAPSDPLRLHQ

SEQ ID NO: 1787 - protein, 558 aa, Unknown
  Description of Unknown: Integrase B1788 sequence
  PTHR30461:SF3,SM00857,G3DSA:1.10.10.2600,IPR036162,PF13408, PS51737,G3DSA:3.40.50.1390,IPR025827,IPR006119,IPR038109, PF07508,IPR011109,SSF53041,PTHR30461,Coil, PS51736,cd00338,PF00239
MTNAVIYARYSPGPNQTDQSIEGQIHECTRFCEDNDLRIVGTYIDRKQTGRNDNRADFQKMLRDSSRHGFSTVVVWKIDRFGRNREEIAKNKAVLRMNGVRVLSAKEHIPDGPEGIILESVLEGLAEYYSANLSQNIKRGMRESALKCQFNGSGLSTGYTVDADHKYRIDPDGAAVVRTIFEMYDGGKKIADILRYLQQSNIKTMRGKEYTHYGISRILRNRVYIGEYHWHDIVVPGGVPQIIDNDLFDRVQKRLEANKHAPAARRGDVDFLLTSKLICGNCKSTMIGDCGTGKNGARWYYYTCRAKKTKSSKCRKKSVPKEALEREVTALTAAYVLRDDVIDYIANKVVEIQKSEHDDKSMLRYFESQLKDTNKAIANIMRAIEAGIITETTRSRLEELEDTKRDLETEIIKEKVARPTIEREQVIFFLEKFRGGNVDDKEYQRKIIDTFVHKVILYDDKITITYNYSTDSTKNAENTVESIESAASAAECKCSNKFSSSPPVTRILLLQCSCYFFRRGSNRMVLRSRIPSVRWTVGKSACVSAHGSAPSDPLRLHQ

SEQ ID NO: 1788 - protein, 558 aa, Unknown
  Description of Unknown: Integrase B1789 sequence
  PTHR30461:SF3,SM00857,G3DSA:1.10.10.2600,IPR036162,PF13408, IPR025827,PS51737,G3DSA:3.40.50.1390,IPR006119,IPR038109, PF07508,SSF53041,IPR011109,PTHR30461,Coil, PS51736,cd00338,PF00239
MDIYKVRQLLKGQSIFDIPLRVVYYVRVSTDKEEQKNSTVNQDTFFEELIASHPAWTFVGKYIDDGASGIMADKREDFQRMISDGQNQMYDLILTKEISRFARNTLDSIRYTRLLLNCGIGVWFYTDNVNTINEDAELHLAILSSIAQNESLKTSTRVRMGHAQSIKRGVVMGNSMLYGYNKDHGKLVIDPYEAEMVRSIYEKYATGVYTTPMLEREIYASGYRNHYGEKISRTVIGHIITNPKYKGYYVGGKVKIIDMFTKKRKFIPKDEWIMYKDETGERVPAIIDEETWELANKYFVERGDAIKARRKVCTTPNTFTGKIYCGTDGAPYWLKHRVLRGKDDSTWYCSDKLKNGTDSCKSFPIKEDEIRSMVVDLITLSPSDIQKYCEMYLEMLRKNIDSSVDKSAKIAELNKEIENNMAKKQKLLDYNLQGILSDDEFISNTKLLNRKIERAQSLIDSFTSKSPVELKSNSVLDKAAKLLNDFSGVKSEDLDNKIVDELIDKIVITPQDTDYASVEFYLKTSEKVHKTYDRKAVLRNDNLLKKMIEEQEKKMAGK

SEQ ID NO: 1789 - protein, 558 aa, Unknown
  Description of Unknown: Integrase B1790 sequence
  PTHR30461:SF3,SM00857,G3DSA:1.10.10.2600,IPR036162,PF13408, PS51737,G3DSA:3.40.50.1390,IPR025827,IPR006119,IPR038109, PF07508,IPR011109,SSF53041,PTHR30461,Coil, PS51736,cd00338,PF00239
MTNAVIYARYSPGPNQTDQSIEGQIHECTRFCEDNDLRIVGTYIDRKQTGRNDNRADFQKMLRDSSRHGFSTVVVWKIDRFGRNREEIAKNKAVLRMNGVRVLSAKEHIPDGPEGIILESVLEGLAEYYSANLSQNIKRGMRESALKCQFNGSGLSTGYTVDADHKYRIDPDGAAVVRTIFEMYDGGKKIADILRYLQQSNIKTMRGKEYTHYGISRILRNRVYIGEYHWHDIVVPGGVPQIIDNDLFDRVQKRLEVNKHAPAARRGDVDFLLTSKLICGNCKSTMIGDCGTGKNGARWYYYTCRAKKTKSSKCRKKSVPKEALEREVTALTAAYVLRDDVIDYIADKVVEIQKSEHDDKSMLRYFESQLKDTNKAIANIMRAIEAGIITETTRSRLEELEDTKRDLETEIIKEKVARPTIEREQVIFFLEKFRGGNVDDKEYQRKIIDTFVHKVILYDDKITITYNYSTDSTKNAENTAESIESAASAAECKCSNKTSSSPPMTRILLLRCSCYFFRRGSNRTVLRSRIPSVRWTVGKSACVSAHGSAPSDPLRLHQ

SEQ ID NO: 1790 - protein, 558 aa, Unknown
  Description of Unknown: Integrase B1791 sequence
  PTHR30461:SF3,SM00857,G3DSA:1.10.10.2600,IPR036162,PF13408, IPR025827,G3DSA:3.40.50.1390,PS51737,IPR006119,IPR038109, PF07508,SSF53041,IPR011109,PF00239,PTHR30461, PS51736,Coil,cd00338
MSSVDKIAVVYARYSSHGQTEQSIEGQIAAAQKYAEQHGYTIIHVYADRAMTGRNDDREQFQKMLSDTAMHQFGVILLWKIDRFGRNREEIAFNRYRCKKNGVRVERVAEDVPDGPEGVILDSVLEGMAEYYSLQLAQNVRRGQRESAKKSMSIGGNKMLGYIVNPETKRYESDPKTASYVTEIFKRYANGETISEIVAWLNAQGIRTTRGSEFTVNSLHRLLKNEKYTGVYIFHDIRNEGGMPALTDRATFDKVQEMLKVNRRAPARVWSKTEYLLTDKLFCGHCGEMMVGESGHGRNGIKHSYYTCLNRKKKKSCDKKPVRQDVIEPLVLRAIGKLLENPATLENITDQVWAAYERSDTSGDTIKALDKQIADVDRALSNVMKAIELGIINEMTKTRMDELTNQKQALSTARAEAGLAEGFKLTRDMILFFLQEIAALDMADRDSQKRLIKTFVNAIYLYDDHFDIAFNYTDNGKVAVRMQEINDAASGEVFGCCAQSPTKRIRNLGCGSFSIASSSRKIQNCGKGVGRFLEKNQNFFRCFQNALRKWLLIQPENG

SEQ ID NO: 1791 - protein, 558 aa, Unknown
  Description of Unknown: Integrase B1792 sequence
  SM00857,G3DSA:1.10.10.2600,IPR036162,PS51737,G3DSA:3.40.50.1390, IPR006119,IPR038109,PF07508,IPR011109,SSF53041, PTHR30461,Coil,PS51736,cd00338,PF00239
MDKKILCIIRASTEKQETESQKKELVAYCITKGYAVEEMEFIEVAGASAVKLNKKYIQMLEDIKATILSIPTITAVALWHLNRLGRVESKLHEMKEWFLQHKIQVYCKNPDFTLLDDTGKESAAGSLAFSMFASVVKFETDEMFAKMKRGRERNKVNGIFYGGKIKFGYTLDATKHFIINEEEAQTIRLIFNLYSSGKYSFYDLIEELKARGITKGGMKITYEMIQNALADEAYYSSKILPSIIDKELFDKCAAIKANTVAVKRTKESVNVNFAVGLLKCKCGNNFIANGDFYRCYSKINQQRKKKVVKCDAPIIRRDIMDDTLWLVTRLLQQRFLMDKDSVDISEQKDKINVLTAKLSTAQKGLSSIKDRKEKLEDAYYVDGEMNEAQFKKRLASLHSKEVQTESLIRNYKTEIEDIQKVIKQIELPSNDRYLQSLLLSDLDVEELEDRKKIKEMMFNHINKVTVNRVMKGNHKCVEITITSKTKLTFVFLYDSWLNSHRKGECNLFYEDKPVYEIDGAIIRQNKAVTKMLYQKIGLPELTSRELGEAAARYAKKQE

SEQ ID NO: 1792 - protein, 558 aa, Unknown
  Description of Unknown: Integrase B1793 sequence
  PTHR30461:SF3,cd00338,SM00857,G3DSA:1.10.10.2600,IPR036162, PF13408,IPR025827,G3DSA:3.40.50.1390,PS51737,IPR006119, IPR038109,PF07508,IPR011109,SSF53041, PTHR30461,PS51736,Coil,PF00239
MKKKPIEPEMQDAVIYTRYSSHNQRDCSIEQQVADCEIFARQNNLRVVKVYADRHLSGTTDNRPQFQQMLKDASHGHWAYVICWKIDRFARNRYDSATYKFRLKKAGVRVLYAKESIPDGPEGILLESVLEGSAEYYSAALAQNIRRGMKFNAEQCKVNSGSIPFGYCKGPDGRFAVHEANAEVVREIFRKAAAGMPFVDIANDLNSRGLKTSRGGRWNKGSFRLLMNEAYIGVYHFSDTRIEGGMPALIDQGTFWAANERLKANSSVRGRHQDGGDYLLTGKLKCAHCGSYMIGFSGTGKSGELHYYYGCQKRRRERACKKANVPREWIERVVVKAALDYVLRPEVMEWIADAVMEYQEREAASAQLAALTAELEENRKATDNVMKAIEAGIITSTTKQRLLDLEAKAQDLKRAIELEKLSHVRLERDQILFWLDRFRGGSLQSQEFRRKVIDAFVSVVYLFDDHLRIAFNYSGGSNAEADFDLVMDAEAAAGELSKKFAQGHVASTKCESGEPRHDLLRGYVLRPDHAALRAVKNKHSAFIAGCLFFARIVLTECL

SEQ ID NO: 1793 - protein, 558 aa, Unknown
  Description of Unknown: Integrase B1794 sequence
  PTHR30461:SF3,SM00857,G3DSA:1.10.10.2600,IPR036162,PF13408, IPR025827,PS51737,G3DSA:3.40.50.1390,IPR006119,IPR038109, PF07508,SSF53041,IPR011109,PF00239,PTHR30461, PS51736,Coil,cd00338
MKERTKVYLYTRVSTAMQIDGYSLEAQKNRMKAYAEFNDYEIAGEYEDAGKSGKSIEGRIEFSRMMDDIKCSKDHVSYVLVFKLSRFGRNAADVLSTLQVMQDFGVNLICVEDGIDSSKDAGKLMISVLSAVAEIERENIRIQTMEGRIQKAREGKWNGGFAPYGYDLINGELHINEEEAKTVRLIYELYVHKKMGGRLIAQYLESHDIKKLSHKNTRGDMFAAAYIQDILRNPTYCGKIAYGRRKQEKVHGTRNDYRIVWNDDYLLTDGIHQPIVSVEDWEEAQARLRSQATKYKRYDRQENEHAYLLTGIIKCPECGAGMYVSKSVKKRPDGSYYKEFRYYGCKHRRMDKGQKCTFKNQLPMELMDQAVAEVIVSLVSRPDFAAMMAEKINAEIDISALLEEIAHYEKQLRQQYAVKDRLAEDIDQLDPDDRHYQRRKSDLEERLYKMYDKIEETEEHLIEARAKKQAIDADRITRDNILSILMNFEKLYSVMSDIEKRDLMATMIADIQVYPQRQPNGQWLKSIHFKLPLIAEEELQFSLDKKDWLENVMVLAKL

SEQ ID NO: 1794 - protein, 558 aa, Unknown
  Description of Unknown: Integrase B1795 sequence
  PTHR30461:SF3,SM00857,G3DSA:1.10.10.2600,IPR036162,PF13408, IPR025827,G3DSA:3.40.50.1390,PS51737,IPR006119,IPR038109, PF07508,IPR011109,SSF53041,PTHR30461,PS51736, cd00338,PF00239
MNKLRAAAYCRVSTDRAEQSGSLASQRSFFDDYIRNSDSMTLVGVFYDEGTSGTTTLNRYGFNKMISLAVSGGIDIILTKEVSRFARNTVDTLNITRMLRSKGVGIIFINDNIDTRDSDGELRLSIMATIAQEESRKISERVKWGQQRKMEQGVVFGRSCLGYDVKDGKITVNADSAKIVKRIFTEYAVLLKGAESIADGLNAEQIRTVNGGRWSGAFIRKVLRNVKYVGDLEQKKTCTPDFLTHKKRLNSSEHIYIRNHHEPIISRELWEQTQAEISRRKPTDTSRHSDRYVFSGKVYCGVCGSVMVSRVKTLKNGKIYHALRCSGRIGGKSCNNETLNVTALKACVKRIFTDIPIDKTAVINAVIKGLSRTDKPDIPALRRKIETLNAKKRRAVDLMLDGLITQQELIEQKSYYDSIIEKLSQEISSDRSVFETDKIRKNAERFLDFTSDPIWLLVIRADYIHGTLTVYLKGIEKGFTTCFTATGRGDSYRVITGNTVRSQGIIPGTMQVQKNWFHHDVNDKLIKKSAPDIFQVHFVLICRLFCSLCVAGHSAPTL

SEQ ID NO: 1795 - protein, 558 aa, Unknown
  Description of Unknown: Integrase B1796 sequence
  PTHR30461:SF3,SM00857,G3DSA:1.10.10.2600,IPR036162,PF13408, IPR025827,PS51737,G3DSA:3.40.50.1390,IPR006119,IPR038109, PF07508,IPR011109,SSF53041,PTHR30461,Coil, PS51736,cd00338,PF00239
MDIYKVRQLLKGQSIFDIPLRVVYYVRVSTDKEEQKNSTVNQDTFFEELIASHPAWTFVGKYIDDGASGIMADKREDFQRMISDGQNQMYDLILTKEISRFARNTLDSIRYTRLLLNCGVGVWFYTDNVNTINEDAELHLAILSSIAQNESLKTSTRVRMGHAQSIKRGVVMGNSMLYGYNKDHGKLVIDPYEAEMVRSIYEKYATGVYTTPMIEREIYASGYRNHYGERISRTVIGHIITNPKYKGYYVGGKVKIIDMFTKKRKFIPKDEWIMYKDETGERVPAIIDEETWELANKYFVERGDAIKARRKVCTTPNTFTGKIYCGTDGAPYWLKHRVLRGKDDSTWYCSDKLKNGTDSCKSFPIKEDEIRSMVVDLITLSPSDIQKYCEMYLEMLRKSVDSSVDKSAKIAELNKEIENNMAKKQKLLDYNLQGILSDDEFISNTKLLNRKIERAQSLIDSFTSKSPVELKSNSVLDKAAKLLNDFSGVKSEDLDNKIVDELIDKIVITPQDTDYASVEFYLKTSEKVHKTYDRKAVLRNDNLLKKMIEEQEKKMAGK

SEQ ID NO: 1796 - protein, 558 aa, Unknown
  Description of Unknown: Integrase B1797 sequence
  PTHR30461:SF3,SM00857,G3DSA:1.10.10.2600,IPR036162,PF13408, IPR025827,G3DSA:3.40.50.1390,PS51737,IPR006119,IPR038109, PF07508,IPR011109,SSF53041,PF00239,PTHR30461, PS51736,Coil,cd00338
MKKTKTKCYLYTRVSTSMQVDGYSLDAQRDKLRKYAEYEDMVVAGEYSDEGFSGKNIQGRHEFQRMLQDIQDCKDGVEYVLVFKLSRFGRNAADVLNSLQLMQDFGVNLICVEDGIDSSKDSGKLMISVLSAVAEIERENIRTQTMAGREQKAREGKWNGGFAPYGYRLEKGELLIAEDEVDVIRTIFDRYIHTNDGVSGVAKYLNRQGFVKKLRQNGTIPGFSASFVKSIIDNPVYMGKIAYGRRRTEKKIGTRNEMHVVEQSEFPVYEGKHEAIISEEDWNLAQEKRKINAYRREKVNDPTHAHILSGILKCPCCGKSLYGNIAKAHSKDKKTRYYYYCKNTVTPTGHECTFRLNIEQMEMNRMVASIISAMVSDPRFADAIKAKIGSAVDTNDLEKQLEALQAQLRQTLGTKARLERQMDGLDVNDPYYDRKISDLQRRYDEQYGAIDEIEVQIDDVQSQIRSIRQEKISGDNIYRLLLAFDQVYEAASEVERKEFMRAFIERIELFPEKQPDGNWIRKIIFNFPVPVNGTEVKELPLENETIVETVVLMSRKEE

SEQ ID NO: 1797 - protein, 558 aa, Unknown
  Description of Unknown: Integrase B1798 sequence
  PTHR30461:SF3,SM00857,G3DSA:1.10.10.2600,IPR036162,PF13408, IPR025827,G3DSA:3.40.50.1390,PS51737,IPR006119,IPR038109, PF07508,SSF53041,IPR011109,PTHR30461,PS51736, cd00338,PF00239
MNKLRAAAYCRVSTDRAEQSGSLASQRSFFDDYIRNSDSMTLVGVFYDEGTSGTTTLNRYGFNKMISLAVSGGIDIILTKEVSRFARNTVDTLNITRMLRAKGVGIIFINDNIDTRDSDGELRLSIMATIAQEESRKISERVKWGQQRKMEQGVVFGRSCLGYDVKDGKITVNADSAEIVKRIFTEYTVLLKGAESIADGLNAEQIRTVNGGRWSGAFIRKVLRNVKYVGDLEQKKTCTPDFLTHKKRLNRSEHIYIRNHHEPIISRELWEQTQAEISRRKPTDTSRHSDRYVFSGKVYCGVCGSVMVSRVKTLKNGKIYHALRCSGRIGGKSCNNETLNVTALKACVKRIFTDMPIDKTAVINAVIKGLSRTDKPDIPALRRKIETLNAKKRRAVDLMLDGLITQQELIEQKSYYDSIIEKLSQEISSDRSVLETDKIRKNAERFLDFTSDPLWLLVIRADYIHGTLTVYLKGIENGFTTCFTATGRGDSYRVITGNTVRSQGIIPGTMQVQKNWFHHDVNDKSIKKSAPDTFQVHFVLICRLFCFLFVAGYLAPTL

SEQ ID NO: 1798 - protein, 558 aa, Unknown
  Description of Unknown: Integrase B1799 sequence
  PTHR30461:SF3,SM00857,G3DSA:1.10.10.2600,IPR036162,PF13408, IPR025827,G3DSA:3.40.50.1390,PS51737,IPR006119,IPR038109, PF07508,SSF53041,IPR011109,PTHR30461,Coil, PS51736,cd00338,PF00239
MDIYKVRQLLKGQSIFDIPLRVVYYVRVSTDKEEQKNSTVNQDTFFEELIASHPAWTFVGKYIDDGASGIMADKREDFQRMISDGQNQMYDLILTKEISRFARNTLDSIRYTRLLLNCGIGVWFYTDNVNTINEDAELHLAILSSIAQNESLKTSTRVRMGHAQSIKRGVVMGNSMLYGYNKDHGKLVIDPYEAEMVRSIYEKYATGVYTTPMLEREIYASGYRNHYGEKISRTVIGHIITNPKYKGYYVGGKVKIIDMFTKKRKFIPKDEWIMYKDETGERVPAIIDEETWELANKYFVERGDAIKARRKVCTTPNTFTGKIYCGTDGAPYWLKHRVLRGKDDSTWYCSDKLKNGTDSCKSFPIKEDEIRSMVVDLITLSPSDIQKYCEMYLEMLRKSIDSSVDKSAKIAELNKEIENNMAKKQKLLDYNLQGILSDDEFISNTKLLNRKIERAQSLIDSFTSKSPVELKSNSILDKAAKLLNDFSGVKSEDLDNKIVDELIDKIVITPQDTDYASVEFYLKTSEKVHKTYDRKAVLRNDNLLKKMIEEQEKKMAGK

SEQ ID NO: 1799 - protein, 558 aa, Unknown
  Description of Unknown: Integrase B1800 sequence
  PTHR30461:SF3,SM00857,G3DSA:1.10.10.2600,IPR036162,PF13408, IPR025827,PS51737,G3DSA:3.40.50.1390,IPR006119,IPR038109, PF07508,IPR011109,SSF53041,PTHR30461,Coil, PS51736,cd00338,PF00239
MTNAVIYARYSPGPNQTDQSIEGQIHECTRFCEDNDLRIVGTYIDRKQTGRNDNRADFQKMLRDSSRHGFSTVVVWKIDRFGRNREEIAKNKAVLRMNGVRVLSAKEHIPDGPEGIILESVLEGLAEYYSANLSQNIKRGMRESALKCQFNGSGLSTGYTVDADHKYRIDPDGAAVVRTIFEMYDSGKKIADIQRYLQQSNIKTMRGKEYTHYGISRILRNRVYIGEYHWHDIVVPGGVPQIIDNDLFDRVQKRLEANKHAPAARRGDVDFLLTSKLICGNCKSTMIGDCGTGKNGARWYYYTCRAKKTKSSKCRKKSVPKEALEREVTALTAAYVLRDDVIDYIADKVVEIQKSEHDDKSMLRYFESQLKDTNKAIANIMRAIEAGIITETTRSRLEELEDTKRDLETEIIKEKVARPTIEREQVIFFLEKFRGGNVDDKEYQRKIIDTFVHKVILYDDKITITYNYSTDSTKNAENTVESIESAASAAECKCSDKYSSSPPITRILLLQCSCYFFRRGSNRTVLRSRIPSVRWTVGKSACVSAHGSAPSDPLRLHQ

SEQ ID NO: 1800 - protein, 558 aa, Unknown
  Description of Unknown: Integrase B1801 sequence
  PTHR30461:SF3,SM00857,G3DSA:1.10.10.2600,IPR036162,PF13408, PS51737,G3DSA:3.40.50.1390,IPR025827,IPR006119,IPR038109, PF07508,IPR011109,SSF53041,PTHR30461,Coil, PS51736,cd00338,PF00239
MTNAVIYARYSPGPNQTDQSIEGQIHECTRFCEDNDLRIVGTYIDRKQTGRNDNRADFQKMLRDSSRRGFSTVVVWKIDRFGRNREEIAKNKAVLRMNGVRVLSAKEHIPDGPEGIILESVLEGLAEYYSANLSQNIKRGMRESALKCQFNGSGLSTGYTVDADHKYRIDPDGAAVVRTIFEMYDSGKKIADIQRYLQQSNIKTMRGKEYTHYGISRILRNRVYIGEYHWHDIVVPGGVPQIIDNDLFDRVQKRLEANKHAPAARRGDVDFLLTSKLICGNCKSTMIGDCGTGKNGARWYYYTCRAKKTKSNKCRKKSVPKEALEREVTALTAAYVLRDDVIDYIANKVVEIQKSEHDDKSMLRYFESQLKDTNKAIANIMRAIEAGIITETTRSRLEELEDTKRDLETEIIKEKVARPTIEREQVIFFLEKFRGGNVDDKEYQRKIIDTFVNKVILYDDKITITYNYSTDSTKNAENTVESIESAASAAECKCSNKSSSSPPITRILLLRCSCYFFRRGSNRTVLRSRISSVRWTVGKSACVSAHGSAPSDPLRLHQ

SEQ ID NO: 1801 - protein, 558 aa, Unknown
  Description of Unknown: Integrase B1802 sequence
  PTHR30461:SF3,SM00857,G3DSA:1.10.10.2600,IPR036162,PF13408, IPR025827,PS51737,G3DSA:3.40.50.1390,IPR006119,IPR038109, PF07508,IPR011109,SSF53041,PTHR30461,PS51736, cd00338,PF00239
MNKLRAAAYCRVSTDRAEQSGSLASQRSFFDDYIRNSDSMTLVGVFYDEGTSGTTTLNRYGFNKMISLAVSGGIDIILTKEVSRFARNTVDTLNITRMLRAKGVGIIFINDNIDTRDSDGELRLSIMATIAQEESRKISERVKWGQQRKMEQGVVFGRSCLGYDVKDGKITINADSAEIVKRIFTEYTVLLKGAESIADGLNAEQIRTVNGGRWSGAFIRKVLRNVKYVGDLEQKKTCTPDFLTHKKRLNRSEHIYIRNHHEPIISRELWEQTQAEISRRKPTDTSRHSDRYVFSGKVYCGVCGSVMVSRVKTLKNGKIYHALRCSGRIGGKSCNNETLNVTALKACVKRIFTDMPIDKTAVINAVIKGLSRTDKPDIPALRRKIETLNAKKRRAVDLMLDGLITQQELIEQKSYYDSIIEKLSQEISSDRSVFETDKIRKNAERFLDFTSDPLWLLVIRADYIHGTLTVYLKGIEKGFTTCFTATGRGDSYRVITGNTVRSQGIIPVTMQVQKNWFHHDVNDKSIKKSAPDTFQVHFVLICRLFCFLFVAGYLAPTL

SEQ ID NO: 1802 - protein, 558 aa, Unknown
  Description of Unknown: Integrase B1803 sequence
  PTHR30461:SF3,SM00857,G3DSA:1.10.10.2600,IPR036162,PF13408, IPR025827,PS51737,G3DSA:3.40.50.1390,IPR006119,IPR038109, PF07508,IPR011109,SSF53041,PTHR30461,Coil, PS51736,cd00338,PF00239
MTNAVIYARYSPGPNQTDQSIEGQIHECTRFCEDNDLRIVGTYIDRKQTGRNDNRADFQKMLRDSSRHGFSTVVVWKIDRFGRNREEIAKNKAVLRMNGVRVLSAKEHIPDGPEGIILESVLEGLAEYYSANLSQNIKRGMRESALKCQFNGSGLSTGYTVDADHKYRIDPDGAAVVRTIFEMYDSGKKIADIQRYLQQSNIKTMRGKEYTHYGISRILRNRVYIGEYHWHDIVVPGGVPQIIDNDLFDRVQKRLEANKHAPAARRGDVDFLLTSKLICGNCKSTMIGDCGTGKNGARWYYYTCRAKKTKSSKCRKKSVPKEALEREVTALTAAYVLRDDVIDYIADKVVEIQKSEHDDKSMLRYFESQLKDTNKAIANIMRAIEAGIITETTRSRLEELEDTKRDLETEIIKEKVARPTIEREQVIFFLEKFRGGNVDDKEYQRKIIDTFVHKVILYDDKITITYNYSTDSTKNAENTVESIESAASAAECKCSDKSSSSPPITRILLLQCSCYFFRRGSNRTVLRSRIPSVRWTVGKSACVSAHGSAPSDPLRLHQ

SEQ ID NO: 1803 - protein, 558 aa, Unknown
  Description of Unknown: Integrase B1804 sequence
  PTHR30461:SF3,SM00857,G3DSA:1.10.10.2600,IPR036162,PF13408, PS51737,G3DSA:3.40.50.1390,IPR025827,IPR006119,IPR038109, PF07508,IPR011109,SSF53041,PTHR30461,PS51736, cd00338,PF00239
MNKLRAAAYCRVSTDRAEQSGSLASQRSFFDDYIKNSDSMTLVGVFYDEGTSGTTTLNRYGFNKMISLAVSGGIDIILTKEVSRFARNTVDTLNITRMLRAKGVGIIFINDNIDTRDSDGELRLSIMATIAQEESRKISERVKWGQQRKMEQGVVFGRSCLGYDVKDGKITVNADSAEIVKRIFTEYTVLLKGAESIADRLNAEQIRTVNGGRWSGAFIRKVLRNVKYVGDLEQKKTCTPDFLTHKKRLNSSEHIYIRNHHEPIISRELWEQTQAEISRRKPTDTSRHSDRYVFSGKVYCGVCGSVMVSRVKTLKNGKIYHALRCSGRISGKSCNNETLNVTALKACVKRIFTDMPIDKTAVINAVIKGLSRTDKPDIPALRRKIETLNAKKRRAVDLMLDGLITQQELIEQKSYYDSIIEKLSQEISSDRSVFETDKIRKNAEKFLDFTSDPIWLLVIRADYIHGTLTVYLKGIEKGFTTCFTATGRGDSYRVITGNTVRSQGIIPGTMQVQKNWFHHDVNDKLIKKSAPDIFQVHFVLICRLFCFLYAAGHSVPTL

SEQ ID NO: 1804 - protein, 558 aa, Unknown
  Description of Unknown: Integrase B1805 sequence
  PTHR30461:SF3,cd00338,SM00857,G3DSA:1.10.10.2600,IPR036162, PF13408,IPR025827,PS51737,G3DSA:3.40.50.1390,IPR006119, IPR038109,PF07508,IPR011109,SSF53041,PTHR30461, PS51736,Coil,PF00239
MAKKKKPAGGIAVIYARYSSHNQRDVSIEQQIEACRKHATELGLTIIATYEDRAISGRTDNRPAFQRLMHDAEKGKFSYVLAWKSNRMGRNMMQAMVNESRLMDCGIKVYYAEEDFDDSAAGRFALRSMMNVNQFYSDNLAEDVRRGLMDNANKCMVNGRQPLGYKRGKDGKVVVDEPAAAIVREVYARVASGELFTDIARDLNRRGIKTADKGEWNKNSFHRLCSNEKYRGIYIYGDVRIEGGIPTIIDDTLWYKVQEALRVKKLKRNGRHRPGDEDYLLTGKLRCGKCGGYMIGMSGRSKTGDIHYYYACQNRRVGHTCDKKNIRRDVIEPAVAQAIKEYCLTDDAIEWIADKTVEYWEKADRNLQLDSIEGDLAAVQSSISNVMKAIEMGVVTETTRDRLIELEKQRTDLKSKLALAKEEVVHVDRKKLISSLLLFRNGDIHDRQYQEDLFKTFLISVYVYDDDDNGHLKIVFNAFGDNNTVDLPIDFGETDNQSAFSDGAEKFDYSLHRSTKKPSGLCRMVFLFYIVIQKQRTVFATVRPFLCSYYRMLMRPAP

SEQ ID NO: 1805 - protein, 558 aa, Unknown
  Description of Unknown: Integrase B1806 sequence
  PTHR30461:SF3,SM00857,G3DSA:1.10.10.2600,IPR036162,PF13408, PS51737,IPR025827,G3DSA:3.40.50.1390,IPR006119,IPR038109, PF07508,IPR011109,SSF53041,PTHR30461,Coil, PS51736,cd00338,PF00239
MTNAVIYARYSPGPNQTDQSIEGQIHECTRFCEDNDLRIVGTYIDRKQTGRNDNRADFQKMLRDSSRHGFSTVVVWKIDRFGRNREEIAKNKAVLRMNGVRVLSAKEHIPDGPEGIILESVLEGLAEYYSANLSQNIKRGMRESALKCQFNGSGLSTGYTVDADHKYRIDPDGAAVVRTIFEMYDGGKKIADILRYLQQSNIKTMRGKEYTHYGISRILRNRVYIGEYHWHDIVVPGGVPQIIDNDLFDRVQKRLEVNKHAPAARRGDVDFLLTSKLICGNCKSTMIGDCGTGKNGARWYYYTCRAKKTKSSKCRKKSVPKEALEREVTALTAAYVLRDDVIDYIANKVVEIQKSEHDDKSMLRYFESQLKDTNKAIANIMRAIEAGIITETTRSRLEELEDTKRDLETEIIKEKVARPTIEREQVIFFLEKFRGGNVDDKEYQRKIIDTFVHKVILYDDKITITYNYSTDSTKNAENTVESIESAASAAECKCSNKPSSSPPMTRILLLQCSCYFFRRGSNRMVLRSRIPSVRWTVGKSACVSAHCRAPSDPLRLHQ

SEQ ID NO: 1806 - protein, 558 aa, Unknown
  Description of Unknown: Integrase B1807 sequence
  PTHR30461:SF3,SM00857,G3DSA:1.10.10.2600,IPR036162,PF13408, PS51737,IPR025827,G3DSA:3.40.50.1390,IPR006119,IPR038109, PF07508,IPR011109,SSF53041,PTHR30461,Coil, PS51736,cd00338,PF00239
MTNAVIYARYSPGPNQTDQSIEGQIHECTRFCEDNDLRIVGTYIDRKQTGRNDNRADFQKMLRDSSRHGFSTVVVWKIDRFGRNREEIAKNKAVLRMNGVRVLSAKEHIPDGPEGIILESVLEGLAEYYSANLSQNIKRGMRESALKCQFNGSGLSTGYTVDADHKYRIDPDGAAVVRTIFEMYDGGKKIADILRYLQQSNIKTMRGKEYTHYGISRILRNRVYIGEYHWHDIVVPGGVPQIIDNDLFDRVQKRLEVNKHAPAARRGDVDFLLTSKLICGNCKSTMIGDCGTGKNGARWYYYTCRAKKTKSSKCRKKSVPKEALEREVTALTAAYVLRDDVIDYIANKVVEIQKSEHDDKSMLRYFESQLKDTNKAIANIMRAIEAGIITETTRSRLEELEDTKRDLETEIIKEKVARPTIEREQVIFFLEKFRGGNVDDKEYQRKIIDTFVHKVILYDDKITITYNYSTDSTKNAENTVESIESAASAAECKCSNKPSSSPPVTRILLLQCSCYFFRRGSNRTVLQSRIPSVRWTAGKSACVSAHGSAPSDPLRLHQ

SEQ ID NO: 1807 - protein, 558 aa, Unknown
  Description of Unknown: Integrase B1808 sequence
  PTHR30461:SF3,IPR036162,PS51737,IPR011109,PTHR30461, PF00239,G3DSA:1.10.10.2600,PF14287,IPR006119,SSF53041, IPR025378,SM00857,IPR025827,cd03770,IPR038109, PS51736,PF13408,G3DSA:3.40.50.1390,PF07508,Coil
MLQQSNNTITSIYPIGNQTEELTALYCRLSQDDKQEGDSNSIINQKKILKRYAIEHGYQPYVFFVDDGFSGTNFNRPDFQRMIAEVEAGRIKRVIVKDMSRLGRDYLQVGMYTEIMFPNMDVHFIAVNDGVDSHVGENEFTPFRNIINEWYAKDTSKKIRAVKRSKGMAGEHIGSHAPYGYMKNPDNKKEWLIDEEAAEVVREIFRLCVNGYGPTRIANILTERKILCPTYYALEHGEKPRTVLPPDKYLWSATVVSHILERMDYLGHTVNFKTHVKSYKNRKKIDNSPEQWRVFENTHEAIIDKETFEIVQKIRSGKRRPTKMGDMPMFSGLLYCADCGSKMTFHRQMAQSAEKHNFVCSNYRHNSKSCTMHYIRNVVVEQIVLENLKEVIRYVSDYEDEFVQMVMDTDMRQRNKELSQKKKRLTEIHSRIQELDKIFQRIYEDNISGKLSDERFMKLSKGYEEEQHTLQEEQTSLEKELQKEEKQSVDVKQFLSVVRKYTNLTELTPEIVHEFIDKIIVHAPDKSSGKRLQEIEIIYNHIGVFDHSKVTLWKGKAV

SEQ ID NO: 1808 - protein, 558 aa, Unknown
  Description of Unknown: Integrase B1809 sequence
  PTHR30461:SF3,cd00338,SM00857,G3DSA:1.10.10.2600,IPR036162, PF13408,IPR025827,G3DSA:3.40.50.1390,PS51737,IPR006119, IPR038109,PF07508,IPR011109,SSF53041,PTHR30461, PS51736,Coil,PF00239
MKEKTKVYIYTRVSTAVQVDGYSLDAQKSRMKAYAEFNDFEIVGEYEDAGKSGKSIEGRLEFNRMMEDIKSGKDGVSYVLVFKLSRFGRNAADVLSTLQVMQDFDVNLICVEDGIDSSKDAGKLMISVLSAVAEIERENIRVQTMEGRIQKAREGKWNGGFAPYGYKLEKGMLYINEEEAEAIRIIFDQYVHTDIGANGLAKYLANHGINKIQRQNGKNPLFDAALIRRILKNPVYCGKIAYGRRRREKGHGTRNDYRLVEQENYLLVDGLHEAIVSEGLWHEAQVKLLAQAKKYEKVNNGKDNKVHLLTGLLKCPICGAGMYGNKSIKHKPDGTKYKDFFYYGCKHRTMTRGHKCEYKKQINEELLDGAVAEVIIKLVSNPKFAAMMQQKINMKIDTSAIEQEIANYEKQLRQSYATKSRLIDEIDTLDPDDKHYIKRKADLDDRLYKMYDKIEDTENLLIEARAKKMAIEAEKLTADNIYKVLIYFEKLYAVMDEQEKRQIMESLISEIHIYEERQPNGQWLKSIKFKLPIIEEDMEMSLDSDTHVEAIVSLQREI

SEQ ID NO: 1809 - protein, 558 aa, Unknown
  Description of Unknown: Integrase B1810 sequence
  PTHR30461:SF3,SM00857,G3DSA:1.10.10.2600,IPR036162,PF13408, PS51737,IPR025827,G3DSA:3.40.50.1390,IPR006119,IPR038109, PF07508,SSF53041,IPR011109,PTHR30461,PS51736, cd00338,PF00239
MNKLRAAAYCRVSTDRAEQSGSLASQRSFFDDYIRNSDSMTLVGVFYDEGTSGTTTLNRYGFNKMISLAVSGGIDIILTKEVSRFARNTVDTLNITRMLRAKGVGIIFINDNIDTRDSDGELRLSIMATIAQEESRKISERVKWGQQRKMEQGVVFGRSCLGYDVKDGKITINADSAEIVKRIFTEYTVLLKGAESIADGLNAEQIRTVNGGRWSGAFIRKVLRNVKYVGDLEQKKTCTPDFLTHKKRLNRSEHIYIRNHHEPIISRELWEQTQAEISRRKPTDTSRHSDRYVFSGKVYCGVCGSVMVSRVKTLKNGKIYHALRCSGRIGGKSCNNETLNVTALKACVKRIFTDMPIDKTAVINAVIKGLSRTDKPDIPALRRKIETLNAKKRRAVDLMLDGLITQQELIEQKSYYDSIIEKLSQEISSDRSVFETDKIRKNAERFLDFTSDPLWLLVIRADYIHGTLTVYLKGIEKGFTTCFTATGRGDSYRVITGNTVRSQGIIPGTMQVQKNWFHHDVNDKLIKKSAPDIFQVHFVLICRLFCSLCVAGHSAPTL

SEQ ID NO: 1810 - protein, 558 aa, Unknown
  Description of Unknown: Integrase B1811 sequence
  PTHR30461:SF3,SM00857,G3DSA:1.10.10.2600,IPR036162,PF13408, PS51737,IPR025827,G3DSA:3.40.50.1390,IPR006119,IPR038109, PF07508,IPR011109,SSF53041,PTHR30461,Coil, PS51736,cd00338,PF00239
MRSIEICDNKCGEKMMQTLAQGEMRVVVIPAKSSEENKQAAKCLRVAAYCRVSTDDEEQKTSYEAQIGYYTEKINQNPEWQMAGIFADEGISGTQAKKRPEFLKMIRLCRQRKIDIILTKSLSRFARNTVDSLGYIRELRALGIAVISEKENINTLTAESEMLITIMSCFAQAESESISKNVSWGVRQSFKNGNVPMQYARLLGYRKGHDGNAEIIPEEAEVVKEIYRCYLDGMSMNLIADRLNEKGLTTKGGSSPYRKTVVQRILTNEKYTGDALLQKTYVTDCITKKTRKNNGELPMYLVKNHHEPIISRTDFNRVQEEMARRSAKRTIADKLTKTGQGKYSAKYALSELLICGECGEHYRRVTWTAKGFKEIKWRCVSRIQYGKKKCHSSPTVDEQAFHRAIVSAINEFCEVKDDVAKALRESIIEALDQNQNGSVHAAQQRIDELARNMDELIKLATVPETAENAMSDIAKFSEEMKMLREFIETEKAKQAATQRGSDEVNTILERLGQEDFTLIEYDDVAARQLIEKITVASKDAITVRFKGGFEIRKDLNGN

SEQ ID NO: 1811 - protein, 558 aa, Unknown
  Description of Unknown: Integrase B1812 sequence
  PTHR30461:SF3,SM00857,G3DSA:1.10.10.2600,IPR036162,PF13408, PS51737,IPR025827,G3DSA:3.40.50.1390,IPR006119,IPR038109, PF07508,IPR011109,SSF53041,PTHR30461,Coil, PS51736,cd00338,PF00239
MTNAVIYARYSPGPNQTDQSIEGQIHECTRFCEDNDLRIVGTYIDRKQTGRNDNRADFQKMLRDSSRHGFSTVVVWKIDRFGRNREEIAKNKAVLRMNGVRVLSAKEHIPDGPEGIILESVLEGLAEYYSANLSQNIKRGMRESALKCQFNGSGLSTGYTVDADHKYRIDPDGAAVVRTIFEMYDGGKKIADILRYLQQSNIKTMRGKEYTHYGISRILRNRVYIGEYHWHDIVVPGGVPQIIDNDLFDRVQKRLEANKHAPAARRGDVDFLLTSKLICGNCKSTMIGDCGTGKNGARWYYYTCRAKKTKSSKCRKKSVPKEALEREVTALTAAYVLRDDVIDYIADKVVEIQKSEHDDKSMLRYFESQLKDTNKAIANIMRAIEAGIITETTRSRLEELEDTKRDLETEIIKEKVARPTIEREQVIFFLEKFRGGNVDDKEYQRKIIDTFVHKVILYDDKITITYNYSTDSTKNAENTVESIESAASAAECKCSNKPSSSPPVTRILLLQCSCYFFRRGSNRMVLRSRIPSVRWTVGKSACVSAHGSAPSDPLRLHQ

SEQ ID NO: 1812 - protein, 558 aa, Unknown
  Description of Unknown: Integrase B1813 sequence
  PTHR30461:SF3,SM00857,G3DSA:1.10.10.2600,IPR036162,PF13408, IPR025827,G3DSA:3.40.50.1390,PS51737,IPR006119,IPR038109, PF07508,IPR011109,SSF53041,PTHR30461,PS51736, cd00338,PF00239
MNKLRAAAYCRVSTDRAEQSGSLASQRSFFDDYIRNSDSMTLVGVFYDEGTSGTTTLNRYGFNKMISLAVSGGIDIILTKEVSRFARNTVDTLNITRMLRAKGVGIIFINDNIDTRDSDGELRLSIMATIAQEESRKISERVKWGQQRKMEQGVVFGRSCLGYDVKDGKITVNADSAEIVKRIFTEYTVLLKGAESIADGLNAEQIRTVNGGRWSGAFIRKVLRNVKYVGDLEQKKTCTPDFLTHKKRLNSSEHIYIRNHHEPIISRELWEQTQAEISRRKPTDTSRHSDRYVFSGKVYCGVCGSVMVSRVKTLKNGKIYHALRCSGRIGGKSCNNETLNVTALKACVKRIFTDIPIDKTSVINAVIKGLSRTDKPDIPALRRKIETLNAKKRRAVDLMLDGLITQQELIEQKSYYDSIIEKLSQEISSDRSVFETDKIRKNAERFLDFTSDPIWLLVIRADYIHGTLTVYLKGIEKGFTTCFTATGRGDSYRVITGNTVRSQGIIPGTMQVQKNWFHHDVNDKSIKKSAPDTFQVHFVLICRLFCFLFVAGYLAPTL

SEQ ID NO: 1813 - protein, 557 aa, Unknown
  Description of Unknown: Integrase B1814 sequence
  PTHR30461:SF3,cd00338,SM00857,G3DSA:1.10.10.2600,IPR036162, PF13408,PS51737,G3DSA:3.40.50.1390,IPR025827,IPR006119, IPR038109,PF07508,IPR011109,SSF53041,PTHR30461, PS51736,Coil,PF00239
MARKKNIAAGQNAVIYARYSSHNQREVSIEQQVRECMKHAAELGLHVVGTYEDRAISGKTDKRPNFQRMMRDAEKGKFQAVVAWKSNRIGRNMLQAMVNEAKLEDCGVKVFYAEEDFDDTAAGRFALRNMMNVNQFYSENMAEDITRGLYDNASKCMANGRQPLGYKRGEDGRVVLDEANAAVVREIFTRVAAGDLFVDIARDLNAQGIKTSKGVNWNKGSFQSICQNERYRGIYIYGDVRVADGIPRIVSDDLWYRVQEAMRMKKNPVGTRHRVGAEDYLLTGKLRCGHCGSYMTGVSGTSRNGELHYYYTCQKRRTEHACDKKNIRRDVIEPAVAQAIKMYCLTDDVIAWIADRTVEYWEKHDNDLQIEALEQQLEENKKATSNMLKAIEMGIITEATRTRMVELETEQSRLSVQLNVAKEDVVKIDREQIISYLELLQQGDIHDRDFQMELFKNFLVAVYVYDDNRMKLVFSCMGDQNSVEIPLETGEDPPDGGLSPDAKMFVLTPDSSTKKALYFVGSMVLFFFIPVKRSGVHRSPCRRASDTPDLNRNRYLI

SEQ ID NO: 1814 - protein, 557 aa, Unknown
  Description of Unknown: Integrase B1815 sequence
  PTHR30461:SF3,SM00857,G3DSA:1.10.10.2600,IPR036162,PF13408, PS51737,G3DSA:3.40.50.1390,IPR025827,IPR006119,IPR038109, PF07508,IPR011109,SSF53041,PTHR30461,PS51736, cd00338,PF00239
MAKKRYDLRPVRTVCIYARYSPGSRQTDQSIEGQLRVCQEYAEQHDYRIIQTYADKHKTGTNDDREAFRQMIKDSEKGLFDAVLVWKSDRFGRNMEDMVLNEMRIKRNGVSLISCTEPVADGPLGGMQKAMLMGMAEFYSATNAENVRRGLLESARKCQITSGAIPFGYKAGEDKRFYTDPINAAAVLEIFQRYDGGELLTHIMDDLNKKGIRSHKGKPLTRSSMYSILRNERYTGVYIYADIRVEGGMPQIVPKDLYERVQIKLGKNKHAPARAKAAEPFILTTKCFCGQCGGPMAGESGTSKTGAKHYYYGCVHHKNSRDKSKACQKKPVRKDFLERLVIDTTLDVALHKENIQSIAADLCAWQQRQKDTAILDGLKSRRRECEKAIGNLVAALEAGAASPTIAARVRDREEELENIKFAIAEQELVQEKFDEKKIMYFLSKVPEGDRTDINYMQRIVDTFINSVFVYDDRVVICYNFDGDGSKITVNDVDKAMQEAEDRENRQITQEAPGQGGSCVESDDSKCSPYGGLVQGNEPKANSILFFQRAFGIIVKLQ

SEQ ID NO: 1815 - protein, 557 aa, Unknown
  Description of Unknown: Integrase B1816 sequence
  PTHR30461:SF3,IPR036162,PS51737,IPR011109,PTHR30461, PF00239,G3DSA:1.10.10.2600,IPR006119,SSF53041,cd00338, SM00857,IPR025827,IPR038109,mobidb-lite,PS51736, PF13408,G3DSA:3.40.50.1390,PF07508,Coil
MAQQKKAAGAEFDGTPRAVIYARYSSTHQRERSIEDQIADCRAYAERCGLMVVGMYADRAISGKTDERPDFQRMIDDSKKRQFDRVIVWKLDRFARNRYDSALYKHKLKQNGVSVLSAMENIGEGDESIILEAILEASAEYYSRDLRKKVLRGMTTSAKKGLHNTGSVPYGYRLEGEIAIPDGDRAEFVKHVFEAYAKGETPAELYREMQRRGLDTKVNGRKVSDNIIGSILRNEKYTGRGMWRGIPVEWPRLIDDDLFEAARARTEKNRRAPAAYKAAEPFILCGKAFCGYCGAPLMSGGGKGRSGKYYRHYICRTKKRERACGKKTEDKDFLEWYIVEQTCAYVLAPERLEYIADRVVECYKESFDGQRVSALEARIAKLDRDLDKTTDLLFAAPSAAAVDRINKHVVELEAQKSELEAELSGLKIAAAITYTRDEVVAWLKQFCNGDPLEAEFRRRIVETFINSVYVYDDRIVIYFNVRGGKQISYAEMLESVGDVEPLPPGPENKKSGCPDNGTAANNSKERFLHGKNTEQTTESAVRFCSGLVHQKALLHLR

SEQ ID NO: 1816 - protein, 557 aa, Unknown
  Description of Unknown: Integrase B1817 sequence
  SM00857,G3DSA:1.10.10.2600,IPR036162,PS51736,PS51737, G3DSA:3.40.50.1390,PF13408,IPR025827,IPR006119,IPR038109, PF07508,IPR011109,SSF53041,PTHR30461,Coil, mobidb-lite,cd00338,PF00239
MEELDTRPVADILARYSTDNQNPVTIDVQVEKCREWCERNGYQVGKIFSDEAVSGMKETRAGYEACMMHLGMGGAQLVVVYDQSRMFREFTEWFQFRKDVDMLGARVASVTQPMVGGDLKDPAVFINEAATAMLNHAQVLITRQKTIDALKHNAREGKSSGGKPPLGYDLDKDKKYVVNEHEAEAVRLVFQLFARGFSYGEIIDELNSRGYLTKRGQPFGKNSIFDLLKNEKYIGRLVYGATKAQADGRWNSHAKSKEDAIVVENGVPAIIEQELWEQVQSRIRTRKGAGGRYSAKREYLLTGRVFCGDCGASMVVMGSKASGYQYYECNNKRRTHTCKMKNVRTEWLEQTVAASIKQMLTEPANIEMLVDVARDQERQITTEYDTRRAGLASRYTRVCRQLENGVNALLEGVVSAELKEKVRRLEEEKAEIEAETAELNQYKGYVGLDDATIRRCVENVAKVDIDTPEGLKLILSVVSRVNIHTDTIEIKTLISTDGTDPDPTKSRPQNLELFPSEGLSGEKYHTTPENGSGHQMKTALYSQKRLYSAFFYAFKML

SEQ ID NO: 1817 - protein, 557 aa, Unknown
  Description of Unknown: Integrase B1818 sequence
  PTHR30461:SF3,cd00338,SM00857,G3DSA:1.10.10.2600,IPR036162, PF13408,PS51737,G3DSA:3.40.50.1390,IPR025827,IPR006119, IPR038109,PF07508,IPR011109,SSF53041,PTHR30461, PS51736,Coil,PF00239
MKMPIDLSSLTPAERTLFDSCPEALDSGCETVCCFYLRYSSDKQTEQSIEGQLRDLLDFCKRMGYRCAAVYVDRAISAHASMEKRPAFQQMLTDSARSEWTIVLVWKLDRFARRREDAAIARMRLRKNGCTVESAKENISKNPEGVILESLLEGMAEYYSAELSQKVKRGMRETALKGSSTGGVIPLGYKSVNKRLELDPVYAPIVKEMFERYAAGETATSIMRDLNARGYRTAKNMEFRGSTFSRIMANKKYIGICRYGDVYTEDVIPPIIDKELFDAVQKKLKQVAEAPAKTKAKVPYLLSQKIFCGHCGNNMFGESGRGKQGRIYHYYACYSKKRGKGCRKKNLQKDWIEGIVAEQARAMLTDEVIDHIATMAEKQSEEAYRATSKAPALQKEIKENETKIRNLTAAIEASGATSSYLISRIAELEGQTKALQTELAKEEDNTIRLTKDKVVFWLEKVRDKVAAVGDQTAMLLDLLVNSVTVWDDGPDGITIKTAFNITGLPEKTYKVPAGSPPSGGEMCSDLMASGSPNATHPNPTITFIGFLLVQTQRYSLP

SEQ ID NO: 1818 - protein, 557 aa, Unknown
  Description of Unknown: Integrase B1819 sequence
  PTHR30461:SF3,SM00857,G3DSA:1.10.10.2600,IPR036162,PF13408, IPR025827,G3DSA:3.40.50.1390,PS51737,IPR006119,IPR038109, PF07508,IPR011109,SSF53041,PTHR30461,Coil, PS51736,cd00338,PF00239
MNRYGKRCVLYPRVSTEMQVDGYSLEGQKNMLTRFADREEMIVVDTYEDAGKSGKSIEGRPAFQKMLRDIEDGLDIDYILVYKLSRFGRNAADILNSLELVQSYGVNLICIEEGIDSSQTSGKLLISVLSAVAEIERENIIEQTMNGRREKARQGGWNGGFAPYGYTLEDNKLMIEETEAVAIRKIFELYTSSEIGLGGIANQLNLQGIRKIPRQNGTLEDWTGHFIKLILDNPVYCGKIAYGRRTKEKVKGTKNDYQMKRNDDYILTEGQHKGIVSEEVWEKAHAKRLRTGVKQPSKIGRDRVHLLSGLLKCPVCGSPMYTNKHAWTNKDGTYKEIYYYVCSRNRMVRGKHCEYKAMLKKTDIEPMVIEAIREIVRNEEYAQAIKKRIGVQIDTKAVDKELEGYQAKLKEVDLNKTRLEREIDSLPADAKYRERKLHDMTLRLDSLYDVIVELEEKIEDARLRRDAIKQQAITLENIYKIMVNFDCVYNIINDEEKRNVVTALIKEIEIYRNDESEYPLKRIGLNFPVFKDGGEVTELLWDKGNTVETVALITRIK

SEQ ID NO: 1819 - protein, 557 aa, Unknown
  Description of Unknown: Integrase B1820 sequence
  cd03768,SM00857,G3DSA:1.10.10.2600,IPR036162,PF13408, PS51737,SSF109709,IPR025827,G3DSA:3.40.50.1390,IPR006119, IPR038109,PF07508,IPR011109,SSF53041,PTHR30461, PS51736,PF00239
MNTVRCAIYTRKSTEEGLDKEFNTLEAQRESGENYVKSQSYQGWEIIPTRYDDGGFSGGNLNRPALQQLMSDVENGLVDMIVVYKIDRLTRSLVDFAKLVAVLDEHHCSFVSVTQNFNTYDSMGRLTLNVLLSFAQFEREVITERIRDKISASKKKGMWMGGCLPIGYDTVNKKLVVNEAEAAVVRLIFEKYLVMRSEIAVSDWLNAHGYTTMGKTGSKQFNHQRVNKILRNVIYIGKVPHKTAVYDGQHEAIVSQEIFDEVQEIKKTNRGGRLALSRFVEHSLLKGYIYCDCCHSAMVATNSNKKNKVYGYYSSVRVIKEGYKQCQVGNIPAGELDNFILEQMEAIIRSPKIVAGLISEAKITNPDVNDVQIIGKVKREKEFIHHLSSLTQRQLLMLLIKKVRVDVDRIKIIYTDLALSLMNEEMKAKLSANNLDGKENEILYRVKLRRRRGSLKIFAPEDYKPDENNALFMALIKAYKWREQMNKKGWFIDDIAKNEGLSREYVGKVLRMNYLAPDIVTAIVDGVYPKKMSLNRIFEKEIPLLWSEQRIKYGFGD

SEQ ID NO: 1820 - protein, 557 aa, Unknown
  Description of Unknown: Integrase B1821 sequence
  PTHR30461:SF3,SM00857,G3DSA:1.10.10.2600,IPR036162,PF13408, PS51737,G3DSA:3.40.50.1390,IPR025827,IPR006119,IPR038109, PF07508,IPR011109,SSF53041,PTHR30461,Coil, PS51736,cd00338,PF00239
MPRKKKLQEVGGLRLVAYYRYSNGGQQTEQSIEGQRRDCEAYAKAHGYKIVHEYIDRHISGKSDSRPAFQQMISDSDSHLFDAVICWKTDRLARSRYDSIIYKTRLRRNGVKILYAAETVVDGPEGIIIEGLMESLAEYYSAELAQKLRRGQRESALKCIALGGNRSFGYDIGPDKHYCINEKQAPAVRYIFEQYAAGATAADIVRELTARGYRTSRGNPFNKNSICRIITNEMYLGVYKYADIRIEGGVPAMIDRELFNRCQTQLAFNRAHGGGKGAPRADYVLVGKLDCGLCGHAMKGASATGHTGSKHYYYTCTQHVEKKCPKTSIEKSYLEQIIVDGVAKYVLTPEKISQIVDCMMELQAKEQEPKGNPEKDALEAELAECRRKQNNILEAIEEGGSARLAARLRALEEQEAQLTFALGEINNAPAPPQFSREALTFMFEQFRREEDEVDEEYRRRILDTFVSSILLYEDRAEVKFNITDQKTGDFERVILPISANKKPPEDDDIPSNSEGSTALRLVEAMGVELITGDSTWKIFDFDPQIGPLLWMKIPLTE

SEQ ID NO: 1821 - protein, 557 aa, Unknown
  Description of Unknown: Integrase B1822 sequence
  PTHR30461:SF3,IPR036162,PS51737,IPR011109,PTHR30461, PF00239,G3DSA:1.10.10.2600,IPR006119,SSF53041,cd00338, SM00857,IPR025827,IPR038109,PS51736,mobidb-lite, PF13408,G3DSA:3.40.50.1390,PF07508,Coil
MPRAAQAAGAVFDGTPRAVIYARYSSTHQRERSIEDQIADCRAYAERCGLMVVGIYADRAISGKTDERPDFQRMIDDSKKRQFDRVIVWKLDRFARNRYDSALYKHKLKQNGVSVLSAMENIGEGDESIILEAILEASAEYYSRDLRKKVLRGMTTSAKKGLHNTGSVPYGYRLEGESAIPDGDRAEFVKHVFEAYAKGETPAELYREMQRRGLDTKVNGRKVSDNIIGSILRNEKYTGRGMWRGIPVEWPRLIDDELFEAARARTEKNRRAPAAYKAAEPFILCGKAFCGYCGAPLMSGGGKGRSGKYYRHYICRTKKRERACGKKTEDKDFLEWYIVEQTCAYVLAPERLEYIADRVVECYKESFDGQRVSVLEARIAKLDRDLDKTTDLLFAAPSAAAVDRINKHVVELEAQKSELEAELSGLKIAAAITYTRDEVVAWLKQFCNGDPLEAEFRRRIVETFINSVYVYDDRIVIYFNVRGGKQISYAEMLDSAGDVEPLPPGPENEKSGGPDNGTAASNSKERFLHGKNTEQTAGSAVRFCSGLVHQKALSQMR

SEQ ID NO: 1822 - protein, 557 aa, Unknown
  Description of Unknown: Integrase B1823 sequence
  PTHR30461:SF3,cd00338,SM00857,G3DSA:1.10.10.2600,IPR036162, PF13408,IPR025827,G3DSA:3.40.50.1390,PS51737,IPR006119, IPR038109,PF07508,SSF53041,IPR011109,PTHR30461, PS51736,Coil,PF00239
MNPVDKIAVVYARYSSHGQTEQSIEGQIAAAQKYAEQHGYTIIHVYADRAMTGRNDDREQFQKMLSDTAMHQFGVILLWKIDRFGRNREEIAFNRYRCKKNGVRVERVAEDVPDGPEGVILDSVLEGMAEYYSLQLAQNVRRGQRESAKKSMSIGGNKMLGYIVNPETKRYESDPKTASYVTEIFKRYANGETISEIVAWLNAQGIRTTRGSEFTVNSLHRLLKNEKYTGVYIFHDIRNEGGMPALTDRATFDKVQEMLKVNRRAPARVWSKTEYLLTDKLFCGHCGEMMVGESGHGRNGIKHSYYTCLNRKKKKSCDKKPVRQDVIEPLVLRAIGKLLENPATLENITDQVWAAYERSDTSGDTIKALDKQIADVDRALSNVMKAIELGIVNEMTKTRMDELTNQKQALSTARAEAGLAEGFKLTRDMILFFLQELSALDMADRDGQKRLIKTFVNAIYLYDDHFDIAFNYTDNGNVVVRIQEINDAARGEVFGHCAQSPTKKNPQLRLRVLFCAGAGRIRTGRPSADGKKQSCGLFFRPRLANPPAPTKKLWQRY

SEQ ID NO: 1823 - protein, 557 aa, Unknown
  Description of Unknown: Integrase B1824 sequence
  PTHR30461:SF3,IPR036162,PS51737,IPR011109,PTHR30461, PF00239,G3DSA:1.10.10.2600,IPR006119,SSF53041,cd00338, SM00857,IPR025827,IPR038109,mobidb-lite,PS51736, PF13408,G3DSA:3.40.50.1390,PF07508,Coil
MPRAAQAAGAAFDGTPRAVIYARYSSTHQRERSIEDQIADCRAYAERCGLMVVGIYADRAISGKTDERPDFQRMIDDSKKRQFDRVIVWKLDRFARNRYDSALYKHKLKQNGVSVLSAMENIGEGDESIILEAILEASAEYYSRDLRKKVLRGMTTSAKKGLHNTGSVPYGYRLEGESAIPDGDRAEFVKHVFEAYAKGETPAELYREMQRRGLDTKANGRKVSDNIIGSILRNEKYTGRGMWRGIPVEWPRLIDDELFEAALARTEKNRRAPAAYKAAEPFILCGKAFCGYCGAPLMSGGGKGRSGKYYRHYICRTKKRERACGKKTEDKDFLEWYIVEQTCAYVLAPERLEYIADRVVECYKESFDGQRVSVLEARIAKLDRDLDKTTDLLFAAPSAAAVDRINKHVVELEAQKSELEAELSGLKIAAAITYTRDEVVAWLKQFCNGDPLEAEFRRRIVETFINSVYVYDDRIVIYFNVRGGKQISYAEMLDSAGDVEPLPPGPESKKSGGPDNGTAASDSKERFLHGKNTEQTAESAVRFCSCLVHQKALLHLR

SEQ ID NO: 1824 - protein, 557 aa, Unknown
  Description of Unknown: Integrase B1825 sequence
  PTHR30461:SF3,SM00857,G3DSA:1.10.10.2600,IPR036162,PF13408, IPR025827,G3DSA:3.40.50.1390,PS51737,IPR006119,IPR038109, PF07508,SSF53041,IPR011109,PF00239,PTHR30461, PS51736,Coil,cd00338
MFIDDNRPKRVAAYCRVSTDKTDQANSLVSQQRYFSEYINRNPLWELYDIYVDDGISGTNTKKRAAFNHMIEDAVNGKFDLIITKEISRFARNIVDSITYTRELKKHGVGVLFLSDGIYTLDSDGELRLALISTIAQEESRKTSERVKWGQRRQMEKGVVFGKDMLGYDVRNGKLFINEEGAETVRKIFHKFLDEGKGVHRIAKELREEGVKTAARMKDWSYTNILRILRNEKYCGDLVQQKTYTPDYLTHQKKRNYGEVETVTIRDHHEPIISRERFEAVQRELKRRRPSESTIKAYANRYALSGKIICGECGAGFVRRQKKRKDGTFNVKWVCAESRKNGGSHQEKDGETAGCTTNSISDRDIKQILQRVVADTMNGREELVSKLLQTVESVIKTVSGNDDLYRIEKETEKCAEKKKRLLDMCLNGYIEAKDYRAACDALETQIAELQSALVKEKEKQKMIADKEKLIEDIKKFISNISCGAEWNDAFYRNIVDKIVVYKGRKMDIHLKFIPDRWQVQILAGVKEINAYESKMRASVCSAPISVSRPFNSGSGIE

SEQ ID NO: 1825 - protein, 557 aa, Unknown
  Description of Unknown: Integrase B1826 sequence
  cd03768,SM00857,G3DSA:1.10.10.2600,IPR036162,PF13408, IPR025827,SSF109709,G3DSA:3.40.50.1390,PS51737,IPR006119, IPR038109,PF07508,SSF53041,IPR011109,PTHR30461, PS51736,PF00239
MKTIKCAIYTRKSTDEGLDKEFNTLEAQRESGENYIKSQMHQGWQIIEKHYDDGGFSGGTLKRPALQELLQDVENGEVNMIVVYKIDRLTRSLIDFAKLVEVLDRNQCSFVSVTQNFNTYDSMGRLTLNVLLSFAQFEREVITERIRDKVDASKKKGMWMGGNIPIGYDAINKKLVINSKEAPVVKLAFEKYLVLRSEVAVANWLNLNGYTTMSKGNNGKFNHLRISKMLRNVIYIGKIPHKDKIYDGQHSAIISEELFNEVQKIKNTNRAGRLTPSRFFEHALLKGLIECDCCHAAMVSTKSNKHNKIYEYYTSVRAVKDGYKNCLVGNIPAGEMDNFVLTQLADIIKSPKILSGLIEEAKIKRPDICDIQIINKLGDGIDFIHRISPIVQRQLVELFIKKVRVNTNRIKIIYTKTAIELMDNNMRDNLFPNNIDGEENEIMYHVELHKKRGSVKIFEPETYKPDLYNPLYLALIKAFKWQEIIRTEHLTFEEVAEREKLSREYVGKIMKMTYLAPDIITSIVDGSYPKTLSINKIVESEIPILWTEQRIKYGFTA

SEQ ID NO: 1826 - protein, 557 aa, Unknown
  Description of Unknown: Integrase B1827 sequence
  PTHR30461:SF3,cd00338,SM00857,G3DSA:1.10.10.2600,IPR036162, PF13408,IPR025827,G3DSA:3.40.50.1390,PS51737,IPR006119, IPR038109,PF07508,IPR011109,SSF53041,PTHR30461, PS51736,Coil,PF00239
MKMQIDLSALTPAERTLFDGCPEALDSGCETVCCFYLRYSSDKQTEQSIEGQLRDLLDFCKRMGYRCAAVYVDRAISAHASMEKRPAFQQMLTDSARSEWTIVLVWKLDRFARRREDAAIARMRLRKNGCTVESAKENISKNPEGVILESLLEGMAEYYSAELSQKVKRGMRETALKGASTGGVIPLGYKSVNKRLELDPVYAPIVKEMFERYAAGETATAIMRDLNARGYRTQHNMEFRGSTFSRIMANKKYIGICRYGDVYTEDVIPPIIDKELFDAVQKKLKQVAEAPAKAKAKVPYLLSQKIFCGHCGSNMFGESGRGKQGRIYHYYACYSKKRGKGCRKKNLQKDWIEGIVAEQARAMLTDEVIDHIATMAEKQSEEAYRATSKAPALQKEIKENETKIRNLTAAIEASGATSSYLISRIAELEAQTKALQSELVKEEGNTVRLTKDKVVFWLEKVRDKVAAVGDQTAMLLDLLVNSVTVWDDGPDGITIKTAFNITGLPEKTYKVPAGSPPSGGEMCSDLMASGSPDATHPNPTITFIGFLLVQTQRYSLP

SEQ ID NO: 1827 - protein, 557 aa, Unknown
  Description of Unknown: Integrase B1828 sequence
  PTHR30461:SF3,cd00338,SM00857,G3DSA:1.10.10.2600,IPR036162, PF13408,PS51737,G3DSA:3.40.50.1390,IPR025827,IPR006119, IPR038109,PF07508,IPR011109,SSF53041,PTHR30461, PS51736,Coil,PF00239
MKMQIDLSALTPAERTLFDSCPEALDSGCETVCCFYLRYSSDKQTEQSIEGQLRDLLDFCKRMGYRCAAVYVDRAISAHASMEKRPAFQQMLTDSARSEWTIVLVWKLDRFARRREDAAIARMRLRKNGCTVESAKENISKNPEGVILESLLEGMAEYYSAELSQKVKRGMRETALKGASTGGVIPLGYKSVNKRLELDPVYAPIVKEMFERYAAGETATAIMRDLNARGYRTQHNMEFRGSTFSRIMANKKYIGICRYGDVYTEDVIPPIIDKELFDAVQKRLKQVAEAPAKTKAKVPYLLSQKIFCGHCGSNMFGESGRGKQGRIYHYYACYNKKRGKGCTKKNLQKDWIEGVVAEQARAMLTDEVIDYIATMAEKQSEEAYKATSKAPALQKAIKENEVKIRNLTAAIEESGATSSYLISRIAELEAQTKALQTELAKEEDNTIRLTKDKVVFWLEKVRDKVAAVGDQTAMLLDLLVNSVTVWDDGPDGITIKTAFNITGLPEKTYKVPAGSPPSGGEMCSDLMAYGSPNATYPNPTITFVGFLLVQTRRYSLP

SEQ ID NO: 1828 - protein, 557 aa, Unknown
  Description of Unknown: Integrase B1829 sequence
  SM00857,G3DSA:1.10.10.2600,IPR036162,PF13408,IPR025827, G3DSA:3.40.50.1390,mobidb-lite,PS51737,IPR006119,IPR038109, PF07508,IPR011109,SSF53041,PTHR30461,Coil, PS51736,cd00338,PF00239
MNEQNKWPIADILARYSTDNQNPVTIDVQVEKCREWCERNGYQVGKIFSDEAVSGMKETRAGYEACMMHLGMGGAQLVVVYDQSRMFREFTEWFQFRKDVDMLGARVASVTQPMVGGDLKDPAVFINEAATAMLNHAQVLITRQKTIDALKHNAREGKSSGGKPPLGYDLDKDKKYVVNEHEAEAVRFVFQLFARGFSYGEIIDELNSRGYLTKRGQPFGKNSIFDLLKNEKYIGRLVYGATKAQADGRWNSHAKSKEDAIVVENGVPAIIEQELWEQVQSRIRTRKGAGGRYSAKREYLLTGRVFCGDCGTSMVVMGSKASGYQYYECNNKRRTHTCKMKNVRTEWLEQTVAASIKQMLTEPANIEMLVDVARDQERQITTEYDTRRAELASRYTRVCRQLENGVNALLEGVVSSELKEKVRRLEEEKAEIEAETAELNQYKGYVGLDDATIRHCVENVAKVDINTSEGLKLILAVVSRVNIRTDTIEIKTLISMDGTDPDPTKSRPQHLELFPSESASGEKYHTTPENGSGHQMKTALYSQKRLYSAVFYAFKML

SEQ ID NO: 1829 - protein, 557 aa, Unknown
  Description of Unknown: Integrase B1830 sequence
  PTHR30461:SF3,IPR036162,PS51737,IPR011109,PTHR30461, PF00239,G3DSA:1.10.10.2600,IPR006119,SSF53041,cd00338, SM00857,IPR025827,IPR038109,PS51736,mobidb-lite, PF13408,G3DSA:3.40.50.1390,PF07508,Coil
MARKKNIAAGLDAVIYARYSSHNQREVSIEQQIAECTKHAAALGLRIVGTYEDRAISGKTDNRPRFQQMMRDAEKGKFQAVVAWKSNRIGRNMLQAMVNEAKLDDYGVKVFYAEEDFDDTAAGRFALRNMMNVNQFYSENMAEDITRGLYDNASKCMANGRQPLGYKRGEDGRVVLDEANAAVVREIFTRVAAGDLFVDIARDLNAQGIKTSKGANWNKGSFQSICQNERYRGIYIYGDVRVADGIPRIVSDDLWYRVQEAMRMKKNPVGTRHRVGAEDYLLTGKLRCGHCGSYMTGVSGTSRNGELHYYYTCQKRRTEHACDKKNIRRDVIEPAVAQAIKMYCLTDDVIEWMADRTVEYWEKHDNDLQIEALEQQLEENKKATSNMLKAIEMGIITEATRTRMVELETEQSRLSVQLNAAKEDVVKIDREQIISYLELLQQGDIHDRDFQMELFKNFLVAVYVYDDNRMKLVFSCMGDQNSVEIPLETGEDPPDGGLSPDAKMFVLTPDSSTKKALYFVGSTVLFFFVPTKRSGVHRSPCRRASDTPDLKRNRYPI

SEQ ID NO: 1830 - protein, 557 aa, Unknown
  Description of Unknown: Integrase B1831 sequence
  PTHR30461:SF3,SM00857,G3DSA:1.10.10.2600,IPR036162,PF13408, PS51737,G3DSA:3.40.50.1390,IPR025827,IPR006119,IPR038109, PF07508,SSF53041,IPR011109,PF00239,PTHR30461, PS51736,Coil,cd00338
MSSVDKIAVIYARYSSHGQTEQSIEGQIAAAQKYAEQHGYTIIHIYADRAMTGRNDDREQFQKMLSDTAMHQFGVILLWKIDRFGRNREEIAFNRYRCKKNGVRVERVAEDVPDGPEGVILDSVLEGMAEYYSLQLAQNVRRGQRESAKKSMSIGGNKMLGYVVNPETKRYESDPKTASYVTEIFKRYANGETISEIVAWLNAQGIRTTRGSEFTVNSLHRLLKNEKYTGVYIFHDIRNEGGMPALTDRATFDKVQEMLKVNRRAPVRVWSKTEYLLTDKLFCGHCGAIMVGESGHGRNGTKHSYYTCLNRKKKKSCDKKPVRQDVIEPLVLRAIGKLLENPATLENIADQVWAAYERSDTSGDTIKALDKQIADVDRALSNVMKAIEMGIINEMTKTRMDELTNQKQALSQSRAEAGLTGGFKLTRDMILFFLQEMAALDMADRDSQKRLIKTFVNAIYLYDDHFDIAFNYTDNGKVAVRMQEINDAASGEVFGCCAQSPTKKNPQLRLRVLFCAGAGRIRTGRPSADGKKQSCGLFFRPRLANPPAPTKKLWQRY

SEQ ID NO: 1831 - protein, 557 aa, Unknown
  Description of Unknown: Integrase B1832 sequence
  PTHR30461:SF3,SM00857,G3DSA:1.10.10.2600,IPR036162,PF13408, IPR025827,PS51737,G3DSA:3.40.50.1390,IPR006119,IPR038109, PF07508,SSF53041,IPR011109,PF00239,PTHR30461, PS51736,Coil,cd00338
MKKARTKCYIYTRVSTAMQVDGYSLDAQREKLRKYADYEDMVIAGEYSDEGFSGKNIQGRHEFQQMLRDVQDCKDGVSYVLVFKLSRFGRNAADVLNSLQLMQDFGVNLICVEDGIDSSKDSGKLMISVLSAVAEIERENIRAQTMAGREQKAREGKWNGGFAPYGYRLENGELSIADDEVEVIRVIFDRFIHTNDGVAGIARYLNTHGYVKKLRQNGTIPKFSAVFVRGILDNPIYCGKIAFGRRKVEKKLGTRNEMHVVKQSEFPVYVGQHEAIVSEDDWNLAQTKRQRTTGRREKVRDPDHAHILSGILKCPCCGRNLYGNVSKAHSKDNKTRYYYFCKSIKGQTGHECSFRLNIEQNEINQMVASIVSAMVHDPRFVDAIKEKIGSAVDTSELEHQSETIKAQLRQRLSTKSRLEHQMDTLDFNDPYYDRKSLDLQRRYDEQYELIEDMEAQLAEIQGQIDDIHQEKITADNIYHLLLAFDEVYNAATEVEQKEFMRAFIEHIDIFPEKQPDGNWIRNIVFAFPVPYNRKEIREFPLESQSTVEAIVSLRREI

SEQ ID NO: 1832 - protein, 557 aa, Unknown
  Description of Unknown: Integrase B1833 sequence
  PTHR30461:SF3,cd00338,SM00857,G3DSA:1.10.10.2600,IPR036162, PF13408,IPR025827,PS51737,G3DSA:3.40.50.1390,IPR006119, IPR038109,PF07508,SSF53041,IPR011109,PTHR30461, PS51736,Coil,PF00239
MARKKNIAAGLDAVIYARYSSHNQREVSIEQQIAECTKHAAALGLRIVGTYEDRAISGKTDNRPRFQQMMRDAEKGKFQAVVAWKSNRIGRNMLQAMVNEAKLDDYGVKVFYAEEDFDDTAAGRFALRNMMNVNQFYSENMAEDITRGLYDNANKCMANGRQPLGYKRGADGKVMLDEPAAAVVREIFTRVAAGDLFVDIARDLNAKGIKTSKGATWNKGSFQSICQNERYKGIYIYGNVRIVDGIPRIVSDELWYKVQEAMRMKKNPVGTRHRVGAEDYLLTGKLRCGHCGSYMTGVSGTSRNGELHYYYTCQKRRTEHACNKKNVRRDVIEPAIAQAIKMYCLTDDVIEWVANRTVEYWEKHDNDLHIEALEQQLEENKKATSNMLKAIEMGIITDATRSRMIELETEQSKLAVQLNAAKADVVKIDRDDLIDELQIFRDMDVNNRSVQAELFKDFLVAAYIYDDNRLKLVFSFMGKDNSIEIPLETGEDPPDGEDSPDAKMFVLTPDCSTKKALYFVGSTVLFFFIPAKRSGVHRSPCRRASDTPDLNRNRYLI

SEQ ID NO: 1833 - protein, 557 aa, Unknown
  Description of Unknown: Integrase B1834 sequence
  PTHR30461:SF3,cd00338,SM00857,G3DSA:1.10.10.2600,IPR036162, PF13408,PS51737,G3DSA:3.40.50.1390,IPR025827,IPR006119, IPR038109,PF07508,IPR011109,SSF53041,PTHR30461, mobidb-lite,Coil,PF00239
MPKKPTKHPAKPKRGKKLEIEEPGVLYGRYSSHNQKDISVEQQFEKGYELAAEYGIKIIDTYADRAVSGRTDKRKDFQRMMSDATKGKFRYVIAWKSNRMGRNMLEALINEARLQELGVRVLYVEEDFDDTAAGRFAARSMMNVNQFYSENMAEDIRRGLYDNASNCMVANGHLPYGYKRDDTLHYVIDEPKAAVIREIFTRVAAGEPFVDIMSSLNARGIKTSYNRPWGRSSFQKILSNERYRGIYIYGDVRKEDGIPRIISDELFFKVQEVITTKKNPQGRHRVNGDYLLTGKLFCGKCKSPMVGISGTGRSGKLHYYYVCQKHRTEKTCDKKNVRRDEIEMQVAQAIKDYALKDDVIEWIADSTVAYNERKEAESKVGILEDQLAGTERGIKNIMSAIEQGIITETTKSRLVELESERATIKAKIAAARADIVTVSRDDIISGLEMFRDGDVHDKKYQARLFDTFLVAVYVYDNDLRLVFSFSGNKNTVQIPIESAVNAVENNEAECSFKLCSAPPKIPITLLGDWYFSFSLFPLHSSLTPCSFLSKLADLGNR

SEQ ID NO: 1834 - protein, 557 aa, Unknown
  Description of Unknown: Integrase B1835 sequence
  PTHR30461:SF3,SM00857,G3DSA:1.10.10.2600,IPR036162,PF13408, PS51737,IPR025827,G3DSA:3.40.50.1390,IPR006119,IPR038109, PF07508,IPR011109,SSF53041,PF00239,PTHR30461, PS51736,Coil,cd00338
MPRKKKLQEVGGLRLVAYYRYSNGGQQTEQSIEGQRRDCEAYAKAHGYKIVHEYIDRHISGKSDSRPAFQQMISDSDSHLFDAVICWKTDRLARSRYDSIIYKTRLRRNGVKILYAAETVVDGPEGIIIEGLMESLAEYYSAELAQKLRRGQRESALKCIALGGNRSFGYDIGPDKHYCINEKQAPAVRYIFEQYAAGATAADIVRELTARGYRTSRGNPFNKNSICRIITNEMYLGVYKYADIRIEGGVPAMIDRELFNRCQTQLAFNRAHGGGKGAPRADYVLVGKLDCGLCGHAMKGASATGHTGSKHYYYTCTQHVEKKCPKTSIEKNYLEQVIVDGVAKYVLTPEKISQIVDCMMELQAKEQEPKGNPEKDALEAELAECRRKQNNILEAIEEGGSARLAARLRALEEQEAQLTFALGEINNAPAPPQFSREALTFMFEQFRREEDEVDEEYRRRILDTFVSSILLYEDRAEVKFNITDQKTGDFERVILPISANKKPPEDDDATSNSEGSTALRLVEAMGVELITGDSTWKISDSDSKIVPLLWLKIPLTE

SEQ ID NO: 1835 - protein, 556 aa, Unknown
  Description of Unknown: Integrase B1836 sequence
  cd03768,SM00857,G3DSA:1.10.10.2600,IPR036162,PF13408, IPR025827,G3DSA:3.40.50.1390,PS51737,SSF109709,IPR006119, IPR038109,PF07508,SSF53041,IPR011109,PTHR30461, PS51736,PF00239
MKTIRCAVYTRKSTEDGLEKEFNTLEAQRESGENYIKSQAYQGWEIIPTHYDDGGYSGGTLKRPALQQLLKDVEAGMVDMIVVYKIDRLTRSLIDFSKLVEIFDRNQCSFVSVTQNFNTYDSMGRLTLNVLLSFAQFEREVITERIRDKVDASKKKGMWMGGVLPLGYVSVNKKLEIIPEEAKIVYLAFEKYLIFRSEIAVAEWLNNNGYTTLSKGNGKFTHMRVSSMLKNVLYIGKVPHKDKVYDGQHHAIISQELFDEVQKIKSQNRIGRLAPSRFVEHALLKGLIYCDCCQAAMISTKSNKKNKVYEYYTSFRAVKEGFNNCKIGSIPAGEMDNFVLLQIAGIIKSPKILSGLIEQAKIIRPDIKDVQIISKLQDGDDFIQRLSSITLRQLLIMLVQKIRVDVDRIKIMYTELAVSLMDDKMKDDLFPNNINGERNEILYRVCLRRKRGSLKIFAPEKYKPDENNPLYLALIKAFVWQDKMKKENLFIEDLAKSEGLSREYVGKVLHMTYLAPDIVTAIVDGVYPKTLSLRKILESEIPLLWSQQRLKYGFSF

SEQ ID NO: 1836 - protein, 556 aa, Unknown
  Description of Unknown: Integrase B1837 sequence
  cd03768,PTHR30461:SF3,SM00857,G3DSA:1.10.10.2600,IPR036162, PF13408,PS51737,G3DSA:3.40.50.1390,IPR025827,IPR006119, IPR038109,PF07508,SSF53041,IPR011109,PTHR30461, PS51736,Coil,PF00239
MNTIAIYTRKSKFTGKGESIENQIEKCKKFIEFKFNIDSENVNIFIDEGFSGKNENRPQYQLMMEKIKKKEIDSIVIYQLNRLGRNARDIHNTMQLCDDLGVIIYSATEGFDSSTSFGRAVIGILASLAQLEREQLAERVKDNMYTLAKMGRWLGGQSPLGFDGSREYYIDETGKERSITKLKKNEEELKLVKLLYDKYLEEKSLSQVGKWALINHLTGKNGGNLNKNAINVILQNPVYVKSSKEVFEYLSNEGYEVCGEPNGNGLLRYGKDDEPIVATAKHKGVIPSDQWIEVQKILKDNAYKAPRMGKTNTALLTGLLRCKCGSTMRISYGQKRKDGTKPFYYICNMKINSGGTRCNLKNLNGNLFEKNFIQFLKNYSKETLFTELQKLLNNSKDLESTISSNKIDVEIEKSNKAIKQILNKLKLTDDDELSKILLQEIKVENNKLKALSKQKEELLNDQSEVVITQSEVLAILDDLDNFQKTFDDLNLEDKQKALKSLIESITLTDDKFIVDFNIKKKLDNAINKLSSLFAKYKSSQLRHPCRSYMYRHPSWP

SEQ ID NO: 1837 - protein, 556 aa, Unknown
  Description of Unknown: Integrase B1838 sequence
  SM00857,G3DSA:1.10.10.2600,IPR036162,PF13408,PS51737, G3DSA:3.40.50.1390,IPR025827,IPR006119,IPR038109,PF07508, SSF53041,IPR011109,PTHR30461,Coil,cd00338, PF00239
MAYRKITDIRDTIGMRAVFYARVSTAEEEQLNAIELQIEENRGCIKDHGWKLVGEYIDRSKSGTMVKGRDDYQRLYEDLYEDLFDIVVIKDQERLQRNTLDWYLFINRVVQTGKLLFMYMDGKFYSPDDALITGVRAIIAEEFSRNLSKKLHNYHDHRIEKARQGQEIALQGSGNVYGWDKKDGKYYINPEQAKVRRLMCEGIMARKGSTLIAKELNDAGYRNTVGKPWKPMDIPKFVYDCKNVGTMIINKERHDFESKQTIKLPKEEWVYVENALPPIVTQEEWDLICKIHEERVIATGSDRRGKKTSGYSFSGKLVCGICGAPYWRKQRVSKDEYWVCSTKQTKGRRTRKRDSTMGKAGEINPLGCDNENISYNSLMEIMGVVSERLQANTDTIKHDMINWLTKLRKQLLEANGGHTEADLQRELSRKSKLLDAYLDGILNKQEYQKKAEELDERIIQLKAETEKNKANSGDIAEIDKVLANIDEEVSRYVDGNEKLKVEYLLEHLEQVQIFPDKVIVIVPILSEGIVVEKTQYVSREKRRRKNNFNKASYETL

SEQ ID NO: 1838 - protein, 556 aa, Unknown
  Description of Unknown: Integrase B1839 sequence
  SM00857,G3DSA:1.10.10.2600,IPR036162,PF13408,PS51737, G3DSA:3.40.50.1390,IPR025827,IPR006119,IPR038109,PF07508, SSF53041,IPR011109,PTHR30461,Coil,cd00338, PF00239
MAYRKITDIRDTIGMRAVFYARVSTAEEEQLNAIELQIEENRGCIKDHGWKLVGEYIDRSKSGTMVKGRDDYQRLYEDLYEDLFDIVVIKDQERLQRNTLDWYLFINRVVQTGKLLFMYMDGKFYSPDDALITGVRAIIAEEFSRNLSKKLHNYHDHRIEKARQGQEIALQGSGNVYGWDKKDGKYYINPEQARVRRLMCEGIMARKGSTLIAKELNDAGYRNTVGKPWKPMDIPKFVYDCKNVGTMIINKERHDFESKQTIKLPKEEWVYVENALPPIVTQEEWDLICKIHEERVIATGSDRRGKKTSGYSFSGKLVCGICGAPYWRKQRVSKDEYWVCSTKQTKGRRTRKRDSTMGKAGEINPLGCDNENISYNSLMEIMGVVSERLQANTDTIKQDMINWLTKLRKQLLEANGGHTEADLQRELSRKSKLLDAYLDGILNKQEYQKKAEELDERIIQLKTETEKNKANSGDIAEIDKVLANIDEEVARYVDGNEKLKVEYLLEHLEQVQIFPDKVIVIVPILSEGIVVEKTQYVSREKRCRKVYAAKSSVRDI

SEQ ID NO: 1839 - protein, 556 aa, Unknown
  Description of Unknown: Integrase B1840 sequence
  PTHR30461:SF3,cd00338,SM00857,G3DSA:1.10.10.2600,IPR036162, PF13408,PS51737,G3DSA:3.40.50.1390,IPR025827,IPR006119, IPR038109,PF07508,IPR011109,SSF53041,PTHR30461, mobidb-lite,Coil,PF00239
MPRKPAKHPAKPKRGKKLEVEEPGVLYGRYSSHNQKDISVEQQFEKGYELAAEYGIRIIDTYADRAVSGRTDKRRDFQRMMTDAAKGKFRYVIAWKSNRMGRNMLEALINEARLQDLGVRVLYVEEDFDDTAAGRFAARSMMNVNQFYSENMAEDIKRGLYDNAANCMVANGHLPYGYKADETLHYAIDEPKAAVIREIFARVSCGEAFVDIMASLNARGIKTSYGRPWGRSSFQKILSNERYRGIYIYGDVRKEGGIPRIISDELYFKVQEVITTKKNPQGRHRVNGDYLLTGKLFCGHCKSPMTGVSGTGRSGNLHYYYVCQKRRTGKTCDKKNVRRDEIELQVAQAIKDYALKDDVIEWIADSTVAYNERKEAESKVGILEDQLAGTEHGIKNIMSAIEQGIITETTKSRLVELESERAAIKANIAAARADIVTVSRDDIISGLEMFRDGDVHDKKYQARLFDTFLVAVYAYDDDLRLVFSFSGNKNTIQIPIESAVNAVENNEAECSFKLCSAPPKQSQTNQAGSPGFCSAPTVYMTGGIFVLVFPLAYAKK

SEQ ID NO: 1840 - protein, 556 aa, Unknown
  Description of Unknown: Integrase B1841 sequence
  SM00857,G3DSA:1.10.10.2600,IPR036162,PF13408,IPR025827, G3DSA:3.40.50.1390,PS51737,IPR006119,IPR038109,PF07508, IPR011109,SSF53041,PTHR30461,Coil,PS51736, cd00338,PF00239
MNIYYARERLRTGSIFDLKLKVAYYARVSTEKVEQQVSIKHQQEYYEEFIRSNQNWTFSGAYIDDGISGIHAEKREEFQNMIRDAKLGRVDMIITKEISRFARNTLDSIQYTRELLSYGVCVWFQNDGINTIDEDSEFRLTIMAGVAQDELRKLSSRIKFGHARSIQNGVVLGNRIYGYHKKDGKLTIVPEEAEMIRMIFRDYASGTMSTPKLEKKLWDMGYRNFKGGKINRDVIRNIIKNPKYKGYFCGGKVKIVDMFTKKQEFLPESKWVIFKDDGSRVPQIIDEETWEKANDYMKKRSEAIKSHRTSFKNGNLFTGKIFCANDDAPYWMKQHYVRGKEDVRWVCSYKIKNGADSCSSHGIRESDLKKVVASLINESSCNIDEVIKEYLNILRKVINNKPDTGIEKERLQNQIDAIKKKKEKILEYNLNGDISDEEFISRNKGYTKQIIDLEMEISKLVPEDVELQIAEKQLSKITEELKSFKEVKEEDINRQIIDKLFDKIVVSLSADKQTVCKFYLSTGCLKIRDLGGVVLNTCYLTIRKNDTRHFIGELVA

SEQ ID NO: 1841 - protein, 556 aa, Unknown
  Description of Unknown: Integrase B1842 sequence
  PTHR30461:SF3,SM00857,G3DSA:1.10.10.2600,IPR036162,PF13408, IPR025827,PS51737,G3DSA:3.40.50.1390,IPR006119,IPR038109, PF07508,IPR011109,SSF53041,PF00239,PTHR30461, Coil,cd00338
MPKKTAKHPAKPKRGKKLEIEEPGVLYGRYSSHNQKDISVEQQFEKGYELAAEYGIRIIDTYADRAVSGRTDKRKDFQRMMSEAAKGKFRYVIAWKSNRMGRNMLEALINEARLQELGVRVLYVEEDFDDTAAGRFAARSMMNVNQFYSENMAEDIKRGLYDNASNCMVANGHLPYGYKRDETLHYVIDEPKAAVIREIFTRVAAGEPFVDIMNSLNARGIKTSYNRPWGRSSFQKILSNERYRGIYIYGDVRKEDGIPRIISDELFFKVQEVITTKKNPQGRHRVNGDYLLTGKLFCGKCKSPMVGISGTGRSGKLHYYYVCQKHRTEKTCDKKNVRRDEIELQVAQAIKDYALKDDVIEWIADSTVAYNERKEAESKVGILEDQLAGTERGIKNIMSAIEQGIITETTKSRLVELESERATIKAKIAAARADIVTVSRDDIISGLEMFRDGDVYDKKYQARLFDTFLVAVYVYDDDLRLVFSFSGNKNTIQIPIESAVNAVENNAAECSFKLCSAPPKQSQTNHAGSPGFCYAPTIYMVSGIFVLVCPFDHARK

SEQ ID NO: 1842 - protein, 556 aa, Unknown
  Description of Unknown: Integrase B1843 sequence
  cd03768,SM00857,G3DSA:1.10.10.2600,IPR036162,PF13408, PS51737,G3DSA:3.40.50.1390,SSF109709,IPR025827,IPR006119, IPR038109,PF07508,IPR011109,SSF53041,PTHR30461, PS51736,PF00239
MKSIRCAVYTRKSTEDGLEKEFNTLEAQRESGENYIKSQAYQGWEIIPTHYDDGGFSGGTLKRPALQQLLKDVEAGMVDMIVVYKIDRLTRSLIDFSKLVEIFDRNQCSFVSVTQNFNTYDSMGRLTLNVLLSFAQFEREVITERIRDKVDASKKKGMWMGGVLPLGYVSVNKKLEIIPEEAKIVRLAFEKYLIFRSEIAVAEWLNNNGYTTLSKGNGKFTHMRVSSMLKNVLYIGKVPHKDKVYNGQHHAIISQELFDEVQKIKSKNRVGRLAPSRFVEHALLKGLIYCDCCQAAMISTKSNKKNKVYEYYTSFRAVKEGFNNCKIGSIPAGEMDNFVLRQIAGIIKSPKILSGLIEQAKIIRPDIKDVQIISKLQDGDDFIQRLSSITLRQLLIMFVQKIRVDVDRIKIMYTELAVSLMDDKMKDDLFPNNINGERNEILYRVCLRRKRGSLKIFAPEKYKPDENNPLYLALIKAFVWQDKMKKENLFIEDLAKSEGLSREYVGKVLRMTYLAPDIVTAIVDGVYPKTLSLRKILESEIPLLWSQQRLKYGFSF

SEQ ID NO: 1843 - protein, 556 aa, Unknown
  Description of Unknown: Integrase B1844 sequence
  cd03768,PTHR30461:SF3,SM00857,G3DSA:1.10.10.2600,IPR036162, PF13408,PS51737,IPR025827,G3DSA:3.40.50.1390,IPR006119, IPR038109,PF07508,IPR011109,SSF53041,PTHR30461, PS51736,Coil,PF00239
MNTIAIYTRKSKFTGKGESIENQIEKCKKFIEFKFNIDSENVNIFIDEGFSGKNENRPQYQLMMEKIKKKEIDSIVIYQLNRLGRNARDIHNTMQLCDDLGVIIYSATEGFDSSTSFGRAVIGILASLAQLEREQLAERVKDNMYTLAKMGRWLGGQSPLGFDGSREYYIDETGKERSITKLKKNEEELKLVKLLYDKYLEEKSLSQVGKWALINHLTGKNGGNLNKNAINVILQNPVYVKSSKEVFEYLSNEGYEVCGEPNGNGLLRYGKDDEPIVATAKHKGVIPSDQWIEVQKILKGNAYKAPRMGKTNTALLTGLLRCKCGSTMRISYGQKRKDGTKPFYYICNMKINSGGARCNLKNLNGNLFEKNFIQFLKNYSKETLFAELQKLLNNSKDLESTISSNKIDVEIEKSNKAIKQILNKLKLTDDDELSKILLQEIKVENNKLKALSKQKEELLNDQSEVVITQSEVLAILDDLDNFQKTFDDLNLEDKQKALKSLIESITLTDDKFIVDFNIKKKLDNAIKKLSSLFAKYKSSQLRHPCRSYMYRHPSWP

SEQ ID NO: 1844 - protein, 556 aa, Unknown
  Description of Unknown: Integrase B1845 sequence
  PTHR30461:SF3,IPR036162,PS51737,IPR011109,PTHR30461, PS00397,PF00239,G3DSA:1.10.10.2600,IPR006119,SSF53041, SM00857,IPR025827,IPR038109,PS51736,cd03768, IPR006118,PF13408,G3DSA:3.40.50.1390,PF07508,Coil
MKAALYVRVSTTYQIDKDSLPVQRQDLINYAKYAFNIDDYKIFEDAGFSGKNTNRPAFQNMMDRIRSREFSHLFVWKIDRVSRNLLDFCDMYEELKKYNCTFVSKNEQFDTSSAMGEAMLKIILVFAELERKLTSERVTSIMLARAEKGLWNGANVPLGYSYDEETKYPVINENEAKTIRFIFDMYEKRQSTAAISKYLNENNVHTKRGGSWTSKGIGDIIHNPFYYGTLRYNYRESARGKKKSEDEWIVKENNHEGIISKEQWLRCNKIIEENAKKNASRFRSMNQIQHIFGGLIYCKTCGAKYICSLDKPRKDGYKPSRYICGGKIKGVICDNKIVTDVTIGDFMLQYVLNFISCINKIPSNLEDLENRLLGNYDVCLDYDSLYDTFSMLAYIKQMRKNNYKYEDLDKIVDFEKVKSNKSEIDSLLENKSKLERAAERLTNLYLYDDVPMSEREFYKRKTEIEDKLSEVNEKLNALNNEKNKPKITDLGFMDEMDDLLLRLDFTGSSLRELTMNNDRKILKDFFETIIEKIIVCDKRVDSIVFRNGLVHKFYYK

SEQ ID NO: 1845 - protein, 556 aa, Unknown
  Description of Unknown: Integrase B1846 sequence
  cd03768,SM00857,G3DSA:1.10.10.2600,IPR036162,PF13408, PS51737,G3DSA:3.40.50.1390,SSF109709,IPR025827,IPR006119, IPR038109,PF07508,SSF53041,IPR011109,PTHR30461, PS51736,PF00239
MKTIRCAVYTRKSTEDGLEKEFNTLEAQRESGENYIKSQAYQGWEIIPTHYDDGGFSGGTLKRPALQQLLRDVEAGMVDMIVVYKIDRLTRSLIDFSKLVEIFDRNQCSFVSVTQNFNTYDSMGRLTLNVLLSFAQFEREVITERIRDKVDASKKKGMWMGGVLPLGYVSVNKKLEIVPEEAKVVRLAFEKYLIFRSEIAVAEWLNNNGYTTLSKGNGKFTHMRVSSMLKNVLYIGKVPHKDKVYDGQHHAIISRELFDEVQKIKSQNRIGRLAPSRFVEHALLKGLIYCDCCQAAMISTKSNKKNKVYEYYTSFRAVKEGFNNCKIGSIPAGEMDNFVLRQIAGIIKSPKILSGLIEQAKIIRPDIKDVQIISKLQDGDDFIQRLSSITLRQLLIMLVQKIRVDVDRIKIMYTELAVSLMDDKMKDDLFPNNINGERNEILYRVCLRRKRGSLKIFAPEKYKPDENNPLYLALIKAFVWQDKMKKENLFIEDLAKSEGLSREYVGKVLRMTYLAPDIVTAIVDGVYPKTLSLRKILESEIPLLWSQQRLKYGFSF

SEQ ID NO: 1846 - protein, 556 aa, Unknown
  Description of Unknown: Integrase B1847 sequence
  PTHR30461:SF3,SM00857,G3DSA:1.10.10.2600,IPR036162,PF13408, PS51737,G3DSA:3.40.50.1390,IPR025827,IPR006119,IPR038109, PF07508,IPR011109,SSF53041,PF00239,PTHR30461, Coil,cd00338
MKKFKFPIDLSMLTEEEINQFREDPSTLFQGDTDVCLYLRFSSERQKEQSIEGQLRDCIAYCKRKNYRIVAIYVDRATTARKDVEKRVHFQEMITASVHQTWKLVVVWKLDRFARNREDSAVFKMRLRKNGVKVESATEGISKNPEGIILEAVLEGIAEYYSADLSQKITRGMRESALKCHSIGGHVPLGYKIEDHKLVINPDTAHIVQEAFELYANGETVADICRMFNAKGYRTAKGAEFNRNSFKSMFRNRRYIGVYRYKDFEKEGGVPPIINKDLFETVQKRLSANAEAPARGKAKVDYLLAGKLFCGHCGGSMNGESGTSKTGAVHNYYACYTRKRQHSCDKKPLRKEWIEQIVAQDAMELLTDDAIQEMADMAISQTEKDLRENTRIPELSERMKETESGIANITKAVEKGIASDALMSRLVELEKEKKNLLRLIAEEEKYVCKIDRDQIVYWLTKFKDGNIEDENFKRIIIDLMVNSVTVWDEPDGFRITTAYNLTSCKNKTFRIPSSSDKGFGFEGLESTRTTLDELKSSMVTSEWLSCVLYRTVILSS

SEQ ID NO: 1847 - protein, 556 aa, Unknown
  Description of Unknown: Integrase B1848 sequence
  cd03768,SM00857,G3DSA:1.10.10.2600,IPR036162,PF13408, PS51737,G3DSA:3.40.50.1390,SSF109709,IPR025827,IPR006119, IPR038109,PF07508,SSF53041,IPR011109,PTHR30461, PS51736,PF00239
MKTIRCAVYTRKSTEDGLEKEFNTLEAQRESGENYIKSQAYQGWEIIPTHYDDGGFSGGTLKRPALQQLLKDVEAGMVDMIVVYKIDRLTRSLIDFSKLVEIFDRNQCSFVSVTQNFNTYDSMGRLTLNVLLSFAQFEREVITERIRDKVDASKKKGMWMGGVLPLGYVSVNKKLEIIPEEAKIVHLAFEKYLIFRSEIAVAEWLNNNGYTTLSKGNGKFTHMRVSSMLKNVLYIGKVPHKDKVYDGQHHAIISQELFDEVQKIKSQNRIGRLAPSRFVEHALLKGLIYCDCCQAAMISTKSNKKNKVYEYYTSFRAVKEGFNNCKIGSIPAGEMDNFVLRQIAGIIKSPKILSGLIEQAKIIRPDIKDVQIISKLKDGDDFIQRLSSITLRQLLIMLVQKIRVDVDRIKIMYTELAVSLMDDKMKDDLFPNNINGERNEILYRVCLRRKRGSLKIFAPEKYKPDENNPLYLALIKAFVWQDKMKKENLFIEDLAKSEGLSREYVGKVLRMTYLAPDIVTAIVDGVYPKTLSLRKILESEIPLLWSQQRLKYGFSF

SEQ ID NO: 1848 - protein, 556 aa, Unknown
  Description of Unknown: Integrase B1849 sequence
  PTHR30461:SF3,IPR036162,PS51737,IPR011109,PTHR30461, PS00028,PF00239,G3DSA:1.10.10.2600,IPR006119,SSF53041, IPR013087,cd00338,SM00857,IPR025827,IPR038109, PS51736,PF13408,G3DSA:3.40.50.1390,PF07508,Coil
MRQKFKIDLSMLTPEEQQQFRDDPTTLTKGEVDVALYLRFSSERQKEQSIEGQLRDCIAYCKRKGFRIVAIYVDRATTARKDVEKRVHFQEMISDSIHHLWNFVVVWKLDRFARNREDSAVFKMRLRKNGVRVKSATETISENPEGIILESVLEGIAEYYSADLSQKITRGLRESAMKGHSVGGHVPLGYKIEDHKLVINPATAHIVQEAFQLYANGESMAEICRIFNSKGYRTAKNSEFNRSSFKSMFKNVRYIGTYIYKDIEKENAIPAIIDKDLFETVQRRLSLTADAPARGKAKVDYLLSGKLFCGHCGSSMNGDSGTGRHGEIHNYYKCFSRKKHKNCNKKSLRKEYIERIVAQDAMDLLTDEVIEELADMAMTQADRDLKENTRIPELTVKLTEIEQGIANITKAIEKGIASDALLNRLTELEKEKKDLTSQLREEEKYIYRIDRDQVVFWLTKFQGGDIEDEDCRRRIIDLLVNSVTVWDEPDGYKITTAYNLTSCKTRTFRVSEKADSPSGEGFGFGDLSSTKKIRDTLSRVSYFFGSLISFVHPKGN

SEQ ID NO: 1849 - protein, 556 aa, Unknown
  Description of Unknown: Integrase B1850 sequence
  PTHR30461:SF3,SM00857,G3DSA:1.10.10.2600,IPR036162,PF13408, IPR025827,G3DSA:3.40.50.1390,PS51737,IPR006119,IPR038109, PF07508,SSF53041,IPR011109,PTHR30461,PS51736, cd00338,PF00239
MARAAKQDNNSEIIDGVIYARYSEGPNQTEASIEGQVRECKEYAKRNGIRIINVYSDSKHTGTNDNRAEFQKMLRDSRRGGFSVVVVWKIDRFGRNRAEMAQNKALLKLQGVKVVSAKEYIPDSPEGIILESVLEGMAEYYSANLSQNIKRGMKENALHCKSNGSGKSLGYIVDKDGYFEIEPNEATIVKTIFQKYDEGMKIADIWREIVASGAKTKRGKDFTQYGISRVLNNRAYIGEYRYGDIVTPGGMPRIIDDDLFNRVQERRALRKKAPASRRSNSDVDFLLTGKVFCGHCKGTMRGMSGTSKTGRKFYYYACHDKIFKHNKCTKKNVKKEWLETEVTRITKDDILNKETIEFIADRVVEIQRQEQEDKSMLRYYEQQLRDTQSAINNIMKAIEAGIITSSTKSRLFELEEQKSIIEGEIEREKIITPVIEKEQVIFSLERFFSGDINNKEYQRNIIDMFVNKVILYDDKIIITYNISSQNEISVDVVEQAAFAALDECSSKLSLPPPAGACPCTQSALLYVERFFIAAHQFYLKPNHCFAVADISRQGFL

SEQ ID NO: 1850 - protein, 556 aa, Unknown
  Description of Unknown: Integrase B1851 sequence
  PTHR30461:SF3,cd00338,SM00857,G3DSA:1.10.10.2600,IPR036162, PF13408,PS51737,G3DSA:3.40.50.1390,IPR025827,IPR006119, IPR038109,PF07508,IPR011109,SSF53041,PTHR30461, PS51736,Coil,PF00239
MTVKKFPIDLSCLTEEEISQFREDPYTLYNGDQDVAIYLRYSSTGQSDQSIEGQLRDCRAFCKANHYRIVAIYVDRATTARKDVEKRVHLMEMVADSAKQNWEYVIVWKLDRFARNRNDSAIMKMRLRKNGVKVLSATEHLTDSPESIILESVLEGMAEFFSAELSQKVTRGMRESALKCHSVGGHIPLGYKVENHKLVVNPDTAHIVQEAFSLYANGESVADICRKFNSAGYKTAKNTEFNRSSFKAMFRNTRYIGTYTYKDIVIENGIPAIIDKELFETVQRRLSKTATAPARGKAKVDYLLSGKLFCGHCGASMNGESGAGRHGKVYHYYSCYTKKRKLGCDKWPLKKDYIEGIVARDALNLLTDQLIDEIADMAIRQSEQDLINDTHIPQLTAQLSEVEKSIANITAAIEKGIASETLMNRLVQLEHEKKTLNKEIKAEEKFVYRIDRDQIIFWLSQFKYGNIEDEDFRRRLIDLLVNSVTVWDEPDGYKITTAYNLTSCKTKTFRVDKNPAAEEATGFDFGESECTKSPRNHLISRTFAFHKSPFSDTVFF

SEQ ID NO: 1851 - protein, 556 aa, Unknown
  Description of Unknown: Integrase B1852 sequence
  SM00857,G3DSA:1.10.10.2600,IPR036162,PF13408,PS51737, G3DSA:3.40.50.1390,IPR025827,IPR006119,IPR038109,PF07508, SSF53041,IPR011109,PTHR30461,Coil,PS51736, cd00338,PF00239
MNIYYARERLRTGSIFDLKLKVAYYARVSTEKTEQQVSIKHQQEYYEEFIRSNQNWTFSGAYIDDGISGIHAEKREEFQNMIRDAKLGRVDMIITKEISRFARNTLDSIQYTRELLSYGVCVWFQNDGINTIDEDSEFRLTIMAGVAQDELRKLSSRIKFGHARSIQNGVVLGNRIYGYHKKDGKLTIVPEEAEMIRMIFKDYASGTVSTPKLEKKLWDMGYRNFKGGKINRDVIRNIIKNPKYKGYFCGGKVKIVDMFTKKQEFLPESKWVIFKDDGSRVPQIIDEETWEKANEYMKKRSEAIKSHRTSFKNGNLFTGKIFCANDGAPYWMKQHYVRGKEDVRWVCSYKIKNGADSCSSHGIRESDLKKVVASLINESSCNIDEVIKEYLNILRKVINNKPDTGIEKERLQNQIDAIKKKKEKILEYNLNGDIPDEEFISRNKGYTKQIIDLEMEISKLVPEDVELQIAEKQLSKITEELKSFKEVKEEDINRQIIDKLFDKIVVSLSADKQTVCKFYLSTGCSKIRDLGGVVLNTCYLTIRKNDTRYFIGELVA

SEQ ID NO: 1852 - protein, 556 aa, Unknown
  Description of Unknown: Integrase B1853 sequence
  SM00857,G3DSA:1.10.10.2600,IPR036162,PF13408,PS51737, G3DSA:3.40.50.1390,IPR025827,IPR006119,IPR038109,PF07508, SSF53041,IPR011109,PTHR30461,Coil,cd00338, PF00239
MAYRKITDIRDTIGMRAVFYARVSTAEEEQLNAIELQIEENRGCIKDHGWKLVGEYIDRSKSGTMVKGRDDYQRLYEDLYEDLFDIVVIKDQERLQRNTLDWYLFINRVVQTGKLLFMYMDGKFYSPDDALITGVRAIIAEEFSRNLSKKLHNYHDHRIEKARQGQEIALQGSGNVYGWDKKDGKYYINPEQAKVRRLMCEGIMARKGSTLIAKELNDAGYRNTVGKPWKPMDIPKFVYDCKNVGTMIINKERHDFESKQTIKLPKEEWVYVENALPPIVTQEEWDLICKIHEERVIATGSDRRGKKTSGYSFSGKLICGICGAPYWRKQRVSKDEYWVCSTKQTKGRRTRKRDSTMGKAGEINPLGCDNENISYNSLMEIMGVVSERLQANTDTIKQDMINWLTKLRKQLLEANGGHTEVDLQRELSRKSKLLDAYLDGILNKQEYQKKAEELDERIIQLKAETEKNKANSGDIAEIDKVLANIDEEVARYVDGNEKLKVEYLLEHLEQVQIFPDKVIVIVPILSEGIVVEKTQYVSRKKWSGKDNFDESFDHCA

SEQ ID NO: 1853 - protein, 556 aa, Unknown
  Description of Unknown: Integrase B1854 sequence
  PTHR30461:SF3,SM00857,G3DSA:1.10.10.2600,IPR036162,PF13408, PS51737,G3DSA:3.40.50.1390,IPR025827,IPR006119,IPR038109, PF07508,IPR011109,SSF53041,PF00239,PTHR30461, PS51736,Coil,cd00338
MKKFPIDLSCLTEEEISQFQEDPYTLYNGDQNVAIYLRYSSTGQSDQSIEGQLRDCRTFCKANHYRIVAIYVDRATTARKDVEKRVHLMEMISDSAKQNWEYVIVWKLDRFARNRNDSAIMKMRLRKNGVKVLSATEHLTDSPESIILESVLEGMAEFFSAELSQKVTRGMRESALKCHSVGGHIPLGYKVENHKLVVDPDTAHIVQEAFSLYANGESVADICRKFNSAGYKTAKNTEFNRSSFKAMFRNTRYIGTYTYKDIVIENGIPAIIDKELFETVQRRLSKTATAPARGKAKVDYLLSGKLFCGHCGASMNGESGAGRHGKVYHYYSCYTKKRKLGCDKRPLKKDYIEGIVARDALNLLTDHLIDEIADMAIRQSEQDLINDTHIPQLTAQLSEVEKSITNITAAIEKGIASETLMNRLVQLEHEKKTLNKEIKAEEKFVYRIDRDQIVFWLSQFKYGNIEDEDFRRRLIDLLVNSVTVWDEPDGYKITTAYNLTSCKTKTFRVEKNPAAEEATGFDFGESECTLAAAGCKAGFPPLPAAISLPWCSMWLW

SEQ ID NO: 1854 - protein, 556 aa, Unknown
  Description of Unknown: Integrase B1855 sequence
  cd03768,SM00857,G3DSA:1.10.10.2600,IPR036162,PF13408, PS51737,G3DSA:3.40.50.1390,SSF109709,IPR025827,IPR006119, IPR038109,PF07508,IPR011109,SSF53041,PTHR30461, PS51736,PF00239
MKTIRCAVYTRKSTEDGLEKEFNTLEAQRESGENYIKSQAYQGWEIIPTHYDDGGYSGGTLKRPALQQLLRDVEAGMVDMIVVYKIDRLTRSLIDFSKLVEIFDRNQCSFVSVTQNFNTYDSMGRLTLNVLLSFAQFEREVITERIRDKVDASKKKGMWMGGVLPLGYVSVNKKLEIIPEEAKIVRLAFEKYLIFRSEIAVAEWLNNNGYTTLSKGNGKFTHMRVSSMLKNVLYIGKVPHKDKVYNGQHHAIISQELFDEVQKIKSQNRVGRLAPSRFVEHALLKGLIYCDCCQAAMISTKSNKKNKVYEYYTSFRAVKEGFNNCKIGSIPAGEMDNFVLRQIAGIIKSPKILSGLIEQAKIIRPDIKDVQIISKLQDGDDFIQGLSSITLRQLLIMLVQKIRVDVDRIKIMYTELAVSLMDDKMKDDLFPNNINGERNEILYRVCLRRKRGSLKIFAPEKYKPDENNPLYLALIKAFVWQDKMKKENLFIEDLAKSEGLSREYVGKVLRMTYLAPDIVTAIVDGVYPKTLSLRKILESEIPLLWSQQRLKYGFSF

SEQ ID NO: 1855 - protein, 556 aa, Unknown
  Description of Unknown: Integrase B1856 sequence
  SM00857,G3DSA:1.10.10.2600,IPR036162,PF13408,IPR025827, G3DSA:3.40.50.1390,PS51737,IPR006119,IPR038109,PF07508, SSF53041,IPR011109,PTHR30461,Coil,cd00338, PF00239
MAYRKITDIKDTIGMRAVFYARVSTAEEEQLNAIELQIEENRGCIKDHGWKLVGEYIDRSKSGTMVKGRDDYQRLYEDLYEDLFDIVVIKDQERLQRNTLDWYLFINRVVQTGKLLFMYMDGKFYSPDDALITGVRAIIAEEFSRNLSKKLHNYHDHRIEKARQGQEIALQGSGNVYGWDKKDGKYYINPEQAKVRRLMCEGIMARKGSTLIAKELNDAGYRNTVGKPWKPMDIPKFVYDCKNVGTMIINKERHDFESKQTIKLPKEEWVYVENALPPIVTQEEWDLICKIHEERVIATGSDRRGKKTSGYSFSGKLVCGICGAPYWRKQRVSKDEYWVCSTKQTKGRRTRKRDSTMGKAGEINPLGCDNENISYNSLMEIMGVVSERLQANTDTIKHDMINWLTKLRKQLLEANGGHTEADLQRELSRKSKLLDAYLDGILNKQEYQKKAEELDERIIQLKAETEKNKANSGDIAEIDRVLANIDEEVARYVDGNEKLKVEYLLEHLEQIQIFPDKVIVIVPILSEGIVVEKTQYVSREKRSRQDNSFTLPDGTV

SEQ ID NO: 1856 - protein, 556 aa, Unknown
  Description of Unknown: Integrase B1857 sequence
  cd03768,PTHR30461:SF3,SM00857,G3DSA:1.10.10.2600,IPR036162, PF13408,IPR025827,G3DSA:3.40.50.1390,PS51737,IPR006119, IPR038109,PF07508,SSF53041,IPR011109,PTHR30461, PS51736,Coil,PF00239
MNTIAIYTRKSKFTGKGESIENQIEKCKKFIEFKFNIDSENVNIFIDEGFSGKNENRPQYQLMMEKIKKKEIDSIVIYQLNRLGRNARDIHNTMQLCDDLGVIIYSATEGFDSSTSFGRAVIGILASLAQLEREQLAERVKDNMYTLAKMGRWLGGQSPLGFDGSREYYIDETGKERSITKLKKNEEELKLVKLLYDKYLEEKSLSQVGKWALINHLTGKNGGNLNKNAINVILQNPVYVKSSKEVFEYLSNEGYEVCGEPNGNGLLRYGKDDEPIVATAKHKGVIPSDQWIEVQKILKDNAYKAPRMGKTNTALLTGLLRCKCGSTMRISYGQKRKDGTKPFYYICNMKINSGGARCNLKNLNGNLFEKNFIQFLKNYSKETLFTELQKLLNNSKDLESTISSNKIDVEIEKSNKAIKQILNKLKLTDDDELSKILLQEIKVENNKLKALSKQKEELLNDQSEVVITQSEVLAILDDLDNFQKTFDDLNLEDKQKALKSLIESITLTDDKFIVDFNIKKKLDNAIKKLSSLFAKYKSSQLRHPCRSYMYRHPSWP

SEQ ID NO: 1857 - protein, 556 aa, Unknown
  Description of Unknown: Integrase B1858 sequence
  PTHR30461:SF3,SM00857,G3DSA:1.10.10.2600,IPR036162,PF13408, PS51737,G3DSA:3.40.50.1390,IPR025827,IPR006119,IPR038109, PF07508,IPR011109,SSF53041,PTHR30461,Coil, PS51736,cd00338,PF00239
MKKFPIDLSCLTEEEISQFQEDPYTLYNGDQNVAIYLRYSSTGQSDQSIEGQLRDCRTFCKVNHYRIVAIYVDRATTARKDVEKRVHLMEMISDSAKQNWEYVIVWKLDRFARNRNDSAIMKMRLRKNGVKVLSATEHLTDSPESIILESVLEGMAEFFSAELSQKVTRGMRESALKCHSVGGHIPLGYKVENHKLVVDPDTAHIVQEAFSLYANGESVAAICRKFNSAGYKTAKNTEFNRSSFKAMFRNTRYIGTYTYKDIVIENGIPAIIDKELFETVQRRLSKTATAPARGKAKVDYLLSGKLFCGHCGASMNGESGAGRHGKVYHYYSCYTKKRKLGCDKRPLKKDYIEGIVARDALNLLTDQLIDEIADMAIRQSEQDLINDTHIPQLTAQLSEVEKSITNITAAIEKGIASETLMNRLVQLEHEKKTISKEIKAEEKFVYRIDRDQIVFWLSQFKYGNIEDENFRRRLIDLLVNSVTVWDEPDGYKITTAYNLTSCKTKTFRVEKNPAAEEATGFDFGESECTKSPRNRLISRAFSLVTETTGSAGGGTS

SEQ ID NO: 1858 - protein, 556 aa, Unknown
  Description of Unknown: Integrase B1859 sequence
  PTHR30461:SF3,SM00857,G3DSA:1.10.10.2600,IPR036162,PF13408, PS51737,G3DSA:3.40.50.1390,IPR025827,IPR006119,IPR038109, PF07508,SSF53041,IPR011109,PTHR30461,Coil, PS51736,cd00338,PF00239
MRVSVNLNAQKPDTTTNAVIYARYSSHGQTEQSIEGQLAKGHEYAAAQGYTVVHEYIDRAMTGRNDNREAFQKMLSDTGKHQFQVVIVWKVDRFGRNREEIAFNKHTCKKNGVRVEYVAESLPNSPEAVILESVLEGMAEYYSIQLSQNIRRGQLESAKKCQCVGGSVPLGYTLDSDKHFVIDPQTAPVVKKIFDLYAEGATISEITGQLNEQGIRTARKQLFTKNSLTKLLKNEKYIGIYAYKDVVRVEGGVPAIVDKSTFDRVQELLKINRRAPSHTWTKVEYLLTDKLFCGHCGSPMVGESGFSHTGAKYSYYGCIKRRREKACDKKPVRQDWIEALVLDETVKLLHDDELMEYIIDRTWEYYQITDKVQEEKAVLEAQLAEVDKAINNLVRAIEAGIFNAATKSRMDELDAQKAALTASLADLELTSGIRITRDHIEYFLLRLRDLDVKDRECQKRLVQTFVNAVFVYDDGRVKITYNYSGQSSTITLNQIASAEKGKGFVCCLPCSTFSPRFRVGSRGIFCFLGKTGRKYTTNFSCFVLQWKRKRQRGNGK

SEQ ID NO: 1859 - protein, 556 aa, Unknown
  Description of Unknown: Integrase B1860 sequence
  SM00857,G3DSA:1.10.10.2600,IPR036162,PF13408,PS51737, G3DSA:3.40.50.1390,IPR025827,IPR006119,IPR038109,PF07508, IPR011109,SSF53041,PTHR30461,Coil,PS51736, cd00338,PF00239
MNIYYARERLRTGSIFDLKLKVAYYARVSTEKAEQQVSIKHQQEYYEEFIRSNQNWTFSGAYIDDGISGIHAEKREEFQNMIRDAKLGRVDMIITKEISRFARNTLDSIQYTRELLSYGVCVWFQNDGINTIDEDSEFRLTIMAGVAQDELRKLSSRIKFGHARSIQNGVVLGNRIYGYHKKDGKLTIVPEEAEMIRMIFKDYASGTVSTPKLEKKLWDMGYRNFKGGKINRDVIRNIIKNPKYKGYFCGGKVKIVDMFTKKQEFLPESKWVIFKDDGSRVPQIIDEETWEKANEYMKKRSEAIKSHRTSFKNGNLFTGKIFCANDGAPYWMKQHYVRGKEDVRWVCSYKIKNGADSCSSHGIRESDLKKVVASLINESSCNIDEFIKEYLSILRKVINNKPDTGIEKERLQNQIDAIKKKKEKILEYNLNGDIPDEEFISRNKGYTKQIIDLEMEISKLVPEDVELQIAEKQLSKITEELKSFKEVKEEDINRQIIDNLFDKIVVSLSADKQTVCKFYLSTGCSKIRDLGGVVLNTCYLTIRKNDTRHFIGELVA

SEQ ID NO: 1860 - protein, 556 aa, Unknown
  Description of Unknown: Integrase B1861 sequence
  PTHR30461:SF3,SM00857,G3DSA:1.10.10.2600,IPR036162,PF13408, IPR025827,G3DSA:3.40.50.1390,PS51737,IPR006119,IPR038109, PF07508,SSF53041,IPR011109,PTHR30461,PS51736, cd00338,PF00239
MARAAKQDSNSEIIDGVIYARYSEGPNQTEASIEGQVRECKEYAKRNGIRIINVYSDSKHTGTNDNRAEFQKMLRDSRRGGFSVVVVWKIDRFGRNRAEMAQNKALLKLQGVKVVSAKEYIPDSPEGIILESVLEGMAEYYSANLSQNIKRGMKENALHCKSNGSGKSLGYIVDKDGYFEIEPNEATIVKTIFQKYDEGMKIADIWREIVASGAKTKRGKDFTQYGISRVLSNRAYIGEYRYGDIVTPGGMPRIIDDDLFNRVQERRALSKKETPHRRSSSPADFLLTGKVYCGHCKSSMRGDSGTSKNGNSFYFYTCHGKRYKHNGCKKKNVRKEWLETEVTRLTVENILNDEVISFIADRVVKIQKEEQENKSMLHYYEQQLRDTQSAINNIMKAIEAGIITSSTKSRLFELEEQKSIIEGEIEREKIITPVIEKEQVIFSLERFFGGDINNKEYQRNIIDMFVNKVILYDDKIIITYNISSQNEISVDVVEQAAFAALDECSSKLSLAPPAGACPCTQSALLYVERFFIAAHQFYLKPNHCFAVADISRQGFL

SEQ ID NO: 1861 - protein, 556 aa, Unknown
  Description of Unknown: Integrase B1862 sequence
  SM00857,G3DSA:1.10.10.2600,IPR036162,PF13408,PS51737, G3DSA:3.40.50.1390,IPR025827,IPR006119,IPR038109,PF07508, SSF53041,IPR011109,PTHR30461,Coil,cd00338, PF00239
MAYRKITDIKDTIGMRAVFYARVSTAEEEQLNAIELQIEENRGCIKDHGWKLVGEYIDRSKSGTMVKGRDDYQRLYEDLYEDLFDIVVIKDQERLQRNTLDWYLFINRVVQTGKLLFMYMDGKFYSPDDALITGVRAIIAEEFSRNLSKKLHNYHDHRIEKARQGQEIALQGSGNVYGWDKKDGKYYINPEQAKVRRLMCEGIMARKGSTLIAKELNDAGYRNTVGKPWKPMDIPKFVYDCKNVGTMIINKERHDFESKQTIKLPKEEWVYVENALPPIVTQEEWDLICKIHEERVIATGSDRRGKKTSGYSFSGKLVCGICGAPYWRKQRVSKDEYWVCSTKQTKGRRTRKRDSTMGKAGEINPLGCDNENISYNSLMEIMGVVSERLQANTDTIKQDMINWLTKLRKQLLEANGGHTEADLQREISRKSKLLDAYLDGILNKQEYQKKAEELDERIIQLKAETEKNKANSGDIAEIDKVLANIDEEVARYIDGNEKLKVEYLLEHLEQVQIFPDKVIVIVPILSEGIVVEKTQYVSREKRSRKIYVSASGSRDP

SEQ ID NO: 1862 - protein, 556 aa, Unknown
  Description of Unknown: Integrase B1863 sequence
  PTHR30461:SF3,SM00857,G3DSA:1.10.10.2600,IPR036162,PF13408, PS51737,IPR025827,G3DSA:3.40.50.1390,IPR006119,IPR038109, PF07508,IPR011109,SSF53041,PTHR30461,Coil, PS51736,cd00338,PF00239
MKKKFPIDLSMLTPEEIDQFREDPYTLYHGDIEVSLYLRFSSERQKEQSIEGQLRDCRAFCKRSGYRIVAIYVDRALTARKDAEKRVQFQQMIVDSEKRHWQYLVVWKLDRFARNRNDSAIYKMRLKKNGVRVISATENISENPEGIILEAVLEGMAEFYSAELSQKITRGMRESAMKCHSIGGHVPLGYKIKDHKLVIDPVGAAIVQEAFQLYANGDTVADICRLFNNKGYRTAKGAEFNRNSFKSMFKNERYIGIYTYRDLRIEDGVPAIVDKELFEIVQQRLRKNGEAPARGKAKVDYLLSGKLFCGHCGASMNGESGTGRHGGKFHYYSCYNRKRHRNCDKKPLKKEYIERVVVEDALTLLTDEVIEELADMAISQSDIDLKENTRVPELTAKCDEIDKAIGNITKAIEKGIASDALMERLMVLEKDKKDALRQLREEEKYIYRIDRDQVIYWLYQFKEGDIEDENFRRHIIDLLVNSVTVWDEPDGYRITSAYNLTSAPTKTFKVDGAFSGEGFGFEKLTSTIKSYRYRCVWRKARRINRFRAFSSPDFFF

SEQ ID NO: 1863 - protein, 556 aa, Unknown
  Description of Unknown: Integrase B1864 sequence
  PTHR30461:SF3,IPR036162,PS51737,IPR011109,PTHR30461, PF00239,G3DSA:1.10.10.2600,PF14287,IPR006119,SSF53041, IPR025378,SM00857,IPR025827,cd03770,IPR038109, PS51736,PF13408,G3DSA:3.40.50.1390,PF07508,Coil
MVMMNGMEYTGMDAILAGSFRAAIYCRLSKDDDLDGESASIANQRDMLENYCEKQGWEVVAVYQDDGYTGLNMERPDLKRMLKAIERRQANLVITKDLSRLGRNYLQTGFLIEDFFPRHGVRYIAMNDGIDTMRDNNDIAPFKNILNEMYSKDISKKVHSSYLLKAQKGQFTGCLAPFGYQKDPEDKNHLLIDEETAPIVRRLFAWALEGHGPNYIRRRLEEEKIPCPTYWNRVRGLRNVSTKWEKKDPVNGRYIWDFTVIKDILMNPVYTGAIASQKKEYRFKIGTIGEKKPEEWIVVENQHEPLVDRKTFDIVQRKLKSRQRPRQTGEISLFAGLIKCGECGKSLTIRYTNEKHPKQIYSCKTYNAYGKQHCSQHRVEYDTLYRLVLNKIRECARAALMDGEAVAGKLSDTCEAEQKGQREALERSLAKDEERIDVLEKMVLRLYEDMVAGRISEANFNLLMEKTQKEQAELKTRVEEGRKKLADEIRLACDARQWVEAIQEYADITELDAATLNRLIKEIVVHESIDSDKTRHISIEIHFNLKPIPEVEQVTA

SEQ ID NO: 1864 - protein, 556 aa, Unknown
  Description of Unknown: Integrase B1865 sequence
  SM00857,G3DSA:1.10.10.2600,IPR036162,PF13408,PS51737, IPR025827,G3DSA:3.40.50.1390,IPR006119,IPR038109,PF07508, IPR011109,SSF53041,PTHR30461,Coil,PS51736, cd00338,PF00239
MNIYYARERLRTGSIFDLKLKVAYYARVSTEKVEQQVSIKHQQEYYEEFIRSNQNWTFSGAYIDDGISGIHAEKREEFQNMIRDAKLGRVDMIITKEISRFARNTLDSIQYTRELLSYGVCVWFQNDGINTIDEDSELRLTIMAGVAQDELRKLSSRIKFGHARSIQNGVVLGNRIYGYHKKDGKLTIVPEEAEMIRMIFRDYASGTMSTPKLEKKLWDMGYRNFKGGKINRDVIRNIIKNPKYKGYFCGGKVKIVDMFTKKQEFLPESKWVIFKDDGSRVPQIIDEETWEKANEYMKKRSEAIKSHRTSFKNGNLFTGKIFCANDGAPYWMKQHYVRGKEDVRWVCSYKIKNGADSCSSHGIRESDLKKVVASLINESSCNIDEVIKEYLNIIRKVINNKPDTGIEKERLQNQIDAIKKKKEKILEYNLNGNIPDEEFISRNKDYTKQIIDLEMEISKLVPEDVELQITEKQLSKITEELKSFKEVKEEDINRQIIDKLFDKIVVSLSADKQTVCKFYLSTGCLKIRDLGGVVLNTCYLTIRKNDTRHFIGELVA

SEQ ID NO: 1865 - protein, 556 aa, Unknown
  Description of Unknown: Integrase B1866 sequence
  cd03768,PTHR30461:SF3,SM00857,G3DSA:1.10.10.2600,IPR036162, PF13408,IPR025827,G3DSA:3.40.50.1390,PS51737,IPR006119, IPR038109,PF07508,SSF53041,IPR011109,PTHR30461, PS51736,Coil,PF00239
MNTIAIYTRKSKFTGKGESIENQIEKCKKFIEFKFNIDSENVNIFIDEGFSGKNENRPQYQLMMKKIKKKEIDSIVIYQLNRLGRNARDIHNTMQLCDDLGVIIYSATEGFDSSTSFGRAVIGILASLAQLEREQLAERVKDNMYTLAKMGRWLGGQSPLGFDGSREYYIDETGKERSITKLKKNEEELKLVKLLYDKYLEEKSLSQVGKWALINHLTGKNGGNLNKNAINVILQNPVYVKSSKEVFEYLSNEGYEVCGEPNGNGLLRYGKDDEPIVATAKHKGVIPSDQWIEVQKILKDNAYKAPRMGKTNTALLTGLLRCKCGSTMRISYGQKRKDGTKPFYYICNMKINSGGARCNLKNLNGNLFEKNFIQFLKNYSKETLFAELQKLLNNSKDLESTISSNKIDIEIEKSNKAIKQILNKLKLTDDDELSKILLQEIKVENNKLKVLSKQKEELLNDQSEVVITQSEVLAILDDLDNFQKTFDDLNLEDKQKALKSLIESITLTDDKFIVDFNIKKKLDNAIKKLSSLFAKYKSSQLRHPCRSYMYRHPSWP

SEQ ID NO: 1866 - protein, 556 aa, Unknown
  Description of Unknown: Integrase B1867 sequence
  PTHR30461:SF3,cd00338,SM00857,G3DSA:1.10.10.2600,IPR036162, PF13408,IPR025827,PS51737,G3DSA:3.40.50.1390,IPR006119, IPR038109,PF07508,SSF53041,IPR011109,PTHR30461, mobidb-lite,Coil,PF00239
MPRKPAKHPAKPKRGKKLEIEEPGVLYGRYSSHNQKDISVEQQFEKGYELAAEYGIRIIDTYADRAVSGRTDKRRDFQRMMTDAAKGKFRYVIAWKSNRMGRNMLEALINEARLQDLGVRVLYVEEDFDDTAAGRFAARSMMNVNQFYSENMAEDIKRGLYDNAANCMVANGHLPYGYKADETLHYAIDEPKAAVIREIFTRVSCGEAFVDIMASLNARGIKTSYGRPWGRSSFQKILSNERYRGIYIYGDVRKEGGIPRIVSDELYFKVQEVITTKKNPQGRHRVNGDYLLTGKLFCGHCKSPMTGVSGTGRSGNLHYYYVCQKRRTEKTCDKKNVRRDEIELQVAQAIKDYALKDDVIEWIADSTVAYNERKEAESKVGILEDQLAGTEHGIKNIMSAIEQGIITETTKSRLVELESERATIKAKIAAARADIVTVSRDDIISGLEMFRDGDVHDKKYQARLFDTFLVAVYAYDDDLRLVFSFSGNKNTIQIPIESAVNAVENNEAECSFKLCSAPPKQSQTNQAGSPGFCSAPTVYMTGGIFVLVFPLAYAKK

SEQ ID NO: 1867 - protein, 556 aa, Unknown
  Description of Unknown: Integrase B1868 sequence
  PTHR30461:SF3,SM00857,G3DSA:1.10.10.2600,IPR036162,PF13408, PS51737,IPR025827,G3DSA:3.40.50.1390,IPR006119,IPR038109, PF07508,IPR011109,SSF53041,PTHR30461,Coil, cd00338,PF00239
MPRKPAKHPAKPKRGKKLEIEEPGVLYGRYSSHNQKDISVEQQFEKGYELAVEYGIRIIDTYADRAVSGRTDKRRDFQRMMTDAAKGKFRYVIAWKSNRMGRNMLEALINEARLQDLGVRVLYVEEDFDDTAAGRFAARSMMNVNQFYSENMAEDIKRGLYDNAANCMVANGHLPYGYKADETLHYAIDEPKAAVIREIFTRVSCGEAFVDIMASLNARGIKTSYGRPWGRSSFQKILSNERYRGIYIYGDVRKEGGIPRIISDELYFKVQEVITTKKNPQGRHRVNGDYLLTGKLFCGHCKSPMTGVSGTGRSGNLHYYYVCQKRRTEKTCDKKNVRRDEIELQVAQAIKDYALKDDVIEWIADSTVAYNERKEAESKVGILEDQLAGTEHGIKNIMSAIEQGIITETTKSRLVELESERATIKANIAAARADIVTVSRDDIISGLEMFRDGDVHDKKYQARLFDTFLVAVYAYDDDLRLVFSFSGNKNTIQIPIESAVNAVENNEAECSFKLCSAPPKQSQTNHAGSPGFCSAPTIYMVSDVFVLVCPFSHARK

SEQ ID NO: 1868 - protein, 556 aa, Unknown
  Description of Unknown: Integrase B1869 sequence
  SM00857,G3DSA:1.10.10.2600,IPR036162,PF13408,IPR025827, PS51737,G3DSA:3.40.50.1390,IPR006119,IPR038109,PF07508, SSF53041,IPR011109,PTHR30461,Coil,cd00338, PF00239
MAYRKITDIKDTIGMRAVFYARVSTAEEEQLNAIELQIEENRGCIKDHGWKLVGEYIDRSKSGTMVKGRDDYQRLYEDLYEDLFDIVVIKDQERLQRNTLDWYLFINRVVQTGKLLFMYMDGKFYSPDDALITGVRAIIAEEFSRNLSKKLHNYHDHRIEKARQGQEIALQGSGNVYGWDKKDGKYYINSEQAKVRRLMCEGIMARKGSTLIAKELNDAGYRNTVGKPWKPMDIPKFVYDCKNVGTMIINKERHDFESKQTIKLPKEEWVYVENALPPIVTQEEWDLICKIHEERVIATGSDRRGKKTSGYSFSGKLVCGICGAPYWRKQRVSKDEYWVCSTKQTKGRRTRKRDSTMGKAGEINPLGCDNENISYNSLMEIMGVVSERLQANTDTIKHDMINWLTKLRKQLLEANGGHTEADLQRELSRKSKLLDAYLDGILNKQEYQKKAEELDERIIQLKAETEKNKANSGDIAEIDKVLANIDEEVSRYVDGNEKLKVEYLLEHLEQVQIFPDKVIVIVPILSEGIVVEKTQYVSREKRCGKNNHFTDDFRAY

SEQ ID NO: 1869 - protein, 556 aa, Unknown
  Description of Unknown: Integrase B1870 sequence
  cd03768,SM00857,G3DSA:1.10.10.2600,IPR036162,PF13408, PS51737,G3DSA:3.40.50.1390,SSF109709,IPR025827,IPR006119, IPR038109,PF07508,IPR011109,SSF53041,PTHR30461, PS51736,PF00239
MKTIRCAVYTRKSTEDGLEKEFNTLEAQRESGENYIKSQAYQGWEIIPTHYDDGGFSGGTLKRPALQQLLKDVEAGMVDMIVVYKIDRLTRSLIDFSKLVEIFDRNQCSFVSVTQHFNTYDSMGRLTLNVLLSFAQFEREVITERIRDKVDASKKKGMWMGGVLPLGYVSVNKKLEIIPEEAKIVRLAFEKYLIFRSEIAVAEWLNNNGYTTLSKGNGKFTHIRVSSMLKNVLYIGKVPHKDKVYDGQHHAIISQELFDEVQKIKSQNRIGRLAPSRFVEHALLKGLIYCDCCQAAMISTKSNKKNKVYEYYTSFRAVKEGFNNCKIGSIPAGEMDNFVLRQIAGIIKSPKILSGLIEQAKIIRPDIKDVQIISKLKDGDDFIQRLSSITLRQLLIMLVQKIRVDVDRIKIMYTELAVSLMDDKMKDDLFPNNINGERNEILYRVCLRRKRGSLKIFAPEKYKPDENNPLYLALIKAFVWQDKMKKENLFIEDLAKSEGLSREYVGKVLRMTYLAPDIVTAIVDGVYPKTLSLRKILETEIPLLWSQQRLKYGFSF

SEQ ID NO: 1870 - protein, 556 aa, Unknown
  Description of Unknown: Integrase B1871 sequence
  cd03768,SM00857,G3DSA:1.10.10.2600,IPR036162,PF13408, PS51737,G3DSA:3.40.50.1390,SSF109709,IPR025827,IPR006119, IPR038109,PF07508,IPR011109,SSF53041,PTHR30461, PS51736,Coil,PF00239
MKTMRCAIYTRKSTEDGLDKEFNTLEAQRESGENYIKSQAYQGWEIIPTHYDDGGFSGGTLKRPALQQLLKDVEAGMVDMIVVYKIDRLTRSLIDFSKLVEVFDRNQCSFVSVTQNFNTYDSMGRLTLNVLLSFAQFEREVITERIRDKVDASKKKGMWMGGNLPIGYTTINKKLTVISDEAAIVRLAFEKYLLFRSETMVAEWLNNNGYTTMGKGNGKFTHARVSKMLRNVLYVGKVPHKDKVYDGQHEAIVSQELFDKVQQIKKQNRAGRLSPSRFVEHALLKGFIYCDCCQSAMVSTKSNKKNKVYEYYTSARAVKEGFNNCHVGSVPAGEMDNFVLRQMAQIIKSPKILSGLIEQAKIARPDIKDVQIIDKMKGGDDFMHHLSAITQRQLLILLIKKVRVDVDRIKIMYTDLAIELMDGEFKEQLFPNNIDGEENEVMHRVCLRRKRGSLKIFAPEKYKPDENNPLYLALIKAFVWQDKIKKEGLFIDGLAKSEGLSREYVGKVLRLTYLAPDIVTAIIDGVYPKTLSLNKVLESEIPILWRDQRIKYGFSV

SEQ ID NO: 1871 - protein, 556 aa, Unknown
  Description of Unknown: Integrase B1872 sequence
  PTHR30461:SF3,IPR036162,PS51737,IPR011109,PTHR30461, PF00239,G3DSA:1.10.10.2600,IPR006119,SSF53041,cd00338, SM00857,IPR025827,IPR038109,PS51736,mobidb-lite, PF13408,G3DSA:3.40.50.1390,PF07508,Coil
MPRAAQAAGAAFDGTPRAVIYTRYSSTHQRERSIEDQIADCRAYAERCGLMVVGIYADRAISGKTDERPDFQRMIDDSKKRQFDRVIVWKLDRFARNRYDSALYKHKLKQNGVSVLSAMENIGEGDESIILEAILEASAEYYSRDLRKKVLRGMTTSAKKGLHNTGSVPYGYRLEGESAVPDGDRAEFVKHVFEAYAKGETPAELYREMQSRGLDTKVNGRKVSDNIIGSILRNEKYTGRGMWRGIPVEWPRLIDDELFEAARARTEKNRRAPAAYKAAEPFILCGKAFCGYCGAPLMSGGGKGRSGKYYRHYICRTKKRERACGKKTEDKDFLEWYIVEQTCAYVLAPERLEYIAERVVECYKESFDGQRVSALEARIAKLDRDLDKTTDLLFAAPSAAAVDRINKHVVELEAQKSELEAELSGLKIAAAITYTRDEVVAWLKQFCNGDPLEAEFRRRIVETFINSVYVYDDRIVIYFNVRGGKQISYAEMLESVGDVEPLPPGPENEKSGGPDNGTAANNSKERFLHGKNTEQTTESAVRFCSGLVHQDSIIRT

SEQ ID NO: 1872 - protein, 556 aa, Unknown
  Description of Unknown: Integrase B1873 sequence
  PTHR30461:SF3,cd00338,SM00857,G3DSA:1.10.10.2600,IPR036162, PF13408,PS51737,IPR025827,G3DSA:3.40.50.1390,IPR006119, IPR038109,PF07508,IPR011109,SSF53041,PTHR30461, mobidb-lite,Coil,PF00239
MPKKPTKHPAKPKRGKKLETEEPGVLYGRYSSHNQKDISVEQQFEKGYELAAEYGIKIIDTYADRAVSGRTDKRKDFQRMMSDAAKGKFRYVIAWKSNRMGRNMLEALINEARLQELGVRVLYVEEDFDDTAAGRFAARSMMNVNQFYSENMAEDIRRGLYDNASNCMVANGHLPYGYKRDDTLHYVIDEPKAAVIREIFTRVAAGEPFVDIMSSLNARGIKTSYNRPWGRSSFQKILSNERYRGIYIYGDVRKEDGIPRIISDELFFKVQEVITTKKNPQGRHRVNGDYLLTGKLFCGKCKSPMVGISGTGRSGKLHYYYVCQKHRTEKTCDKKNVRRDEIELQVAQAIKDYALKDDVIEWIADSTVAYNERKEAESKVGILEDQLAGTERGIKNIMSAIEQGIITETTKSRLVELESERATIKAKIAAARADIVTVSRDDIISGLEMFRDGDVHDKKYQARLFDTFLVAVYVYDDDLRLVFSFSGSKNTVQIPIESAVNAVENNEAKCSFKLCSAPPKQSQMNHAGSPGFCYAPTIYMVSGIFVLVCPFDHARK

SEQ ID NO: 1873 - protein, 556 aa, Unknown
  Description of Unknown: Integrase B1874 sequence
  SM00857,G3DSA:1.10.10.2600,IPR036162,PF13408,PS51737, G3DSA:3.40.50.1390,IPR025827,IPR006119,IPR038109,PF07508, IPR011109,SSF53041,PTHR30461,Coil,PS51736, cd00338,PF00239
MNIYYARERLRTGSIFDLKLKVAYYARVSTEKAEQQVSIKHQQEYYEEFIRSNQNWTFSGAYIDDGISGIHAEKREEFQNMIRDAKLGRVDMIITKEISRFARNTLDSIQYTRELLSYGVCVWFQNDGINTIDEDSEFRLTIMAGVAQDELRKLSSRIKFGHARSIQNGVVLGNRIYGYHKKDGKLTIVPEEAEMIRMIFRDYASGTMSTPKLEKKLWDMGYRNFKGGKINRDVIRNIIKNPKYKGYFCGGKVKIVDMFTKKQEFLPESKWVIFKDDGSRVPQIIDEETWEKANEYMKKRSEAIKSHRTSFKNGNLFTGKIFCANDGAPYWMKQHYVRGKEDVRWVCSYKIKNGADSCSSHGIRESDLKKVVASLINESSCNIDEVIKEYLNILKKVINNKPDTGIEKERLQNQIDAIKKKKEKILEYNLNGNISDEEFISRNKGYTKQIIDLEMEISKLVPEDVELQIAEKQLSKITDELKSFKEVKEEDINRQIIDKLFDKIVVSLSADKQTVCKFYLSTGCLKIRDLGGVVLNTCYLTIRKNDTRHFIGELVA

SEQ ID NO: 1874 - protein, 556 aa, Unknown
  Description of Unknown: Integrase B1875 sequence
  cd03768,SM00857,G3DSA:1.10.10.2600,IPR036162,PF13408, IPR025827,G3DSA:3.40.50.1390,PS51737,SSF109709,IPR006119, IPR038109,PF07508,SSF53041,IPR011109,PTHR30461, PS51736,PF00239
MKTMRCAIYTRKSTEDGLDKEFNTLEAQRESGENYIKSQAYQGWEIIPTHYDDGGFSGGTLKRPALQQLLKDVEAGMVDMIVVYKIDRLTRSLIDFSKLVEVFDRNQCSFVSVTQNFNTYDSMGRLTLNVLLSFAQFEREVITERIRDKVNASKKKGMWMGGNLPIGYTTIHKKLTIIPDEAAIVRLAFEKYLLFRSETMVAEWLNNNGYTTMGKGNEKFTHARVSKMLRNVLYVGKVPHKDKVYDGQHEAIVSQELFDKVQQIKKQNRAGRLSPSRFVEHALLKGFIYCDCCQSAMVSTKSNKKNKVYEYYTSARAVKEGFNNCHVGSVPAGEMDNFVLRQMAQIIKSPKILSGLIEQAKIARPDVKDVQIIDKMKDGDDFMHHLSAITQRQLLLLLIKKVRVDVDRIKIMYTDLAIELMDGEFKEQLFPNNIDGEENEVMHRVCLRRKRGSLKIFAPEKYKPDENNPLYLALIKAFVWQDKIKKEGLFIDALAKSEGLSREYVGKVLRLTYLAPDIVTAIIDGVYPKTLSLNKVLESEIPILWRDQRIKYGFSV

SEQ ID NO: 1875 - protein, 556 aa, Unknown
  Description of Unknown: Integrase B1876 sequence
  SM00857,G3DSA:1.10.10.2600,IPR036162,PF13408,PS51737, G3DSA:3.40.50.1390,IPR025827,IPR006119,IPR038109,PF07508, IPR011109,SSF53041,PTHR30461,Coil,PS51736, cd00338,PF00239
MNIYYARERLRTGSIFDLKLKVAYYARVSTEKAEQQVSIKHQQEYYEEFIRSNQNWTFSGAYIDDGISGIHAEKREEFQNMIRDAKLGRVDMIITKEISRFARNTLDSIQYTRELLSYGVCVWFQNDGINTIDEDSEFRLTIMAGVAQDELRKLSSRIKFGHARSIQNGVVLGNRIYGYHKKDGKLTIVPEEAEMIRMIFRDYASGTMSTPKLEKKLWDMGYRNFKGGKINRDVIRNIIKNPKYKGYFCGGKVKIVDMFTKKQEFLPESKWVIFKDDGSRVPQIIDEETWEKANEYMKKRSEAIKSHRTSFKNGNLFTGKIFCANDGAPYWMKQHYVRGKEDVRWVCSYKIKNGADSCSSHGIRESDLKKVVASLINESSCNIDEVIKEYLNILRKVINNKPDTGIEKERLQNQIDAIKKKKEKILEYNLNGNIPDEEFISRNKGYTKQIIDLEMEISKLVPEDVELQIAEKQLSKITEELKSFKEVKEEDINRQIIDKLFDKIVVSLSADKQTVCKFYLSTGCLKIRDLGGVVLNTCYLTIRKNDTRHFIGELVA

SEQ ID NO: 1876 - protein, 556 aa, Unknown
  Description of Unknown: Integrase B1877 sequence
  PTHR30461:SF3,SM00857,G3DSA:1.10.10.2600,IPR036162,PF13408, IPR025827,PS51737,G3DSA:3.40.50.1390,IPR006119,IPR038109, PF07508,SSF53041,IPR011109,PF00239,PTHR30461, PS51736,Coil,cd00338
MDILKTREQLRSCSIYDLPLRVTFYARVSTEKDAQLNSLDNQISFYSNMIKKNPNWEYVEGYIDEGLSAITTEKRENFHRMVTDGENGEFDMIITKEISRFARNTLDSIRFTRELLHFGVAVFFQNDNINTLDEDSELRLTIMSSIAQDELRKLSSRIKFGHQQAIKDHVVLGNSRIFGYSKDNKRLVIDEDEAKMVRELFELYATNEYSMKQIENIFWEKGYRNHNGNKIAHTTMSGMISNPKYKGYYVGNKVKVVDMFTKKQKFLPPEDWVMFKDETGEIVPAIVSEELWDKANDVLERRSKDVKNRQGKCNHGNLLTGKLFCTDCGATYYRRDAKDRQGNKNSKWICSGKIKNGAESCKSFPIYESDVVPILLEVFKETSCDVEELINQYIEMYKSLSQPEEVGRRLDELKKKMDLEQKKKSKLLGYNVSGQISDRDFISLTKQCSNEIALCEKEISALENEMQTRNDFKKRIEEMRRTLKRASEDANSGVINHSFVEKYIDKIYVTPIDETHMEMKIKLFTNETTTKYLENLRVRTGHTFKKMIESYENSMK

SEQ ID NO: 1877 - protein, 555 aa, Unknown
  Description of Unknown: Integrase B1878 sequence
  SM00857,G3DSA:1.10.10.2600,IPR036162,PF13408,PS51737, IPR025827,G3DSA:3.40.50.1390,IPR006119,IPR038109,PF07508, IPR011109,SSF53041,PTHR30461,Coil,PS51736, cd00338,PF00239
MLLLLDINFNRTFEPNYRLIKNRLLRQQEPASNTSEDASQIQQKYCIIFGAAMQAEHPFYFWLLFLYSFLHTTKQEGDIMAKLRNGALYIRVSTADQTELSPDAQQRLLLDYAKKNGIIISKDYVFEESVSGRHADKRPKFQEMIGIAKQESHPIDVILVWKYSRFARNQEESIVYKSLLKKSNVDVISISEPLIDGPFGTLIERIIEWMDEYYSIRLSGEVIRGMKEKALKHGYQTTPCLGYDAVGGGKPFVINEEEYKIVQYIMDQYDLYDQDATAIARKCNDLGFRSKRGNLFEQRNVDLILKNPFYAGTVVWNGISFEGSHETRLSKERFEKRIALMRARRRPAKARNISTCKHWLSGLLRCSVCGATLSLAGSGSYRYFQCWKYSKGFHTGSQSLSAAKAEAAVCDYFDRILAGADFTYTVRNIPDQKESDELDLLRQELDQIAVKEARVKLAYENGIDTLEEYKENRRRLKESREELQEKIDDATAATQPEDSDSVAREALLKEIRSVSEILKDPAESYERKGLLLRSIVDGITYDKEKNRLYFNFFIS

SEQ ID NO: 1878 - protein, 555 aa, Unknown
  Description of Unknown: Integrase B1879 sequence
  PTHR30461:SF3,SM00857,G3DSA:1.10.10.2600,IPR036162,PF13408, PS51737,G3DSA:3.40.50.1390,IPR025827,IPR006119,IPR038109, PF07508,IPR011109,SSF53041,PTHR30461,Coil, cd00338,PF00239
MARTATKHPAKPKRGKKLEAEEPGVLYGRYSSHNQKDISVEQQFEKGYGLAGEYGIRIVETYADRAVSGRTDKRKDFQRMMADAAKGKFRYVIAWKSNRMGRNMLEALVNEAKLQELGVRVLYVEEDFDDTAAGRFAARSMMNVNQFYSENMAEDIKRGLYDNASNCMVANGHLPYGYKRDDTLHYVIDEAKAAVIREIFVRVSCGEPLVDIYDSLNARGIKTSYGRPWGRSSFQKILSNERYRGIYIYGDVRKEGGIPRIVSDELYFKVQEVLKTKKNPQGRHRVNGDYLLTGKLFCGNCKSPMIGISGTGRTGKLHYYYVCQKKRSEKTCDKKNVRRDEVEYQIAKAIFDNALQDQVIEWIADSTIAYNDRKEAEGHIGILEDQLADVQRSLKNIMSAIEQGIVTETTKSRLLELESERSEIEGKIAAAKADIVPVNREQLIEWLLSLREGDIHDKKYQARLFDTFLIAAYLYDDGTAKLVFSFAGDKNTVTVPLAEAVDSVEENTAEGSFKLCLAPPKQSQTNQMRSPGFSASPAIYMVGGAFVLVCSLVQE

SEQ ID NO: 1879 - protein, 555 aa, Unknown
  Description of Unknown: Integrase B1880 sequence
  SM00857,G3DSA:1.10.10.2600,IPR036162,PF13408,IPR025827, G3DSA:3.40.50.1390,PS51737,IPR006119,IPR038109,PF07508, SSF53041,IPR011109,PTHR30461,Coil,cd00338, PF00239
MAYRKITDIKDTIGMRAVFYARVSTAEEEQLNAIELQIEENRGCIKDHGWKLVGEYIDRSKSGTMVKGRDDYQRLYEDLYEDLFDIVVIKDQERLQRNTLDWYLFINRVVQTGKLLFMYMDGKFYSPDDALITGVRAIIAEEFSRNLSKKLHNYHDHRIEKARQGQEIALQGSGNVYGWDKKDGKYYINPEQAKVRRLMCEGIMARKGSTLIAKELNDAGYRNTVGKPWKPMDIPKFVYDCKNVGTMIINKERHDFESKQTIKLPKEEWVYVENALPPIVTQEEWDLICKIHEERVIATGSDRRGKKTSGYSFSGKLVCGICGAPYWRKQRVSKDEYWVCSTKQTKGRRTRKRDSTMGKAGEINPLGCDNENISYNSLMEIMGVVSERLQANTDTIKHDMINWLTKLRKQLLEANGGHTEADLQRELSRKSKLLDAYLDGILNKQEYQKKAEELDERIIQLKAETEKNKANSGDIAEIDKVLANIDEEVSRYVDGNEKLKVEYLLEHLEQVQIFPDKVIVIVPILSEGIVVEKTQYVSREKRSRKDDAFKTYVRN

SEQ ID NO: 1880 - protein, 555 aa, Unknown
  Description of Unknown: Integrase B1881 sequence
  PTHR30461:SF3,SM00857,G3DSA:1.10.10.2600,IPR036162,PF13408, IPR025827,PS51737,G3DSA:3.40.50.1390,IPR006119,IPR038109, PF07508,PF14287,IPR011109,SSF53041,cd03770, PTHR30461,IPR025378,PF00239
MTKQPDKITALYCRLSRDDEQDGLSGSIKNQQTILEKYAQENGFRNTRVFIDDGWSGTNFARPAFTEIMELAEKGLIGTLIVKDHSRLGRNRLIVGQLLEEGFDSLGVRYIAIMDNIDTAKGISDLVPMQDLFNEWHAKNTSQKVRNVFKSKGMSGAPLTTNPPFGYQKDPESKNGWLVDEEAAKTVRQIFAWCVDGLGPTQIAKRLKAGKIPTPTEHWSNIGRNCSKLPAVPYNWCSATVADILGKQEYCGDTVNFRSTTKSFKNKKKIERPSEEWQIFKDTHPAIIDRETFALVQELRKHRRRPTKSGIVSPFSGLLYCADCGEKLYYSVTGSYKREQAYFFCSSYRKNSEVCSAHYIREKVVEQIVLESMQRILLNVQVFEKEFARKQMDCYTEDKKKLLAAKRRELGKVKKRIAEIDTLIQKIYEDNASGKLSDERYATLSLSYEEEQKTLKAAVPEMQAYLEAETDKTESLQRFIQKVKQITELKALTPELIHEFVDRIVVYAPRYLDGKRVQLLDIYYSGVGILHELTPEEMEEAFQHHLTERNKEKTA

SEQ ID NO: 1881 - protein, 555 aa, Unknown
  Description of Unknown: Integrase B1882 sequence
  PTHR30461:SF3,cd00338,SM00857,G3DSA:1.10.10.2600,IPR036162, PF13408,PS51737,IPR025827,G3DSA:3.40.50.1390,IPR006119, IPR038109,PF07508,IPR011109,SSF53041,PTHR30461, PS51736,Coil,PF00239
MDETRLIFPSSLKEREIEMKKRVYTLYRVSTKGQVEKDDIPMQKEACRNFAESQGWEIVKEFSEKGVSGFKKSAKERDELQKIQQAAMEGKFDILLVFMFDRLGRRDDETPFIVEWFTKQGIEVWSVNEGQQRFDTHVDKLMNYIRYWQASGESLKTSVRTRTRLEQLTGEGHYTGGTVAFGYKRVRLGRVNKKNQEVCDLVIDEAEAEIVRLIFHKYVYEGYGAQKLSHYLYEQGVVGRNSKNIPNTSIVRMIKNKGYTGYLINGAVETECPQLRIIEPELFEQAQELRQARTCERGGTSLGTSSKALLTGLVYCGHCGNRLSLTSSGRTHTYADGHTVKEVRPRYSCFYKIRHPGDCDGQSGYGVSKLDSIVEEVVRQIFAQFREVSRKKLLESVKTNDAARIQKKIKKIQKDLEAKQKELDDLKAETILVIRGVSALDKELLGTLVAEAKDALETLEKQLVQAQEEYEEATKTAKRSNYICNELFTWADVYDTANHDERRAILQQFIKEIRVRKDYEISIALNASFNQVEQLKAVSTYDGAEIFEEISEKGA

SEQ ID NO: 1882 - protein, 555 aa, Unknown
  Description of Unknown: Integrase B1883 sequence
  PTHR30461:SF3,SM00857,G3DSA:1.10.10.2600,IPR036162,PS51737, G3DSA:3.40.50.1390,IPR006119,IPR038109,PF07508,IPR011109, SSF53041,PTHR30461,Coil,PS51736,cd00338, PF00239
MKSTIYARYSTDKQRESSIDDQTRLCRQRAQTEGFEITAIYSDDGVSGSMPVSRRSGGAKLIADALAGRFDALIVESLDRLSRDQVEQESIIRRFEHHGIIIIGVSDGYDSRMDGRKIMRGVRGLINELYLDDLRHKTHRGQEGQVARGFLAGGKSYGYNIIKTDKGSRPEINEQEAKQVKWIFTRYAEGWSVQKIAAELNRQRIPSPRGRTWAVSGIYGSPAKGCGILNNEMYIGRYVWNRSQWVKDPDTGNRQRIDRPESEWKITEMPELRIIDDNLWQAVRNRMGKHGKKIIGRKATTLFGGLMTCPYCGGSIIAVSSRLYGCNTRKDRGSSVCKGILFSRDDADKNLLAILQDEMLTDEAIHEIENQVHAILASRQKDQRDQKNAAENRLKELDAEINRLVDAIASIGLSNALKSRLQAAESERDALQAQQSAQKAINKPIHKMDIVGRIRKKIGEMKTVLTSDTKRARKIIADMLGEIRITEKAGNVIAEYDKATQKLLLVSSGVSLNVVAGARYQLERQTKIIATRKLSPVSVDKDGEKMKIIRRHKDL

SEQ ID NO: 1883 - protein, 555 aa, Unknown
  Description of Unknown: Integrase B1884 sequence
  PTHR30461:SF3,SM00857,G3DSA:1.10.10.2600,IPR036162,PF13408, PS51737,IPR025827,G3DSA:3.40.50.1390,IPR006119,IPR038109, PF07508,IPR011109,SSF53041,PF00239,PTHR30461, Coil,cd00338
MPRKPAKHPAKPKRGKKLEIEEPGVLYGRYSSHNQKDISIEQQFEKCYELAAEYGIRIIDTYADRAVSGRTDKRVDFQRMMADAAKGKFRYVLAWKSNRIGRNMLEALVNEARFQELGVRVLYVEEDFDDTAAGRFAARSMMNVNQFYSENMAEDIKRGLYDNAANCMVTNGHLPYGYKADETLHYAIDEPRAAVIREIFTRVSCGEAFVDIMSSLNARGITTSYGRPWGRSSFQKILSNERYRGIYIYGDVRIEGGIPRIVSDELYFKVQEAITTKKNPQGRHRVNGDYLLTGKLFCGHCKSPMTGISGTGRAGKLHFYYVCQKRRTEKTCHKKNVRRDVIELKIAKAIRDYALKDDIIEWIADSCVEDHDRRVSESHLSVFEDQLAEVNRSIKNVMSAIEKGIITETTKGRLMELEAERTAIEGKICAAKAAIVPTNRERLVEWLRSLREGDVHDKKYQAGLFDTFLVAAYLYDDNRVKIVFSFTGDKNTIEIPLEDVIDSIDDEASCVRLSSTLSHQKTFAQKCGGFLLITYYFFTVTLSELRFFGKVKSKK

SEQ ID NO: 1884 - protein, 555 aa, Unknown
  Description of Unknown: Integrase B1885 sequence
  SM00857,G3DSA:1.10.10.2600,IPR036162,PF13408,IPR025827, PS51737,G3DSA:3.40.50.1390,IPR006119,IPR038109,PF07508, IPR011109,SSF53041,PF00239,PTHR30461,PS51736, Coil,cd00338
MARKKKFELNDNNLAIAYYRFSSHSQNEASIDQQRELAHAWADAHGFKIVKEYEDAAISGTTEDRPGFQQMLSEVAKIRPRVLIMWKTDRLGRDKYVLAMAKRTIRDAGCEIRLLAENIPTDGPEGVLIEGLMDAMAEYYSRQLSQNIQRGMDYNAQHALYNGHKLFGYGVDKSTKRYVVDPDTAPFVQRMFAEYAEGKAMQTICDELNAQGLRTTRGAKFGVKTMNKMLQNRAYIGEYRHGDIVVEGGMPALVDEETFDKVQRKFAENKRKGSQRARGMDENDAPRYWLTGKVYCGKCGSTLQGVSGTSGTGRTYYYYYCSAQRRKQCTLKKVRKEKLEDAVTMILRSILHDSENLMSLAVDAAAYYEKNYRDTGYLDGLEAKRREVEKSLANLVKVIESGLISETVTERLVQLEEQKRALNEAIEAENIRAALCEDEHTIKAYFEKFLHADFDNPETRDQVLEYFVDKIYLTDDGLVVTSWYSEDRTEVTWDMLYGEDGNPFVKGEAVKFDCFPFGSTMHWYGEHPSGARRFFVCSTLISCESRGFYSGESGV

SEQ ID NO: 1885 - protein, 555 aa, Unknown
  Description of Unknown: Integrase B1886 sequence
  PTHR30461:SF3,cd00338,SM00857,G3DSA:1.10.10.2600,IPR036162, PF13408,PS51737,G3DSA:3.40.50.1390,IPR025827,IPR006119, IPR038109,PF07508,IPR011109,SSF53041,PTHR30461, PS51736,Coil,PF00239
MARKKNIAAGLDAVIYARYSSHNQREVSIEQQIAECTKHAAALGLRIVGTYEDRAISGKTDNRPRFQQMMRDAEKGKFQAVVAWKSNRIGRNMLQAMVNEAKLDDYGVKVFYAEEDFDDTAAGRFALRNMMNVNQFYSENMAEDITRGLYDNASKCMANGRQPLGYKRGEDGRVVLDEANAAVVREIFTRVAAGDLFVDIARDLNAQGIKTSKGANWNKGSFQSICQNERYRGIYIYGDVRVADGIPRIVSDDLWYRVQEAMRMKKNPVGTRHRVGAEDYLLTGKLRCGHCGSYMTGVSGTSRNGELHYYYTCQKRRTEHACDKKNIRRDVIEPAVAQAIKMYCLTDDVIEWMADRTVEYWEKHDNDLQIEALEQQLEENKKATSNMLKAIEMGIITEATRTRMVELETEQSRLSVQLNAAKEDVVKIDREQIISYLELLQQGDIHDRDFQMELFKNFLVAVYVYDDNRMKLVFSCMGDQNSVEIPLETGEDPPDGGLSPDAKMFVLTPDSSTKKALYFVGSMVLFFLRGQIFGAALLRLHVFWAFCEKPGCSRR

SEQ ID NO: 1886 - protein, 555 aa, Unknown
  Description of Unknown: Integrase B1887 sequence
  PTHR30461:SF3,SM00857,G3DSA:1.10.10.2600,IPR036162,PF13408, IPR025827,PS51737,G3DSA:3.40.50.1390,IPR006119,IPR038109, PF07508,SSF53041,IPR011109,PTHR30461,Coil, PS51736,cd00338,PF00239
MDETRLIFPFSLKEREIEMKKRVYTLYRVSTKGQVEKDDIPMQKEACRNFAESQGWEIVKEFSEKGVSGFKKSAKERDELQKIQQAAMEGKFDILLVFMFDRLGRRDDETPFIVEWFTKQGIEVWSVNEGQQRFDTHVDKLMNYIRYWQASGESLKTSVRTRTRLEQLTGEGHYTGGTVAFGYKRVRLGRVNKKNQEVCDLVIDEAEAEIVRLIFHKYVYEGYGAQKLSHYLYEQGVVGRNNKNIPNTSIVRMIKNKGYTGYLINGAVETECPQLRIIEPELFEQAQELRQARTCERGGTSLGTSSKALLTGLVYCGHCGNRLSLTSSGRTHTYADGHTVKEVRPRYSCFYKIRHPGDCDGQSGYGVSKLDSIVEEVVRQIFAQFREVSRKKLLESVKTNDAARIQKKVKKIQKDLESKQKELDDLKAETILVIRGVSALDKELLGTLVAEARETLETLEKQLVQAQEEYEEATKTAKRSNYICNELFTWADVYDTANHDERRAILQQFITEIRVRKDYEISITLNASFNQVEQLKAVSTYDGAEIFEEISEKGA

SEQ ID NO: 1887 - protein, 555 aa, Unknown
  Description of Unknown: Integrase B1888 sequence
  PTHR30461:SF3,SM00857,G3DSA:1.10.10.2600,IPR036162,PF13408, IPR025827,G3DSA:3.40.50.1390,PS51737,IPR006119,IPR038109, PF07508,IPR011109,SSF53041,PF00239,PTHR30461, PS51736,Coil,cd00338
MMTLFEIRNALADGTSIYELPLKVTYYARVSTDKYEQLNSLENQVTYYENYIKENCKWTFVEGYIDEGISGTSTNKRDSFKRMIRDGQNGKFNLVITKEISRFARDTLDSISYTRKLLEYGVGVFFQYDHINTFNSDSELRLTIMASIAQEEVRKLSERVKFGFQRSIESGKVLGNDFIWGYKKDKCKLVVVEEEAEIIRKIFDMYVNEHLGMRSIGNKLAGEGILNKNGKPFQQGTIKYILTNPKYKGYYCGNKTRVIDYHTKQRVNINEEDWKLYEDNINVPPIVSEYIWNKAQEIVKSRSDRFSTHKEVYQNRYPFSGKIFCMNHNTTYRRKKQISSGKKKKVVITWRCSHFLKYNTTGCDGPILYDDELKEIVGKSILKYISNVSIVDDLIKEYKTIEDNKDYSKDIEKKKDEIERLERSKSKILDLIVKELINEDDFKKQSDEIVSKIHKLENEISELETKSKSILTNYKYLEEVRKKALEKLKYENADIDSLIYEFLEKIEVYKLNDNNYISLRVILNTGNQYGITFKHGEHPFGTNYTYDKSRSRKHI

SEQ ID NO: 1888 - protein, 555 aa, Unknown
  Description of Unknown: Integrase B1889 sequence
  PTHR30461:SF3,cd00338,SM00857,G3DSA:1.10.10.2600,IPR036162, PF13408,IPR025827,PS51737,G3DSA:3.40.50.1390,IPR006119, IPR038109,PF07508,IPR011109,SSF53041,PTHR30461, PS51736,Coil,PF00239
MTVKKFPIDLSCLTEEEISQFQEDPYTLYNGDQEVALYLRYSSTGQSDQSIEGQLRDCRAFCKANHYRIVAIYVDRATTARKDVEKRVHLMEMVADSAKQNWEYVIVWKLDRFARNRNDSAIMKMRLRKNGVKVLSATEHLTDSPESIILESVLEGMAEFFSAELSQKVTRGMRESALKCHSVGGHIPLGYKVENHKLVVDPDTAHIVQEAFSLYANGESVADICRKFNSAGYKTAKNTEFNRSSFKAMFRNTRYIGTYTYKDIVIENGIPAIIDKELFETVQRRLSKTATAPARGKAKVDYLLSGKLFCGHCGASMNGESGAGRHGKVYHYYSCYTKKRKLGCDKRPLKKDYIEGIVARDALNLLTDQLIDEIADMAIRQSEQDLINDTHIPQLTAQLSEVEKSITNITAAIEKGIASETLMNRLVQLEHEKKTLNKEIKAEEKFVYRIDRDQIIFWLSQFKYGNIEDEDFRRRLIDLLVNSVTVWDEPDGYKITTAYNLTSCKTKTFRVDKNPAAEEATGFDFGESECTIERISEPYIVWGTVFVQTKRHSLP

SEQ ID NO: 1889 - protein, 555 aa, Unknown
  Description of Unknown: Integrase B1890 sequence
  PTHR30461:SF3,IPR036162,PS51737,IPR011109,PTHR30461, PF00239,G3DSA:1.10.10.2600,IPR006119,SSF53041,cd00338, SM00857,IPR025827,IPR038109,mobidb-lite,PS51736, PF13408,G3DSA:3.40.50.1390,PF07508,Coil
MYEDIKTACLYVRFSSHNQTEQSIEGQTRVCRDFCKRHNIRIVEIYADRATSASKDIEKRVQFLKMIKDSEKGLFDAVIVYKLDRFARSRYDSATYKYRLKRNGVQLISATENISNDPEGIILESVLEGMAEFYSAELSQKINRGMRESAYKHNSIGGAIPLGYKIEDKKLVIDPKTAPIVKEAFEKYADGETVAEICRQFNARGYKTSKGTAFGKSSFTKIFRNERYIGVYTFHDYRAEDAIPAIIDKDLWDRVQLRVGKIKNAPARNKAKVVYLLSGKIFCGHCGSKMNGNCNAGNYCYYQCYGKKNGNVDCKKKNIRKEFIERLVAQDALSLLTDEYIEQIATIACEKNQHEIELDSALPTIRDRIHQVDLSLNHLLKAIESGSAPDMLVKRMGELEKEKKDLQAQAKKESEDIVELDKAQVIYWLEQFRGGSIEDEEFCRMLIDLFVNSVTVWDEDDNTYKVTVAYNLTSLPTKTYRLNKGGTLSDFASNAPPINRHTHRSCAPAPQETASARSAGRRGGCTPQKFRFCTAYYRRIAPCLQAGCPPTRGRA

SEQ ID NO: 1890 - protein, 555 aa, Unknown
  Description of Unknown: Integrase B1891 sequence
  PTHR30461:SF3,cd00338,SM00857,G3DSA:1.10.10.2600,IPR036162, PF13408,IPR025827,PS51737,G3DSA:3.40.50.1390,IPR006119, IPR038109,PF07508,IPR011109,SSF53041,PTHR30461, PS51736,Coil,PF00239
MTVKKFPIDLSCLTEEEISQFQEDPYTLYNGDQNVAIYLRYSSTGQSDQSIEGQLRDCRTFCKANHYRIVAIYVDRATTARKDVEKRVHLMEMISDSAKQNWEYVIVWKLDRFARNRNDSAIMKMRLRKNGVKVLSATEHLTDSPESIILESVLEGMAEFFSAELSQKVTRGMRESALKCHSVGGHIPLGYKVENHKLVVDPDTAHIVQEAFSLYANGESVAAICRKFNSAGYKTAKNTEFNRSSFKAMFRNTRYIGTYTYKDIVIENGIPAIIDKELFETVQRRLSKTATAPARGKAKVDYLLSGKLFCGHCGASMNGESGAGRHGKVYHYYSCYTKKRKLGCDKRPLKKDYIEGIVARDALNLLTDQLIDEIADMAIRQSEQDLINDTHIPQLTAQLSEVEKSITNITAAIEKGIASETLMNRLVQLEHEKKTLNKEIKAEEKFVYRIDRDQIVFWLSQFKYGNIEDENFRRRLIDLLVNSVTVWDEPDGYKITTAYNLTSCKTKTFRVEKNPAAEEATGFDFGESECTIERISEPYIVWGTVFVQTKRHSLP

SEQ ID NO: 1891 - protein, 555 aa, Unknown
  Description of Unknown: Integrase B1892 sequence
  PTHR30461:SF3,cd00338,SM00857,G3DSA:1.10.10.2600,IPR036162, PF13408,PS51737,G3DSA:3.40.50.1390,IPR025827,IPR006119, IPR038109,PF07508,SSF53041,IPR011109,PTHR30461, PS51736,Coil,PF00239
MNRKELLFKGYRVVFYARVSTEEEEQLNAIELQIEENRSVIAENGGTLVDEYIDRGKSGTMTKKRDDYLRLYEDMSTDKFDIICIKDQDRLMRNTRDWYLFVDRLVTTGKKLYLYLDGKFFIPAEDALITGVKAIMAEEYSRNLSKKLTNYNKRRLDKARAGETVRLQGSGNAYGWNKKDGVYTINPEQFKIRRLMCELTLQGMGTTAVAEYLNSNGYRNSIGKEWRAQDIPKFIYDEKNIGTLIINKERRDFDTKTRVKVPPEEWVTIENALPPVVTPEEWERLCKIREERTTLTRGKYVGKKKGGYFTGKLVCGCCGAPYWRSLCKNRSKEGSREYWVCKTKQTEGRKTRMKTTAKGKAGDINPKGCDNANISYNDLMEILQRVADQLSANTDQIKADMLSWLENLKANIVKSVASYTEEDLRKEESRRDKLLDSYLDGIISKEVYRRKNQDLEARIKMIQKDIESCHAQAEDIEDIDNIIKNIDKEVEKYIAENENLKLNFVLENLKSIVVYDDFVEVNIPVIGSGVMLRNIQLVSRQEWCRKKHYYQSDIK

SEQ ID NO: 1892 - protein, 555 aa, Unknown
  Description of Unknown: Integrase B1893 sequence
  PTHR30461:SF3,IPR036162,PS51737,IPR011109,PTHR30461, PF00239,G3DSA:1.10.10.2600,IPR006119,PF14287,SSF53041, IPR025378,SM00857,IPR025827,cd03770,IPR038109, PF13408,G3DSA:3.40.50.1390,PF07508,Coil
MIIACCILSESEVKMTDKITALYCRLSQDDMLDGESNSITNQKAILQKFAEDNGFPNPTFYVDDGVSGTTWERDGFKAMMADIEDGKVATVITKDLSRLGRDYLKTGELIEMVFPDYDVRYIAVNDNVDTAKSENELLAFKNIFNDWYARDCSKKIRAVFRAKGQSGKHLCPPVYGYKKSETDKNLWVIDEPAAEVVRKIFKLCIDGYDPVQIARILTEQGIPTPTAYALLQGRDNGRHNAKTYRWGAQTIAHILERYEYCGHTVNFRTKMKSYKVHKIVYNPQDEWQIFENTQEPIITQQTFDLVQELRKHKRRPQKMQTVNPFAGMVYCADCGEKMYLSRRKNERPEQEHMRCSTYAKEQDKCSVHYIRTCVLNEIVLGELNKLLTMVRENEDEFIQTAMSNSVQRKSSELTKAKKALKQAEKRIAELDKLFTRLYEDNVLGRLSDERFTMMSAGYEDEQKQLKATVTELTAFVETAEQKSSDVTAFLKVVHRYEHIETLTPEIMHELVDKIIVHEPDKSSGKRVQDIEIHFRFGVAVSTISVETGKYGKKVA

SEQ ID NO: 1893 - protein, 555 aa, Unknown
  Description of Unknown: Integrase B1894 sequence
  SM00857,G3DSA:1.10.10.2600,IPR036162,PS51737,G3DSA:3.40.50.1390, IPR006119,IPR038109,PF07508,SSF53041,IPR011109, PF00239,PTHR30461,PS51736,Coil,cd00338
MDKRILCIIRASTEKQETESQKKELISYCEAKGFTVDEMAFIEVAGASARKLNKKYIQMLEDIKATLLSSPTIKAVALWDLNRLGRVESKLHEMKEFFVAHKIQVYCKSPEFVLLNEDGTASDAGGIVFSVFASIVKHDTDEMFAKMNRGRMRNKENGIYYGGQIKFGYTLDETKHFIIKEEEAKTIRLIFELYATGKYSFYSLIDELKARGITKNGKKITFEMIQNALSDEAYYNGKLPIISKDLFDKCTAIKANSVAVKRTKETCNVNFAVGLLKCECGNNFIASGDYYTCFSKVNRKRKKVVVECDAPVIKSDLLDDLLWIVTRPLQQKFLMQTDSQSVAENNDKINVLTVKVSTAQKELSSFKDRIEKLEDAYYVEGEMDEAQFKKRLGILKSKKVQTESLITNYRNEINDIKKVIEQLEQPINDRYLQSLLLSNLDTEDIEDRKKIKEMMFMHIEKVTAKKVMLGNHKGVEITIIAKSGLSFVFFYDIWLSSFRKGECNTFYEDKPLYEVNGFIKSMNTKVQNMIYEKIGLPLLSYKELGEAAAEYAKTH

SEQ ID NO: 1894 - protein, 555 aa, Unknown
  Description of Unknown: Integrase B1895 sequence
  PTHR30461:SF3,IPR036162,PS51737,IPR011109,PTHR30461, PF00239,G3DSA:1.10.10.2600,IPR006119,PF14287,SSF53041, IPR025378,SM00857,IPR025827,cd03770, IPR038109,PF13408,G3DSA:3.40.50.1390,PF07508,Coil
MTKQPDKITALYCRLSRDDEQDGLSGSIKNQRTILEKYAQENGFQNTRVFIDDGWSGTNFARPAFTEIMELAEKGLIGTLIVKDHSRLGRNRLIVGQLLEEGFDSLGIRYIAIMDNIDTAKGISDLVPMQDLFNEWHAKNTSQKVRNVFKSKGMSGAPLTTNPPFGYLKDPESKNGWIIDEAAAKIVRQIFAWCIDGLGPTQIAKRLKAGKIPTPTEHWGNIGRNCSKPPAVPYNWCSATVADILGKQEYCGDTVNFRSTTKSFENKKKIERPPEEWQIFKDTHPAIIDRETFALVQELRKHRRRPTKSGIVSPFSGLLYCADCGEKLYYSVSNNYKREQAYFFCSSYRKNSEVCSAHYIREKVVEQIVLESMQRILLNVQVFEKEFARKQMDCYTEDKKKQLAAKRRELSKAKKRIAEIDTLIQRIYEDNASGKLSDERYATLSLSYEEEQKTLKAAIPKMQVYLEDETNKTESLQRFIQKVKQITELKALTPELIHEFVDKIVVYAPRYLDGKRVQLLDIYYSGVGILHELTPEEMEEAFQHHLAERSKEKTA

SEQ ID NO: 1895 - protein, 555 aa, Unknown
  Description of Unknown: Integrase B1896 sequence
  PTHR30461:SF3,cd00338,SM00857,G3DSA:1.10.10.2600,IPR036162, PF13408,PS51737,G3DSA:3.40.50.1390,IPR025827,IPR006119, IPR038109,PF07508,IPR011109,SSF53041,PTHR30461, PS51736,Coil,PF00239
MKTAVIYARYSSDKQTEQSIEGQLYDCYNYAKQHGITVVREYIDRAMTGKNDDRPAFQQMLHESAMHKWDSVIVWKLDRFARNTIDSAVNRQILAKNGVKLLSVMESFGDDASGQMMTHIIEAINEYYSADLREKTIRGMRQSAMKAQTTGHIPLGYKVVDKKLVIDDETRIIPETVFRMYAEGERLTDIAEYLNAHGYRNRRGRPFTTNSFYNMLANEKYIGIYKYDDIVIEGGIPQMIPNEVFEAVREKLITNRKRAAKNTAKADYYLSGKLYCGHCGEPMSGLSGTGRNGVKHYYYRCNGVQKKSGCHKKLENKYLIEDEVCRAARSAFEQMDKAETAETIYQMYLQTVRNEYAPAELEKELTECTKQAENVVNAIAQTGGNQLLYDKVRELEERKEQLSSALRLSQAMTDNVPSVEQITVFIDDILATDINTTEGKKAIADIMISKVYVYDDKLTVIFKDKDGKSVDIPLSAVSDTSLADCAPSALGSQSRIIRTLSSLRMCSDLLFIFDIETVRIFISSGGFCYHKVKFALGLSADYKVKIEFMQIVIFV

SEQ ID NO: 1896 - protein, 555 aa, Unknown
  Description of Unknown: Integrase B1897 sequence
  cd00338,SM00857,G3DSA:1.10.10.2600,IPR036162,PS51737, G3DSA:3.40.50.1390,mobidb-lite,IPR006119,IPR038109,PF07508, IPR011109,SSF53041,PTHR30461,PS51736,Coil, PF00239
MPEDIKTAVIYARFSCSKQREASIDDQLRVCRDWCAREGYAIVGEYSDYAMSGRSDDRPQFQKMIANAGESDIVLVYMMDRFSRDEYDAPAYKHELRRKGVEVVSAMEAMPDGPERILIEKIYEGLAAVESVKTSMRTRRGMEGNALKCKTNGVRVYGYGRNEDDEYVVNEDEAAIVREAFRRSCDHEPVDSIASDFARRGVTTRTGRPCGYSMVYQMLHNRKYTGFYSWGGIEVEGGMPQIIDKATFAIAQEVKPKKRRASEDWGTFALSGRAICSECGHNMAGTSGRGKRNVKYEYYGCRCGAKPVRRDWLEHELAEAIRGMLRDRETALRISHMLWDEPEPEIADARRRAMASKRKAENGLQNIMAAIEQGIVMPEFTDRIAQLQAQKARAERDLASYDEARIDPEEFADFLQCGGGMDDAAVLDSFVYQVMVTPEECVATLYCDDERNEPARLSIARVRTFSGWCPFAKIVEPRYWRSVAPCSSGFLGPPKMATTEKGEAPRGASPLLLAIPPPALGRGRSRSGSPARSPWPASGSPCRTWRRCPRACLRS

SEQ ID NO: 1897 - protein, 555 aa, Unknown
  Description of Unknown: Integrase B1898 sequence
  PTHR30461:SF3,SM00857,G3DSA:1.10.10.2600,IPR036162,PF13408, PS51737,G3DSA:3.40.50.1390,IPR025827,IPR006119,IPR038109, PF07508,IPR011109,SSF53041,PTHR30461,Coil, PS51736,cd00338,PF00239
MNRYGKRCVLYPRVSTEMQVDGYSLEGQKNMLTRFADREEMIVVDTYEDAGKSGKSIEGRPAFQKMLRDIEDGLDIDYILVYKLSRFGRNAADILNSLELVQSYGVNLICIEEGIDSSQTSGKLLISVLSAVAEIERENIIEQTMNGRREKARQGGWNGGFAPYGYTLEDNKLMIEETEAVAIRKIFELYTSSEIGLGGIANQLNLQGIRKIPRQNGTLEDWTGHFIKLILDNPVYCGKIAYGRRTKEKVKGTKNDYQMKRNDDYILTEGQHKGIVSEEIWEKAHAKRLRTGVKQPSKIGRDRVHLLSGLLKCPVCGSPMYTNKHAWTNKDGTYKEIYYYVCSRNRMVRGKHCEYKAMLKKTDIEPMVIEAIREIVRNEEYAQAIKKRICVQIDTKAVDKELEGYQAKLKEVDLNKTRLEREIDSLPADAKYRERKLHDMTLRLDSLYDVIVELEEKIEDARLRRDAIKQQAITLENIYKIMVNFDCVYNIINDEEKRNVVTALIKEIEIYRNDESEYPLKRIGLNFPVFKDGGEVTELLWDKGNTVETVCLLCH

SEQ ID NO: 1898 - protein, 555 aa, Unknown
  Description of Unknown: Integrase B1899 sequence
  PTHR30461:SF3,SM00857,G3DSA:1.10.10.2600,IPR036162,PF13408, IPR025827,G3DSA:3.40.50.1390,PS51737,IPR006119,IPR038109, PF07508,SSF53041,IPR011109,PTHR30461,Coil, PS51736,cd00338,PF00239
MDEARLIFPFSLKEREIEMKKRVYTLYRVSTKGQVEKDDIPMQKESCRNFAESQGWEIVKEFSEKGVSGFKKSAKERDELQKIQQAAMEGKFDILLVFMFDRLGRRDDETPFIVEWFTKQGIEVWSVNEGQQRFDTHVDKLMNYIRYWQASGESLKTSVRTRTRLEQLTGEGHYTGGTVAFGYKRVRLGRVNKKNQEVCDLVVDEAEAEIVRLIFHKYVYEGYGAQKLSHYLYEQGVVGRNNKNIPNTSIVRMIKNKGYTGYLINGAVETECPQLRIIEPELFEQAQELRQARTCERGGTSLGTSSKALLTGLVYCGHCGNRLSLTSSGRIHTYADGHTVKEVRPRYSCFYKIRHPGDCDGQSGYGVSKLDSIVEEVVRQIFAQFREVSRKKLLESVKTNDAARIQKKIKKIQKDLEAKQKELDDLKAETILVIRGVSALDKELLGTLVAEAKDALETLEKQLVQAQEEYEEATKTAKRSNYICNELFTWADVYDTANHDERRAILQQFIKEIRVRKDYEISITLNASFDQVEQLKAVSTYDGAEIFEEISAKGA

SEQ ID NO: 1899 - protein, 555 aa, Unknown
  Description of Unknown: Integrase B1900 sequence
  PTHR30461:SF3,SM00857,G3DSA:1.10.10.2600,IPR036162,PF13408, PS51737,IPR025827,G3DSA:3.40.50.1390,IPR006119,IPR038109, PF07508,IPR011109,SSF53041,PTHR30461,cd00338, PF00239
MPKKTAKHPAKPKRGKKLEIEEPGVLYGRYSSHNQKDISIEQQFEKCYELAAEYGIRVIDTYADRAVSGRTDKRVDFQRLMADAAKGKFCYVLAWKSNRIGRNMLEALVNEARFQELGVRVLYVEEDFDDTAAGRFAARSMMNVNQFYSENMAEDIKRGLYDNAANCMVTNGHLPYGYKADETLHYAIDEPKAAVIREIFTRVSCGEAFVDIMASLNDRGITTSYGRPWGRSSFQKILSNERYRGIYIYGDVRIEGGIPRIVSDELYFKVQEAITTKKNPQGRHRVNGDYLLTGKLFCGHCKSPMTGISGTGRAGKLHFYYVCQKRRTEKTCHKKNVRRDVIELKIAKAIRDYALKDDIIEWIADSCVEDHDRRVSESHLSVFEDQLAEVNRSIKNVMSAIEKGIITETTKGRLMELEAERTAIEGKICAAKAAIVPTNRERLVEWLRSLREGDVHDKKYQAGLFDTFLVAAYLYDDNRVKIVFSFAGDKNTIEIPLEDVIDSIDGEASCVRLSSTLSHQSRARRTERSPGSAPISAIYMVGGVFVLVCPLDAEE

SEQ ID NO: 1900 - protein, 555 aa, Unknown
  Description of Unknown: Integrase B1901 sequence
  PTHR30461:SF3,SM00857,G3DSA:1.10.10.2600,IPR036162,PF13408, IPR025827,G3DSA:3.40.50.1390,PS51737,IPR006119,IPR038109, PF07508,IPR011109,SSF53041,PF00239,PTHR30461, PS51736,Coil,cd00338
MARKRINTPEATGVIYARFSSHNQREESIEQQVAECNTFALASGIKIVGVYSDSAKTGRTDRRPQFQKLQREAQKGEFDYIIAYKSNRIARNILNALMFENEMEKLGIKVVYAKEEFGNNAAGRFALRTMMNVNQFFSENMAEDIKRNQADNALNCRANGPAPYGYKTGADGKFVIDEMRAPIVQEIFNRTANAEKFVEISEDLNRRGIKTKNGNEWGKSSFFTILHNERYTGVYIFNDVRIEGGMPVIIERSLFDRVQKIMKTKKNPQGRKRADDGIYLLTGKLFCGKCKSHMIGMSGTSKNGDSHYYYICNEKRTNGTCDKKAVRRNFLENEIAKAIRRYILQPNVMEWIVQQVLSFQKGDVRQVEIANMQERHKEVKKAIANVMIAIDQGIITASTKEHLQDLESERAQLDARILVAQSEAGKAVTRESLLAYLEHFRAANVEDKECQKELFDTFVKAVYLYDDHITLIFDINDGTTEDVEISMDEVEQSLCENVRLNSVVGHQIEQDEHVFMCLSYFFCLLQGHSKLLITTFSYDIILSEVLSVYIDNEYL

SEQ ID NO: 1901 - protein, 555 aa, Unknown
  Description of Unknown: Integrase B1902 sequence
  PTHR30461:SF3,IPR036162,PS51737,IPR011109,PTHR30461, PF00239,G3DSA:1.10.10.2600,IPR006119,PF14287,SSF53041, IPR025378,SM00857,IPR025827,cd03770,IPR038109, PF13408,G3DSA:3.40.50.1390,PF07508,Coil
MTKQPDKITALYCRLSRDDEQDGLSGSIKNQQAILEKYAQENGFKNTRVFIDDGWSGTNFARPAFTEIMELAEKGLIGTLIVKDHSRLGRNRLIVGQLLEEGFDSLGVRYIAIMDNIDTAKGISDLVPMQDLFNEWHAKNTSQKVRNVFKSKGMSGAPLTTNPPFGYLKDPESRNGWIVDEEASKTVRQIFAWCIDGLGPTQIAKRLKAAKVSTPTEHWCNIGRNCSKPPAVPYNWCSATVADILGKQEYCGDTVNFRSTTKSFKNKKKIERPPEEWQIFKDTHPAIVDRETFALVQELRKHRRRPTKSGIVSPFSGLLYCADCGEKLYYSVTNNYKREQAYFFCSSYRKNSEVCSAHYIREKVVEQIVLESMQRILLNVQAFEKEFARKQMDCYTEDKKKQLAAKRRELSKAKKRIAEIDALIQKIYEDNASGKLSDERYATLSLSYEEEQKTLKASVPEMQTYLETETDKTESLQRFIQKVKQITELKALTPELIHEFVDKIVVYAPRYLDGKRVQLLDIYYSGVGILHELTPEEMEEAFQQHLAQRNKEKTA

SEQ ID NO: 1902 - protein, 555 aa, Unknown
  Description of Unknown: Integrase B1903 sequence
  PTHR30461:SF3,SM00857,G3DSA:1.10.10.2600,IPR036162,PF13408, PS51737,G3DSA:3.40.50.1390,IPR025827,IPR006119,IPR038109, PF07508,IPR011109,SSF53041,PTHR30461,cd00338, PF00239
MPRKPAKHPAKPKRGKKLEIEEPGVLYGRYSSHNQKDISIEQQFEKCYELAAEYGIRIIDTYADRAVSGRTDKRVDFQRMMADAAKGKFRYVLAWKSNRIGRNMLEALVNEARFQELGVRVLYVEEDFDDTAAGRFAARSMMNVNQFYSENMAEDIKRGLYDNAANCMVTNGHLPYGYKADETLHYAIDEPRAAVIREIFTRVSCGEAFVDIMSSLNARGITTSYGRPWGRSSFQKILSNERYRGIYIYGDVRIEGGIPRIVSDELYFKVQEAITTKKNPQGRHRVNGDYLLTGKLFCGHCKSPMTGISGTGRAGKLHFYYVCQKRRTEKTCHKKNVRRDVIELKIAKAIRDYALKDDIIEWIADSCVEDHDRRVSESHLSVFEDQLAEVNRSIKNVMSAIEKGIITETTKGRLMELEAERTAIEGKICAAKAAIVPTNRERLVEWLRSLREGDVHDKKYQAGLFDTFLVAAYLYDDNRVKIVFSFAGDKNTIEIPLEDVIDSIDDEASCVRLSSTLSHQKTFAQKCGGFLLITYYFFTVTLSELRFFGKVKSKK

SEQ ID NO: 1903 - protein, 554 aa, Unknown
  Description of Unknown: Integrase B1904 sequence
  PTHR30461:SF3,SM00857,G3DSA:1.10.10.2600,IPR036162,PF13408, PS51737,IPR025827,G3DSA:3.40.50.1390,IPR006119,IPR038109, PF07508,IPR011109,SSF53041,PTHR30461,Coil, PS51736,cd00338,PF00239
MQTMPIDLSALTAEERQQFAENPSVLSTDCVATCCLYMRYSSDRQSEQSIEGQLRELISYCIRQEYRIAAVYVDRAISAHTSMAKRVAFQQMLADSKRAAWNTVLVWKLDRFARNRQDSAAARALLYKNGCGVESATEAISATKEGRLLESVLEGLNEYYSDELREKIIRGNRESALKGNALGGSVPLGYKIENKKWVLDPLTAPLVAEAFDRYANGETVAAICDDFNARGYRTAKGAKFNKSSFKNIFRNEKYIGVYKYKDIRQEDSVPRIVTDDVWAKVKARLKVNEEAPARGKAKVPYLLAGKIFCGHCGSQMVGECGRSKNGHTYNYYSCAGRKIRRACNKKPVPKDWIEDIVVQDALEVLTDDVIDYVATVAARQSEEEIQQNTNIPAIREQIADIERKVRNLTKAIETSGMAPDTLVSRIAELESQRKGLSAQLLEEQHSVIHLTKDMVVYYLESVRKQAVPLETQKKMLIDLFVNSVTVYDDDTGYFKIITAYNLSAVPTKTYRVSTSFVEAGSSDTGPNGPPLDANPNTITVVGMVFVQTRKHALP

SEQ ID NO: 1904 - protein, 554 aa, Unknown
  Description of Unknown: Integrase B1905 sequence
  PTHR30461:SF3,SM00857,G3DSA:1.10.10.2600,IPR036162,PF13408, IPR025827,G3DSA:3.40.50.1390,PS51737,IPR006119,IPR038109, PF07508,SSF53041,IPR011109,PF00239,PTHR30461, PS51736,Coil,cd00338
MKKFPIDLSCLTEEEISQFQEDPYTLYNGDQEVALYLRYSSTGQSDQSIEGQLRDCRAFCKANHYRIVAIYVDRATTARKDVEKRVHLMEMVADSAKQNWEYVIVWKLDRFARNRNDSAIMKMRLRKNGVKVLSATEHLTDSPESIILESVLEGMAEFFSAELSQKVTRGMRESALKCHSVGGHIPLGYKVENHKLVVDPDTAHIVQEAFSLYANGESVADICRKFNSAGYKTAKNTEFNRSSFKAMFRNTRYIGTYTYKDIVIENGIPAIIDKELFETVQRRLSKTATAPARGKAKVDYLLSGKLFCGHCGASMNGESGAGRHGKVYHYYSCYTKKRKLGCDKRPLKKDYIEGIVARDALNLLTDQLIDEIADMAIRQSEQDLINDTHIPQLTAQLSEVEKSITNITAAIEKGIASETLMNRLVQLEHEKKTLNKEIKAEEKFVYRIDRDQIVFWLSQFKYGNIEDEDFRRRLIDLLVNSVTVWDEPDGYKITTAYNLTSCKTKTFRVEKNPAAEEATGFDFGESECTKSPRNRLISRTFAFHKFRFYGVAFF

SEQ ID NO: 1905 - protein, 554 aa, Unknown
  Description of Unknown: Integrase B1906 sequence
  PTHR30461:SF3,cd00338,SM00857,G3DSA:1.10.10.2600,IPR036162, PF13408,IPR025827,G3DSA:3.40.50.1390,PS51737,IPR006119, IPR038109,PF07508,IPR011109,SSF53041,PTHR30461, PS51736,Coil,PF00239
MKKFPIDLSCLTEEEISQFQEDPYTLYNGDQNVAIYLRYSSTGQSDQSIEGQLRDCRTFCKANHYRIVAIYVDRATTARKDVEKRVHLMEMVADSAKRNWEYVIVWKLDRFARNRNDSAIMKMRLRKNGVKVLSATEHLTDSPESIILESVLEGMAEFFSAELSQKVTRGMRESALKCHSVGGHIPLGYKVENHKLVVDPDTAHIVQEAFSLYANGESVAAICRKFNSAGYKTAKNTEFNRSSFKAMFRNTRYIGTYTYKDIVIENGIPAIIDKELFETVQRRLSKTATAPARGKAKVDYLLSGKLFCGHCGASMNGESGAGRHGKVYHYYSCYTKKRKLGCDKRPLKKDYIEGIVARDALNLLTDQLIDEIADMAIRQSEQDLINDTHIPQLTAQLSEVEKSITNITAAIEKGIASETLMNRLVQLEHEKKTLNKEIKAEEKFVYRIDRDQIVFWLSQFKYGNIEDEDFRRRLIDLLVNSVTVWDEPDGYKITTAYNLTSCKTKTFRVKKNPAAEEATGFDFGESECTKSPRNRLISRTFAFRKLLFSDAAFS

SEQ ID NO: 1906 - protein, 554 aa, Unknown
  Description of Unknown: Integrase B1907 sequence
  PTHR30461:SF3,SM00857,G3DSA:1.10.10.2600,IPR036162,PF13408, IPR025827,G3DSA:3.40.50.1390,PS51737,IPR006119,IPR038109, PF07508,SSF53041,IPR011109,PF00239,PTHR30461, PS51736,Coil,cd00338
MKKFPIDLSCLTEEEISQFQEDPYTLYNGDQNVAIYLRYSSTGQSDQSIEGQLRDCRTFCKANHYRIVAIYVDRATTARKDVEKRVHLMEMIADSAKRNWEYVIVWKLDRFARNRNDSAIMKMRLRKNGVKVLSATEHLTDSPESIILESVLEGMAEFFSAELSQKVTRGMRESALKCHSVGGHIPLGYKVENHKLVVDPDTAHIVQEAFSLYANGESVAAICRKFNSAGYKTAKNTEFNRSSFKAMFRNTRYIGTYTYKDIVIENGIPAIIDKELFETVQRRLSKTATAPARGKAKVDYLLSGKLFCGHCGASMNGESGAGRHGKVYHYYSCYTKKRKLGCDKRPLKKDYIEGIVARDALNLLTDQLIDEIADMAIRQSEQDLINDTHIPQLTAQLSEVEKSIANITAAIEKGIASETLMNRLVQLEHEKKTLNKEIKAEEKFVYRIDRDQIVFWLSQFKYGNIEDEDFRRRLIDLLVNSVTVWDEPDGYKITTAYNLTSCKTKTFRVEKNPAAEEATGFDFGESECTKSPRNHLISRTFAFHKFRFLGVAFF

SEQ ID NO: 1907 - protein, 554 aa, Unknown
  Description of Unknown: Integrase B1908 sequence
  PTHR30461:SF3,SM00857,G3DSA:1.10.10.2600,IPR036162,PF13408, IPR025827,G3DSA:3.40.50.1390,PS51737,IPR006119,IPR038109, PF07508,IPR011109,SSF53041,PF00239,PTHR30461, PS51736,Coil,cd00338
MKKFLIDLSCLTEEEISQFQEDPYTLYNGDQNVAIYLRYSSTGQSDQSIEGQLRDCRTFCKANHYRIVAIYVDRATTARKDVEKRVHLMEMISDSAKQNWEYVIVWKLDRFARNRNDSAIMKMRLRKNGVKVLSATEHLTDSPESIILESVLEGMAEFFSAELSQKVTRGMRESALKCHSVGGHIPLGYKVENHKLVVDPDTAHIVQEAFSLYANGESVAAICRKFNSAGYKTAKNTEFNRSSFKAMFRNTRYIGTYTYKDIVIENGIPAIIDKELFETVQRRLSKTATAPARGKAKVDYLLSGKLFCGHCGASMNGESGAGRHGKVYHYYSCYTKKRKLGCDKRPLKKDYIEGIVARDALNLLTDQLIDEIADMAIRQSEQDLINDTHIPQLTAQLSEVEKSITNITAAIEKGIASETLMNRLVQLEHEKKTLNKEIKAEEKFVYRIDRDQIVFWLSQFKYGNIEDENFRRRLIDLLVNSVTVWDEPDGYKITTAYNLTSCKTKTFRVEKNPAAEEATGFDFGESECTKSPRNRLVSRTFAFHKFRFLGTAFF

SEQ ID NO: 1908 - protein, 554 aa, Unknown
  Description of Unknown: Integrase B1909 sequence
  PTHR30461:SF3,SM00857,G3DSA:1.10.10.2600,IPR036162,PF13408, PS51737,IPR025827,G3DSA:3.40.50.1390,IPR006119,IPR038109, PF07508,IPR011109,SSF53041,PF00239,PTHR30461, PS51736,Coil,cd00338
MKKFPIDLSCLTEEEISQFQEDPYTLYNGDQDVALYLRYSSTGQSDQSIEGQLRDCRAFCKANHYRIVAIYVDRATTARKDVEKRVHLMEMVADSAKQNWEYVIVWKLDRFARNRNDSAIMKMRLRKNGVKVLSATEHLTDSPESIILESVLEGMAEFFSAELSQKVTRGMRESALKCHSVGGHIPLGYKVENHKLVVDPDTAHIVQEAFSLYANGESVADICRKFNSAGYKTAKNTEFNRSSFKAMFRNTRYIGTYTYKDIIIENGIPAIIDKELFETVQRRSSKTATAPARGKAKVDYLLSGKLFCGHCGASMNGESGAGRHGKVYHYYSCYTKKRKLGCDKRPLKKDYIEGIVARDALNLLTDQLIDEIADMAIRQSEQDLINDTHIPQLTAQLSEVEKSITNITAAIEKGIASETLMNRLVQLEHEKKTLNKEIKAEEKFVYRIDRDQIIFWLSQFKYGNIEDEDFRRRLIDLLVNSVTVWDEPDGYKITTAYNLTSCKTKTFRVEKNPAAEEATGFDFGESECTKSPRNHLISRTFAFHKFRFLGVAFF

SEQ ID NO: 1909 - protein, 554 aa, Unknown
  Description of Unknown: Integrase B1910 sequence
  IPR036162,PS51737,IPR011109,PTHR30461,PS00397, PF00239,G3DSA:1.10.10.2600,IPR006119,SSF53041,SM00857, IPR025827,IPR038109,PS51736,cd03768,IPR006118, PF13408,G3DSA:3.40.50.1390,PF07508,Coil
MEKSKRVVGYARVSTEAQDITRQVELITAYCTERNYHLIKIIQEKISGARKDRKSINELLEVDDTVADMIIVSELSRLSREDDILSVLSTINELLKQGVDILFLDKQDRIYKAGTVLSLYDIITLSVEAKASADERYKIAGRMQTGLRSKLSEFTNMFTGGTVPFGYKVIHNPDYKLNLTPKNLLVVDAQEAEAVKYLFQQLIDGNTIRQTVRVYNKLYPYKLSYSGICRIIRNPKYKGEIYRRGKLYGTIPELQIITPEVFDKANKQMRENNLFQSNAPKYYNPLKGLIFCPCGCSLYMKPNHNSYLIYRCSSSYNDKQRCENFGIKCSYVLSAVWTCVKETLHTEEYKRFNTERANELQGINKQIRETITRKVNNVDELKTQSASLIAKIKKLNNDDLINELETDYNVLCKQIKQIEQEISELNGQIAENDAEIKRSVEQKDFSEMEQSALYKEKLQKVVYHSLSAMRGILEIVFKNGMIRYVLIKKHRNGGVFLLPEFWTVDISRAVIIVPTHPSVDPEHPYTLLPTIPREYTFDTIITERDMDEYRITVS

SEQ ID NO: 1910 - protein, 554 aa, Unknown
  Description of Unknown: Integrase B1911 sequence
  PTHR30461:SF3,SM00857,G3DSA:1.10.10.2600,IPR036162,PF13408, PS51737,IPR025827,G3DSA:3.40.50.1390,IPR006119,IPR038109, PF07508,IPR011109,SSF53041,PTHR30461,Coil, PS51736,cd00338,PF00239
MRKKFNIDLSMLTPEEQQQFRDDPTTLTKGEVNVALYLRFSSERQKEQSIEGQLRDCIAYCKRKSFRIAAIYVDRATTARKDVEKRVHFQEMISDSVHHLWNFVVVWKLDRFARNREDSAVFKMRLRKNGVRVKSATETISDNPEGIILESVLEGIAEYYSADLSQKITRGLRESAMKGHCVGGHVPLGYKIEDHRLVINPETAHIVQEAFQLYANGESVAEICRIFNSKGYRTAKNSEFNRSSFKSIFKNVRYIGTYIYKDIEKENAIPAIIDKDLFETVQRRLSLAADAPARGKAKVDYLLSGKLFCGHCGAAMHGESGTSKTGVIHNYYTCYSRKRRKGCNKKPLKKDFIERVVAQDAMTLLTDDVIEELADMAMSQADRDLKENTRIPELSARLTEIEQGINNITKAVEKGIASDALLNRLTELEKEKKDLTSQLREEEKYIYRIDRDQVVFWLTKFQGGDIEDEDCRRRIIDLLVNSVTVWDEPDGYKITTAYNLTSCKTKTFRVSSNADSPSGEGFGFGELSSTIGRISEPYIVWGTVFVQTKRHSLS

SEQ ID NO: 1911 - protein, 554 aa, Unknown
  Description of Unknown: Integrase B1912 sequence
  PTHR30461:SF3,SM00857,G3DSA:1.10.10.2600,IPR036162,PF13408, IPR025827,G3DSA:3.40.50.1390,PS51737,IPR006119,IPR038109, PF07508,IPR011109,SSF53041,PTHR30461,cd00338, PF00239
MPKKPIKHPAKPKRGVKLDIEEPGVLYGRYSSHNQKDISVEQQFEKGYELAAEYGIRIVETYADRAVSGRTDKRADFQRMMRDATQGKFRYVIAWKSNRMGRNMLEALINETRLQELGVRVLYVEEDFDDTAAGRFAARSMMNVNQFYSENMAEDIKRGLYDNASNCMVANGHLPYGYKADETLHYTIDEPKAAVIREIFTRVSCGEAFTDIMGSLNSRGITTSYGRPWGRTSFQKILSNERYRGIYIYGDVRIEGGIPRIVSDELYFKVQEVLTTKKNPQGRHRTNGDYLLTGKLFCGHCKSPMTGISGTGRTGKLHYYYVCQKKRTEKSCHKKNVRRDVIELKVAKAIRENVLKDDIIEWIADSSVEDYKRRESESYLSVFEGQLAEINRSIKNVMSAIEQGIITETTKSRLMELEAERSAMEGKIYAARADIVPADRERIIEWLRSLREGDIHDKQYQAGLFDTFLIGVYLYDDDNRMKIVFSFSGNKNTIEIPLDDAIDDVADEGEDVRLSSTLVHQSRARRTIAGLPGSTAVLYMIGGLFVLECSLEER

SEQ ID NO: 1912 - protein, 554 aa, Unknown
  Description of Unknown: Integrase B1913 sequence
  cd03768,SM00857,IPR006118,G3DSA:1.10.10.2600,IPR036162, PS51737,G3DSA:3.40.50.1390,IPR006119,IPR038109,PF07508, SSF53041,IPR011109,PTHR30461,PS00397,PS51736, Coil,PF00239
MEKSKRVVGYARVSTEAQDITRQVELITAYCTERNYHLIKIIQEKISGARKDRKSINELLEVDDTVADMIIVSELSRLSREDDILSVLSTINELLKQGVDILFLDKQDRIYKAGTVLSLYDIITLSVEAKASADERYKIAGRMQTGLRSKLSEFTNMFTGGTVPFGYKVIHNPDYKLNLTPKNLLVVDAQEAEAVKYLFQQLIDGNTIRQTVRGYNKLYPYKLSYSGICRIIRNPKYKGEIYRRGKLYGTIPELQIITPEVFDKANKQMRENNLFQSNAPKYYNPLKGLIFCPCGCSLYMKPNHNSYLIYRCSSAYNDKQKCENYGVKCAYILSSVWTCVKETLHTEEYKRFNTERANELQGINKQIREIVTRKVNNVDELKTQSASLIAKIKKLNNDDLINELETDYNVLCKQIKQIEQEISELNGQIAENDAEIKRSVEQKDFSEMEQSALYKEKLQKVVYHSLSAMRGILEIVFKNGMIRYVLIKKHRNGGVFLLPEFWTVDISRAVIIVPTHPSVDPEHPYTLLPTIPREYTFDTIITERDMDEYRITVS

SEQ ID NO: 1913 - protein, 554 aa, Unknown
  Description of Unknown: Integrase B1914 sequence
  PTHR30461:SF3,SM00857,G3DSA:1.10.10.2600,IPR036162,PF13408, PS51737,IPR025827,G3DSA:3.40.50.1390,IPR006119,IPR038109, PF07508,IPR011109,SSF53041,PF00239,PTHR30461, PS51736,Coil,cd00338
MKKFPIDLSCLTEEEISQFQEDPYTLYNGDQEVALYLRYSSTGQSDQSIEGQLRDCRAFCKANHYRIVAIYVDRATTARKDVEKRLHLMEMISDSAKQNWEYVIVWKLDRFARNRNDSAIMKMRLRKNGVKVLSATEHLTDSPESIILESVLEGMAEFFSAELSQKVTRGMRESALKCHSVGGHIPLGYKVENHKLVVDPDTAHIVQEAFSLYANGESVADICRKFNSAGYKTAKNTEFNRSSFKAMFRNTRYIGTYTYKDIVIENGIPAIIDKELFETVQRRLSKTATAPARGKAKVDYLLSGKLFCGHCGASMNGESGAGRHGKVYHYYSCYTKKRKLGCDKRPLKKDYIEGIVARDALNLLTDQLIDEIADMAIRQSEQDLINDTHIPQLTAQLSEVEKSITNITAAIEKGIASETLMNRLVQLEHEKKTLNKEIKAEEKFVYRIDRDQIIFWLSQFKYGNIEDEDFRRRLIDLLVNSVTVWDEPDGYKITTAYNLTSCKTKTFRVEKNPAAEEATGFDFGESECTKSPRNRMISRTFAFHKFRFLGVAFF

SEQ ID NO: 1914 - protein, 554 aa, Unknown
  Description of Unknown: Integrase B1915 sequence
  PTHR30461:SF3,cd00338,SM00857,G3DSA:1.10.10.2600,IPR036162, PF13408,PS51737,G3DSA:3.40.50.1390,IPR025827,IPR006119, IPR038109,PF07508,IPR011109,SSF53041,PTHR30461, PS51736,Coil,PF00239
MYEDIKTCVLYVRYSSNNQTEQSIEGQLRVCKDFCAHHNIKIVEVYADRATSASKDIEKRVSFLKMIKDSEKGNFDAVVVYKLDRFARSRYDSATYKYRLRKNGVQLISATENISDDPEGIILESVLEGMAEFYSAELSQKINRGLRESAYKHNSIGGQIPLGYKTEGKKLVIDEETAPIVRQAFEMYAEGHSVAEICRTFNARGYKTSKGTRFGKSSFSKIFRNEKYIGVYQFHEYRAENAIPALIDKKTFDLVQARLKAVGKAPGQFKAKRVYLLSGKLYCGHCGSKMNGNCNTSGYVYYECYGKKNLHKDCNKRNLKKEFIEDIVVKDALSLLTEERIQEIASIAVQTNTHEVETSTDIPTIRSRLHETRLSLDNITKAIETGAAPETLVKRMVELEKEKKTLEGELKRQEKGIVYLDKEQVIFWLEQFKNGDIEDEDFRRQLIDLFVNSVTVWDEPDDYFKITIAYNLTSLQEKTYRLPKGGTLSDFASNTPDRESDENSIILVHVITFGSNSRARGYLKGAMCIAAYLPKLVGFITGVQRQDNGEHGRK

SEQ ID NO: 1915 - protein, 554 aa, Unknown
  Description of Unknown: Integrase B1916 sequence
  PTHR30461:SF3,SM00857,G3DSA:1.10.10.2600,IPR036162,PF13408, IPR025827,G3DSA:3.40.50.1390,PS51737,IPR006119,IPR038109, PF07508,SSF53041,IPR011109,PTHR30461,Coil, PS51736,cd00338,PF00239
MSDTPKLNAAFYGRYSAGPNQSESSIEGQRRECYARAKSQNTIIRKDYIDRHISGQTDQRPQFQQLMKDVKKGLYNIVYVYTIDRFSRNKFDIAKYKNEMRKAGCRLISAKEYVPAGPEGIILESVLEGMAEYYSKELSRKVSRGIYESALKHQHIGGTVPFGFVLENKKYKPDPIKAPIVREIFERYVSGEPAVDICSNLNNRGIATSVGQKFNKSSLNRILSNTKYIGTYTYKRAYIDEITQEKKKELIEFKNVIEPIVSEELFIKAGQRMEQNKHTSKRKKDKPAVEFLLSGKLFCGKCKAPMTGDSGTGKSGNTYYYYTCANKKSKRGKDACRSKSYPKEKLEEFIVKFTRDDILSPEILDWLSENIIQLQGNQKDDMQIRLMLQQKKDVENKIANIMTAIENGIFTETTKDRLENLEEAKRNLEYNIQVEKFKNNAPAESKDSIIYYLEQFRKDDIKDNDCQRLIINTLIDTIIIDEENDRGIVAYRYNDDNNGTREFSIKNTFDVFECVSYGGLSGTKLTLLSKEIIEVCKEKNNIIFFEVLQNWLAA

SEQ ID NO: 1916 - protein, 554 aa, Unknown
  Description of Unknown: Integrase B1917 sequence
  SM00857,G3DSA:1.10.10.2600,IPR036162,PF13408,IPR025827, G3DSA:3.40.50.1390,PS51737,PS51736,IPR006119,IPR038109, PF07508,IPR011109,SSF53041,PTHR30461,Coil, mobidb-lite,cd00338,PF00239
MEELDTRPVADILARYSTDNQNPVTIDVQVEKCREWCERNGYQVGKIFSDEAVSGMKETRAGYEACMMHLGMGGAQLVVVYDQSRMFREFTEWFQFRKDVDMLGARVASVTQPMVGGDLKDPAVFINEAATAMLNHAQVLITRQKTIDALKHNAREGKSSGGKPPLGYDLDKDKKYVVNEHEAEAVRLVFQLFARGFSYGEIIDELNSRGYLTKRGQPFGKNSIFDLLKNEKYIGRLVYGATKAQADGRWNSHAKSKEDAIVVENGVPAIIEQELWEQVQSRIRTRKGAGGRYSAKREYLLTGRVFCGDCGASMVVMGSKASGYQYYECNNKRRTHTCKMKNVRTEWLEQTVAASIKQMLTEPANIEMLVDVARDQERQITTEYDTRRAGLASRYTRVCRQLENGVNALLEGVVSAELKEKVRRLEEEKAEIEAETAELNQYKGYVGLDDATIRRCVENVAKVDIDTPEGLKLILSVVSRVNIHTDTIEIKTLISTDGTDPDPTNSRPQNLELFPSEGLSGEKYHTTPENGSGHHYQQTRTWSCMRAGSGLFFV

SEQ ID NO: 1917 - protein, 554 aa, Unknown
  Description of Unknown: Integrase B1918 sequence
  PTHR30461:SF3,SM00857,G3DSA:1.10.10.2600,IPR036162,PF13408, PS51737,G3DSA:3.40.50.1390,IPR025827,IPR006119,IPR038109, PF07508,IPR011109,SSF53041,PTHR30461,Coil, PS51736,cd00338,PF00239
MRQKFKIDLSMLTPEEQQQFRDDPTTLTKGEVDVALYLRFSSERQKEQSIEGQLRDCIAYCKRKGFRIVAIYVDRATTARKDVEKRVHFQEMISDSIHHLWNFVVVWKLDRFARNREDSAVFKMRLRKNGVRVKSATETISENPEGIILESVLEGIAEYYSADLSQKITRGLRESAMKGHSVGGHVPLGYKLEDHKLVINPATAHIVQEAFQLYANGESMAEICRIFNNKGYRTAKNSEFNRSSFKSMFKNVRYIGTYIYKDIEKENAIPAIIDKDLFETVQRRLSLTADAPARGKAKVDYLLSGKLFCGHCGAAMNGESGTSKTGTIYNYYACYSRKRRKGCNKKPLKKDFIERIVAQDAMALLTNDVIEELADMAMSQADRDLKENTRIPELSTRLTEVEQGINNITKAVEKGIASDALLNRLAELEKEKKDLTSQLREEEKYIYRIDRDQVIFWLTKFQGGDIEDEDCRRRIIDLLVNSVTVWDEPDGYKITTAYNLTSCKTKTFRVSNNAGSPSREGFGFGELSSTIGRISEPYVVWGTVFVQTKRHFLP

SEQ ID NO: 1918 - protein, 554 aa, Unknown
  Description of Unknown: Integrase B1919 sequence
  cd00338,SM00857,G3DSA:1.10.10.2600,IPR036162,PF13408, IPR025827,G3DSA:3.40.50.1390,PS51737,IPR006119,IPR038109, PF07508,SSF53041,IPR011109,PTHR30461,PS51736, Coil,PF00239
MNKTAPAQRRSGIRITFCPCGENLPMKFTSTWKIADPLAQYIIYLRKSRKDMEAEALGQTDTLKRHRAALLSLSESRALNVVEICEEVVTGDSIAVRPEVQKVLQLVETGNYAGVIVMEVERLARGDTIDQGIIAQTFKYSNTKIVTPNKVYDPNNEMDEEYFEFGLFMSRREYNTIKRRLSRGKEASLREGKWISGKTPFGWSREKLPNDKGYKLVPHPEQAPVLQQIYNWYTGDGCARIGAKAISTRLNSLGVPTNSGSLWRADSVLDILRNPANAGWIKSGGRPETKRIVDGSVVVSRPRTRQEDLKLYKGLHNGLISQEQYDKAVALSYSSASPRGKGAWGTVTSLAGLVRCDQCGRVMVRRPSSGNRRDTLLCPSYGCTTVSAWYDDVEDAVLDALRGWLRELELGEAAAPDDTPMRTALESSIAADRKQLAKLEAQEARAYELVETGVYTPEVFLQRSQALAADKQVIVDRIEASQTTIHELARAKQARARLAPAVRRVLETYPLAASPQEKNALLKTVLQKVLYHKQTKSYTKSGSDMHVTLYPLAD

SEQ ID NO: 1919 - protein, 554 aa, Unknown
  Description of Unknown: Integrase B1920 sequence
  SM00857,G3DSA:1.10.10.2600,IPR036162,PF13408,IPR025827, G3DSA:3.40.50.1390,PS51737,IPR006119,IPR038109,PF07508, SSF53041,IPR011109,PTHR30461,Coil,cd00338, PF00239
MAYRKITDIKDTIGMRAVFYARVSTAEEEQLNAIELQIEENRGCIKDHGWKLVGEYIDRSKSGTMVKGRDDYQRLYEDLYEDLFDIVVIKDQERLQRNTLDWYLFINRVVQTGKLLFMYMDGKFYSPDDALITGVRAIIAEEFSRNLSKKLHNYHDHRIEKARQGQEIALQGSGNVYGWDKKDGKYYINPEQAKVRRLMCEGIMARKGSTLIAKELNEAGYRNTVGKPWKPMDIPKFVYDCKNVGTMIINKERHDFESKQTIKLPKEEWVYVENALPPIVTQEEWDLICKIHEERVIATGSDKRGKKTSGYSFSGKLVCGICGAPYWRKQRVSKDEYWVCSTKQTKGRKTRKRDSTMGKAGEINPLGCDNENISYNSLMEIMGVVSERLQANTDTIKHDMINWLTKLRKQLLEANGGHTEADLQRELSRKSKLLDAYLDGILNKQEYQKKAEELDERIIQLKAETEKNKANAGDIAEIDKVLANIDEEVARYVDGNEKLKVEYLLEHLEQVQIFPDKVIVIVPILSEGIVVEKTQYVSREKRRREKYNVWYADG

SEQ ID NO: 1920 - protein, 554 aa, Unknown
  Description of Unknown: Integrase B1921 sequence
  PTHR30461:SF3,cd00338,SM00857,G3DSA:1.10.10.2600,IPR036162, PF13408,PS51737,IPR025827,G3DSA:3.40.50.1390,IPR006119, IPR038109,PF07508,SSF53041,IPR011109,PTHR30461, PS51736,Coil,PF00239
MQTMPIDLSALTPEERQQFAENPSVLSTDCVATCCLYMRYSSDRQSEQSIEGQLRELISYCIRQEYRIAAVYVDRAISAHTSMAKRVAFQQMLADSKRAAWNTVLVWKLDRFARNRQDSAAARALLYKNGCGVESATEAISATKEGRLLESVLEGLNEYYSDELREKIIRGNRESALKGNALGGSVPLGYKIENKKWAIDPLTAPLVSEAFDRYASGDTVAAICDDFNARGYRTAKGAKFNKSSFKNIFRNEKYIGVYKYKDIRQEDSVPRIVTDDVWAKVKARLKVNESAPARGKAKVPYLLAGKIFCGHCGSQMVGECGRSKNGHTYNYYSCAGRKIRRDCNKKPVPKDWIEDIVVQDALEVLTDDVIDYVATVAARQSEEEIQQNTNIPAIREQIADIERKVRNLTKAIETSGMAPDTLVSRIAELESQRKGLSAQLLEEQHSVIHLTKEMVVYYLESVRKQAVPLETQKKMLIDLFVNSVTVYDDDQGYFKIITAYNLSEVPTKTYRVSTSFVEAGSSDTGPNGPPLDANPNTITVSGMVFVQTRKHALP

SEQ ID NO: 1921 - protein, 554 aa, Unknown
  Description of Unknown: Integrase B1922 sequence
  PTHR30461:SF3,cd00338,SM00857,G3DSA:1.10.10.2600,IPR036162, PF13408,IPR025827,PS51737,G3DSA:3.40.50.1390,IPR006119, IPR038109,PF07508,SSF53041,IPR011109,PTHR30461, PS51736,Coil,PF00239
MKKFPIDLSYLTEEEISQFQEDPYTLYNGDQDVALYLRYSSTGQSDQSIEGQLRDCRAFCKANHYRIVAIYVDRATTAHKDVEKRVHLMEMVADSAKQNWEYVIVWKLDRFARNRNDSAIMKMRLRKNGVKVLSATEHLTDSPESIILESVLEGMAEFFSAELSQKVTRGMRESALKCHSVGGHIPLGYKVENHKLVVDPDTAHIVQEAFSLYANGESVADICRKFNSAGYKTAKNTEFNRSSFKAMFRNTRYIGTYTYKDIVIENGIPAIIDKELFETVQRRLSKTATAPARGKAKVDYLLSGKLFCGHCGASMNGESGAGRHGKVYHYYSCYTKKRKLGCDKRPLKKDYIEGIVARDALNLLTDQLIDEIADMAIRQSEQDLINDTHIPQLTAQLSEVEKSITNITAAIEKGIASETLMNRLVQLEHEKKTLNKEIKAEEKFVYRIDRDQIVFWLSQFKYGNIEDEDFRRRLIDLLVNSVTVWDEPDGYKITTAYNLTSCKTKTFRVEKNPAAEEATGFDFGESECTKSPRNRLISRTFAFHKLSFSDVAFS

SEQ ID NO: 1922 - protein, 554 aa, Unknown
  Description of Unknown: Integrase B1923 sequence
  PTHR30461:SF3,SM00857,G3DSA:1.10.10.2600,IPR036162,PF13408, PS51737,G3DSA:3.40.50.1390,IPR025827,IPR006119,IPR038109, PF07508,SSF53041,IPR011109,PF00239,PTHR30461, PS51736,Coil,cd00338
MAKKKKPAGGNAIIYARYSSHNQRDVSIEQQIEACRKHAAELGLTITDTYEDRAISGRTDNRPAFQRMMRDAEDGKFQYVLAWKSNRMGRNMMQAMVNESRLMDCGVKVFYAEEDFDDSAAGRFALRSMMNVNQFYSDNLAEDVRRGLMDNASKCMANGRQPLGYKRGEDGKVVVDEPAAAIVREIYTRIASGEMFMDIARDLNRRGIKTQSGSEWNKSSFKVLCRNERYRGIYIYGDTRIEGGIPPIVDDVLWYKVQEVLKVKKSKNRHHCPSDEDYLLTGKLRCGKCGGYMIGMSGRSKTGDVHHYYACQNRRVGHTCDKKNIRRDVVEPAVAQAIKQYCLTDDAIEWITDQTIAYWEDEDRKLQIDSIENDLSAVQSSISNVMKAIEMGVITETTRDRLIELERQQTDLKSKLALAKEEIVHVDRKDLISSLLAFRHGNVHDRAYQEKLFNAFLIAVYVYDDDHLKLVFNSFGKDDTVNIALDLGENDDNSGLSDVSKSSPILSNGQPKSHLVYAGWLFSFYIVIQKQRTVFATVRPFLCSYYRMLMRPAP

SEQ ID NO: 1923 - protein, 554 aa, Unknown
  Description of Unknown: Integrase B1924 sequence
  PTHR30461:SF3,cd00338,SM00857,G3DSA:1.10.10.2600,IPR036162, PF13408,IPR025827,PS51737,G3DSA:3.40.50.1390,IPR006119, IPR038109,PF07508,IPR011109,SSF53041,PTHR30461, PS51736,Coil,PF00239
MKKFPIDLSCLTEEEISQFQEDPYTLYNGDQDVALYLRYSSTGQSDQSIEGQLRDCRAFCKANHYRIVAIYVDRATTARKDVEKRVHLMEMVADSAKQNWEYVIVWKLDRFARNRNDSAIMKMRLRKNGVKVLSATEYLTDSPESIILESVLEGMAEFFSAELSQKVTRGMRESALKCHSVGGHIPLGYKVENHKLVVNPDTAHIVQEAFSLYANGESVADICRKFNSAGYKTAKNTEFNRSSFKAMFRNTRYIGTYTYKDIVIENGIPAIIDKELFETVQRRLSKTATAPARGKAKVDYLLSGKLFCGHCGASMNGESGAGRHGKVYHYYSCYTKKRKLGCDKRPLKKDYIEGIVARDALNLLTDQLIDEIADMAIRQSEQDLINDTHIPQLTAQLSEVEKSIMNITAAIEKGIASETLMNRLVQLEHEKKTLNKEIKAEEKFVYRIDRDQIVFWLSQFKYGNIEDENFRRRLIDLLVNSVTVWDEPDGYKITTAYNLTSCKTKTFRVDKNPAAEEATGFDFGESECTKSPRNRLISRAFAFHKLSFWDTAFP

SEQ ID NO: 1924 - protein, 554 aa, Unknown
  Description of Unknown: Integrase B1925 sequence
  PTHR30461:SF3,SM00857,G3DSA:1.10.10.2600,IPR036162,PF13408, IPR025827,PS51737,G3DSA:3.40.50.1390,IPR006119,IPR038109, PF07508,IPR011109,SSF53041,PTHR30461,Coil, PS51736,cd00338,PF00239
MPQKFKIDLSMLTPEEQQQFRDDPTTLTKGEVDVALYLRFSSERQKEQSIEGQLRDCIAYCKHKSFRIVAIYVDRATTARKDVEKRIHFQEMISDSAHHLWNFVVVWKLDRFARNREDSAVFKMRLRKNGVRVKSATETISDNPEGIILESVLEGIAEYYSADLSQKITRGLRESAMKGHCVGGHVPLGYKIEDHRLVINPETAHIVQEAFQLYANGESVAEICRIFNGKGYRTAKNSEFNRSSFKSIFKNVRYIGTYIYKDIEKENAIPAIIDKDLFETVQRRLSLAADAPARGKAKVDYLLSGKLFCGHCGAAMHGESGTSKTGAIHNYYTCYSRKRRKGCNKKPLKKDFIERVVAQDAITLLTDDVIEELADMAMSQADRDLKENTRIPELSARLTEIEQGINNITKAVEKGIASDALLNRLTELEKEKKDLTSQLREEEKYIYRIDRDQVVFWLTKFQGGDIEDEDCRRRIIDLLVNSVTVWDEPDGYKITTAYNLTSCKTKTFRVSNNADSPSGEGFGFGELSSTIGRISEPYIVWGTVFVQTKRHSLS

SEQ ID NO: 1925 - protein, 554 aa, Unknown
  Description of Unknown: Integrase B1926 sequence
  PTHR30461:SF3,SM00857,G3DSA:1.10.10.2600,IPR036162,PF13408, IPR025827,PS51737,G3DSA:3.40.50.1390,IPR006119,IPR038109, PF07508,IPR011109,SSF53041,PTHR30461,Coil, PS51736,cd00338,PF00239
MAERVCCSYQNVLSIQNRVCCLYRVSTTKQVDHDDQNQADIPVQRKACREFAERMGWTIVYEEQENGVSGFKVSANDRDKIQLIKEYAEQGKFDILLVFMFDRIGRRAEETPFVVEWLINHGIQVWSVNEGEQRIDTHVDRLTNYIRFWQADGESQKTSMRTKAALGQMVEEGRFRGGSAPYGYDLVPSGTYNKRKHEVFKLEINPDEAKVVRMMFDLCVGSGYGRFKIANFLSEMGIKTRDGKNWHEATVGHILHNIMYTGVLRSGCTQSEVFPDLQIISPENFGLAQKLMAERANECNALRTMPRNTRGQSLLSGNVFCGHCGGRLTLTTNGTTRINAAGEKVGRKRIRYVCYNKTRKRSNCDGQTGYTMHILDKMVTDILHQVFDRMRSVEENEIISRTHRSAMVSLKKRLSDAKAESAKATKEYESLKLEVIKAVQGESAFPMDILSELVNNARTRMLDANAQLTELNEEVEKSNQRVEAIKADYRRIMEWSEMFDGSDMNVKKMIAGYIIKRVDVYSDYRLHIEFNMSFAQFELGLETEVEYEAQNIVS

SEQ ID NO: 1926 - protein, 554 aa, Unknown
  Description of Unknown: Integrase B1927 sequence
  SM00857,G3DSA:1.10.10.2600,IPR036162,PF13408,IPR025827, G3DSA:3.40.50.1390,PS51737,mobidb-lite,IPR006119,IPR038109, PF07508,SSF53041,IPR011109,PTHR30461,Coil, PS51736,cd00338,PF00239
MEELDTRPVADILARYSTDNQNPVTIDVQVEKCREWCERNGYQVGKIFSDEAVSGMKETRAGYEACMMHLGMGGAQLVVVYDQSRMFREFTEWFQFRKDVDMLGARVASVTQPMVGGDLKAPAVFINEAATAMLNHAQVLITRQKTIDALKHNAREGKSSGGKPPLGYDLDKDKKYVVNEHEAEAVRLVFQLFARGFSYGEIIDELNSRGYLTKRGQPFGKNSIFDLLKNEKYIGRLVYGATKAQADGRWNSHAKSKEDAIVVENGVPAIIEQELWEQVQSRIRTRKGAGGRYSAKREYLLTGRVFCGDCGASMVVMGSKASGYQYYECNNKRRTHTCKMKNVRTEWLEQTVAASIKQMLTEPANIEMLVDVARDQERQITTEYDTRRAGLASRYTRVCRQLENGVNALLEGVVSAELKEKVRRLEEEKAEIEAETAELNQYKGYVGLDDATIRRCVENVAKVDIDTPEGLKLILSVVSRVNIHTDTIEIKTLISTDGTDPDPTNSRPQNLELFPSEGLSGEKYHTTPENGSGHHYQQTRTWSCMRAGSGLFFV

SEQ ID NO: 1927 - protein, 554 aa, Unknown
  Description of Unknown: Integrase B1928 sequence
  PTHR30461:SF3,SM00857,G3DSA:1.10.10.2600,IPR036162,PF13408, PS51737,IPR025827,G3DSA:3.40.50.1390,IPR006119,IPR038109, PF07508,IPR011109,SSF53041,PF00239,PTHR30461, PS51736,Coil,cd00338
MKKFPIDLSCLTEEEISQFQEDPYTLYNGDQNVAIYLRYSSTGQSDQSIEGQLRDCRAFCKANHYRIVAIYVDRATTARKDVEKRVHLMEMISDSAKQNWEYVIVWKLDRFARNRNDSAIMKMRLRKNGVKVLSATEHLTDSPESIILESVLEGMAEFFSAELSQKVTRGMRESALKCHSVGGHIPLGYKVKNHKLVVDPDTAHIVQEAFSLYANGESVADICRKFNSAGYKTAKNTEFNRSSFKAMFRNTRYIGTYTYKDIVIENGIPAIIDKELFETVQRRLSKTATAPARGKAKVDYLLSGKLFCGHCGASMNGESGAGRHGKVYHYYSCYTKKRKLGCDKRPLKKDYIEGIVARDALNLLTDQLIDEIANMAIRQSEQDLINDTHIPQLTAQLSEVEKSITNITAAIEKGIASETLMNRLVQLEHEKKTLNKEIKAEEKFVYRIDRDQIVFWLSQFKYGNIEDENFRRRLIDLLVNSVTVWDEPDGYKITTAYNLTSCKTKTFRVEKNPAAEEATGFDFGESECTKSPRNHLISRTFAFHKFRFLGVAFS

SEQ ID NO: 1928 - protein, 554 aa, Unknown
  Description of Unknown: Integrase B1929 sequence
  PTHR30461:SF3,SM00857,G3DSA:1.10.10.2600,IPR036162,PF13408, PS51737,IPR025827,G3DSA:3.40.50.1390,IPR006119,IPR038109, PF07508,IPR011109,SSF53041,PF00239,PTHR30461, PS51736,Coil,cd00338
MKKFPIDLSCLTEEEISQFQEDPYTLYNGDQDVALYLRYSSTGQSDQSIEGQLRDCRTFCKANHYRIVAIYVDRATTARKDVEKRVHLMEMVADSAKRNWEYVIVWKLDRFARNRNDSAIMKMRLRKNGVKVLSATEHLTDSPESIILESVLEGMAEFFSAELSQKVTRGMRESALKCHSVGGHIPLGYKVENHKLVVDPDTAHIVQEAFSLYANGESVADICRKFNSAGYKTAKNTEFNRSSFKAMFRNTRYIGTYTYKDIVIENGIPAIIDKELFETVQRRLSKTATAPARGKAKVDYLLSGKLFCGHCGASMNGESGAGRHGKVYHYYSCYTKKRKLGCDKRPLKKDYIEGIVARDALNLLTDQLIDEIADMAIRQSEQDLINDTHIPQLTAQLSEVEKSITNITAAIEKGIASEALMNRLVQLEHEKKTLNKEIKAEEKFVYRIDRDQIVFWLSQFKYGNIEDEDFRRRLIDLLVNSVTVWDEPDGYKITTAYNLTSCKTKTFRVEKNPAAEEATGFDFGESECTKSPRNRLISRTFAFHKFRFFGTAFF

SEQ ID NO: 1929 - protein, 554 aa, Unknown
  Description of Unknown: Integrase B1930 sequence
  PTHR30461:SF3,IPR036162,PS51737,IPR011109,PTHR30461, PF00239,G3DSA:1.10.10.2600,IPR006119,SSF53041,cd00338, SM00857,IPR025827,IPR038109,mobidb-lite,PS51736, PF13408,G3DSA:3.40.50.1390,PF07508,Coil
MGKKQKTNGGDAVIYARYSSHNQRDVSIEQQVEACRKHAAELGLTVTATYEDRAISGKTDKRPSFQRMMRDAEQHKFAYVLAWKSNRIGRNMMQALVNESRLVDCGVKVFYAEEDFDDNAAGRFALRSMMNVNQFYIENMAEDVKRGLYDNAKRGLVNGSLPLGYKRGADGKPEIDEPKAAIVREIYTRVAAGELFASIADDLNARGIKTARGREWNKGSFHVLCHNDRYRGIYMYGDIRIPGGMPRIISDELFYDAQEAYGMKKDNRYGRARHGAENYLLTGKLYCGHCGGYMVGISGTSKTGEMHYYYACQKHRLEHTCEKKAIRRDVIENAVARAIMMYCLDDETIDFIVDSTIAYFKQKDHELHIEAMENELAAVQQAISNLMKAIEAGIITPTTRTRLLDLEEQQSKLSAKINTAKAERVEINRDDLIAGLQLFRTGDIKNKKFLAKLFNTFLIAVYLYDDNRLKIVFSFTGNHNSVEIPLELDNDCPDSEIVSDETEVRMSHLECRKNLGSSPSSGEAEKDDDCSDGRFVRTAPLPPHQTMKIRTFSR

SEQ ID NO: 1930 - protein, 554 aa, Unknown
  Description of Unknown: Integrase B1931 sequence
  PTHR30461:SF3,SM00857,G3DSA:1.10.10.2600,IPR036162,PF13408, IPR025827,PS51737,G3DSA:3.40.50.1390,IPR006119,IPR038109, PF07508,IPR011109,SSF53041,PF00239,PTHR30461, PS51736,Coil,cd00338
MKKFPIDLSCLTEEEISQFQEDPYTLYNGDQNVAIYLRYSSTGQSDQSIEGQLRDCRTFCKANHYRIVAIYVDRATTARKDVEKRLHLMEMISDSAKQNWEYVIVWKLDRFARNRNDSAIMKMRLRKNGVKVLSATEHLTDSPESIILESVLEGMAEFFSAELSQKVTRGMRESALKCHSVGGHIPLGYKVENHKLVIDPDTAHIVQEAFSLYANGESVAAICRKFNSAGYKTAKNTEFNRSSFKAMFRNTRYIGTYTYKDIVIENGIPAIIDKELFETVQRRLSKTATAPARGKAKVDYLLSGKLFCGHCGASMNGESGAGRHGKVYHYYSCYTKKRKLGCDKRPLKKDYIEGIVARDALNLLTDQLIDEIADMAIRQSEQDLINDTHIPQLTAQLSEVEKSITNITAAIEKGIASETLMNRLVQLEHEKKTLNKEIKAEEKFVYRIDRDQIVFWLSQFKYGNIEDEDFRRRLIDLLVNSVTVWDEPDGYKITTAYNLTSCKTKTFRVEKNPAAEEATGFDFGESECTKSPRNRSISRTFAFYKLPFSDVAFF

SEQ ID NO: 1931 - protein, 554 aa, Unknown
  Description of Unknown: Integrase B1932 sequence
  PTHR30461:SF3,SM00857,G3DSA:1.10.10.2600,IPR036162,PF13408, IPR025827,G3DSA:3.40.50.1390,PS51737,IPR006119,IPR038109, PF07508,IPR011109,SSF53041,PF00239,PTHR30461, PS51736,Coil,cd00338
MQTMPIDLSALTPEERQQFAENPSALSTDCVATCCLYMRYSSDRQSEQSIEGQLRELISYCIRQEYRIAAVYVDRAISAHTSMAKRVAFQQMLADSKRAAWNTVLVWKLDRFARNRQDSAAARALLYKNGCGVESATEAISATKEGRLLESVLEGLNEYYSDELREKIIRGNRESALKGNALGGSVPLGYKIENKKWAIDPLTAPLVSEAFDRYASGDTVAAICDDFNARGYRTAKGAKFNKSSFKNIFRNEKYIGVYKYKDIRQEDSVPRIVTDDVWRKVQSRLKVNEQAPARGKAKVPYLLAGKIFCGHCGSQMVGECGRSKNGHTYNYYSCAGRKIRRACNKKPVPKDWIEDIVVQDALEVLTDDVIDYVATVAARQSEEEIQQNTNIPAIREQIADIERKVRNLTKAIETSGMAPDTLVSRIAELESQRKGLSAQLLEEQHSVIHLTKEMVVYYLESVRKQAVPLETQKKMLIDLFVNSVTVYDDDPGYFKITTAYNLSAVPTKTYRVSASFVEAGSSDTGPNGPPLDANPNTITVSGMVFVQTRKHALP

SEQ ID NO: 1932 - protein, 554 aa, Unknown
  Description of Unknown: Integrase B1933 sequence
  PTHR30461:SF3,cd00338,SM00857,G3DSA:1.10.10.2600,IPR036162, PF13408,IPR025827,G3DSA:3.40.50.1390,PS51737,IPR006119, IPR038109,PF07508,IPR011109,SSF53041,PTHR30461, PS51736,Coil,PF00239
MNNHRKIAACYMRYSSHAQDDGNSIEAQDKAIKRYAEEHNYDLQYIYCDKAKTGKSAKRPEFQKMIADAKNQLFDVCIVHKFDRFSRSRRDSIIYKEILSEYGVCLVSVSEQFGSGPQSTVMEAISETMAEYYIKNLSNEVRKGLDVVASKGLHTGGIPPLGYDVSEDKKLVINEAEAEIVRLIFDRYANNYTYNDIAKELNAKGFKTKIGNEFTGSSFNAILQQRKYIGEYVYNRRVSEDKRGCVNSHKNKPEEEILRIPGAVPQIIDNETFEKVQKRLEMNKRKAGHYKSKSSYLLSGLIVCGVCGFHYQGNCRPSGSSSNMYSSYRCGKRQNHKVGCGNSEIEKNRLETFVLEQMQKHLFSDKAIKAIVTQVNEYNASVSKNKNKDLLLYEKQLKEVDKKIKNLSNAIANGVNQDLIIEQINSLGSAKKDLEQRINDSKAPEFPPVVEADVKKALSQFPTFLKENNSIECKNFINQYIDKIVVNKETVEVTFKVASAVFNSSFPDDKTGMIKIKIEISRFELKALPKQRRKIPTNGNFGKSFLKGYEIVQT

SEQ ID NO: 1933 - protein, 554 aa, Unknown
  Description of Unknown: Integrase B1934 sequence
  SM00857,G3DSA:1.10.10.2600,IPR036162,PF13408,PS51737, G3DSA:3.40.50.1390,IPR025827,IPR006119,IPR038109,PF07508, SSF53041,IPR011109,PF00239,PTHR30461,PS51736, Coil,cd00338
MNKTAPAQRRSGIRITFCPCGENLLMKFTSTWKIADPLAQYIIYLRKSRKDMEAEALGQTDTLKRHRAALLSLSESRWLNVVEICEEVVTGDSIAVRPEVQKVLQLVETGNYAGVIVMEVERLARGDTIDQGIIAQTFKYSNTKIITPNKIYDPNNEMDEEYFEFGLFMSRREYNTIKRRLSRGKEASLREGKWISGKTPFGWSREKLPNDKGYKLVPHPEQAPVLQQIYNWYTGEGCARIGAKAISTRLNSLGVPTNSGSLWRADSVLDILRNPANAGWIKSGGRPETKRIVDGAVVVSRPRTRQEDLKLYKGLHDGLISQEQYDKAVALSYSSASPRGKGAWGTVTSLAGLVRCDQCGRVMVRRPSSGGRRDTLLCPSYGCTTVSAWYDDVEDAVLDALRGWLRELELGDASAPDDTPMRTALESSIAADRKQLAKLEAQEARAYELVETGVYTPEIFLQRSQALAADKQTIVDRIEASQTTIHELARARHARARLAPAVRRVLETYPLAASPQEKNALLKTVLQKVLYHKQTKSYTKSGSDMHVTLYPLAD

SEQ ID NO: 1934 - protein, 554 aa, Unknown
  Description of Unknown: Integrase B1935 sequence
  PTHR30461:SF3,SM00857,G3DSA:1.10.10.2600,IPR036162,PF13408, PS51737,G3DSA:3.40.50.1390,IPR025827,IPR006119,IPR038109, PF07508,IPR011109,SSF53041,PF00239,PTHR30461, PS51736,Coil,cd00338
MKKFPIDLSCLTEEEISQFQEDPYTLYNGDQDVALYLRYSSTGQSDQSIEGQLRDCRTFCKANHYRIVAIYVDRATTARKDVEKRVHLMEMVADSAKQNWEYVIVWKLDRFARNRNDSAIMKMRLRKNGVKVLSATEHLTDSPESIILESVLEGMAEFFSAELSQKVTRGMRESALKCHSVGGHIPLGYKVENHKLVVDPDTAHIVQEAFSLYANGESVADICRKFNSAGYKTAKNTEFNRSSFKAMFRNTRYIGTYTYKDIVIENGIPAIIDKELFETVQRRLSKTATAPARGKAKVDYLLSGKLFCGHCGASMNGESGAGRHGKVYHYYSCYTKKRKLGCDKRPLKKDYIEGIVARDALNLLTDQLIDEIADMAIRQSEQDLINDTHIPQLTAQLSEVEKSITNITAAIEKGIASETLMNRLVQLEHEKKTLNKEIKAEEKFVYRIDRDQIIFWLSQFKYGNIEDEDFRRRLIDLLVNSVTVWDEPDGYKITTAYNLTSCKTKTFRVEKNPAAKEATGFDFGESECTKSPRNRLISRAFAFHKFRFFGAAFF

SEQ ID NO: 1935 - protein, 554 aa, Unknown
  Description of Unknown: Integrase B1936 sequence
  cd00338,SM00857,G3DSA:1.10.10.2600,IPR036162,PF13408, PS51737,IPR025827,G3DSA:3.40.50.1390,IPR006119,IPR038109, PF07508,SSF53041,IPR011109,PTHR30461,PS51736, Coil,PF00239
MNKTAPAQRRSGIRITFCPCGENLLMKFTSTWKIADPLAQYIIYLRKSRKDMEAEALGQTDTLKRHRAALLSLSESRWLNVVEICEEVVTGDSIAVRPEVQKVLQLVETGNYAGVIVMEVERLARGDTIDQGIIAQTFKYSNTKIITPNKIYDPNNEMDEEYFEFGLFMSRREYNTIKRRLSRGKEASLREGKWISGKTPFGWSREKLPNDKGYKLVPHPEQAPVLQQIYNWYTGEGCARIGAKAISTRLNSLGVPTNSGSLWRADSVLDILRNPANAGWIKSGGRPETKRIVDGAVVVSRPRTRQEDLKLYKGLHDGLISQEQYDKAVALSYSSASPRGKGAWGTVTSLAGLVRCDQCGRVMVRRPSSGGRRDTLLCPSYGCTTVSAWYDDVEDAVLDALRGWLRELELGDASAPDDTPMRTALESSIAADRKQLAKLEAQEARAYELVETGVYTPEIFLQRSQALAADKQVIVDRIEASQTTITELARAKQARARLAPAVRRVLETYPLAASPQERNALLKTVLQKVLYHKQTKSYTKSGSDMHVTLYPLAD

SEQ ID NO: 1936 - protein, 554 aa, Unknown
  Description of Unknown: Integrase B1937 sequence
  PTHR30461:SF3,SM00857,G3DSA:1.10.10.2600,IPR036162,PF13408, IPR025827,G3DSA:3.40.50.1390,PS51737,IPR006119,IPR038109, PF07508,IPR011109,SSF53041,PF00239,PTHR30461, PS51736,Coil,cd00338
MKKFPIDLSCLTEEEISQFQEDPYTLYNGDQDVALYLRYSSTGQSDQSIEGQLRDCRTFCKANHYRIVAIYVDRATTARKDVEKRVHLMEMVADSAKQNWEYVIVWKLDRFARNRNDSAIMKMRLRKNGVKVLSATEHLTDSPESIILESVLEGMAEFFSAELSQKVTRGMRESALKCHSVGGHIPLGYKVENHKLVVDPDTAHIVQEAFSLYANGESVADICRKFNSAGYKTAKNTEFNRSSFKAMFRNTRYIGTYTYKDIVIENGIPAIIDKELFETVQRRLSKTATAPARGKAKVDYLLSGKLFCGHCGASMNGESGAGRHGKVYHYYSCYTKKRKLGCDKRPLKKDYIEGIVARDALNLLTDQLIDEIADMAIRQSEQDLINDTHIPQLTAQLSEVEKSITNITAAIEKGIASETLMNRLVQLEHEKKTLNKEIKAEEKFVYRIDRDQIVFWLSQFKYGNIEDEDFRRRLIDLLVNSVTVWDEPDGYKITTAYNLTSCKTKTFRIEKNPAAEEATGFDFGKSECTKSPRNRLISRTFAFHKFRFLGVAFF

SEQ ID NO: 1937 - protein, 554 aa, Unknown
  Description of Unknown: Integrase B1938 sequence
  PTHR30461:SF3,SM00857,G3DSA:1.10.10.2600,IPR036162,PF13408, PS51737,G3DSA:3.40.50.1390,IPR025827,IPR006119,IPR038109, PF07508,IPR011109,SSF53041,PF00239,PTHR30461, PS51736,Coil,cd00338
MKKFPIDLSCLTEEEISQFQEDPYTLYNGDQNVAIYLRYSSTGQSDQSIEGQLRDCRTFCKANHYRIVAIYVDRATTARKDVEKRVHLMEMISDSAKQNWEYVIVWKLDRFARNRNDSAIMKMRLRKNGVKVLSATEHLTDSPESIILESVLEGMAEFFSAELSQKVTRGMRESALKCHSVGGHIPLGYKVENHKLVVDPDTAHIVQEAFSLYANGESVAAICRKFNSAGYKTAKNTEFNRSSFKAMFRNTRYIGTYTYKDIVIENGIPAIIDKELFETVQRRLSKTATAPARGKAKVDYLLSGKLFCGRCGASMNGESGAGRHGKVYHYYSCYTKKRKLGCDKRPLKKDYIEGIVARDALNLLTDQLIDEIADMAIRQSEQDLINDTHIPQLTAQLSEVEKSITNITAAIEKGIASETLMNRLVQLEHEKKTLNKEIKAEEKFVYRIDRDQIVFWLSQFKYGNIEDENFRRRLIDLLVNSVTVWDEPDGYKITTAYNLTSCKTKTFRVEKNPAAEEATGFDFGESECTKSPRNRLISRTFAFHKLLFVGVAFF

SEQ ID NO: 1938 - protein, 554 aa, Unknown
  Description of Unknown: Integrase B1939 sequence
  PTHR30461:SF3,SM00857,G3DSA:1.10.10.2600,IPR036162,PF13408, IPR025827,G3DSA:3.40.50.1390,PS51737,IPR006119,IPR038109, PF07508,SSF53041,IPR011109,PF00239,PTHR30461, PS51736,Coil,cd00338
MKKFPIDLSCLTEEEISQFQEDPYTLYNGDQEVALYLRYSSTGQSDQSIEGQLRDCRAFCKANHYRIVAIYVDRATTARKDVEKRVHLMEMVADSAKQNWEYVIVWKLDRFARNRNDSAIMKMRLRKNGVKVLSATEHLTDSPESIILESVLEGMAEFFSAELSQKVTRGMRESALKCHSVGGHIPLGYKVENHKLVVDPDTAHIVQEAFSLYANGESVADICRKFNSAGYKTAKNTEFNRSSFKAMFRNTRYIGTYTYKDIVIENGIPAIIDKELFETVQRRLSKTATAPARGKAKVDYLLSGKLFCGHCGASMNGESGAGRHGKVYHYYSCYTKKRKLGCDKRPLKKDYIEGIVARDALNLLTDQLIDEIADMAIRQSEQDLINDTHIPQLTAQLSEVEKSITNITAAIEKGIASETLMNRLVQLEHEKKTLNKEIKAEEKFVYRIDRDQIVFWLSQFKYGNIEDEDFRRRLIDLLVNSVTVWDEPDGYKITTAYNLTSCKTKTFRVEKNPDAEEATGFDFRESECTKSPRNRLISRTFAFHKFRFLGTAFF

SEQ ID NO: 1939 - protein, 554 aa, Unknown
  Description of Unknown: Integrase B1940 sequence
  PTHR30461:SF3,SM00857,G3DSA:1.10.10.2600,IPR036162,PF13408, IPR025827,G3DSA:3.40.50.1390,PS51737,IPR006119,IPR038109, PF07508,IPR011109,SSF53041,PTHR30461,Coil, PS51736,cd00338,PF00239
MKKFPIDLSCLTEEEISQFQEDPYTLYNGDQNVAIYLRYSSTGQSDQSIEGQLRDCRTFCKVNHYRIVAIYVDRATTARKDVEKRIHLMEMISDSAKQNWEYVIVWKLDRFARNRNDSAIMKMRLRKNGVKVLSATEHLTDSPESIILESVLEGMAEFFSAELSQKVTRGMRESALKCHSVGGHIPLGYKVENHKLVVDPDTAHIVQEAFSLYANGESVAAICRKFNSAGYKTAKNTEFNRSSFKAMFRNTRYIGTYTYKDIVIENGIPAIIDKELFETVQRRLSKTATAPARGKAKVDYLLSGKLFCGHCGASMNGESGAGRHGKVYHYYSCYTKKRKLGCDKRPLKKDYIEGIVARDALNLLTDQLIDEIADMAIRQSEQDLINDTHIPQLTAQLSEVEKSITNITAAIEKGIASETLMNRLVQLEHEKKTISKEIKAEEKFVYRIDRDQIVFWLSQFKYGNIEDENFRRRLIDLLVNSVTVWDEPDGYKITTAYNLTSCKTKTFRVEKNPAAEEATGFDFGESECTKSHRNRLISMTFAFHKLLFSDVAFS

SEQ ID NO: 1940 - protein, 554 aa, Unknown
  Description of Unknown: Integrase B1941 sequence
  SM00857,G3DSA:1.10.10.2600,IPR036162,PF13408,IPR025827, G3DSA:3.40.50.1390,PS51737,IPR006119,IPR038109,PF07508, SSF53041,IPR011109,PF00239,PTHR30461,PS51736, Coil,cd00338
MNKTAPAQRRSGIRITFCPCGENLLMKFTSTWKIADPLAQYIIYLRKSRKDMEAEALGQTDTLKRHRAALLSLSESRGLNVIEICEEVVTGDSIAVRPEVQKVLQLVETGNYAGVIVMEVERLARGDTIDQGIIAQTFKYSDTRIITPNKTYDPNNEMDEEYFEFGLFMSRREYNTIKRRLSRGKEASLREGKWISGKTPFGWLREKLPNDKGYKLVPHPEQAPVLRQIYNWYTGEGCARIGAKAISTRLNSLGIPTNSGSLWRADSVLDILRNPANAGWIKSGGRPETKRIVDGAVVVSRPRTRQEDLRLYKGLHDGLISQEQYDKAVALSYSSASPRGKGAWGTVTSLAGLVRCDQCGRVMVRRPSSGNRRDTLLCPSYGCPTVSAWYDDVEDAVLDALRGWLRELELGEAAAPDDTPMRTALESSIAADRKQLAKLESQEARAYELVETGVYTPEIFLQRSQALAADKQVIVDRIEASQTTITELARAKQARARLAPAVRRVLETYPLAASPQEKNALLKTVLQKVLYHKQTKSYTKSGSDMHVTLYPLAD

SEQ ID NO: 1941 - protein, 554 aa, Unknown
  Description of Unknown: Integrase B1942 sequence
  PTHR30461:SF3,cd00338,SM00857,G3DSA:1.10.10.2600,IPR036162, PF13408,IPR025827,PS51737,G3DSA:3.40.50.1390,IPR006119, IPR038109,PF07508,IPR011109,SSF53041,PTHR30461, PS51736,Coil,PF00239
MKKFPIDLSCLTEEEISQFQEDPYTLYNGDQDVALYLRYSSTGQSDQSIEGQLRDCRAFCKANHYRIVAIYVDRATTARKDVEKRVHLMEMVADSAKQNWEYVIVWKLDRFARNRNDSAIMKMRLRKNGVKVLSATEYLTDSPESIILESVLEGMAEFFSAELSQKVTRGMRESALKCHSVGGHIPLGYKVENHKLVVNPDTAHIVQEAFSLYANGESVADICRKFNSAGYKTAKNTEFNRSSFKAMFRNTRYIGTYTYKDIVIENGIPAIIDKELFETVQRRLSKTATAPARGKAKVDYLLSGKLFCGHCGASMNGESGAGRHGKVYHYYSCYTKKRKLGCDKRPLKKDYIEGIVARDALNLLTDQLIDEIADMAIRQSEQDLINDTHIPQLTAQLSEVEKSIMNITAAIEKGIASETLMNRLVQLEHEKKTLNKEIKAEEKFVYRIDRDQIVFWLSQFKYGNIEDENFRRRLIDLLVNSVTVWDEPDGYKITTAYNLTSCKTKTFRVDKNPAAEEATGFDFGESECTKSPRNRLISRTFAFYKLPFSDAAFS

SEQ ID NO: 1942 - protein, 554 aa, Unknown
  Description of Unknown: Integrase B1943 sequence
  SM00857,G3DSA:1.10.10.2600,IPR036162,PF13408,IPR025827, G3DSA:3.40.50.1390,PS51737,IPR006119,IPR038109,PF07508, SSF53041,IPR011109,PTHR30461,Coil,cd00338, PF00239
MAYRKITDIKDTIGMRAVFYARVSTAEEEQLNAIELQIEENRGCIKDHGWKLVGEYIDRSKSGTMVKGRDDYQRLYEDLYEDLFDIVVIKDQERLQRNTLDWYLFINRVVQTGKLLFMYMDGKFYSPDDALITGVRAIIAEEFSRNLSKKLHNYHDHRIEKARQGQEIALQGSGNVYGWDKKDGKYYINPEQAKVRRLMCEGIMARKGSTLIAKELNDAGYRNTVGKPWKPMDIPKFVYDCKNVGTMIINKERHDFESKQTIKLPKEEWVYVENALPPIVTQEEWDLICKIHEERVIATGSDRRGKKTSGYSFSGKLVCGICGAPYWRKQRVSKDEYWVCSTKQTKGRRTRKRDSTMGKAGEINPLGCDNENISYNSLMEIMGVVSERLQANTDTIKHDMINWLTKLRKQLLEANGGHTEADLQRELSRKSKLLDAYLDGILNKQEYQKKAEELDERIIQLKAETEKNKANSGDIAEIDKVLANIDEEVSRYVDGNEKLKVEYLLEHLEQVQIFPDKVIVIVPILSEGIVVEKAQYVSREKWSRKKYTDESSDG

SEQ ID NO: 1943 - protein, 554 aa, Unknown
  Description of Unknown: Integrase B1944 sequence
  SM00857,G3DSA:1.10.10.2600,IPR036162,PF13408,IPR025827, G3DSA:3.40.50.1390,PS51737,IPR006119,IPR038109,PF07508, SSF53041,IPR011109,PTHR30461,Coil,cd00338, PF00239
MAYRKITDIRDTIGMRAVFYARVSTAEEEQLNAIELQIEENRGCIKDHGWKLVGEYIDRSKSGTMVKGRDDYQRLYEDLYENLFDIVVIKDQERLQRNTLDWYLFINRVVQTGKLLFMYMDGKFYSPDDALITGVRAIIAEEFSRNLSKKLHNYHDHRIEKARQGQEIALQGSGNVYGWDKKDGKYYINPEQAKVRRLMCEGIMARKGSTLIAKELNDAGYRNTVGKPWKPMDIPKFVYDCKNVGTMIINKERHDFESKQTIKLPKEEWVYVENALPPIVTQEEWDLICKIHEERVIATGSDRRGKKTSGYSFSGKLVCGICGAPYWRKQRVSKDEYWVCSTKQTKGRKTRKRDSTMGKAGEINPLGCDNENISYNSLMEIMGVVSERLQANTDTIKQDMINWLTKLRKQLLEANGGHTEADLQRELSRKSKLLDAYLDGILNKQEYQKKAEELDERIIQLKTETEKNKANSGDIAEIDKVLANIDEEVARYVDGNEKLKVEYLLEHLEQVQIFPDKVIVIVPILSEGIVVEKTQYVSREKRRREKYNVWYADG

SEQ ID NO: 1944 - protein, 554 aa, Unknown
  Description of Unknown: Integrase B1945 sequence
  PTHR30461:SF3,SM00857,G3DSA:1.10.10.2600,IPR036162,PF13408, IPR025827,G3DSA:3.40.50.1390,PS51737,IPR006119,IPR038109, PF07508,IPR011109,SSF53041,PF00239,PTHR30461, PS51736,Coil,cd00338
MKKFPIDLSCLTEEEISQFQEDPYTLYNGDQNVAIYLRYSSTGQSDQSIEGQLRDCRTFCKANHYRIVAIYVDRATTARKDVEKRVHLMEMISDSAKQNWEYVIVWKLDRFARNRNDSAIMKMRLRKNGVKVLSATEHLTDSPESIILESVLEGMAEFFSAELSQKVTRGMRESALKCHSVGGHIPLGYKVENHKLVVDPDTAHIVQEAFSLYANGESVAAICRKFNSAGYKTAKNTEFNRSSFKAMFRNTRYIGTYTYKDIVIENGIPAIIDKELFETVQRRLSKTATAPARGKAKVDYLLSGKLFCGHCGASMNGESGAGRHGKVYHYYSCYTKKRKLGCDKRPLKKDYIEGIVARDALNLLTDQLIDEIADMAIRQSEQDLINDTHIPQLTAQLSEVEKSITNITAAIEKGIASETLMNRLVQLEHEKKTLNKEIKAEEKFVYRIDRDQIVFWLSQFKYGNIEDEDFRRRLIDLLVNSVTVWDEPDGYKITTAYNLTSCKTKTFRVEKNPAAEEATGFDFGESECTKSPRNHPISRTFAFHKFRFYGVAFF

SEQ ID NO: 1945 - protein, 554 aa, Unknown
  Description of Unknown: Integrase B1946 sequence
  IPR036162,PS51737,IPR011109,PTHR30461,PS00397, PF00239,G3DSA:1.10.10.2600,IPR006119,SSF53041,SM00857, IPR025827,IPR038109,PS51736,cd03768,IPR006118, PF13408,G3DSA:3.40.50.1390,PF07508,Coil
MGKSKRVVGYARVSTEAQDITRQVELITAYCTERNYHLIKIIQEKISGARKDRKSINELLEVDDTVADMIIVSELSRLSREDDILSVLSTINELLKQGVDIQFLDKQDRIYKAGTVLSLYDIITLSVEAKASADERYKIAGRMQTGLRSKLSEFTNMFTGGTVPFGYKVIHNPDYKLNQTPKNLLVVDAQEAEAVKYLFQQLIDGNTIRQTVRVYNKLYPYKLSYSGICRIIRNPKYKGEIYRRGKLYGTIPELQIITPEVFDKANKQMRENNLFQSNAPKYYNPLKGLIFCPCGCSLYMKPNHNSYLIYRCSSSYNDKQRCENFGIKCSYVLSAVWTCIKATLHTEEYLRFNSRRSNELHEINKQIRETITQKVNNVDELKTQSASLIAKIKKLNNDDLINELETDYNVLCKQIKQIEQEISELNGQIAENDAEIKRSVEQKDFSEMEQSALYKEKLQKVVYHSLSAMRGILEIVFKNGMIRYVLIKKHRNGGVFLLPEFWTVDISRAVIIIPTHPSVDPEHPYTLLPTIPKEYTFDAIITERDMDEYRITVS

SEQ ID NO: 1946 - protein, 554 aa, Unknown
  Description of Unknown: Integrase B1947 sequence
  PTHR30461:SF3,SM00857,G3DSA:1.10.10.2600,IPR036162,PF13408, IPR025827,PS51737,G3DSA:3.40.50.1390,IPR006119,IPR038109, PF07508,IPR011109,SSF53041,PTHR30461,Coil, PS51736,cd00338,PF00239
MQTMPIDLSALTPEERQQFAENPSVLSTDCVATCCLYMRYSSDRQSEQSIEGQLRELISYCIRQEYRIAAVYVDRAISAHTSMAKRVAFQQMLADSKRAAWNTVLVWKLDRFARNRQDSAAARALLYKNGCGVESATEAISATKEGRLLESVLEGLNEYYSDELREKIIRGNRESALKGNALGGSVPLGYKIENKKWAIDPLTAPLVSEAFDRYASGDTVAAICDDFNARGYRTAKGAKFNKSSFKNIFRNEKYIGVYKYKDIRQENSVPRIVTDDVWAKVKARLKVNEEAPARGKAKVPYLLTGKIFCGHCGSQMVGECGRGKGGKTYNYYSCAGRKIRHTCDKKPVPKDWIEDIVVQDALEVLTDDVIDYVATVAARQSEEELQQNTNIPAIREQIADIERKVRNLTKAIEASNMAPDSLVARIAELESQRKGLSAQLLEEQHSVIHLSKEVVVYFLESVREKASPLESQKKMLVDLLINSVTVYDDEPGYLKITTAYNLSAVPAKTYRVSTSSVESGCSDMRANGPPLDANPNTITVVGMVFVQTRKHALP

SEQ ID NO: 1947 - protein, 554 aa, Unknown
  Description of Unknown: Integrase B1948 sequence
  cd03768,SM00857,IPR006118,G3DSA:1.10.10.2600,IPR036162, PS51737,G3DSA:3.40.50.1390,IPR006119,IPR038109,PF07508, IPR011109,SSF53041,PTHR30461,PS00397,PS51736, Coil,PF00239
MEKSKRVVGYARVSTEAQDITRQVELITAYCTERNYHLIKIIQEKISGARKDRKSLNELLEVDDTVADMIIVSELSRLSREDDILSVLSTINELLKQGVDILFLDKQDRIYKAGTVLSLYDIITLSVEAKASADERYKIAGRMQTGLRSKLAEFTNMFTGGTVPFGYKVIHNPDYKLNLTPKNLLVVDAQEAEAVKYLFQQLIDGNTIRQTVRVYNKLYPYKLSYSGICRIIRNPKYKGEIYRRGKLYGQISELQIISPEDFDKANKQMRENELFQSNAPKYYNPLKGLLFCPCGCGLYMKPNHNSYLIYRCSSAYNDKQKCENYGIKCAYILSSVWTCVKETLHTEEYKRFNTERANELQGINKQIRETITRKVNNVDELKTQSASLIAKIKKLNNDDLINELETDYNGLCKQIKQTEQEISELNGQIAENDAEIKRSVEQKDFSQMEQSALYKEKLQKVVYHSLSAMRGILEIVFKNGMIRYVLIKKHRNGGVFLLPEFWTVDISRAVIIIPTHPSVDPEHPYTLLPTIPREYTFDAIITERDMDEYRITVS

SEQ ID NO: 1948 - protein, 554 aa, Unknown
  Description of Unknown: Integrase B1949 sequence
  SM00857,G3DSA:1.10.10.2600,IPR036162,PF13408,IPR025827, PS51737,G3DSA:3.40.50.1390,IPR006119,IPR038109,PF07508, SSF53041,IPR011109,PTHR30461,Coil,cd00338, PF00239
MAYRKITDIRDTIGMRAVFYARVSTAEEEQLNAIELQIEENRGCIKDHGWKLVGEYIDRSKSGTMVKGRDDYQRLYEDLYEDLFDIVVIKDQERLQRNTLDWYLFINRVVQTGKLLFMYMDGKFYSPDDALITGVRAIIAEEFSRNLSKKLHNYHDHRIEKARQGQEIALQGSGNVYGWDKKDGKYYINPEQAKVRRLMCEGIMARKGSTLIAKELNDAGYRNTVGKPWKPMDIPKFVYDCKNVGTMIINKERHDFESKQTIKLPKEEWVYVENALPPIVTQEEWDLICKIHEERVIATGSDRRGKKTSGYSFSGKLVCGICGAPYWRKQRVSKDEYWVCSTKQTKGRRTRKRDSTMGKAGEINPLGCDNENISYNSLMEIMGVVSERLQANTDTIKQDMINWLTKLRKQLLEANGGHTEADLQREISRKSKLLDAYLDGILNKQEYQKKAEELDDRIIQLKAETEKNKANSGDIAEIDKVLANIDEEVSRYVDGNEKLKVEYLLEHLEQVQIFPDKVIVIVPILSEGIVVEKAQYVSREKRRREKYNVWYADG

SEQ ID NO: 1949 - protein, 554 aa, Unknown
  Description of Unknown: Integrase B1950 sequence
  PTHR30461:SF3,SM00857,G3DSA:1.10.10.2600,IPR036162,PF13408, PS51737,G3DSA:3.40.50.1390,IPR025827,IPR006119,IPR038109, PF07508,IPR011109,SSF53041,PTHR30461,Coil, cd00338,PF00239
MARTATKHPAKPKRGKKLEAEEPGVLYGRYSSHNQKDISVEQQFEKGYGLAGEYGIRIVETYADRAVSGRTDKRKDFQRMMADAAKGKFRYVIAWKSNRMGRNMLEALVNEAKLQELGVRVLYVEEDFDDTAAGRFAARSMMNVNQFYSENMAEDIKRGLYDNASNCMVANGHLPYGYKRDDTLHYVIDEAKAAVIREIFVRVSCGEPLVDIYDSLNARGIKTSYGRPWGRSSFQKILSNERYRGIYIYGDVRKEGGIPRIVSDELYFKVQEVLKTKKNPQGRHRVNGDYLLTGKLFCGNCKSPMIGISGTGRTGKLHYYYVCQKKRSEKTCDKKNVRRDEVEYQIAKAIFDNALQDQVIEWIADSTIAYNDRKEAEGHIGILEDQLADVQRSLKNIMSAIEQGIVTETTKSRLLELESERSEIEGKIAAAKADIVPVNREQLIEWLLSLREGDIHDKKYQARLFDTFLIAAYLYDDGTAKLVFSFAGDKNTVTVPLAEAVDSVEENTAEGSFKLCLAPPKIPNIRLDGRDFLILGGDKFAGRLQHAGGMLQSP

SEQ ID NO: 1950 - protein, 554 aa, Unknown
  Description of Unknown: Integrase B1951 sequence
  PTHR30461:SF3,cd00338,SM00857,G3DSA:1.10.10.2600,IPR036162, PF13408,PS51737,G3DSA:3.40.50.1390,IPR025827,IPR006119, IPR038109,PF07508,IPR011109,SSF53041,PTHR30461, PS51736,Coil,PF00239
MVTIRWLREQIRQGKTIYDLPLRVTFYARVSTEKVEQQGSLENQIQYYTEFIQKNPNWTYVPGYIDEGISGTSTYKRDSFLRMIENAKRGMFDFIITKEISRFSRNTLDSIQYTQELLDNNVGVLFQNDNINTLDSDSEFRLIVMAGVAQDEVRKLSERLKFGFRQSIKNGHVLGNNRLWGYDKKDCKLTIIPEQAEAVKLIFQLYATGNYGLRKLSQELTRRGYTSLLGNKFNSVTIGHILQNPKYKGWYCGNKTQSLDYRKKKTAFLDESEWVTYPDPNIPAIVSEELWNQANEIFKKRSARTKAYGVGYQSRYPYSGKIICGKHGTAFHRQSFKTMEGHTEFWQCRMYREHGKAGCDLPTLRTKELDAILADQFQKLVKNQKQIVRLVMDSVSSVQQKRDYSGQIAQLNTQISQLEGKKDKLLELSIANAITIQEFKKRNNRFNEQIADMQEQMISLQKLEENGSAASVDLSAIEKALWQELSFQDTISTEVVAAILDHVVVCEGSTKQRIDLELYLRLGQTASVTFSRERFAFWNTSSSRCAPQDAGCAR

SEQ ID NO: 1951 - protein, 554 aa, Unknown
  Description of Unknown: Integrase B1952 sequence
  PTHR30461:SF3,IPR036162,PS51737,IPR011109,PTHR30461, PF00239,G3DSA:1.10.10.2600,IPR006119,PF14287,SSF53041, IPR025378,SM00857,IPR025827,cd03770,IPR038109, PS51736,PF13408,G3DSA:3.40.50.1390,PF07508,Coil
MAKSNQGKITALYERLSRDDELQGESNSILNQKKYLEDYARKSGFNNIKHFTDDGYSGTNFNRPGFQSMIAEIEAGHIATVIVKDMSRFGRNYLEVGFYTEIQFPSKGVRFIAINNNVDSANPTDNDFTPFLNIMNEWYAKDTSNKIRAVFKSRMQDGKRCSGSIPYGYKRIPGDKQTLYVDEEAAAVVYKIFEMAANGSSMAKIAQTLSDEKVLIPSAYEEQHGSKAAQFHSYHDPYRWNTTTITYILDRQEYLGHTVLRKSIRENFKLKKRRAATPEEQMIFRDTHEAIIDQETWDKAQRLRKRCPKRLPDGTYTHRLSGMVFCADCGSRMSFSSPEAKHRDSGVVYDSDSSWQCSKYRNMYTSCTSHFIKTSTIEAAILEAIKAMAQKVLEDEAEFAEQLRALWESQNNQSSNEFKKELLAVQKRMDELDTLIRSLYESSVMGKIPERQFQRLMAQYDEEQTGCETRMAELKKELDNTETTKVDLKRFIKLIRKYKDCEVLTDDMLYELVEKWLSIPHPADGRSAVNRKSTFISTSLAILFPAKSRSTTMM

SEQ ID NO: 1952 - protein, 554 aa, Unknown
  Description of Unknown: Integrase B1953 sequence
  PTHR30461:SF3,SM00857,G3DSA:1.10.10.2600,IPR036162,PF13408, IPR025827,PS51737,G3DSA:3.40.50.1390,IPR006119,IPR038109, PF07508,IPR011109,SSF53041,PTHR30461,Coil, PS51736,cd00338,PF00239
MRKKFNIDLSMLTPEEQQQFRDDPTTLTKGEVDVALYLRFSSERQKEQSIEGQLRDCIAYCKRKSFRIVAIYVDRATTARKDVEKRVHFQEMISDSAHHLWNFVVVWKLDRFARNREDSAVFKMRLRKNGVRVKSATETISDNPEGIILESVLEGIAEYYSADLSQKITRGLRESAMKGHSVGGHVPLGYKIEDHRLVINPATAHIVQEAFQLYANGESMAEICRIFNSKGYRTAKNSEFNRSSFKSMFKNVRYIGTYIYKDIKKENAIPAIIDKDLFETVQRRLSLAADAPARGKAKVDYLLSGKLFCGHCGATMNGESGTSKTGAIHNYYTCYSRKRRKGCDKKPLKKDFIERIVAQDAMALLTNDVIEELADMAMSQADRDLKENTRIPELSTRLTEVEQGINNITKAIEKGIASDTLLNRLTELEKEKKDLTSQLHEEEKYICRIDRDQVVFWLTKFQGGDIEDEDCRRRIIDLLVNSVTVWDEPDGYKITTAYNLTSCKTKTFRVSNNADSPSGEGFGFGELSSTIGRISEPYIVWGTVFVQTRRHSLS

SEQ ID NO: 1953 - protein, 554 aa, Unknown
  Description of Unknown: Integrase B1954 sequence
  cd00338,SM00857,G3DSA:1.10.10.2600,IPR036162,PF13408, PS51737,IPR025827,G3DSA:3.40.50.1390,IPR006119,IPR038109, PF07508,SSF53041,IPR011109,PTHR30461,PS51736, Coil,PF00239
MNKTAPAQRRSGIRITFCPCGENLLMKFTSTWKIADPLAQYIIYLRKSRKDMEAEALGQTDTLKRHRAALLSLSESRWLNVVEICEEVVTGDSIAVRPEVQKVLQLVETGNYAGVIVMEVERLARGDTIDQGIIAQTFKYSNTKIITPNKIYDPNNEMDEEYFEFGLFMSRREYNTIKRRLSRGKEASLREGKWISGKTPFGWSREKLPNDKGYKLVPHPEQAPVLQQIYNWYTGEGCARIGAKAISTRLNSLGVPTNSGSLWRADSVLDILRNPANAGWIKSGGRPETKRIVDGAVVVSRPRTRQEDLKLYKGLHDGLISQEQYDKAVALSYSSASPRGKGAWGTVTSLAGLVHCDQCGRVMVRRPSSGNRRDTLLCPSYGCTTVSAWYDDVEDAVLDALRGWLRELELGEAAAPDDTPMRTALESSIAADRKQLAKLEAQEARAYELVETGVYTPEVFLQRSQALAADKQVIVDRIEASQTTIHELARARQARARLAPAVRRVLETYPLAASPQEKNALLKTVLQKVLYHKQTKSYTKSGSDMHVTLYPLAD

SEQ ID NO: 1954 - protein, 554 aa, Unknown
  Description of Unknown: Integrase B1955 sequence
  PTHR30461:SF3,cd00338,SM00857,G3DSA:1.10.10.2600,IPR036162, PF13408,PS51737,IPR025827,G3DSA:3.40.50.1390,IPR006119, IPR038109,PF07508,IPR011109,SSF53041,PTHR30461, mobidb-lite,Coil,PF00239
MPRKPAKHPAKPKRGKKLEVEEPGVLYGRYSSHNQKDISVEQQFEKGYELAAEYGIRIIDTYADRAVSGRTDKRRDFQRMMTDAAKGKFRYVIAWKSNRMGRNMLEALINEARLQDLGVRVLYVEEDFDDTAAGRFAARSMMNVNQFYSENMAEDIKRGLYDNAANCMVANGHLPYGYKADETLHYAIDEPKAAVIREIFTRVSCGETFVDIMASLNARGIKTSYGRPWGRSSFQKILSNERYRGIYIYGDVRKEGGIPRIISDELYFKVQEVITTKKNPQGRHRVNGDYLLTGKLFCGHCKSPMTGISGTSRSGNLHYYYVCQKRRTEKTCEKKNLRRDDIELQVAKAIKRRTLDDDTINWIADSVVEYSQHQESASGIGLLEDQLKDTQRSIKNLMAAIEQGIITPTTKARLMELEKEQSDIDRKITMAKADVIPVNRDQLVGWLKKLQAGDVHDKKYQAELFDTFLIAVYVYDNPDGQDYMKVVFNYAGSKNTVEIPLDPSVIDNVENIETGAVRLSSAQVHQTSEILPVTVGSWGGFLVIQRKEARSRIR

SEQ ID NO: 1955 - protein, 554 aa, Unknown
  Description of Unknown: Integrase B1956 sequence
  PTHR30461:SF3,SM00857,G3DSA:1.10.10.2600,IPR036162,PF13408, IPR025827,G3DSA:3.40.50.1390,PS51737,IPR006119,IPR038109, PF07508,SSF53041,IPR011109,PTHR30461,Coil, PS51736,cd00338,PF00239
MPQKFKIDLSMLTPEEQQQFRDDPTTLTKGEVDVALYLRFSSERQKEQSIEGQLRDCIAYCKHKSFRIVAIYVDRATTARKDVEKRVHFQEMISDSSHHLWNFVVVWKLDRFARNREDSAVFKMRLRKNGVRVKSATETISDNPEGIILESVLEGIAEYYSADLSQKITRGLRESAMKGHCVGGHVPLGYKIEDHRLVINPETAHIVQEAFQLYANGESVAEICRIFNGKGYRTAKNSEFNRSSFKSIFKNVRYIGTYIYKDIEKENAIPAIIDKDLFETVQRRLSLAADAPARGKAKVDYLLSGKLFCGHCGAAMHGESGTSKTGAIHNYYTCYSRKRRKGCNKKPLKKDFIERVVAQDAMALLTDDVIEELADMAMSQADRDLKENTRIPELSARLTEIEQGINNITKAVEKGIASDALLNRLTELEKEKKDLTSQLREEEKYIYRIDRDQVVFWLTKFQGGDIEDEDCRRRIIDLLVNSVTVWDEPDGYKITTAYNLTSCKTKTFRVSNNADSPSGEGFGFGELSSTIGRISEPYIVWGTVFVQTKRHSLP

SEQ ID NO: 1956 - protein, 553 aa, Unknown
  Description of Unknown: Integrase B1957 sequence
  PTHR30461:SF3,SM00857,G3DSA:1.10.10.2600,IPR036162,PF13408, PS51737,G3DSA:3.40.50.1390,IPR025827,IPR006119,IPR038109, PF07508,IPR011109,SSF53041,PTHR30461,Coil, PS51736,cd00338,PF00239
MKKFPIDLSCLTEEEISQFQEDPYTLYNGDQNVAIYLRYSSTGQSDQSIEGQLRDCRAFCKANHYRIVAIYVDRATTARKDVEKRVHLMEMISDSAKQNWEYVIVWKLDRFARNRNDSAIMKMRLRKNGVKVLSATEHLTDSPESIILESVLEGMAEFFSAELSQKVTRGMRESALKCHSVGGHIPLGYKVENHKLVVDPDTAHIVQEAFSLYANGESVADICRKFNSAGYKTAKNTEFNRSSFKAMFRNTRYIGTYTYKDIVIENGIPAIIDKELFETVQRRLSKTATAPARGKAKVDYLLSGKLFCGHCGASMNGESGAGRHGKVYHYYSCYTKKRKLGCDKRPLKKDYIEGIVARDALNLLTDQLIDEIADMAIRQSEQDLINDTHIPQLTAQLSEVEKSITNITAAIEKGIASETLMNRLVQLEHEKKTLNKEIKAEEKFVYRIDRDQIVFWLSQFKYGNIEDENFRRRLIDLLVNSVTVWDEPDGYKITTAYNLTSCKTKTFRVEKNPAAEEATGFDFGKSECTIERISEPYIVWGTVFVQTKRHSLP

SEQ ID NO: 1957 - protein, 553 aa, Unknown
  Description of Unknown: Integrase B1958 sequence
  PTHR30461:SF3,cd00338,SM00857,G3DSA:1.10.10.2600,IPR036162, PF13408,PS51737,G3DSA:3.40.50.1390,IPR025827,IPR006119, IPR038109,PF07508,IPR011109,SSF53041,PTHR30461, PS51736,Coil,PF00239
MKKFPIDLSCLTEEEISQFQEDPYTLYNGDQNVAIYLRYSSTGQSDQSIEGQLRDCRTFCKANHYRIVAIYVDRATTARKDVEKRLHLMEMISDSAKQNWEYVIVWKLDRFARNRNDSAIMKMRLRKNGVKVLSATEHLTDSPESIILESVLEGMAEFFSAELSQKVTRGMRESALKCHSVGGHIPLGYKVENHKLVIDPDTAHIVQEAFSLYANGESVAAICRKFNSAGYKTAKNTEFNRSSFKAMFRNTRYIGTYTYKDIVIENGIPAIIDKELFETVQRRLSKTATAPARGKAKVDYLLSGKLFCGHCGASMNGESGAGRHGKVYHYYSCYTKKRKLGCDKRPLKKDYIEGIVARDALNLLTDQLIDEIADMAIRQSEQDLINDTHIPQLTAQLTEVEKSITNITAAIEKGIASETLMNRLVQLEHEKKTLNKEIKAEEKFVYRIDRDQIVFWLSQFKYGNIEDKDFRRRLIDLLVNSVTVWDEPDGYKITTAYNLTSCKTKTFRVEKNPAAEEATGFDFGESECTMERISEPYIVWGTVFVQTKRHSLP

SEQ ID NO: 1958 - protein, 553 aa, Unknown
  Description of Unknown: Integrase B1959 sequence
  PTHR30461:SF3,SM00857,G3DSA:1.10.10.2600,IPR036162,PF13408, PS51737,IPR025827,G3DSA:3.40.50.1390,IPR006119,IPR038109, PF07508,IPR011109,SSF53041,PTHR30461,Coil, PS51736,cd00338,PF00239
MKKFPIDLSCLTEEEISQFQEDPYTLYNGDQNVAIYLRYSSTGQSDQSIEGQLRDCRAFCKANHYRIVAIYVDRATTARKDVEKRVHLMEMISDSAKQNWEYVIVWKLDRFARNRNDSAIMKMRLRKNGVKVLSATEHLTDSPESIILESVLEGMAEFFSAELSQKVTRGMRESALKCHSVGGHIPLGYKVENHKLVVDPDTAHIVQEAFSLYANGESVADICRKFNSAGYKTAKNTEFNRSSFKAMFRNTRYIGTYTYKDIVIENGIPAIIDKELFETVQRRLSKTATAPARGKAKVDYLLSGKLFCGHCGASMNGESGAGRHGKVYHYYSCYTKKRKLGCDKRPLKKDYIEGIVARDALNLLTDQLIDEIADMAIRQSEQDLINDTHIPQLTAQLSEVEKSITNITAAIEKGIASETLMNRLVQLEHEKKTLNKEIKAEEKFVYRIDRDQIVFWLSQFKYGNIEDENFRRRLIDLLVNSVTVWDEPDGYKITTAYNLTSCKTKTFRVEKNPAAEEATGFDFGESECTIERISEPYIVWGTVFVQTKRHSLP

SEQ ID NO: 1959 - protein, 553 aa, Unknown
  Description of Unknown: Integrase B1960 sequence
  PTHR30461:SF3,SM00857,G3DSA:1.10.10.2600,IPR036162,PF13408, PS51737,G3DSA:3.40.50.1390,IPR025827,IPR006119,IPR038109, PF07508,IPR011109,SSF53041,PTHR30461,Coil, PS51736,cd00338,PF00239
MKKFPIDLSCLTEEEISQFQEDPYTLYNGDQNVAIYLRYSSTGQSDQSIEGQLRDCRTFCKENHYRIVAIYVDRATTARKDVEKRVHLMEMISDSAKQNWEYVIVWKLDRFARNRNDSAIMKMRLRKNGVKVLSATEHLTDSPESIILESVLEGMAEFFSAELSQKVTRGMRESALKCHSVGGHIPLGYKVENHKLVVDPDTAHIVQEAFSLYANGESVADICRKFNSAGYKTAKNTEFNRSSFKAMFRNTRYIGTYTYKDIVIENGIPAIIDKELFETVQRRLSKTATAPARGKAKVDYLLSGKLFCGHCGASMNGESGAGRHGKVYHYYSCYTKKRKLGCDKRPLKKDYIEGIVARDALNLLTDQLIDEIADMAIRQSEQDLINDTHIPQLTAQLSEVEKSITNITAAIEKGIASETLMNRLVQLEHEKKTLNKEIKAEEKFVYRIDRDQIVFWLSQFKYGNIEDENFRRRLIDLLVNSVTVWDEPDGYKITTAYNLTSCKTKTFRVEKNPAAEEATGFDFGESECTIERISEPYIVWGTICVQTKIHPLP

SEQ ID NO: 1960 - protein, 553 aa, Unknown
  Description of Unknown: Integrase B1961 sequence
  PTHR30461:SF3,cd00338,SM00857,G3DSA:1.10.10.2600,IPR036162, PF13408,IPR025827,G3DSA:3.40.50.1390,PS51737,IPR006119, IPR038109,PF07508,IPR011109,SSF53041,PTHR30461, PS51736,Coil,PF00239
MQTIPIDLSSLTAQEQRQFAENPAVLDANCDTVCCLYMRYSSEKQTEQSIEGQLRELLSFCKQHKYRVAAVYVDRAISAHASMDKRPAFQKMLSDSRGASWKTVLVYKLDRFARNREDAAVARMRLRKAGCNVESAKEGISKNPEGVILEALLEGMAEYYSLELSQKITRGMRESALKGQAVGGSIPLGYRIEKKQWVLDPLTAPLVSEAFNRYADGETVAGICSDFNARGYRTAKGAQFNKSSFKNIFRNEKYIGVYKYKDIRVEDAIPRIVPDDLWERVQARLKVSEQAPARGKAKVPYLLSGKIFCGHCGSPMIGESGRGKGGKTYNYYSCATRKRTGNCDKKPVPKDWIEDVVAQDALSVLTDDVIDYVATIAAQQSEEDIQKNTNIPAIREQIADIERKVRNLTKAIEASGAAPDVLVSRIVDLEEQRKGLSAQLSEEERGVIPLTKEMVMVFLTAVREQVVPLENMKPVIISLLVNSVTVYDDEPGFMKFTTAYNLTKTPQKTYKVQTFGDYKCSDIGANGVPLGTNSNTITVVGMVFVQTRKHALP

SEQ ID NO: 1961 - protein, 553 aa, Unknown
  Description of Unknown: Integrase B1962 sequence
  PTHR30461:SF3,SM00857,G3DSA:1.10.10.2600,IPR036162,PF13408, IPR025827,G3DSA:3.40.50.1390,PS51737,IPR006119,IPR038109, PF07508,IPR011109,SSF53041,PTHR30461,Coil, PS51736,cd00338,PF00239
MQTMPIDLSALTPAERQQFSENSSVLSTDCVAVCCLYMRFSSDRQSEQSIEGQLRELISYCIRQEYRIAAVYVDRAVSAHTSMAKRVAFQQMLADSKRAAWNTVLVWKLDRFARNRQDSAAARAVLMKNGCMVESATENISNSPEGRLLESVLEGINEYYSEDLKQKIRRGNRESALKGQALGGSVPLGYKIERKKWTLDPLTAPLVEEAFTRYAGGETVAAICDDFNLRGYRTSKGAKFNKSSFKNIFRNEKYIGVYKYTDIRQENAVPRIVSDDVWRKVQSRLKVNEEAPARGKAKVPYLLAGKIFCGHCGAPMVGECGRSKGGKTYNYYSCSNRKRKNSCDKKPAPKDWIEDVVAQDAQAVLTDDIIEYVSTVAAKQSEEEIQQNTNIPAIKQQIRDIDSKVRNLTKAIESASIAPDSLVSRIAELENQKKGLSAQLTEEQHNVVPLTKEMVRYYLESVRSNAIPFETQKHMLIDMFVNSVTVYDDEPGFMKFTTAYNLTQIPSKTYKVPIPGGFKCSDMGLISPPLEYNTNTISVIGMVFIQTKRHALP

SEQ ID NO: 1962 - protein, 553 aa, Unknown
  Description of Unknown: Integrase B1963 sequence
  PTHR30461:SF3,SM00857,G3DSA:1.10.10.2600,IPR036162,PF13408, PS51737,G3DSA:3.40.50.1390,IPR025827,IPR006119,IPR038109, PF07508,IPR011109,SSF53041,PTHR30461,Coil, PS51736,cd00338,PF00239
MQTIPIDLSALTPAERQQFSENPSVLSTDCVAVCCLYMRFSSDRQSEQSIEGQLRELISYCVRQEYRIAAVYVDRAVSAHTSMAKRVAFQQMLADSKRAAWNTVLVWKLDRFARNRQDSAAARAVLMKNGCMVESATENISNSPEGRLLESVLEGINEYYSEDLKQKIRRGNRESALKGQALGGSVPLGYKIEHKNWTLDPLTAPLVEEAFARYAGGETVASICDDFNLRGYRTSKGAKFNKSSFKNIFRNEKYIGVYKYTDIRQENAVPRIVSDDVWRKVQSRLKVNEEAPARGKAKVPYLLAGKIFCGHCGAPMVGECGRSKGGKTYNYYSCSNRKRKNSCDKKPAPKDWIEDVVAQDAQAVLTDDIIEYVSTVAAKQSEEEIQQNTNIPAIKQQIMDIDSKVRNLTKAIESASIAPDSLVSRIAELESQKKGLSAQLTEEQHSVVPLTKEMVRYYLESVRSNAIPFETQKHMLIDMFVNSVTVYDDEPGFMKFTTAYNLTQIPSKTYKVPIPGGFKCSDMGLISPPLEYNTNTISVIGMVFIQTKRHALP

SEQ ID NO: 1963 - protein, 553 aa, Unknown
  Description of Unknown: Integrase B1964 sequence
  cd03768,SM00857,IPR006118,G3DSA:1.10.10.2600,IPR036162, PS51737,G3DSA:3.40.50.1390,IPR006119,IPR038109,PF07508, SSF53041,IPR011109,PTHR30461,PS00397,PS51736, Coil,PF00239
MEKSKRVVGYARVSTEAQDITRQIELITAYCSDRNYHLIKIIQEKISGARKDRKSLNELLDVDDAVADMIIVSELSRLSREDDILSVLSTINELLKQGVDILFLDKQDRIYKAGTILSLYDIITLSVEAKASADERYKIAGRMQTGLRSKLAEFSNMFAGGTVPFGYKVIHNPDYKLNQTPKNLLVVDAKEAEAVKYLFQQLIDGNTIRQTVRVYNKLYPYKLSYSGICRIIRNPKYKGEIYRRGKLYGQIPELQIITPEDFDKANKQMRENSLFQSNAPKYYNPLKGLLFCPCGCGLYMKPNHNSYLIYRCSSAYNDKQKCENYGVKCAYILSSVWTCVKETLHTEEYKRFNTQRANELQGINKQIRETITRKVNSVDELKTQSASLIAKIKKLNNDDLINELETDYNVLCKQIKQTEQEISELNGQIAENDAEIKRNVEQKDFSKMEQSALYKEKLQKAVYHSLSAMRGILEIIFKNGMTRYVLIKKHRNGGTYLLPDTFKGDMERKQIIVPSLRTDKDNPYSAQPMNLRYTFDEFFKAMPVEEYEIPITE

SEQ ID NO: 1964 - protein, 553 aa, Unknown
  Description of Unknown: Integrase B1965 sequence
  PTHR30461:SF3,SM00857,G3DSA:1.10.10.2600,IPR036162,PF13408, PS51737,IPR025827,G3DSA:3.40.50.1390,IPR006119,IPR038109, PF07508,SSF53041,IPR011109,PF00239,PTHR30461, PS51736,Coil,cd00338
MKRFPIDLSCLTEEEISQFQEDPYTLYNGDQEVALYLRYSSTGQSDQSIEGQLRDCRAFCKANHYRIVAIYVDRATTARKDVEKRVHLMEMVADSAKQNWEYVIVWKLDRFARNRNDSAIMKMRLRKNGVKVLSATEHLTDSPESIILESVLEGMAEFFSAELSQKVTRGMRESALKCHSVGGHIPLGYKVENHKLVVDPDTAHIVQEAFSLYANGESVADICRKFNSAGYKTAKNTEFNRSSFKAMFRNTRYIGTYTYKDIVIENGIPAIIDKELFETVQRRLSKTATAPARGKAKVDYLLSGKLFCGHCGASMNGESGAGRHGKVYHYYSCYTKKRKLGCDKRPLKKDYIEGIVARDALNLLTDQLIDEIADMAIRQSEQDLINDTHIPQLTAQLSEVEKSITNITAAIEKGIASETLMNRLVQLEHEKKTLNKEIKAEEKFVCRIDRDQIVFWLSQFKHGNIEDEDFRRRLIDLLVNSVTVWDEPDGYKITTAYNLTSCKTKTFRVDKNPAAEEATGFDFGESECTIERIFEPYIVWGTVFVQTKRHSLP

SEQ ID NO: 1965 - protein, 553 aa, Unknown
  Description of Unknown: Integrase B1966 sequence
  PTHR30461:SF3,SM00857,G3DSA:1.10.10.2600,IPR036162,PF13408, IPR025827,G3DSA:3.40.50.1390,PS51737,IPR006119,IPR038109, PF07508,IPR011109,SSF53041,PF00239,PTHR30461, PS51736,Coil,cd00338
MKKFPIDLSCLTEEEISQFQEDPYTLYNGDQNVAIYLRYSSTGQSDQSIEGQLRDCRTFCKANHYRIVAIYVDRATTARKDMEKRVHLMEMISDSAKQNWEYVIVWKLDRFARNRNDSAIMKMRLRKNGVKVLSATEHLTDSPESIILESVLEGMAEFFSAELSQKVTRGMRESALKCHSVGGHIPLGYKVENHKLVVDPDTAHIVQEAFSLYANGESVAAICRKFNSAGYKTAKNTEFNRSSFKAMFRNTRYIGTYTYKDIVIENGIPAIIDKELFETVQRRLSKTATAPARGKAKVDYLLSGKLFCGHCGASMNGESGAGRHGKVYHYYSCYTKKRKLGCDKRPLKKDYIEGIVARDALNLLTDQLIDEIADMAIRQSEQDLINDTHIPQLTAQLSEVEKSITNITAAIEKGIASETLMNRLVQLEHEKKTLNKEIKAEEKFVYRIDRDQIVFWLSQFKYGNIEDEDFRRRLIDLLVNSVTVWDEPDGYKITTAYNLTSCKTKTFRVEKNPAAEKATGFDFGESECTIERISEPYIVWGTVFVQTKRHSLP

SEQ ID NO: 1966 - protein, 553 aa, Unknown
  Description of Unknown: Integrase B1967 sequence
  PTHR30461:SF3,cd00338,SM00857,G3DSA:1.10.10.2600,IPR036162, PF13408,PS51737,G3DSA:3.40.50.1390,IPR025827,IPR006119, IPR038109,PF07508,IPR011109,SSF53041,PTHR30461, PS51736,Coil,PF00239
MKLPIDISCLTKEEISQFQEDPYTLYNGDQDVALYLRYSSTGQSDQSIEGQLRDCRTFCKANHYRIVAIYVDRATTAHKDVEKRVHLMEMVADSAKQNWEYVIVWKLDRFARNRNDSAIMKMRLRKNGVKVLSATEHLTDSPESIILESVLEGMAEFFSAELSQKVTRGMRESALKCHSVGGHIPLGYKVENHKLVVNPDTAHIVQEAFSLYANGESVADICRKFNSAGYKTAKNTEFNRSSFKAMFRNTRYIGTYTYKDIVIENGIPAIIDKELFETVQRRLSKTATAPARGKAKVDYLLSGKLFCGHCGASMNGESGAGRHGKVYHYYSCYTKKRRLGCDKRPLKKDYIEEIVARDALNLLTDQLIDEIADMAIQQSEQDLINDTHIPQLTAQLSEVEKSITNITAAIEKGIASETLMNRLVQLEHEKKTLNKEIKAEEKFVYRIDRDQIVFWLSQFKYGNIEDEDFRRRLIDLLVNSVTVWDEPDGYKITTAYNLTSCKTKTFRVEKNPATEEATGFDFGESECAKKTRNRNGFGSFCLHKLLFSPAAFF

SEQ ID NO: 1967 - protein, 553 aa, Unknown
  Description of Unknown: Integrase B1968 sequence
  PTHR30461:SF3,SM00857,G3DSA:1.10.10.2600,IPR036162,PF13408, PS51737,G3DSA:3.40.50.1390,IPR025827,IPR006119,IPR038109, PF07508,SSF53041,IPR011109,PF00239,PTHR30461, PS51736,Coil,cd00338
MKEFPIDLSCLTEEEISQFQEDPYTLYNGDQNVAIYLRYSSTGQSDQSIEGQLRDCRTFCKANHYRIVAIYVDRATTARKDVEKRVHLMEMISDSAKQNWEYVIVWKLDRFARNRNDSAIMKMRLRKNGVKVLSATEYLTDSPESIILESVLEGMAEFFSAELSQKVTRGMRESALKCHSVGGHIPLGYKVENHKLVVDPDTAHIVQEAFSLYANGESVADICRKFNSAGYKTAKNTEFNRSSFKAMFRNTRYIGTYTYKDIVIENGIPAIIDKELFETVQRRLSKTATAPARGKAKVDYLLSGKLFCGHCGASMNGESGAGRHGKVYHYYSCYTKKRKLGCDKRPLKKDYIEGIVARDALNLLTDQLIDEIADMAIRQSEQDLINDTHIPQLAAQLSEVEKSIANITAAIEKGIASETLMNRLVQLEHEKKTLNKEIKAEEKFVYRIDRDQIVFWLSQFKYGNIEDEDFRRRLIDLLVNSVTVWDEPDGYKITTAYNLTSCKTKTFRVEKNPAAEEATGFDFGESECTIERISEPYIVWGTVFVQTKRHSLP

SEQ ID NO: 1968 - protein, 553 aa, Unknown
  Description of Unknown: Integrase B1969 sequence
  PTHR30461:SF3,SM00857,G3DSA:1.10.10.2600,IPR036162,PF13408, IPR025827,G3DSA:3.40.50.1390,PS51737,IPR006119,IPR038109, PF07508,SSF53041,IPR011109,PF00239,PTHR30461, PS51736,Coil,cd00338
MKKFPIDLSCLTEEEISQFQEDPYTLYNGDQNVAIYLRYSSTGQSDQSIEGQLRDCRTFCKANHYRIVAIYVDRATTARKDVEKRVHLMEMISDSAKQNWEYVIVWKLDRFARNRNDSAIMKMRLRKNGVKVLSATEHLTDSPESIILESVLEGMAEFFSAELSQKVTRGMRESALKCHSVGGHIPLGYKVENHKLVVDPDTAHIVQEAFSLYANGESVAAICRKFNSAGYKTAKNTEFNRSSFKAMFRNTRYIGTYTYKDIVIENGIPAIIDKELFETVQRRLSKTATAPARGKAKVDYLLSGKLFCGHCGASMNGESGAGRHGKVYHYYSCYTKKRKLRCDKRPLKKDYIEGIVARDALNLLTDQLIDEIADMAIRQSEQDLINDTHIPQLTAQLSEVEKSITNITAAIEKGIASETLMNRLVQLEHEKKTLNKEIKAEEKFVYRIDRDQIVFWLSQFKYGNIEDENFRRRLIDLLVNSVTVWDEPDGYKITTAYNLTSCKTKTFRVEKNPAAEEATGFDFGESECTIERISEPYIVWGTVFVQTKRHSLP

SEQ ID NO: 1969 - protein, 553 aa, Unknown
  Description of Unknown: Integrase B1970 sequence
  cd03768,SM00857,IPR006118,G3DSA:1.10.10.2600,IPR036162, PS51737,G3DSA:3.40.50.1390,IPR006119,IPR038109,PF07508, IPR011109,SSF53041,PTHR30461,PS00397,PS51736, Coil,PF00239
MEKSKRVVGYARVSTEAQDITRQIELITAYCNDRNYHLIKIIQEKISGARKDRKSLNELLDVDDAVADMIIVSELSRLSREDDILSVLSTINELLKQGVDILFLDKQDRIYKAGTILSLYDIITLSVEAKASADERYKIAGRMQTGLRSKLAEFSNMFAGGTVPFGYKVIHNPDYKLNQTPKNLLVVDAKEAEAVKYLFQQLIDGNTIRQTVRVYNKLYPYKLSYSGICRIIRNPKYKGEIYRRGKLYGQIPELQIITPEDFDKANKQMRENSLFQSNAPKYYNPLKGLLFCPCGCGLYMKPNHNSYLIYRCSSAYNDKQKCENYGVKCAYILSSVWTCVKETLHTEEYKRFNTQRANELQGINKQIRETITRKVNSVDELKTQSASLIAKIKKLNNDDLINELETDYNVLCKQIKQTEQEISELNGQIAENDAEIKRNVEQKDFSKMEQSALYKEKLQKAVYHSQSAMRGILEIVFKNGMTRYVLIKKHRNGGTYLLPDTFKGDMERKQIIVPSLRTDKDNPYSAQPMNLRYTFDEFFKAMPVEEYEIPITE

SEQ ID NO: 1970 - protein, 553 aa, Unknown
  Description of Unknown: Integrase B1971 sequence
  PTHR30461:SF3,SM00857,G3DSA:1.10.10.2600,IPR036162,PF13408, PS51737,IPR025827,G3DSA:3.40.50.1390,IPR006119,IPR038109, PF07508,IPR011109,SSF53041,PF00239,PTHR30461, PS51736,Coil,cd00338
MKKFPIDLSCLTEEEISQFQEDPYTLYNGDQDVALYLRYSSTGQSDQSIEGQLRDCRAFCKANHYRIVAIYVDRATTARKDVEKRVHLMEMVADSAKQNWEYVIVWKLDRFARNRNDSAIMKMRLRKNGVKVLSATEHLTDSPESIILESVLEGMAEFFSAELSQKVTRGMRESALKCHSVGGHIPLGYKVENHKLVVDPDTAHIVQEAFSLYANGESVADICRKFNSAGYKTAKNTEFNRSSFKAMFRNTRYIGTYTYKDIVIENGIPAIIDKELFETVQRRLSKTATAPARGKAKVDYLLSGKLFCGHCGASMNGESGAGRHGKVYHYYSCYTKKRKLGCDKRPLKKDYIEGIVARDALNLLTDQLIDEIADMAIRQSEQDLINDTHIPQLTAQLSEVEKSIMNITAAIEKGIASETLMNRLVQLEHEKKTLNKEIKAEEKFVYRIDRDQIVFWLSQFKYGNIEDEDFRRRLIDLLVNSVTVWDEPDGYKITTAYNLTSCKTKTFRVEKNPAAEEATGFDFGESECTIERISEPYIVWGTVFVQTKRHSLP

SEQ ID NO: 1971 - protein, 553 aa, Unknown
  Description of Unknown: Integrase B1972 sequence
  PTHR30461:SF3,SM00857,G3DSA:1.10.10.2600,IPR036162,PF13408, PS51737,G3DSA:3.40.50.1390,IPR025827,IPR006119,IPR038109, PF07508,SSF53041,IPR011109,PF00239,PTHR30461, PS51736,Coil,cd00338
MKKFPIDLSCLTEEEISQFQEDPYTLYNGDQEVALYLRYSSTGQSDQSIEGQLRDCRAFCKANHYRIVAIYVDRATTARKDVEKRVHLMEMVADSAKQNWEYVIVWKLDRFARNRNDSAIMKMRLRKNGVKVLSATEHLTDSPESIILESVLEGMAEFFSAELSQKVTRGMRESALKCHSVGGHIPLGYKVKNHKLVVDPDTAHIVQEAFSLYANGESVADICRKFNSAGYKTAKNTEFNRSSFKAMFRNTRYIGTYTYKDIVIENGIPAIIDKELFETVQRRLSKTATAPARGKAKVDYLLSGKLFCGHCGASMNGESGAGRHGKVYHYYSCYTNKRKLGCDKRPLKKDYIEGIVARDALNLLTDQLINEIADMAIRQSEQDLINDTHIPQLTAQLSEVEKSITNITAAIEKGIASETLMNRLVQLEHEKKTLNKEIKAEEKFVYRIDRDQIVFWLSQFKYGNIEDEDFRRRLIDLLVNSVTVWDEPDGYKITTAYNLTSCKTKTFRVEKNPAAEEATGFDFGESECTIERISEPYIVWGTVFVQTKRHSLP

SEQ ID NO: 1972 - protein, 553 aa, Unknown
  Description of Unknown: Integrase B1973 sequence
  PTHR30461:SF3,SM00857,G3DSA:1.10.10.2600,IPR036162,PF13408, PS51737,IPR025827,G3DSA:3.40.50.1390,IPR006119,IPR038109, PF07508,IPR011109,SSF53041,PF00239,PTHR30461, PS51736,Coil,cd00338
MKKFPIDLSCLTEEEISQFQEDPYTLYNGDQDVALYLRYSSTGQSDQSIEGQLRDCRTFCKANHYRIVAIYVDRATTARKDVEKRVHLMEMVADSAKQNWEYVIVWKLDRFARNRNDSAIMKMRLRKNGVKVLSATEHLTDSPESIILESVLEGMAEFFSAELSQKVTRGMRESALKCHSVGGHIPLGYKVENHKLVVDPDTAHIVQEAFSLYANGESVADICRKFNSAGYKTAKNTEFNRSSFKAMFRNTRYIGTYTYKDIVIENGIPAIIDKELFETVQRRLSKTATAPARGKAKVDYLLSGKLFCGHCGASMNGESGAGRHGKVYHYYSCYTKKRKLGCDKRPLKKDYIEGIVARDALNLLTDQLIDEIADMAIRQSEQDLINDTHIPQLTAQLSEVEKSITNITAAIEKGIASETLMNRLVQLEHEKKTLNKEIKAEEKFVYRIDRDQIVFWLSQFKYGNIEDEDFRRRLIDLLVNSVTVWDEPDGYKITTAYNLTSCKTKTFRVEKNPAAEEATGFDFGESECTIERISEPYIVWGTVFVQTKRHSLP

SEQ ID NO: 1973 - protein, 553 aa, Unknown
  Description of Unknown: Integrase B1974 sequence
  PTHR30461:SF3,SM00857,G3DSA:1.10.10.2600,IPR036162,PF13408, PS51737,G3DSA:3.40.50.1390,IPR025827,IPR006119,IPR038109, PF07508,IPR011109,SSF53041,PF00239,PTHR30461, PS51736,Coil,cd00338
MKKFPIDLSCLTEEEISQFQEDPYTLYNGDQNVAIYLRYSSTGQSDQSIEGQLRDCRAFCKANHYRIVAIYVDRATTARKDVEKRVHLMEMISDSAKQNWEYVIVWKLDRFARNRNDSAIMKMRLRKNGVKVLSATEHLTDSPESIILESVLEGMAEFFSAELSQKVTRGMRESALKCHSVGGHIPLGYKVENHKLVVDPDTAHIVQEAFSLYANGESVAAICRKFNSAGYKTAKNTEFNRSSFKAMFRNTRYIGTYTYKDIVIENGIPAIIDKELFETVQRRLSKTATAPARGKAKVDYLLSGKLFCGHCGASMNGESGAGRHGKVYHYYSCYTKKRKLGCDKRPLKKDYIEGIVARDALNLLTDQLIDEIADMAIRQSEQDLINDTHIPQLTAQLSEVEKSITNITAAIEKGIASETLMNRLVQLEHEKKTLNKEIKAEEKFVYRIDRDQIVFWLSQFKYGNIEDENFRRRLIDLLVNSVTVWDEPDGYKITTAYNLTSCKTKTFRVEKNPAAEEATGFDFGESECTIERISEPYIVWGTVFVQTKRHSLP

SEQ ID NO: 1974 - protein, 553 aa, Unknown
  Description of Unknown: Integrase B1975 sequence
  PTHR30461:SF3,SM00857,G3DSA:1.10.10.2600,IPR036162,PF13408, PS51737,IPR025827,G3DSA:3.40.50.1390,IPR006119,IPR038109, PF07508,IPR011109,SSF53041,PF00239,PTHR30461, PS51736,Coil,cd00338
MKKFPIDLSCLTEEEISQFQEDPYTLYNGDQDVALYLRYSSTGQSDQSIEGQLRDCRAFCKANHYRIVAIYVDRATTAHKDVEKRVHLMEMVADSAKQNWEYVIVWKLDRFARNRNDSAIMKMRLRKNGVKVLSATEHLTDSPESIILESVLEGMAEFFSAELSQKVTRGMRESALKCHSVGGHIPLGYKVENHKLVVNPDTAHIVQEAFSLYANGESVADICRKFNSAGYKTAKNTEFNRSSFKAMFRNTRYIGTYTYKDIVIENGIPAIIDKELFETVQRRLSKTATAPARGKAKVDYLLSGKLFCGHCGASMNGESGAGRHGKVYHYYSCYTKKRKLGCDKRPLKKDYIEGIVARDALNLLTDQLIDEIADMAIRQSEQDLINDTHIPQLTAQLSEVEKSIMNITAAIENGIASETLMNRLVQLEHEKKTLNKEIKAEEKFVYRIDRDQIVFWLSQFKYGNIEDEDFRRRLIGLLVNSVTVWDEPDGYKITTAYNLTSCKTKTFRVEKNPAAEEATGFDFGESECTIERISEPYIVWGKIFVQTKRHPLP

SEQ ID NO: 1975 - protein, 553 aa, Unknown
  Description of Unknown: Integrase B1976 sequence
  SM00857,G3DSA:1.10.10.2600,IPR036162,PF13408,IPR025827, G3DSA:3.40.50.1390,PS51737,IPR006119,IPR038109,PF07508, SSF53041,IPR011109,PTHR30461,Coil,cd00338, PF00239
MAYRKITDIKDTIGMRAVFYARVSTAEEEQLNAIELQIEENRGCIKDHGWKLVGEYIDRSKSGTMVKGRDDYQRLYEDLYEDLFDIVVIKDQERLQRNTLDWYLFINRVVQTGKLLFMYMDGKFYSPDDALITGVRAIIAEEFSRNLSKKLHNYHDHRIEKARQGQEIALQGSGNVYGWDKKDGKYYINPEQAKVRRLMCEGIMARKGSTLIAKELNDAGYRNTVGKPWKPMDIPKFVYDCKNVGTMIINKERHDFESKQTIKLPKEEWVYVENALPPIVTQEEWDLICKIHEERVIATGSDRRGKKTSGYSFSGKLVCGICGAPYWRKQRVSKDEYWVCSTKQTKGRRTRKRDSTMGKAGEINPLGCDNENISYNSLMEIMGVVSERLQANTDTIKHDMINWLTKLRKQLLEANGGHTEADLQRELSRKSKLLDAYLDGILNKQEYQKKAEELDERIIQLKAETEKNKANSGDIAEIDKVLANIDEEVSRYVDGNEKLKVEYLLEHLEQVQIFPDKVIVIVPILSEGIVVEKTQYVSREKWSRKKHNYQCYS

SEQ ID NO: 1976 - protein, 553 aa, Unknown
  Description of Unknown: Integrase B1977 sequence
  PTHR30461:SF3,SM00857,G3DSA:1.10.10.2600,IPR036162,PF13408, IPR025827,G3DSA:3.40.50.1390,PS51737,IPR006119,IPR038109, PF07508,IPR011109,SSF53041,PF00239,PTHR30461, PS51736,Coil,cd00338
MKKFPIDLSCLTEEEISQFQEDPYTLYNGDQDVALYLRYSSTGQSDQSIEGQLRDCRAFCKANHYRIVAIYVDRATTARKDVEKRVHLMEMIADSAKQNWEYVIVWKLDRFARNRNDSAIMKMRLRKNGVKVLSATEHLTDSPESIILESVLEGMAEFFSAELSQKVTRGMRESALKCHSVGGHIPLGYKVENHKLVVDPDTAHIVQEAFSLYANGESVADICRKFNSAGYKTAKNTKFNRSSFKAMFRNTRYIGTYTYKDIVIENGIPAIIDKELFETVQRRLSKTATAPARGKAKVDYLLSGKLFCGHCGASMNGESGAGRHGKVYHYYSCYTKKRKLGCDKRPLKKDYIEGIVARDALNLLTNQLIDEIADMAIRQSEQDLINDTHIPQLTAQLSEVEKSITNITAAIEKGIASETLMNRLVQLEHEKKTLNKEIKAEEKFVYRIDRDQIVFWLSQFKYGNIEDEDFRRRLIDLLVNSVTVWDEPDGYKITTAYNLTSCKTKTFRVEKNPAAEEATGFDFGESECTIERISEPYIVWGTVFVQTKRHSLP

SEQ ID NO: 1977 - protein, 553 aa, Unknown
  Description of Unknown: Integrase B1978 sequence
  PTHR30461:SF3,SM00857,G3DSA:1.10.10.2600,IPR036162,PF13408, PS51737,G3DSA:3.40.50.1390,IPR025827,IPR006119,IPR038109, PF07508,SSF53041,IPR011109,PTHR30461,Coil, PS51736,cd00338,PF00239
MKKFPIDLSCLTEEEISQFQEDPYTLYNGDQNVAIYLRYSSTGQSDQSIEGQLRDCRAFCKANHYRIVAIYVDRATTARKDVEKRVHLMEMVADSAKQNWEYVIVWKLDRFARNRNDSAIMKMRLRKNGVKVLSATEHLTDSPESIILESVLEGMAEFFSAELSQKVTRGMRESALKCHSVGGHIPLGYKVENHKLVVDPDTAHIVQEAFSLYANGESVAAICRKFNSAGYKTAKNTEFNRSSFKAMFRNTRYIGTYTYKDIVIENGIPAIIDKELFETVQRRLSKTATAPARGKAKVDYLLSGKLFCGHCGASMNGESGAGRHGKVYHYYSCYTKKRKLGCDKRPLKKDYIEGIVARDTLNLLTDQLIDEIADMAIRQSEQDLINDTHIPQLTAQLSEVEKSIANITAAIEKGIASETLMNRLVQLEHEKKTLNKEIKAEEKFVYRIDRDQIVFWLSQFKYGNIEDENFRRRLIDLLVNSVTVWDEPDGYKITTAYNLTSCKTKTFRVEKNPAAEEATGFDFGESECTIERISEPYIVWGTVFVQTKRHSLP

SEQ ID NO: 1978 - protein, 553 aa, Unknown
  Description of Unknown: Integrase B1979 sequence
  PTHR30461:SF3,SM00857,G3DSA:1.10.10.2600,IPR036162,PF13408, IPR025827,G3DSA:3.40.50.1390,PS51737,IPR006119,IPR038109, PF07508,SSF53041,IPR011109,PTHR30461,PS51736, cd00338,PF00239
MARAAKQDNNSEIIDGVIYARYSEGPNQTEASIEGQVRECKEYAKRNGIRIINVYSDSKHTGTNDNRAEFQKMLRDSRRCGFSVVVVWKIDRFGRNRAEMAQNKALLKLQGVKVVSAKEYIPDSPEGIILESVLEGMAEYYSANLSQNIKRGMKENALHCKSNGSGKSLGYIVDKDGYFEIEPNEATIVKTIYQKYDEGMKIADIWREIVASGAKTKRGKDFTQYGISRVLSNRAYIGEYRYGDIVTPGGMPRIIDDDLFNRVQERRALSKKAPASRRSNSDVDFLLTGKVFCGHCKGTMRGMSGTSKTGRKFYYYACHDKIFKHNKCTKKNVKKEWLETEVTRITRDDILNKETIEFIADRVVEIQRQEQEDKSMLHYYEQQLRDTQSAINNIMKAIEAGIITSSTKSRLFELEEQKSIIEGEIEREKIITPVIEKEQVIFSLERFFGGDINNKEYQRNIIDMFVNKVILYDDKIIITYNISSQNEISVDVVEQAAFAALDECSSKLSLAPPAGACPCTRSALLYVRRFFYCRSWIIIYKPNFVISPWQTLI

SEQ ID NO: 1979 - protein, 553 aa, Unknown
  Description of Unknown: Integrase B1980 sequence
  PTHR30461:SF3,SM00857,G3DSA:1.10.10.2600,IPR036162,PF13408, IPR025827,G3DSA:3.40.50.1390,PS51737,IPR006119,IPR038109, PF07508,IPR011109,SSF53041,PF00239,PTHR30461, PS51736,Coil,cd00338
MKKFPIDLSCLTEEEISQFQEDPYTLYNGDQDVALYLRYSSTGQSDQSIEGQLRDCRAFCKANHYRIVAIYVDRATTARKDVEKRVHLMEMIADSAKQNWEYVIVWKLDRFARNRNDSAIMKMRLRKNGVKVLSATEHLTDSPESIILESVLEGMAEFFSAELSQKVTRGMRESALKCHSVGGHIPLGYKVENHKLVVDPDTAHIVQEAFSLYANGESVADICRKFNSAGYKTAKNTKFNRSSFKAMFRNTRYIGTYTYKDIVIENGIPAIIDKELFETVQRRLSKTATAPARGKAKVDYLLSGKLFCGHCGASMNGESGAGRHGKVYHYYSCYTKKRKLGCDKRPLKKDYIEGIVARDALNLLTNQLIDEIADMAIRQSEQDLINDTHIPQLTAQLSEVEKSITNITAAIEKGIASETLMNRLVQLEHEKKTLNKEIKAEEKFVYRIDRDQIVFWLSQFKYGNIEDEDFRRRLIDLLVNSVTVWDKPDGYKITTAYNLTSCKTKTFRVEKNPAAEEATGFDFGESECTIERISEPYIVWGTVFVQTKRHSLP

SEQ ID NO: 1980 - protein, 553 aa, Unknown
  Description of Unknown: Integrase B1981 sequence
  PTHR30461:SF3,SM00857,G3DSA:1.10.10.2600,IPR036162,PF13408, IPR025827,G3DSA:3.40.50.1390,PS51737,IPR006119,IPR038109, PF07508,SSF53041,IPR011109,PF00239,PTHR30461, PS51736,Coil,cd00338
MKKFPIDLSCLTEEEISQFQEDPYTLYNGDQEVALYLRYSSTGQSDQSIEGQLRDCRAFCKANHYRIVAIYVDRATTARKDVEKRVHLMEMVADSAKRNWEYVIVWKLDRFARNRNDSAIMKMRLRKNGVKVLSATEHLTDSPESIILESVLEGMAEFFSAELSQKVTRGMRESALKCHSVGGHIPLGYKVENHKLVVDPDTAHIVQEAFSLYANGESVADICRKFNSAGYKTAKNTEFNRSSFKAMFRNTRYIGTYTYKDIVIENGIPAIIDKELFETVQRRLSKTATAPARGKAKVDYLLSGKLFCGHCGASMNGESGAGRHGKVYHYYSCYTKKRKLGCDKRPLKKDYIEGIVARDALNLLTDQLIDEIADMAIRQSEQDLINDTHIPQLTAQLSEVEKSITNITAAIEKGIASETLMNRLVQLEHEKKTLNKEIKAEEKFVYRIDRDQIVFWLSQFKYGNIEDEDFRRRLIDLLVNSVTVWDEPDGYKITTAYNLTSCKAKTFRVEKNPAAEEATGFDFGESECTIERISEPYIVWGTVFVQTKRHSLP

SEQ ID NO: 1981 - protein, 553 aa, Unknown
  Description of Unknown: Integrase B1982 sequence
  PTHR30461:SF3,cd00338,SM00857,G3DSA:1.10.10.2600,IPR036162, PF13408,PS51737,G3DSA:3.40.50.1390,IPR025827,IPR006119, IPR038109,PF07508,IPR011109,SSF53041,PTHR30461, PS51736,Coil,PF00239
MKKFPIDLSCLTEEEISQFQEDPYTLYNGDQDVALYLRYSSTGQSDQSIEGQLRDCRAFCKANHYRIVAIYVDRATTARKDVEKRVHLMEMVADSAKQNWEYVIVWKLDRFARNRNDSAIMKMRLRKNGVKVLSATEYLTDSPESIILESVLEGMAEFFSAELSQKVTRGMRESALKCHSVGGHIPLGYKVENHKLVVNPDTAHIVQEAFSLYANGESVADICRKFNSAGYKTAKNTEFNRSSFKAMFRNTRYIGTYTYKDIVIENGIPAIIDKELFETVQRRLSKTATAPARGKAKVDYLLSGKLFCGHCGASMNGESGAGRHGKVYHYYSCYTKKRKLGCDKRPLKKDYIEGIVARDALNLLTDQLIDEIADMAIRQSEQDLINDTHIPQLTAQLSEVEKSIMNITAAIEKGIASETLMNRLVQLEHEKKTLNKEIKAEEKFVYRIDRDQIVFWLSQFKYGNIEDENFRRRLIDLLVNSVTVWDEPDGYKITTAYNLTSCKTKTFRVDKNPAAEEATGFDFGESECTIERISEPYIVWGTVFVQTKRHSLP

SEQ ID NO: 1982 - protein, 553 aa, Unknown
  Description of Unknown: Integrase B1983 sequence
  PTHR30461:SF3,cd00338,SM00857,G3DSA:1.10.10.2600,IPR036162, PF13408,IPR025827,G3DSA:3.40.50.1390,PS51737,IPR006119, IPR038109,PF07508,IPR011109,SSF53041,PTHR30461, PS51736,Coil,PF00239
MQTIPIDLSALTPEERQQFADNPSVLSSDCEAVCCLYMRYSSDRQTEQSIEGQLRELIAYCKHHSYRVAAIYVDRAISAHASMDKRPAFQQMLSDSARSSWKTVLVYKLDRFARNREDSAIARMRLRKNGCNVESAKEGISKNPEGVILEALLEGMAEYYSLELSQKITRGMRESAIKGNCLGGQIPLGYKIENKKYVIDPLTAPLVKEAFSRYGDGETAASICADFNARGYRTASGAEFNKSSFKNIFRNEKYIGVYKYKEMRREGIIPRIIADDAWIAVQSRLKDNEAAPARGKAKVAYLLAGKIFCGHCGAPMTGECGRGKSGKMYNYYSCATRKHHNSCEKKPVPKDWLEDVVAQDALDVLTDEIIEFVAEVAAQQSEEDIQKNTQIPVIRKKISEIENKIHNLTKALECASVAPDAIVERLAELEAQKKGLATQLSDEERGVVPLTKESVVVYLKAVRENAVPLETQKAMLIDMLVNSVTVYDDEPGFLKLIYAYRLTQIPARTYRVPISEKVPCSDFRTQPAPLDANPNTITVVGMVFIQTKRHALP

SEQ ID NO: 1983 - protein, 553 aa, Unknown
  Description of Unknown: Integrase B1984 sequence
  PTHR30461:SF3,SM00857,G3DSA:1.10.10.2600,IPR036162,PF13408, IPR025827,PS51737,G3DSA:3.40.50.1390,IPR006119,IPR038109, PF07508,IPR011109,SSF53041,PF00239,PTHR30461, PS51736,Coil,cd00338
MKKFPIDLSCLTEEEISQFQEDPYTLYNGDQDVALYLRYSSTGQSDQSIEGQLRDCRAFCKANHYRIVAIYVDRATTARKDVEKRVHLMEMVADSAKQNWEYVIVWKLDRFARNRNDSAIMKMRLRKNGVKVLSATEHLTDSPESIILESVLEGMAEFFSAELSQKVTRGMRESALKCHSVGGHIPLGYKVENHKLVVDPDTAHIVQEAFSLYANGESVADICRKFNSAGYKTAKNTEFNRSSFKAMFRNTRYIGTYTYKDIVIENGIPAIIDKELFETVQRRLSKTATAPARGKAKVDYLLSGKLFCGHCGASMNGESGAGRHGKVYHYYSCYTKKRKLGCDKRPLKKDYIEGIVARDALNLLTDQLIDEIADMAIRQSEQDLINDTHIPQLTAQLSEVEKSITNITAAIEKGIASETLMNRLVQLEHEKKTLNKEIKAEEKFVYRIDRDQIVFWLSQFKYGNIEDEDFRRRLIDLLVNSVTVWDEPDGYKITTAYNLTSCKAKTFRVEKNPAAEEATGFDFGESECTIERISEPYIVWGTVFVQTKRHSLP

SEQ ID NO: 1984 - protein, 553 aa, Unknown
  Description of Unknown: Integrase B1985 sequence
  PTHR30461:SF3,SM00857,G3DSA:1.10.10.2600,IPR036162,PF13408, PS51737,IPR025827,G3DSA:3.40.50.1390,IPR006119,IPR038109, PF07508,IPR011109,SSF53041,PF00239,PTHR30461, PS51736,Coil,cd00338
MKKFPIDLSCLTEEEISQFQEDPYTLYNGDQDVALYLRYSSTGQSDQSIEGQLRDCRTFCKANHYRIVAIYVDRATTARKDVEKRVHLMEMVADSAKQNWEYVIVWKLDRFARNRNDSAIMKMRLRKNGVKVLSATEHLTDSPESIILESVLEGMAEFFSAELSQKVTRGMRESALKCHSVGGHIPLGYKVENHKLVVDPDTAHIVQEAFSLYANGESVADICRKFNSAGYKTAKNTEFNRSSFKAMFRNTRYIGTYTYKDIVIENGIPAIIDKELFETVQRRLSKTATAPARGKAKVDYLLSGKLFCGHCGASMNGESGAGRHGKVYHYYSCYTKKRKLGCDKRPLKKDYIEGIVARDALNLLTDQLIDEIADMAIRQSEQDLINDTHIPQLTAQLSEVEKSITNITAAIEKGIASETLMNRLVQLEHEKKTLNKEIKAEEKFVYRIDRDQIIFWLSQFKYGNIEDEDFRRRLIDLLVNSVTVWDEPDGYKITAAYNLTSCKTKTFRVEKNPAAEEATGFDFGESECTIERISEPYIVWGTVFVQTKRHSLP

SEQ ID NO: 1985 - protein, 553 aa, Unknown
  Description of Unknown: Integrase B1986 sequence
  PTHR30461:SF3,SM00857,G3DSA:1.10.10.2600,IPR036162,PF13408, PS51737,IPR025827,G3DSA:3.40.50.1390,IPR006119,IPR038109, PF07508,SSF53041,IPR011109,PTHR30461,Coil, PS51736,cd00338,PF00239
MQTIPIDLSALTPEERQQFADNPSVLSSDCEAVCCLYMRYSSDRQTEQSIEGQLRELIAYCKHHSYRVAAIYVDRAISAHASMDKRPSFQQMLSDSARSSWKTVLVYKLDRFARNREDSAIARMRLRKNGCNVESAKEGISKNPEGVILEALLEGMAEYYSLELSQKITRGMRESAIKGNCLGGQIPLGYKIENKKYVIDPLTAPLVKEAFSRYGDGETAASICADFNARGYRTASGAEFNKSSFKNIFRNEKYIGVYKYKEMRREGIIPRIIADDVWIAVQSRLKVNEAAPARGKAKVPYLLAGKLFCGHCGAPMTGECGRGKSGKMYNYYSCATRKHHNSCNKKPVPKDWLEDVVAQDALDVLTDEIIEFVAEVAAQQSEEDIQKNTQIPVIRKKISEIENKIRNLTKALECASVAPDAIVERLSELEAQKKGLSTQLSDEERGVIPLTKESVVVYLKAVREKAVPLETQKAMLIEMLVNSVTVYDDEPGFLKFVTAYRLTQIPTRTYRVQISAKEPCSDFRTQPAPLDANPNTITVVGMVFIQTKRHALP

SEQ ID NO: 1986 - protein, 553 aa, Unknown
  Description of Unknown: Integrase B1987 sequence
  PTHR30461:SF3,SM00857,G3DSA:1.10.10.2600,IPR036162,PF13408, PS51737,G3DSA:3.40.50.1390,IPR025827,IPR006119,IPR038109, PF07508,IPR011109,SSF53041,PTHR30461,PS51736, cd00338,PF00239
MAKKRYDLRPVRTVCIYARYSPGSRQTDQSIEGQLRVCQEYAEQHDYRIIQTYADKHKTGTNDDREAFRQMIKDSEKGLFDAVLVWKSDRFGRNMEDMVLNEMRIKRNGVSLISCTEPVADGPLGGMQKAMLMGMAEFYSATNAENVRRGLLESARKCQITSGAIPFGYKAGEDKRFYTDPINAAAVLEIFQRYDGGELLTHIMDDLNKKGIRSHKGKPLTRSSMYSILRNERYTGVYIYADIRVEGGMPQIVPKDLYERVQIKLGKNKHAPARAKAAEPFILTTKCFCGQCGGPMAGESGTSKTGAKHYYYGCVHHKNSRDKSKACQKKPVRKDFLERLVIDTTLDVALHKENIQSIAADLCAWQQRQKDTAILDGLKSRRRECEKAIGNLVAALEAGAASPTIAARVRDREEELENIKFAIAEQELVQEKFDEKKIMYFLSKVPEGDRTDINYMQRIVDTFINSVFVYDDRVVICYNFDGDGSKITVNDVDKAMQEAEDRENRQITQEAPGQGAPVLNLTIPSVRLMAVWCGVMNQKRTPYFFSSALLESL

SEQ ID NO: 1987 - protein, 553 aa, Unknown
  Description of Unknown: Integrase B1988 sequence
  PTHR30461:SF3,cd00338,SM00857,G3DSA:1.10.10.2600,IPR036162, PF13408,PS51737,IPR025827,G3DSA:3.40.50.1390,IPR006119, IPR038109,PF07508,SSF53041,IPR011109,PTHR30461, PS51736,Coil,PF00239
MKKFPIDLSCLTEEEISQFQEDPYTLYNGDQDVALYLRYSSTGQSDQSIEGQLRDCRAFCKANHYRIVAIYVDRATTAHKDVEKRVHLMEMVADSAKQNWEYVIVWKLDRFARNRNDSAIMKMRLRKNGVKVLSATEHLTDSPESIILESVLEGMAEFFSAELSQKVTRGMRESALKCHSVGGHIPLGYKVENHKLVVDPDTAHIVQEAFSLYANGESVADICRKFNSAGYKTAKNTEFNRSSFKAMFRNTRYIGTYTYKDIVIENGIPAIIDKELFETVQRRLSKTATAPARGKAKVDYLLSGKLFCGHCGASMNGESGAGRHGKVYHYYSCYTKKRKLGCDKRPLKKDYIEGIVARDALNLLTDQLIDEIADMAIRQSEQDLINDTHIPQLTAQLSEVEKSIVNITAAIEKGIASETLMNRLVQLEHEKKTLNKEIKAEEKFVYRIDRDQIVFWLSQFKYGNIEDENFRRRLIDLLVNSVTVWDEPDGYKITTAYNLTSCKTKTFRVDKNPAAEEATGFDFGESECTIERISEPYIVWGTVFVQTKRHSLP

SEQ ID NO: 1988 - protein, 553 aa, Unknown
  Description of Unknown: Integrase B1989 sequence
  PTHR30461:SF3,SM00857,G3DSA:1.10.10.2600,IPR036162,PF13408, IPR025827,G3DSA:3.40.50.1390,PS51737,IPR006119,IPR038109, PF07508,SSF53041,IPR011109,PF00239,PTHR30461, PS51736,Coil,cd00338
MKKFPIDLSCLTEEEISQFQEDPYTLYNGDQEVALYLRYSSTGQSDQSIEGQLRDCCAFCKANHYRIVAIYVDRATTARKDVEKRVHLMEMVADSAKQNWEYVIVWKLDRFARNRNDSAIMKMRLRKNGVKVLSATEHLTDSPESIILESVLEGMAEFFSAELSQKVTRGMRESALKCHSVGGHIPLGYKVENHKLVVDPDTAHIVQEAFSLYANGESVADICRKFNSAGYKTAKNTEFNRSSFKAMFRNTRYIGTYTYKDIVIENGIPAIIDKELFETVQRRLSKTATAPARGKAKVDYLLSGKLFCGHCGASMNGESGAGRHGKVYHYYSCYTKKRKLGCDKRPLKKDYIEGIVARDALNLLTDQLIDEIADMAIRQSEQDLINDTHIPQLTAQLSEVEKSITNITAAIEKGIASETLMNRLVQLEHEKKTLNKEIKAEEKFVYRIDRDQIVFWLSQFKYGNIEDEDFRRRLIDLLVNSVTVWDEPDGYKITTAYNLTSCKTKTFRVEKNPAAEEATGFDFGESECTIERISEPYIVWGTVFVQTKRHSLP

SEQ ID NO: 1989 - protein, 553 aa, Unknown
  Description of Unknown: Integrase B1990 sequence
  PTHR30461:SF3,SM00857,G3DSA:1.10.10.2600,IPR036162,PF13408, IPR025827,G3DSA:3.40.50.1390,PS51737,IPR006119,IPR038109, PF07508,SSF53041,IPR011109,PF00239,PTHR30461, PS51736,Coil,cd00338
MQTIPIDLSALTPEERQQFADNPSVLSSDCEAVCCLYMRYSSDRQTEQSIEGQLRELIAYCKHHSYRVAAIYVDRAISAHASMDKRPAFQQMLADSARSSWKTVLVYKLDRFARNREDSAIARMRLRKNGCNVESAKEGISKNPEGVILEALLEGMAEYYSLELSQKITRGMRESAIKGNCLGGQIPLGYKIENKKYVIDPLTAPLVKEAFSRYGDGETAASICADFNARGYRTASGAEFNKSSFKNIFRNEKYIGVYKYKEMRREGIIPRIIADDAWIAVQSRLKVNEAAPARGKAKVAYLLAGKIFCGHCGAPMTGECGRGKSGKMYNYYSCATRKHHNSCEKKPVPKDWLEDVVAQDALDVLTDEIIEFVAEVAAQQSEEDIQKNTQIPVIRKKISEIENKIRNLTKALECASVAPDAIVERLAELEAQKKGLSTQLSDEERGVIPLTKESVVVYLKAVREKAVPLETQKAMLIEMLVNSVTVYDDEPGFLKLVYAYRLTQIPTRTYRVPIPAKVPCSDFRTQPAPLDANPNTITVVGMVFIQTRRHALP

SEQ ID NO: 1990 - protein, 553 aa, Unknown
  Description of Unknown: Integrase B1991 sequence
  PTHR30461:SF3,SM00857,G3DSA:1.10.10.2600,IPR036162,PF13408, IPR025827,G3DSA:3.40.50.1390,PS51737,IPR006119,IPR038109, PF07508,SSF53041,IPR011109,PF00239,PTHR30461, PS51736,Coil,cd00338
MKEFPIDLSCLTEEEISQFQEDPYTLYNGDQNVAIYLRYSSTGQSDQSIEGQLRDCRTFCKANHYRIVAIYVDRATTARKDVEKRVHLMEMISDSAKQNWEYVIVWKLDRFARNRNDSAIMKMRLRKNGVKVLSATEHLTDSPESIILESVLEGMAEFFSAELSQKVTRGMRESALKCHSVGGHIPLGYKVENHKLVVDPDTAHIVQEAFSLYANGESVAAICRKFNSAGYKTAKNTEFNRSSFKAMFRNTRYIGTYTYKDIVIENGIPAIIDKELFETVQRRLSKTATAPARGKAKVDYLLSGKLFCGHCGASMNGESGAGRHGKVYHYYSCYTKKRKLGCDKRPLKKDYIEGIVARDALNLLTDQLIDEIADMAIRQSEQDLINDTHIPQLTAQLSEVEKSITNITAAIEKGIASETLMNRLVQLEHEKKTLNKEIKAEEKFVYRIDRDQIVFWLSQFKYGNIEDEDFRRRLIDLLVNSVTVWDEPDGYKITTAYNLTSCKTKTFRVEKNPAAEEATGFDFGESECTIERISEPYIVWGTVFVQTKRHSLP

SEQ ID NO: 1991 - protein, 553 aa, Unknown
  Description of Unknown: Integrase B1992 sequence
  PTHR30461:SF3,SM00857,G3DSA:1.10.10.2600,IPR036162,PF13408, PS51737,G3DSA:3.40.50.1390,IPR025827,IPR006119,IPR038109, PF07508,SSF53041,IPR011109,PF00239,PTHR30461, PS51736,Coil,cd00338
MKKFPIDLSCLTEEEISQFQEDPYTLYNGDQEVALYLRYSSTGQSDQSIEGQLRDCRAFCKANHYRIVAIYVDRATTARKDVEKRVHLMEMVADSAKQNWEYVIVWKLDRFARNRNDSAIMKMRLRKNGVKVLSATEHLTDSPESIILESVLEGMAEFFSAELSQKVTRGMRESALKCHSVGGHIPLGYKVENHKLVVDPDTAHIVQEAFSLYANGESVADICRKFNSAGYKTAKNTEFNRSSFKAMFRNTRYIGTYTYKDIVIENGIPAIIDKELFETVQRRLSKTATAPARGKAKVDYLLSGKLFCGHCGASMNGESGAGRHGKVYHYYSCYTKKRKLGCDKRPLKKDYIEGIVARDALNLLTDQLIDEIADMAIRQSEQDLINDTHIPQLTAQLSEVEKSIINITAAIEKGIASETLMNRLVQLEHEKKTLNKEIKAEEKFVYRIDRDQIVFWLSQFKYGNIEDEDFRRRLIDLLVNSVTVWDEPDGYKITTAYNLTSCKTKTFRVEKNPAAEEATGFDFGESECTIERISEPYIVWGTVFVQTKRHSLP

SEQ ID NO: 1992 - protein, 553 aa, Unknown
  Description of Unknown: Integrase B1993 sequence
  PTHR30461:SF3,SM00857,G3DSA:1.10.10.2600,IPR036162,PF13408, IPR025827,G3DSA:3.40.50.1390,PS51737,IPR006119,IPR038109, PF07508,SSF53041,IPR011109,PTHR30461,Coil, PS51736,cd00338,PF00239
MKKFPIDLSCLTEEEISQFQEDPYTLYNGDQNVAIYLRYSSTGQSDQSIEGQLRDCRTFCKANHYRIVAIYVDRATTARKDVEKRVHLMEMISDSAKQNWEYVIVWKLDRFARNRNDSAIMKMRLRKNGVKVLSATEHLTDSPESIILESVLEGMAEFFSAELSQKVTRGMRESALKCHSVGGHIPLGYKVENHKLVVDPDTAHIVQEAFSLYANGESVAAICRKFNSAGYKTAKNTEFNRSSFKAMFRNTRYIGTYTYKDIVIENGIPAIIDKELFETVQRRLSKTATAPARGKAKVDYLLSGKLFCGHCGASMNGESGAGRHGKVYHYYSCYTKKRKLGCDKRPLKKDYIEGIVARDALNLLTDQLIDEIADMAIRQSEQDLINDTHIPQLTAQLSEVEKSITNITAAIEKGIASETLMNRLVQLEHEKKTISKEIKAEEKFVYRIDRDQIVFWLSQFKYGNIEDENFRRRLIDLLVNSVTVWDEPDGYKITTAYNLTSCKTKTFRVEKNPAAEEATGFDFGESECTIERISEPYIVWGTVFVQTKRHSLP

SEQ ID NO: 1993 - protein, 553 aa, Unknown
  Description of Unknown: Integrase B1994 sequence
  PTHR30461:SF3,SM00857,G3DSA:1.10.10.2600,IPR036162,PF13408, PS51737,G3DSA:3.40.50.1390,IPR025827,IPR006119,IPR038109, PF07508,SSF53041,IPR011109,PF00239,PTHR30461, PS51736,Coil,cd00338
MKKFPIDLSCLTEEEISQFQEDPYTLYNGDQNVAIYLRYSSTGQSDQSIEGQLRDCRTFCKANHYRIVAIYVDRATTARKDVEKRVHLMEMISDSAKQNWEYVIVWKLDRFARNRNDSAIMKMRLRKNGVKVLSATEHLTDSPESIILESVLEGMAEFFSAELSQKVTRGMRESALKCHSVGGHIPLGYKVENHKLVVDPDTAHIVQEAFSLYANGESVADICRKFNSAGYKTAKNTEFNRSSFKAMFRNTRYIGTYTYKDIVIENGIPAIIDKELFETVQRRLSKTATAPARGKAKVDYLLSGKLFCGHCGASMNGESGAGRHGKVYHYYSCYTKKRKLGCDKRPLKKDYIEGIVARDALNLLTDQLIDEIADMAIRQSEQDLINDTHIPQLTAQLSEVEKSITNITAAIEMGIASETLMNRLVQLEHEKKTLNKEIKAEEKFVYRIDRDQIVFWLSQFKYGNIEDEDFRRRLIDLLVNSVTVWDEPDGYKITTAYNLTSCKTKTFRVEKNPAAEEATGFDFGESECTIERISEPYIVWGTVFVQTKRHSLP

SEQ ID NO: 1994 - protein, 553 aa, Unknown
  Description of Unknown: Integrase B1995 sequence
  PTHR30461:SF3,cd00338,SM00857,G3DSA:1.10.10.2600,IPR036162, PF13408,IPR025827,G3DSA:3.40.50.1390,PS51737,IPR006119, IPR038109,PF07508,SSF53041,IPR011109,PTHR30461, PS51736,Coil,PF00239
MKKFPIDLSCLTEEEISQFQEDPYTLYNGDQDVALYLRYSSTGQSDQSIEGQLRDCRTFCKANHYRIVAIYVDRATTARKDVEKRVHLMEMVADSVKRNWEYVIVWKLDRFARNRNDSAIMKMRLRKNGVKVLSATEHLTDSPESIILESVLEGMAEFFSAELSQKVTRGMRESALKCHSVGGHIPLGYKVENHKLVVDPDTAHIVQEAFSLYANGESVADICRKFNSAGYKTAKNTEFNRSSFKAMFRNTRYIGTYTYKDIVIENGIPAIIDKELFETVQRRLSKTATAPARGKAKVDYLLSGKLFCGHCGASMNGESGAGRHGKVYHYYSCYTKKRKLGCDKRPLKKDYIEGIVARDALNLLTDQLIDEIADMAIRQSEQDLINDTHIPQLTAQLTEVEKSITNITAAIEKGIASETLMNRLVQLEHEKKTLNKEIKAEEKFVYRIDRDQIVFWLSQFKYGNIEDEDFRRRLIDLLVNSVTVWDEPDGYKITTAYNLTSCKTKTFRVKKNPAAEEATGFDFGESECTIERISEPYIVWGTVFVQTKRHSLP

SEQ ID NO: 1995 - protein, 553 aa, Unknown
  Description of Unknown: Integrase B1996 sequence
  PTHR30461:SF3,SM00857,G3DSA:1.10.10.2600,IPR036162,PF13408, IPR025827,G3DSA:3.40.50.1390,PS51737,IPR006119,IPR038109, PF07508,SSF53041,IPR011109,PTHR30461,Coil, PS51736,cd00338,PF00239
MRKKFNIDLSMLTPEEQQQFRDDPTTLTKGEVNVALYLRFSSERQKEQSIEGQLRDCIAYCKRKSFRIVAIYVDRATTARKDVEKRIHFQEMISDSAHHLWNFVVVWKLDRFARNREDSAVFKMRLRKNGVRVKSATETISDNPEGIILESVLEGIAEYYSADLSQKITRGLRESAMKGHSVGGHVPLGYKIEDHRLVINPETAHIVQEAFQLYANGESVAEICRIFNGKGYRTAKNSEFNRSSFKSIFKNVRYIGTYIYKDIEKENAIPAIIDKDLFETVQRRLSLAADAPARGKAKVDYLLSGKLFCGHCGATMNGESGTSKTGAIHNYYTCYSRKRRKGCNKKPLKKDFIERVVAQDAMALLTDDVIEELADMAMSQADKDLKENTRIPELSARLTEVEQGINNITKVVEKGIASDALLNRLTELEKEKKDLTSQLREEEKYICRIDRDQIIFWLTKFQGGDIEDEDCRRRIIDLLVNSVTVWDEPDGYKITTAYNLTSCKTKTFRVSNNADSPSGEGFGFGELSSTRRGSVELFFYKNEFALVYRLGDA

SEQ ID NO: 1996 - protein, 553 aa, Unknown
  Description of Unknown: Integrase B1997 sequence
  PTHR30461:SF3,SM00857,G3DSA:1.10.10.2600,IPR036162,PF13408, IPR025827,PS51737,G3DSA:3.40.50.1390,IPR006119,IPR038109, PF07508,IPR011109,SSF53041,PF00239,PTHR30461, PS51736,Coil,cd00338
MKKFPIDLSCLTEEEISQFQEDPYTLYNGDQDVALYLRYSSTGQSDQSIEGQLRDCRAFCKANHYRIVAIYVDRATTARKDVEKRVHLMEMVADSAKQNWEYVIVWKLDRFARNRNDSAIMKMRLRKNGVKVLSATEHLTDSPESIILESVLEGMAEFFSAELSQKVTRGMRESALKCHSVGGHIPLGYKVENHKLVVDPDTAHIVQEAFSLYANGESVADICRKFNSAGYKTAKNTEFNRSSFKAMFRNTRYIGTYTYKDIVIENGIPAIIDKELFETVQRRLSKTATAPARGKAKVDYLLSGKLFCGHCGASMNGESGAGRHGKVYHYYSCYTKKRKLGCDKRPLKKDYIEGIVARDALNLLTDQLIDEIADMAIRQSEQDLINDTHIPQLTAQLSEVEKSITNITAAIEKGIASETLMNRLVQLEHEKKTLNKEIKAEEKFVYRIDRDQIVFWLSQFKYGNIEDEDFRRRLIDLLVNSVTVWDEPDGYKITTAYNLTSCKTKTFRVEKNPAAEEATGFDFGEYECTIERISEPYIVWGTVFVQTKRHSLP

SEQ ID NO: 1997 - protein, 553 aa, Unknown
  Description of Unknown: Integrase B1998 sequence
  PTHR30461:SF3,SM00857,G3DSA:1.10.10.2600,IPR036162,PF13408, PS51737,IPR025827,G3DSA:3.40.50.1390,IPR006119,IPR038109, PF07508,SSF53041,IPR011109,PTHR30461,Coil, PS51736,cd00338,PF00239
MQTIPIDLSALTPEERQQFADNPSVLSSDCEAVCCLYMRYSSDRQTEQSIEGQLRELIAYCKHHSYRVAAIYVDRAISAHASMDKRPAFQQMLSDSARSSWKTVLVYKLDRFARNREDSAIARMRLRKNGCSVESAKEGISKNPEGVILEALLEGMAEYYSLELSQKITRGMRESAIKGNCLGGQIPLGYKIENKKYAIDPLTAPLVKEAFSRYGDGETAASICADFNARGYRTASGAEFNKSSFKNIFRNEKYIGVYKYKEMRREGIIPRIVTDDVWIAVQSRLKDNEAAPARGKAKVAYLLAGKLFCGHCGAPMTGECGRGKSGKMYNYYSCATRKHHNSCEKKPVPKDWLEDVVAQDALDVLTDEIIEFVAEVAAQQSEEDIQKNTQIPVIRKKISEIENKIRNLTKALECASVAPDAIVERLAELEAQKKGLATQLSDEERGVVPLTKESVVVYLKAVREKAVPLETQKAMLIDMLVNSVTVYDDEPGFLKLVYAYRLTQIPTRTYRVPISEKVPCSDFRTQPAPLDANPNTITVVGMVFIQAKRHALP

SEQ ID NO: 1998 - protein, 553 aa, Unknown
  Description of Unknown: Integrase B1999 sequence
  PTHR30461:SF3,SM00857,G3DSA:1.10.10.2600,IPR036162,PF13408, IPR025827,G3DSA:3.40.50.1390,PS51737,IPR006119,IPR038109, PF07508,IPR011109,SSF53041,PF00239,PTHR30461, PS51736,Coil,cd00338
MKKFPIDLSCLTEEEISQFQEDPYTLYNGDQDVALYLRYSSTGQSDQSIEGQLRDCRAFCKANHYRIVAIYVDRATTARKDVEKRVHLMEMVADSAKQNWEYVIVWKLDRFARNRNDSAIMKMRLRKNGVKVLSATEHLTDSPESIILESVLEGMAEFFSAELSQKVTRGMRESALKCHSVGGHIPLGYKVENHKLVVDPDTAHIVQEAFSLYANGESVADICRKFNSAGYKTAKNTEFNRSSFKAMFRNTRYIGTYTYKDIVIENGIPAIIDKELFETVQRRLSKTATAPARGKAKVDYLLSGKLFCGHCGASMNGESGAGRHGKVYHYYSCYTKKRKLGCDKRPLKKDYIEGIVARDALNLLTDQLIDEIADMAIRQSEQDLINDTHIPQLTAQLSEVEKSITNITAAIEKGIASETLINRLVQLEHEKKTLNKEIKAEEKFVYRIDRDQIVFWLSQFKYGNIEDEDFRRRLIDLLVNSVTVWDEPDGYKITTAYNLTSCKAKTFRVEKNPAAEEATGFDFGESECTIERISEPYIVWGTVFVQTKRHSLP

SEQ ID NO: 1999 - protein, 553 aa, Unknown
  Description of Unknown: Integrase B2000 sequence
  PTHR30461:SF3,SM00857,G3DSA:1.10.10.2600,IPR036162,PF13408, PS51737,G3DSA:3.40.50.1390,IPR025827,IPR006119,IPR038109, PF07508,SSF53041,IPR011109,PF00239,PTHR30461, PS51736,Coil,cd00338
MKKFPIDLSCLTEEEISQFQEDPYTLYNGDQNVALYLRYSSTGQSDQSIEGQLRDCRTFCKSNHYRIVAIYVDRATTARKDVEKRVHLMEMVADSAKQNWEYVIVWKLDRFARNRNDSAIMKMRLRKNGVKVLSATEHLTDSPESIILESVLEGMAEFFSAELSQKVTRGMRESALKCHSVGGHIPLGYKVENHKLVVDPDTAHIVQEAFSLYANGESVADICRKFNSAGYKTAKNTEFNRSSFKAMFRNTRYIGTYTYKDIVIENGIPAIIDKELFETVQRRLSKTATAPARGKAKVDYLLSGKLFCGHCGASMNGESGAGRHGKVYHYYSCYTKKRKLGCDKRPLKKDYIEGIVARDALNLLTDQLIDEIADMAIRQSEQDLINDTHIPQLTAQLSEVEKSITNITAAIEKGIASETLMNRLVQLEHEKKTLNKEIKAEEKFVYRIDRDQIVFWLSQFKYGNIEDEDFRRRLIDLLVNSVTVWDEPDGYKITTAYNLTSCKAKTFRVEKNPAAEEATGFDFGESECTIERISEPYIVWGTVFVQTKRHSLP

SEQ ID NO: 2000 - protein, 553 aa, Unknown
  Description of Unknown: Integrase B2001 sequence
  PTHR30461:SF3,IPR036162,PS51737,IPR011109,PTHR30461, PF00239,G3DSA:1.10.10.2600,IPR006119,SSF53041,cd00338, SM00857,IPR025827,IPR038109,PS51736,cd18688, PF13408,G3DSA:3.40.50.1390,PF07508,Coil
MQTIPIDLSALTPEERQQFADNPSVLSSDCEAVCCLYMRYSSDRQTEQSIEGQLRELIAYCKHHSYRVAAIYVDRAISAHASMDKRPAFQQMLADSARSSWKTVLVYKLDRFARNREDSAIARMRLRKNGCNVESAKEGISKNPEGVILEALLEGMAEYYSLELSQKVRRGMSETARKGNSTGGTTPLGYTVVDKRLQIDPMTAHLVEEAFRRYADGDTVAAICDDFNARGYRTTRGTKFNKSSFKNVFRNEKYIGVYKFDDVRTDNAVPRIISDELWRAVQSRLKASEQAPARGKAKVPYLLSGKIFCGHCGAPMVGECGRGKGGKTYNYYSCANRKKARLCDKKPVPKDWLEDVVAQDALDVLTDEIIEFVAEVAAQQSEEDIQKNTQIPVIRKKISEIENKIRNLTKALECASVAPDAIVERLAELEAQKRGLSTQLSDEERGVIPLTKESVVVYLKAVREKAVPLETQKAMLIEMLVNSVTVYDDEPGFLKFVTAYRLTQIPSKTYRVPTPAVSPCSDIGRVGSPLDANPNTITVVGMVFIQTRRHALP

SEQ ID NO: 2001 - protein, 553 aa, Unknown
  Description of Unknown: Integrase B2002 sequence
  PTHR30461:SF3,SM00857,G3DSA:1.10.10.2600,IPR036162,PF13408, IPR025827,G3DSA:3.40.50.1390,PS51737,IPR006119,IPR038109, PF07508,IPR011109,SSF53041,PTHR30461,Coil, PS51736,cd00338,PF00239
MARKKAEKAEGNICVVYARYSSAVQNDASIEQQVGECREYAAAHDLKISEIYADRAISGRSDRRPEFQKMIRHAEAGRFQIVLTYKSNRIARNMLDALRYEERLEKAGVKVVYCKENFGDNAAGRMALRMMMSLNEFYSENMAEDITRGMKDRAKQCKVMGTIPFGYKRGEDGCYAIDESKAEIVREIFRRYAENETQASIAEDLNNRRIFTQQNRPWGKNSFHTVLTNERYIGVYKFADIRIENGMPAIIDRSLFEIVQEKVGRRREVAGRRRESTEYLLTGKAFCAKCGAPMVGVSGTGKGGSLYYYYVCKNRQEHHNCKKENVRKAAAERQIAFRLKTIVLKPEVMEWMIQNVLRFQEEAKKQSDLASYQNRLVEVRRSLDNLIKAIEAGVFSQSTKARLDELEAEQRELQGIISVERSKLNTVTREQIEYYLESFRDGDVNDPAYQKRLFKAFLVKVFLDDDKCRIVYNYADGLDTLEFPLTLDDIESADVSAECSYNACSGVPHTESQSRFGIFVSGKRHARQIFFPKGAENPCRTGRKYGIIHWLCL

SEQ ID NO: 2002 - protein, 553 aa, Unknown
  Description of Unknown: Integrase B2003 sequence
  cd00338,SM00857,G3DSA:1.10.10.2600,IPR036162,PS51737, G3DSA:3.40.50.1390,IPR006119,IPR038109,PF07508,SSF53041, IPR011109,PTHR30461,PS51736,Coil,PF00239
MQYDKADQQNCPRRVVFYGRVSTELEAQISALKNQMNWYLELAEHHPNWTVVGQYADEGISGTGMKTRPSFMKMLRDARKKKFDLIVTREVSRFARNTVDTLVTTRELKQYGVEVYFVNDDIWTMRGDGEVRLTIMASLAQDESRKMSERTKAGIQTSQKKGTYVAGPTPFGYKRDKKAHTLVVQESQAETVRKIFAWYADGINGTEIAQTLTQEGAPNKSGMPQWSARQVLSITKNTIYKGYLTYNKSHIDDFLSHKSIKNSEQDYILVKGSFEPIISEELWDKCQRRRHAWQSYIDGNITQAYLYGKSEHADKWACRLFCGCGARMRAFRAEKGIVRYICYQRSLRNVAPKCSAPNVQAWKLELMAREIYKNVWQDHRQDILEEYQQEQENGAADSEKVEEALSWQESFPNDEISRKFLDRFVPRIFSIDGQKFIWELNLFQESCTVQCNVRGTYNYHSISAEKIMPGKTKAKKGDGAVNRILEVANSTRFWVHTYDDDPISRLLSSRLAADLPASITIKLNYEQARAYRNSRGYVLWPGNWKDLTVKVLL

SEQ ID NO: 2003 - protein, 553 aa, Unknown
  Description of Unknown: Integrase B2004 sequence
  PTHR30461:SF3,SM00857,G3DSA:1.10.10.2600,IPR036162,PF13408, PS51737,G3DSA:3.40.50.1390,IPR025827,IPR006119,IPR038109, PF07508,IPR011109,SSF53041,PF00239, PTHR30461,PS51736,Coil,cd00338
MQTIPIDLSALTAQERQQFAENPSVLSSDCDAVCCLYLRYSSERQTEQSIEGQLRELIAHCKQHRYRIAAIYVDRAISAHASMEKRPSFQQMLSDAVRAPWKTVLVYKLDRFARNREDAAIARMRLRKAGCNVESAKEGISKNPEGVILEALLEGMAEYYSLELSQKITRGMRESAIKGNSLGGQIPLGYKIENKKFVIDPLTAPLVVEAFSRYGDGETAASICADFNARGYRTASGAKFNRSSFKNIFRNEKYIGVYKYKEMRQEGIIPRLVSDDAWISVQSRLKANEAAPARGKAKAAYLLAGKIFCGHCGAPMVGECGRGKGGKIYNYYSCATRKKSRSCEKKPVPKDWIEDIVAQDALDVLTDDVIEFVASVAAQQSEEEIKKNTQIPVIRQKLSEIDSGIRNLTKAIETAAVAPDAIIMRIAELEAQKKALSEQLVNEERGVIPLEKETVVTYLRAVREKAIPLETQKPMLIDMLVNSVTVYDNDPGFLTFVTAYRLSQIPAKTFRIPVSPAHGCSDMGLNALPLGVNPNTIVVVGMVFVQTKKHALP

SEQ ID NO: 2004 - protein, 553 aa, Unknown
  Description of Unknown: Integrase B2005 sequence
  PTHR30461:SF3,SM00857,G3DSA:1.10.10.2600,IPR036162,PF13408, PS51737,IPR025827,G3DSA:3.40.50.1390,IPR006119,IPR038109, PF07508,IPR011109,SSF53041,PF00239,PTHR30461, PS51736,Coil,cd00338
MKKFPIDLSCLTEEEISQFQEDPYTLYNGDQDVALYLRYSSTGQSDQSIEGQLRDCRTFCKANHYRIVAIYVDRATTARKDVEKRVHLMEMVADSAKQNWEYVIVWKLDRFARNRNDSAIMKMRLRKNGVKVLSATEHLTDSPESIILESVLEGMAEFFSAELSQKVTRGMRESALKCHSVGGHIPLGYKVENHKLVVDPDTAHIVQEAFSLYANGESVADICRKFNSAGYKTAKNTEFNRSSFKAMFRNTRYIGTYTYKDIVIENGIPAIIDKELFETVQRRLSKTATAPARGKAKVDYLLSGKLFCGHCGASMNGESGAGRHGKVYHYYSCYTKKRKLGCDKRPLKKDYIEGIVARDALNLLTDQLIDEIADMAIRQSEQDLINDTHIPQLTAQLSEVEKSITNITAAIEKGIASETLMNRLVQLEHEKKTLNKEIKAEEKFVYRIDRDQIVFWLSQFKYGNIEDEDFRRRLIDLLVNSVTVWDEPDGYKITTAYNLTSCKTKTFRVEKNPAAEEATGFDFGESECTIERISEPYIVWGKVFVQTKRHSLP

SEQ ID NO: 2005 - protein, 553 aa, Unknown
  Description of Unknown: Integrase B2006 sequence
  PTHR30461:SF3,cd00338,SM00857,G3DSA:1.10.10.2600,IPR036162, PF13408,PS51737,G3DSA:3.40.50.1390,IPR025827,IPR006119, IPR038109,PF07508,SSF53041,IPR011109,PTHR30461, PS51736,Coil,PF00239
MKKFPIDLSCLTEEEISQFQEDPYMLYNGDQDVALYLRYSSTGQSDQSIEGQLRDCRAFCKANHYRIVAIYVDRATTAHKDVEKRVHLMEMVADSAKQNWEYVIVWKLDRFARNRNDSAIMKMRLRKNGVKVLSATEHLTDSPESIILESVLEGMAEFFSAELSQKVTRGMRESALKCHSVGGHIPLGYKVENHKLVVDPDTAHIVQEAFSLYANGESVADICRKFNSAGYKTAKNTEFNRSSFKAMFRNTRYIGTYTYKDIVIENGIPAIIDKELFETVQRRLSKTATAPARGKAKVDYLLSGKLFCGHCGASMNGESGAGRHGKVYHYYSCYTKKRKLGCDKRPLKKDYIEGIVARDALNLLTDQLIDEIADMAIRQSEQDLINDTHIPQLTAQLSEVEKSIMNITAAIEKGIASETLMNRLVQLEHEKKTLNKEIKAEEKFVYRIDRDQIVFWLSQFKYGNIEDENFRRRLIDLLVNSVTVWDEPDGYKITTAYNLTSCKTKTFRVDKNPAAEEATGFDFGESECTIERISEPYIVWGTVFVQTKRHSLP

SEQ ID NO: 2006 - protein, 553 aa, Unknown
  Description of Unknown: Integrase B2007 sequence
  PTHR30461:SF3,SM00857,G3DSA:1.10.10.2600,IPR036162,PF13408, IPR025827,PS51737,G3DSA:3.40.50.1390,IPR006119,IPR038109, PF07508,IPR011109,SSF53041,PTHR30461,Coil, PS51736,cd00338,PF00239
MKKFPIDLSCLTEEEISQFQEDPYTLYNGDQNVAIYLRYSSTGQSDQSIEGQLRDCRAFCKANHYRIVAIYVDRATTARKDVEKRVHLMEMISDSAKQNWEYVIVWKLDRFARNRNDSAIMKMRLRKNGVKVLSATEHLTDSPESIILESVLEGMAEFFSAELSQKVTRGMRESALKCHSVGGHIPLGYKVENHKLVVDPDTAHIVQEAFSLYANGESVADICRKFNSAGYKTAKNTEFNRSSFKAMFRNTRYIGTYTYKDIVIENGIPAIIDKELFETVQRRLSKTATAPARGKAKVDYLLSGKLFCGHCGASMNGESGAGRHGKVYHYYSCYTKKRKLGCDKRPLKKDYIEGIVARDALNLLTDQLIDEIADMAIRQSEQDLINDTHIPQLTAQLSEVEKSITNITAAIEKGIASETLMNRLVQLEHEKKTISKEIKAEEKFVYRIDRDQIVFWLSQFKYGNIEDEDFRRRLIDLLVNSVTVWDEPDGYKITTAYNLTSCKAKTFRVEKNPAAEEATGFDFGESECTIERISEPYIVWGTVFVQTKRHSLP

SEQ ID NO: 2007 - protein, 553 aa, Unknown
  Description of Unknown: Integrase B2008 sequence
  PTHR30461:SF3,SM00857,G3DSA:1.10.10.2600,IPR036162,PF13408, IPR025827,G3DSA:3.40.50.1390,PS51737,IPR006119,IPR038109, PF07508,SSF53041,IPR011109,PTHR30461,cd00338, PF00239
MPKKPIKHPAKPKRGVKLDIEEPGVLYGRYSSHNQKDISVEQQFEKGYELAAEYGIRIVSTYADRAVSGRTDKRADFQRMMRDATQGKFRYVIAWKSNRMGRNMLEALINETRLQELGVRVLYVEEDFDDTAAGRFAARSMMNVNQFYSENMAEDIKRGLYDNASNCMVANGHLPYGYKADETLHYTIDEQKAAVIREIFTRVSCGEAFTDIMGSLNSRGITTSYGRPWGRTSFQKILSNERYRGIYIYGDVRIEGGIPRIVSDELYFKVQEVLTTKKNPQGRHRTNGDYLLTGKLFCGHCKSPMTGISGTGRAGKLHYYYVCQKKRTEKSCHKKNVRRDVIELMVAKAIRENALKPDIIEMIAEQTVAYNNRKEAEGHVGILENQLAEVNRSIKNVMSAIEQGIITETTKSRLMELEAERAAVEGKICAARADIITISKEDIISGLEMFCDGDVHDKRYQARLFDTFLVAVYLYDDNRMKIVFSFSGAKNTIEIPLDDAIDDVADEGEDVRLSSTLVHQSRARRTIAGLPGSTAVLYMIGGLFVLECSLEER

SEQ ID NO: 2008 - protein, 553 aa, Unknown
  Description of Unknown: Integrase B2009 sequence
  PTHR30461:SF3,SM00857,G3DSA:1.10.10.2600,IPR036162,PF13408, PS51737,G3DSA:3.40.50.1390,IPR025827,IPR006119,IPR038109, PF07508,IPR011109,SSF53041,PF00239,PTHR30461, PS51736,Coil,cd00338
MKKFPIDLSCLTEEEISQFQEDPSTLYNGDQNVAIYLRYSSTGQSDQSIEGQLRDCRTFCKANHYRIVAIYVDRATTARKDVEKRVHLMEMISDSAKQNWEYVIVWKLDRFARNRNDSAIMKMRLRKNGVKVLSATEHLTDSPESIILESVLEGMAEFFSAELSQKVTRGMRESALKCHSVGGHIPLGYKVENHKLAVDPDTAHIVQEAFSLYANGESVAAICRKFNSAGYKTAKNTEFNRSSFKAMFRNTRYIGTYTYKDIVIENGIPAIIDKELFETVQRRLSKTATAPARGKAKVDYLLSGKLFCGHCGASMNGESGAGRHGKVYHYYSCYTKKRKLGCDKRPLKKDYIEGIVARDALNLLTDQLIDEIADMAIRQSEQDLINDTHIPQLTAQLSEVEKSITNITAAIEKGIASETLMNRLIQLEHEKKTLNKEIKAEEKFVYRIDRDQIVFWLSQFKYGNIEDEDFRRRLIDLLVNSVTVWDEPDGYKITTAYNLTSCKTKTFRVEKNPAAEEATGFDFGESECTIERISEPYIVWGTVFVQTKRHSLP

SEQ ID NO: 2009 - protein, 553 aa, Unknown
  Description of Unknown: Integrase B2010 sequence
  PTHR30461:SF3,SM00857,G3DSA:1.10.10.2600,IPR036162,PF13408, PS51737,G3DSA:3.40.50.1390,IPR025827,IPR006119,IPR038109, PF07508,IPR011109,SSF53041,PTHR30461,Coil, PS51736,cd00338,PF00239
MKKFPIDLSCLTEEEISQFQEDPYTLYNGDQDVALYLRYSSTGQSDQSIEGQLRDCRAFCKANHYRIVAIYVDRATTARKDVEKRVHLMEMVADSAKQNWEYVIVWKLDRFARNRNDSAIMKMRLRKNGVKVLSATEHLTDSPESIILESVLEGMAEFFSAELSQKVTRGMRESALKCHSVGGHIPLGYKVENHKLVVDPDTAHIVQEAFSLYANGESVADICRKFNSAGYKTAKNTEFNRSSFKAMFRNTRYIGIYTYKDIVIENGIPAIIDKELFETVQRRLSKTATAPARGKAKVDYLLSGKLFCGHCGASMNGESGAGRHGKVYHYYSCYTKKRKLGCDKRPLKKDYIEGIVARDALNLLTDQLIDEIADMAIRQSEQDLINDTHIPQLTAQLSEVEKSITNITTAIEKGIASETLMNRLVQLEHEKKTLNKEIKAEEKFVYRIDRDQIVFWLSQFKYGNIEDEDFRRRLIDLLVNSVTVWDEPDGYKITTAYNLTSCKTKTFRVEKNPAAEEATGFDFGESECTIERISEPYIVWGKVFVQTKRHSLP

SEQ ID NO: 2010 - protein, 553 aa, Unknown
  Description of Unknown: Integrase B2011 sequence
  PTHR30461:SF3,SM00857,G3DSA:1.10.10.2600,IPR036162,PF13408, PS51737,G3DSA:3.40.50.1390,IPR025827,IPR006119,IPR038109, PF07508,IPR011109,SSF53041,PTHR30461,Coil, PS51736,cd00338,PF00239
MKKFPIDLSCLTEEEISQFQEDPYTLYNGDQNVAIYLRYSSTGQSDQSIEGQLRDCRTFCKANHYRIVAIYVDRATTARKDVEKRVHLMEMISDSAKQNWEYVIVWKLDRFARNRNDSAIMKMRLRKNGVKVLSATEHLTDSPESIILESVLEGMAEFFSAELSQKVTRGMRESALKCHSVGGHIPLGYKVENHKLVVDPDTAHIVQEAFSLYANGESVADICRKFNSAGYKTAKNTEFNRSSFKAMFRNTRYIGTYTYKDIVIENGIPAIIDKELFETVQRRLSKTATAPARGKAKVDYLLSGKLFCGHCGASMNGESGAGRHGKVYHYYSCYTKKRKLGCDKRPLKKDYIEGIVARDALNLLTDQLIDEIADMAIRQSEQDLINDTHIPQLTAQLSEVEKSITNITAAIEKGIASETLMNRLVQLEHEKKTLNKEIKAEEKFVYRIDRDQIVFWLSQFKYGNIEDEDFRRRLIDLLVNSVTVWDEPDGYKITTAYNLTSCKTKTFRVEKNPAAEEATGFDFGESECTIERISEPYIVWGTVFVQTKRHSLP

SEQ ID NO: 2011 - protein, 553 aa, Unknown
  Description of Unknown: Integrase B2012 sequence
  PTHR30461:SF3,cd00338,SM00857,G3DSA:1.10.10.2600,IPR036162, PF13408,IPR025827,G3DSA:3.40.50.1390,PS51737,IPR006119, IPR038109,PF07508,IPR011109,SSF53041,PTHR30461, PS51736,Coil,PF00239
MQTIPIDLSALTAQERQQFDENPSVLSSDCDAVCCLYMRYSSERQTEQSIEGQLRELIAHCKQHRYRIAAIYVDRAISAHASMEKRPSFQQMLSDSSRAAWKTVLVYKLDRFARNREDSAIARMRLRKAGCSVESAKEGISKNPEGVILEALLEGMAEYYSLELSQKITRGMRESAIKGNSLGGQIPLGYKIENKKFVIDPLTAPLVVEAFSRYGDGETAASICADFNARGYRTASGSKFNRSSFKNIFRNEKYIGVYKYKEMRQEGIIPRLVSDDAWIAVQSRLKANEAAPARGKAKAAYLLAGKIFCGHCGAPMVGECGRGKGGKIYNYYSCATRKKSRSCEKKPVSKDWLEDVVAQDALNVLTDDIIDFVASVAAQQSEDEIKKNTQIPVIRQKIAEIDSGIRNLTKAIETAAVAPDAIIMRIAELEAQKKALSEQLANEERGVIPLEKETVVTYLRAVREKAIPLETQKPMLIDMLVNSVTVYDNDPGFLTFVTAYRLSQIPAKTFRIPVSPAHGCSDIELNPLPLGANPNTITVFGMVFVQTKSHALP

SEQ ID NO: 2012 - protein, 553 aa, Unknown
  Description of Unknown: Integrase B2013 sequence
  PTHR30461:SF3,SM00857,G3DSA:1.10.10.2600,IPR036162,PF13408, PS51737,G3DSA:3.40.50.1390,IPR025827,IPR006119,IPR038109, PF07508,IPR011109,SSF53041,PF00239,PTHR30461, PS51736,Coil,cd00338
MKKFPIDLSCLTEEEISQFQEDPYTLYNGDQNVAIYLRYSSTGQSDQSIEGQLRDCRAFCKANHYRIVAIYVDRATTARKDVEKRVHLMEMVADSAKQNWEYVIVWKLDRFARNRNDSAIMKMRLRKNGVKVLSATEHLTDSPESIILESVLEGMAEFFSAELSQKVTRGMRESALKCHSVGGHIPLGYKVENHKLVVDPDTAHIVQEAFSLYANGESVADICRKFNSAGYKTAKNTEFNRSSFKAMFRNTRYIGTYTYKDIVIENGIPAIIDKELFETVQRRLSKTATAPARGKAKVDYLLSGKLFCGHCGASMNGESGAGRHGKVYHYYSCYTKKRKLGCDKRPLKKDYIEGIVARDALNLLTDQLIDEIADMAIRQSEQDLINDTHIPQLTAQLSEVEKSITNITAAIEKGIASETLMNRLVQLEHEKKTLNKEIKAEEKFVYRIDRDQIVFWLSQFKYGNIEDEDFRRRLIDLLVNSVTVWDEPDGYKITTAYNLTSCKTKTFRVEKNLAAEEATGFDFGESECTIERISEPYIVWGTVFVQTKKHSLP

SEQ ID NO: 2013 - protein, 553 aa, Unknown
  Description of Unknown: Integrase B2014 sequence
  PTHR30461:SF3,SM00857,G3DSA:1.10.10.2600,IPR036162,PF13408, PS51737,G3DSA:3.40.50.1390,IPR025827,IPR006119,IPR038109, PF07508,IPR011109,SSF53041,PF00239,PTHR30461, PS51736,Coil,cd00338
MKKFPIDLSCLTEEEISQFQEDPYTLYNGDQDVALYLRYSSTGQSDQSIEGQLRDCRAFCKANHYRIVAIYVDRATTARKDVEKRVHLMEMVADSAKQNWEYVIVWKLDRFARNRNDSAIMKMRLRKNGVKVLSATEHLTDSPESIILESVLEGMAEFFSAELSQKVTRGMRESALKCHSVGGHIPLGYKVENHKLVVNPDTAHIVQEAFSLYANGESVADICRKFNSAGYKTAKNTEFNRSSFKAMFRNTRYIGTYTYKDIVIENGIPAIIDKELFETVQRRLSKTATAPARGKAKVDYLLSGKLFCGHCGASMNGESGAGRHGKVYHYYSCYTKKRKLGCDKRPLKKDYIEGIVARDALNLLTDQLIDEIADMAIRQSEQDLINDTHIPQLTAQLSEIEKSIMNITAAIEKGIASETLMNRLVQLEHEKKTLNKEIKAEEKFVYRIDRDQIVFWLSQFKYGNIEDENFRRRLIDLLVNSVTVWDEPDGYKITTAYNLTSCKTKTFRVDKNPAAEEATGFDFGESECTIERISEPYIVWGTVFVQTKRHSLP

SEQ ID NO: 2014 - protein, 553 aa, Unknown
  Description of Unknown: Integrase B2015 sequence
  cd03768,SM00857,IPR006118,G3DSA:1.10.10.2600,IPR036162, PS51737,G3DSA:3.40.50.1390,IPR006119,IPR038109,PF07508, IPR011109,SSF53041,PTHR30461,PS00397,PS51736, Coil,PF00239
MEKSKRVVGYARVSTEAQDITRQIELITAYCNDRNYHLIKIIQEKISGARRDRKSLNELLEVDDAVADLIIVSELSRLSREDDILSVLSTINELLKQGVDILFLDKQDRIYKAGTILSLYDIITLSVEAKASADERYKIAGRMQTGLRSKLAEFSNMFAGGTVPFGYKVIHNPDYKLNQTPKNLLVVDAKEAEAVKYLFQQLIDGNTIRQTVRVYNKLYPYKLSYSGICRIIRNPKYKGEIYRRGKLYGQIPELQIITPEDFDKANKQMRENSLFQSNAPKYYNPLKGLLFCPCGCGLYMKPNHNSYLIYRCSSAYNDKQKCENYGVKCAYILSSVWTCVKETLHTEEYKRFNTQRANELQGINKQIRETITRKVNSVDELKTQSASLIAKIKKLNNDDLINELETDYNVLCKQIKQTEQEISELNGQIAENDAEIKRNVEQKDFSKMEQSALYKEKLQKAVYHSQSAMRGILEIVFKNGMTRYVLIKKHRNGGTYLLPDTFKGDMERKQIIVPSLRTDKDNPYSAQPMNLRYTFDEFFKAMPVEEYEIPITE

SEQ ID NO: 2015 - protein, 553 aa, Unknown
  Description of Unknown: Integrase B2016 sequence
  PTHR30461:SF3,cd00338,SM00857,G3DSA:1.10.10.2600,IPR036162, PF13408,IPR025827,PS51737,G3DSA:3.40.50.1390,IPR006119, IPR038109,PF07508,IPR011109,SSF53041,PTHR30461, PS51736,Coil,PF00239
MQTIPIDLSALTAQERQQFAENPSVLSSDCDAVCCLYMRYSSERQTEQSIEGQLRELIAHCKQHRYRIAAIYVDRAISAHASMEKRPSFQRMLSDAVRAPWKTVLVYKLDRFARNREDAAIARMRLRKAGCNVESAKEGISKNPEGVILEALLEGMAEYYSLELSQKITRGMRESAIKGNSLGGQIPLGYKIENKKFVIDPLTAPLVVEAFSRYGDGETAASICADFNARGYRTASGAKFNRSSFKNIFRNEKYIGVYKYKEMRQEGIIPRLVTDDAWIAVQSRLKANEAAPARGKAKAAYLLAGKIFCGHCGAPMVGECGRGKGGKIYNYYSCAVRKKDHTCDKKPVPKDWIEDVVAQDALDVLTDDIIDFVASIAAQQSEDEIKKNTQIPVIRQKIAEIDSGIRNLTKAIETAAVAPDAIIMRIAELEAQKKALSEQLVDEERGVIPLEKETVVTYLRAVREKAIPLETQKPMLIDMLVNSVTVYDNDPGFLTFVTAYRLSQIPAKTFRIPVSPAHGCSDMGLNALPLGANPNTIVVVGMVFVQTKKHALP

SEQ ID NO: 2016 - protein, 553 aa, Unknown
  Description of Unknown: Integrase B2017 sequence
  PTHR30461:SF3,SM00857,G3DSA:1.10.10.2600,IPR036162,PF13408, IPR025827,G3DSA:3.40.50.1390,PS51737,IPR006119,IPR038109, PF07508,IPR011109,SSF53041,PF00239,PTHR30461, PS51736,Coil,cd00338
MKKFPIDLSCLTEEEISQFQEDPYTLYNGDQEVALYLRYSSTGQSDQSIEGQLRDCRAFCKANHYRIVAIYVDRATTARKDVEKRVHLMEMVADSAKQNWEYVIVWKLDRFARNRNDSAIMKMRLRKNGVKVLSATEHLTDNPESIILESVLEGMAEFFSAELSQKVTRGMRESALKCHSVGGHIPLGYKVENHKLVVDPDTAHIVQEAFSLYANGESVADICRKFNSAGYKTAKNTEFNRSSFKAMFRNTRYIGTYTYKDIVIENGIPAIIDKELFETVQRRLSKTATAPARGKAKVDYLLSGKLFCGHCGASMNGESGAGRHGKVYHYYSCYTKKRKLGCDKRPLKKDYIEGIVAHDALNLLTDQLIDEIADMAIQQSGQDLINDTHIPQLTAQLSEVEKSITNITAAIEKGIASETLMNRLVQLEHEKKTLNKEIKAEEKFVYRIDRDQIVFWLSQFKYGNIEDEDFRRRLIDLLVNSVTVWDEPDGYKITTAYNLTSCKTKTFRVEKNPAAEEATGFDFGESECTIERISEPYIVWGTVFVQTKRHSLP

SEQ ID NO: 2017 - protein, 553 aa, Unknown
  Description of Unknown: Integrase B2018 sequence
  SM00857,G3DSA:1.10.10.2600,IPR036162,PF13408,IPR025827, G3DSA:3.40.50.1390,PS51737,IPR006119,IPR038109,PF07508, SSF53041,IPR011109,PTHR30461,Coil,cd00338, PF00239
MAYRKITDIKDTIGMRAVFYARVSTAEEEQLNAIELQIEENRGCIKDHGWKLVGEYIDRSKSGTMVKGRDDYQRLYEDLYEDLFDIVVIKDQERLQRNTLDWYLFINRVVQTGKLLFMYMDGKFYSPDDALITGVRAIIAEEFSRNLSKKLHNYHDHRIEKARQGQEIALQGSGNVYGWDKKDGKYYINPEQAKVRRLMCEGIMARKGSTLIAKELNEAGYRNTVGKLWKPMDIPKFVYDCKNVGTMIINKERHDFESKQTIKLPKEEWVYVENALPPIVTQEEWDLICKIHEERVIATGSDRRGKKTSGYSFSGKLVCGICGAPYWRKQRVSKDEYWVCSTKQTKGRRTRKRDSTMGKAGEINPLGCDNENISYNSLMEIMGVVSERLQANTDTIKHDMINWLTKLRKQLLEANGGHTEADLQRELSRKSKLLDAYLDGILNKQEYQKKAEELDERIIQLKAETEKNKANSGDIAEIDKVLANIDEEVSRYVDGNEKLKVEYLLEHLEQVQIFQDKVIVIVPILSEGIVVEKAQYVSREKWCRQDNFNENTF

SEQ ID NO: 2018 - protein, 553 aa, Unknown
  Description of Unknown: Integrase B2019 sequence
  PTHR30461:SF3,SM00857,G3DSA:1.10.10.2600,IPR036162,PF13408, IPR025827,G3DSA:3.40.50.1390,PS51737,IPR006119,IPR038109, PF07508,SSF53041,IPR011109,PF00239,PTHR30461, PS51736,Coil,cd00338
MQTIPIDLSALTPEERQQFADNPSVLSSDCEAVCCLYMRYSSDRQTEQSIEGQLRELIAYCKHHSYRVSAIYVDRAISAHASMDKRPAFQQMLADSARSSWKTVLVYKLDRFARNREDSAIARMRLRKNGCNVESAKEGISKNPEGVILEALLEGMAEYYSLELSQKITRGMRESAIKGNCLGGQIPLGYKIENKKYVIDPLTAPLVKEAFSRYGDGETAASICADFNARGYRTASGAEFNKSSFKNIFRNEKYIGVYKYKEMRREGIIPRIIADDAWIAVQSRLKVNEAAPARGKAKMPYLLAGKLFCGHCGAPMTGECGRGKSGKMYNYYSCATRKHHNSCEKKPVPKDWLEDVVAQDALDVLTDEIIEFVAEVAAQQSEEDIQKNTQIPVIRKKISEIENKIRNLTKALECASVAPDAIVERLSELEAQKKGLSTQLSDEERGVIPLTKESVVVYLKAVREKAVPLETQKAMLIEMLVNSVTVYDDEPGFLKLVYAYRLTQIPTRTYRVPIPAKVPCSDFRTQPAPLDANPNTITVVGMVFIQTRRHALP

SEQ ID NO: 2019 - protein, 553 aa, Unknown
  Description of Unknown: Integrase B2020 sequence
  cd03768,SM00857,IPR006118,G3DSA:1.10.10.2600,IPR036162, PS51737,G3DSA:3.40.50.1390,IPR006119,IPR038109,PF07508, IPR011109,SSF53041,PTHR30461,PS00397,PS51736, Coil,PF00239
MEKSKRVVGYARVSTEAQDITRQIELITAYCNDRNYHLIKIIQEKISGARKDRKSLNELLEVDDTVADMIIVSELSRLSREDDILSVLSTINELLKQGVDILFLDKQDRIYKAGTVLSLYDIITLSVEAKASADERYKIAGRMQTGLRSKLAEFTNMFAGGTVPFGYKIIHNPEYKLNQTPKNLLVVDTPKAEAVKYLFQQLIDGNTIRQTVRVYNKLFPYKLSYSGICRIIRNPKYKGEIYRRGKLYGIMNELQIITPEDFDKANKQMRENSLFQSNAPKYYNPLKGLLFCPCGCSLYMKPNHNSYLIYRCSSAYNEKQKCENYGVKCAYILSSVWICVKETLHTEEYKRFNTQRANELQGVNKQIRETIIRKVNSVDELKAQSASLIAKIKKLNNEDLISELETDYNVLCKQIKQTEQEISELNGQIVENDAEIKRNMEQKDFSKMEQSALYKEKLQKAVYHSLSAMRGILEIIFKNGMTRYVLIKKHRNGGTYLLPDTFKGDMERKQIIVPSLRTDKDNPYSTQPINLRYTFDEFFKAMPVEEYQIPITE

SEQ ID NO: 2020 - protein, 553 aa, Unknown
  Description of Unknown: Integrase B2021 sequence
  PTHR30461:SF3,SM00857,G3DSA:1.10.10.2600,IPR036162,PF13408, PS51737,IPR025827,G3DSA:3.40.50.1390,IPR006119,IPR038109, PF07508,IPR011109,SSF53041,PF00239,PTHR30461, PS51736,Coil,cd00338
MQTIPIDLSALTAQERQQFAENPSVLSSDCDAVCCLYMRYSSERQTEQSIEGQLRELIAHCKQHRYRIAAIYVDRAISAHASMEKRPSFQRMLSDAVRAPWKTVLVYKLDRFARNREDAAIARMRLRKAGCNVESAKEGISKNPEGVILEALLEGMAEYYSLELSQKITRGMRESAIKGNSLGGQIPLGYKIENKKFVIDPLTAPLVVEAFSRYGDGETAASICADFNARGYRTASGAKFNRSSFKNIFRNEKYIGVYKYKEMRQEGIIPRLVTDDAWVAVQSRLKANEAAPARGKAKAAYLLAGKIFCGHCGAPMVGECGRGKGGKIYNYYSCAVRKKDHTCDKKPVPKDWIEDVVAQDALDVLTDDIIDFVASIAAQQSEDEIKKNTQIPVIRQKIAEIDSGIRNLTKAIETAAVAPDAIIMRIAELEAQKKALSEQLVDEERGVIPLEKETVVTYLRAVREKAIPLETQKPMLIDMLVNSVTVYDNDPGFLTFVTAYRLSQIPAKTFRVPVSPAHGCSDMGLNALPLGANPNTIVVVGMVFVQTKKHALP

SEQ ID NO: 2021 - protein, 553 aa, Unknown
  Description of Unknown: Integrase B2022 sequence
  PTHR30461:SF3,SM00857,G3DSA:1.10.10.2600,IPR036162,PF13408, IPR025827,G3DSA:3.40.50.1390,PS51737,IPR006119,IPR038109, PF07508,IPR011109,SSF53041,PTHR30461,Coil, PS51736,cd00338,PF00239
MQMIPIDLSALTASEQRQFTENPSVLSTDCDVVCCLYMRYSSDRQTEQSIEGQLRELLTFCQQHRYRVSAIYVDRAISAHASMEKRPAFQQMLSDSSRAAWKTVLVYKLDRFARNREDAAVARMRLRKNGCNVESAKESISKNPEGVILESILEGMAEYYSLELSQKITRGMRESALKGQAVGGSVPLGYKIEKKKWVLDPLTAPLVSEAFTRYADGETVADICSDFNARGYRTAKGAQFNKSSFKNIFRNEKYIGVYKYRDIRMEDALPRIVEDDVWRKVQSRLKVNEQAPARGKAKVPYLLAGKIFCGHCGSPMVGECGRGKGGKTYNYYSCANRKRNGGCDKKPAPKDWIEDVVANDAINVLTDEVIEYVATTAAQQSENEIQQNTNIPALQAQIAETDRKIKNLLKALEAASTAPDVLVARIADLESQKKGLTAQLFEEKKSVIPLTKEMVVYFLESVRSQVLDLETQKPMLFSLLINSVTVYDDEPGYMKFETAYNLTQIPAKTYRVPTSGICKCSDMGLISPPLDANPNTITVFGMIFVQTRKHALP

SEQ ID NO: 2022 - protein, 553 aa, Unknown
  Description of Unknown: Integrase B2023 sequence
  PTHR30461:SF3,IPR036162,PS51737,IPR011109,PTHR30461, PF00239,G3DSA:1.10.10.2600,IPR006119,SSF53041,cd00338, SM00857,IPR025827,IPR038109,PS51736,cd18688, PF13408,G3DSA:3.40.50.1390,PF07508,Coil
MQTIPIDLSALTPDERQQFADNPSVLSSDCEAVCCLYMRYSSDRQTEQSIEGQLRELIAYCKHHSYRVAAIYVDRAISAHASMDKRPAFQQMLADSARSSWKTVLVYKLDRFARNREDSAIARMRLRKNGCNVESAKEGISKNPEGVILEALLEGMAEYYSLELSQKVRRGMSETARKGNSTGGTTPLGYTVVDKRLKIDPMTAHLVEEAFRRYADGDTVAAICDDFNARGYRTTRGTKFNKSSFKNVFRNEKYIGVYKFDDVRTDNAVPRIISDELWRAVQSRLKTSEQAPARGKAKVPYLLSGKIFCGHCGAPMVGECGRGKGGKTYNYYSCAKRKKTRLCDKKPVPKDWLEDVVAQDALDVLTDEIIEFVAEVAAQQSKEDIQKNTQIPVIRKKISEIENKIRNLTKALECASVAPDAIVERLAELEAQKRGLSTQLSDEERGVIPLTKESVVVYLKAVRENAVPLETQKAMLIEMLVNSVTVYDDEPGFLKFVTAYRLTQIPSKTYRVPTPAVSPCSDIGRVGSPLDANPNSIVVVGMVFVQTKRHALP

SEQ ID NO: 2023 - protein, 553 aa, Unknown
  Description of Unknown: Integrase B2024 sequence
  PTHR30461:SF3,SM00857,G3DSA:1.10.10.2600,IPR036162,PF13408, PS51737,G3DSA:3.40.50.1390,IPR025827,IPR006119,IPR038109, PF07508,IPR011109,SSF53041,PF00239,PTHR30461, PS51736,Coil,cd00338
MKKFPIDLSCLTEEEISQFQEDPYTLYNGDQDVALYLRYSSTGQSDQSIEGQLRDCRAFCKANHYRIVAIYVDRATTARKDVEKRVHLMEMVADSAKQNWEYVIVWKLDRFARNRNDSAIMKMRLRKNGVKVLSATEHLTDSPESIILESVLEGMAEFFSAELSQKVTRGMRESALKCHSVGGHIPLGYKVENHKLVVDPDTAHIVQEAFSLYANGESVADICRKFNSAGYKTAKNTEFNRSSFKAMFRNTRYIGTYTYKDIVIENGIPAIIDKELFETVQRRLSKTATAPARGKAKVDYLLSGKLFCGHCGASMNGESGAGRHGKVYHYYSCYTKKRKLGCDKRPLKKDYIEGIVARDALNLLTDQLIDEIADMAIRQSEQDLINDTHIPQLTAQLSEVEKSITNITAAIEKGIASETLMNRLVQLEHEKKTLNKEIKAEEKFVYRIDRDQIIFWLSQFKYGNIEDEDFRRRLIDLLVNSVTVWDEPDGYKITTAYNLTSCKTKTFRVEKNPAAEEATGFDFGESECTIERISEPYIVWGTVFVQTKRHSLP

SEQ ID NO: 2024 - protein, 553 aa, Unknown
  Description of Unknown: Integrase B2025 sequence
  cd03768,SM00857,IPR006118,G3DSA:1.10.10.2600,IPR036162, PS51737,G3DSA:3.40.50.1390,IPR006119,IPR038109,PF07508, SSF53041,IPR011109,PTHR30461,PS00397,PS51736, Coil,PF00239
MEKSKRVVGYARVSTEAQDITRQIELITAYCNDRNYHLIKIIQEKISGARKDRKSLNELLDVDDAVADMIIVSELSRLSREDDILSVLSTINELLKQGVDILFLDKQDRIYKAGTILSLYDIITLSVEAKASADERYKIAGRMQTGLRSKLAEFSNMFAGGTVPFGYKVIHNPDYKLNQTPKNLLVVDAKEAEAVKYLFQQLIDGNTIRQTVRVYNKLYPYKLSYSGICRIIRNPKYKGEIYRRGKLYGQIPELQIITPEDFDKANKQMRENSLFQSNAPKYYNPLKGLLFCPCGCGLYMKPNHNSYLIYRCSSAYNDKQKCENYGVKCAYILSSVWTCVKETLHTEEYKRFNTQRANELQGINKQIRETITRKVNSVDELKTQSASLIAKIKKLNNDDLINELETDYNVLCKQIKQTEQEISELNGQIAENDAEIKRNVEQKDFSKMEQSALYKEKLQKAVYHSLSAMRGILEIVFKNGMTRYVLIKKHRNGGTYLLPDTFKGDMERKQIIVPSLRTDKDNPYSAQPMNLRYTFDEFFKAMPVEEYEIPITE

SEQ ID NO: 2025 - protein, 553 aa, Unknown
  Description of Unknown: Integrase B2026 sequence
  SM00857,G3DSA:1.10.10.2600,IPR036162,PF13408,IPR025827, G3DSA:3.40.50.1390,PS51737,IPR006119,IPR038109,PF07508, SSF53041,IPR011109,PF00239,PTHR30461,PS51736, Coil,cd00338
MKKFPIDLSCLTEEEISQFQEDPYTLYNGDQDVALYLRYSSTGQSDQSIEGQLRDCRAFCKANHYRIVAIYVDRATTARKDVEKRVHLMEMVADSAKQNWEYVIVWKLDRFARNRNDSAIMKMRLRKNGVKILSATEHLTDSPESIILESVLEGMAEFFSAELSQKVTRGMRESALKCHSVGGHIPLGYKVENHKLVVDPDTAHIVQEAFSLYANGESVADICRKFNSAGYKTAKNTEFNRSSFKAMFRNTRYIGTYTYKDIVIENGIPAIIDKELFETVQRRLSKTATAPARGKAKVDYLLSGKLFCGHCGASMNGESGAGRHGKVYHYYSCYTKKRKLGCDKRPLKKDYIEGIVARDALNLLTDQLIDEIADMAIRQSEQDLINDTHIPQLTAQLSEVEKSITNITAAIEKGIASETLMNRLVQLEHEKKTLNKEIKAEEKFVYRIDRDQIVFWLSQFKYGNIEDEDFRRRLIDLLINSVTVWDEPDGYKITTAYNLTSCKAKTFRVEKNPAAEEATGFDFGESECTIERISEPYIVWGTVFVQTKRHSLP

SEQ ID NO: 2026 - protein, 553 aa, Unknown
  Description of Unknown: Integrase B2027 sequence
  cd09606,PTHR30461:SF3,SM00857,G3DSA:1.10.10.2600,IPR036162, PF13408,IPR025827,G3DSA:3.40.50.1390,PS51737,IPR006119, IPR038109,PF07508,SSF53041,IPR011109,PTHR30461, PS51736,cd00338,PF00239
MKKIETNQPTVERGVIYARYSSSGQREESIEGQLRECRIYAEKHGITIVGEYCDAAMTGTNDKRPQFQRLIRDSAKGQFTVAILWKIDRFARNKYDSAIYKHKLKQNGVRIVYAKESIPDGPEGIIFESLMEGFAEYYSANLSQNVKRGLYDSALKLQTLGQTAYGLRKGTDGKWEHNPAQAPIVKRIFEEYVAGRSIISIYKQLNAEGYRTLNGGMFNKNSLRTILKNEKYCGVYQYADIRVEDGIPAIISKELFAMAQQMIKKNHEKPAAKKEDGGFLLSGKLFCGHCGELMTGDCGTSKLGRIYRYYTCINRRQKKCDKERARKEWIEDVIVHKLAEIANCDDVIDEFADRYMEWQDKQKPMSSELEDRLKKVEAALQNNMSLVDSGFISESVKNHIMQLETERTQLEQGILKERLNSPKLTRQQVVYFLKSFRKGDINDISWRIYLVDTFLQAAYLYDNGNLILSLNFSGDNNKITLNIAEAAVVGGEQMCSDFAHSCPPKESLDVIYAFEAFFFCIRYKDELFCGSRKHDNRFIDLGKCRGSYVVFKR

SEQ ID NO: 2027 - protein, 553 aa, Unknown
  Description of Unknown: Integrase B2028 sequence
  PTHR30461:SF3,SM00857,G3DSA:1.10.10.2600,IPR036162,PF13408, IPR025827,PS51737,G3DSA:3.40.50.1390,IPR006119,IPR038109, PF07508,IPR011109,SSF53041,PTHR30461,Coil, PS51736,cd00338,PF00239
MSITKFPIDLSWLTEEELAQFEEDPFTLYNGEHNVALYLRYSSTGQSDQSIEGQLRDCRAFCKANNYRIVAVYIDRATTARSIEKRVHLLKLISDSAKRRWEYVVVWKLDRFARNRNDSAIMKMRLRKNGVKVLSATEHLTDSPESIILESVLEGMAEFFSAELSQKVSRGMRESAMKCQSIGGHIPLGYKVENHKLVVNPDTAHIVQEAFTLYANGMRIADICRKFNSAGYRTAKNGEFNCNSFRSIFRNIRYIGTYKYKDIHIENGIPAIIDKELFDRVQLRMDRAAVAPARGTGKVDYILSGKLFCGHCGAYMNGECGTGRRGTVYHYYSCSNRKNGNGCDKRPLRKEYIEDIVVQDALNLLTDQLIDEIADMAIRQSELDMFEKTRIPQLTAHMTEVEKSIENITTAIEKGIASDSLMNRLVKLEQQKKELAEEIELEEGRIYKIDRDMIIFWLSQFKQGDIEDETFRRRLVDLLINSVTVWDEPDGYKITTAYNITSKATRTFTIEKNPTDKTKGFENRQCSCTIEFRVEPYIAYGSILVQTKRHSLP

SEQ ID NO: 2028 - protein, 553 aa, Unknown
  Description of Unknown: Integrase B2029 sequence
  PTHR30461:SF3,SM00857,G3DSA:1.10.10.2600,IPR036162,PF13408, PS51737,G3DSA:3.40.50.1390,IPR025827,IPR006119,IPR038109, PF07508,IPR011109,SSF53041,PF00239,PTHR30461, PS51736,Coil,cd00338
MPRKKKLQEVGGLRLVAYYRYSNGGQQTEQSIEGQRRDCEAYAKAHGYKIVHEYIDRHISGKSDSRPAFQQMISDSDSHLFDAVICWKTDRLARSRYDSIIYKTRLRRNGVKILYAAETVVDGPEGIIIEGLMESLAEYYSAELAQKLRRGQRESALKCIALGGNRSFGYDIGPDKHYCINEKQAPAVRYIFEQYAAGATAADIVRELTARGYRTSRGNPFNKNSICRIITNEMYLGVYKYADIRIEGGVPAMIDRELFNRCQTQLAFNRAHGGGKGAPRADYVLVGKLDCGLCGHAMKGASATGHTGSKHYYYTCTQHVEKKCPKTSIEKNYLEQIIVDGVAKYVLTPEKISQIVDCMMELQAKEQEPKGNPEKDALEAELAECRRKQNNILEAIEEGGSARLAARLRTLEEQEAQLTFALGEINNAPTPPQFSREALTFMFEQFRREEDEVDEEYRRRILDTFVSSILLYEDRAEVKFNITDQKTGDFERVILPISANKKPPEDDDITSNSEGSTALRLVDEVQRRTNPRVEISPYSVVFIIPLPGKLVRR

SEQ ID NO: 2029 - protein, 553 aa, Unknown
  Description of Unknown: Integrase B2030 sequence
  PTHR30461:SF3,SM00857,G3DSA:1.10.10.2600,IPR036162,PF13408, PS51737,G3DSA:3.40.50.1390,IPR025827,IPR006119,IPR038109, PF07508,IPR011109,SSF53041,PTHR30461,PS51736, cd00338,PF00239
MARSAKKIEYAPAEQIGVIYARYSSHNQKEESIEQQIAECTEFAEKNGIRIIGIYADKAVSGRSDRRPNFQRMMRDAEKRHFQIVVAYKSNRIARNMLNALQYEAKLDLFGIKTLYAKEEFGNTAAGRFALRTMMNVNQFYSENMGEDIKRGMVDNANECKVNGMLPLGYVKSKEGKYAIAPDEAAVVREIFDSVLKDVPVAEIARSLNQRGIHTKLGREWNKNSFHIMLKNDNYIGVYRHSGVVVEDGIPPILEKEVFAAVQEKLANKKKTAGRRSANGEYLLTGKLFCGYCGSYMIGVSGTGENGTVHNYYQCQKRHAEGRCEKKNVRRDFIEKLIARLTQDYILQDDTIEWIADSTMSFQAMARRESGVAQLERDLADNRKVAKNIMAAIEQGIITETTKARLLEVEGTIHDLERSLSIAKAASQPIERERVVFSLEQMREGNVGSKDHQKKLIDTFVKSVTLWDDRIQIDYYHTPGKHKFSYSLEELTSKAENESNASDVRTDSLELHHCRRELHRFTTAFLLTAAPLRLYGTIKKTQEFKFLRLFCMY

SEQ ID NO: 2030 - protein, 553 aa, Unknown
  Description of Unknown: Integrase B2031 sequence
  PTHR30461:SF3,SM00857,G3DSA:1.10.10.2600,IPR036162,PF13408, PS51737,IPR025827,G3DSA:3.40.50.1390,IPR006119,IPR038109, PF07508,IPR011109,SSF53041,PF00239,PTHR30461, PS51736,Coil,cd00338
MKKFPIDLSCLTEEEISQFQEDPYTLYNGDQDVALYLRYSSTGQSDQSIEGQLRDCRAFCKANHYRIVAIYVDRATTARKDVEKRVHLMEMVADSAKQNWEYVIVWKLDRFARNRNDSAIMKMRLRKNGVKVLSATEHLTDSPESIILESVLEGMAEFFSAELSQKVTRGMRESALKCHSVGGHIPLGYKVENHKLVVDPDTAHIVQEAFSLYANGESVADICRKFNSAGYKTAKNTEFNRSSFKAMFRNTRYIGTYTYKDIVIENGIPAIIDKELFETVQRRLSKTATAPARGKAKVDYLLSGKLFCGHCGASMNGESGAGRHGKVYHYYSCYTKKRKLGCDKRPLKKDYIEGIVARDALNLLTDQLIDEIADMAIRQSEQDLINDTHIPQLTAQLSEVEKSITNITAAIEKGIASETLMNRLVQLEHEKKTLNKEIKAEEKFVYRIDRDQIVFWLSQFKYGNIEDEDFRRRLIDLLVNSVTVWDEPDGYKITTAYNLTSCKTKTFRVEKNPAAKEATGFDFGESECTIERISEPYIVWGTVFVQTKRHSLP

SEQ ID NO: 2031 - protein, 553 aa, Unknown
  Description of Unknown: Integrase B2032 sequence
  PTHR30461:SF3,cd00338,SM00857,G3DSA:1.10.10.2600,IPR036162, PF13408,IPR025827,G3DSA:3.40.50.1390,PS51737,IPR006119, IPR038109,PF07508,IPR011109,SSF53041,PTHR30461, PS51736,Coil,PF00239
MQTIPIDLSALTPEERQQFADNPSVLSSDCEAVCCLYMRYSSDRQTEQSIEGQLRELIAYCKHHSYRVAAIYVDRAISAHASMDKRPAFQQMLSDSARSSWKTVLVYKLDRFARNREDSAIARMRLRKNGCNVESAKEGISKNPEGVILEALLEGMAEYYSLELSQKITRGMRESAIKGNCLGGQIPLGYKIENKKYVIDPLTAPLVKEAFSRYGDGETAASICADFNARGYRTASGAEFNKSSFKNIFRNEKYIGVYKYKEMRREGIIPRIIADDAWIAVQSRLKDNEAAPARGKAKVAYLLAGKIFCGHCGAPMTGECGRGKSGKMYNYYSCATRKHHNSCEKKPVPKDWLEDVVAQDALDVLTDEIIEFVAEVAAQQSEEDIQKNTQIPVIRKKISEIENKIRNLTKALECASVAPDAIVERLAELESQKKGLSTQLSDEERGVIPLTKESVVVYLKAVRENAVPLETQKAMLIDMLVNSVTVYDDEPGFLKLIYAYRLTQIPARTYRVPISEKVPCSDFRTQPAPLDANPNTITVVGMVFIQTKRHALP

SEQ ID NO: 2032 - protein, 553 aa, Unknown
  Description of Unknown: Integrase B2033 sequence
  PTHR30461:SF3,SM00857,G3DSA:1.10.10.2600,IPR036162,PF13408, IPR025827,G3DSA:3.40.50.1390,PS51737,IPR006119,IPR038109, PF07508,IPR011109,SSF53041,PF00239,PTHR30461, PS51736,Coil,cd00338
MQTIPIDLSALTAQERQQFAENPSVLSSDCDAVCCLYLRYSSERQTEQSIEGQLRELIAHCKQHRYRIAAIYVDRAISAHASMEKRPSFQQMLSDSVRAPWKTVLVYKLDRFARNREDAAIARMRLRKAGCNVESAKEGISKNPEGVILEALLEGMAEYYSLELSQKITRGMRESAIKGNSLGGQIPLGYRIENKKFVIDPLTAPLVVEAFSRYGDGETAASICADFNARGYRTASGAKFNRSSFKNIFRNEKYIGVYKYKEMRQEGIIPRLITDDAWIAVQSRLKANEAAPARGKAKTAYLLAGKIFCGHCGAPMVGECGRGKGGKIYNYYSCATRKKSRSCEKKPVPKDWIEDVVAQDALDVLTDDVIEFVASVAAQQSEEEIKKNTQIPVIRQKIAEIDSGIRNLTKAIETAAVAPDAIIMRIAELEAQKKALSEQLVNEERGVIPLEKETVVTYLRAVREKAIPLETQKPMLIDMLVNSVTVYDNDPGFLTLVTAYRLSQIPAKTFRIPVSPAHGCSDMGLNALPLGVNPNTIVVVGMVFVQTKKHALP

SEQ ID NO: 2033 - protein, 553 aa, Unknown
  Description of Unknown: Integrase B2034 sequence
  PTHR30461:SF3,cd00338,SM00857,G3DSA:1.10.10.2600,IPR036162, PF13408,IPR025827,G3DSA:3.40.50.1390,PS51737,IPR006119, IPR038109,PF07508,IPR011109,SSF53041,PTHR30461, PS51736,Coil,PF00239
MQTIPIDLSALTPEERQQFADNPSVLSSDCEAVCCLYMRYSSDRQTEQSIEGQLRELIAYCKHHSYRVAAIYVDRAISAHASMDKRPAFQQMLSDSARSSWKTVLVYKLDRFARNREDSAIARMRLRKNGCNVESAKEGISKNPEGVILEALLEGMAEYYSLELSQKITRGMRESAIKGNCLGGQIPLGYKIENKKYVIDPLTAPLVKEAFSRYGDGETAASICADFNARGYRTASGAEFNKSSFKNIFRNEKYIGVYKYKEMRREGIIPRIIADDAWIAVQSRLKDNEAAPARGKAKVAYLLAGKIFCGHCGAPMTGECGRGKSGKMYNYYSCATRKHHNSCEKKPVPKDWLEDVVAQDALDVLTDEIIEFVAEVAAQQSEEDIQKNTQIPVIRKKISEIENKIRNLTKALECASVAPDAIVERLAELEAQKKGLATQLSDEERGVVPLTKESVVVYLKAVRENAVPLETQKAMLIDMLVNSVTVYDDEPGFLKLIYAYRLTQIPARTYRVPISEKVPCSDFRTQPAPLDANPNTITVVGMVFIQTKRHALP

SEQ ID NO: 2034 - protein, 553 aa, Unknown
  Description of Unknown: Integrase B2035 sequence
  PTHR30461:SF3,SM00857,G3DSA:1.10.10.2600,IPR036162,PF13408, PS51737,G3DSA:3.40.50.1390,IPR025827,IPR006119,IPR038109, PF07508,IPR011109,SSF53041,PF00239,PTHR30461, PS51736,Coil,cd00338
MQTIPIDLSALTAQERQQFAENPSVLSSDCDAVCCLYMRYSSERQTEQSIEGQLRELIAHCKQHRYRIAAIYVDRAISAHASMERRPSFQQMLSDSVRAPWKTVLVYKLDRFARNREDSAIARMRLRKAGCSVESAKEGISKNPEGVILEALLEGMAEYYSLELSQKITRGMRESAIKGNSLGGQIPLGYKIENKKFVIDPLTAPLVVEAFSRYGDGETAASICADFNARGYRTASGAKFNRSSFKNIFRNEKYIGVYKYKEMRQEGIIPRLVTDDAWVAVQSRLKANEAAPARGKAKAAYLLAGKIFCGHCGAPMVGECGRGKGGKIYNYYSCAVRKKDHTCDKKPVPKDWIEDVVAQDALNVLTDDVIDFVASVAAQQSEEEIKKNTQIPVIRQKIAEIDSGIRNLTKAIETAAVAPDAIIMRIAELEAQKKALSEQLVNEERGVIPLEKETVVTYLRAVREKAIPLETQKPMLIDMLVNSVTVYDNDPGFLTFVTAYRLSQIPAKTFRIPASTAHGCSDMGLNALPLGANPNTIVVVGMVFVQAKKHALP

SEQ ID NO: 2035 - protein, 553 aa, Unknown
  Description of Unknown: Integrase B2036 sequence
  PTHR30461:SF3,SM00857,G3DSA:1.10.10.2600,IPR036162,PF13408, PS51737,G3DSA:3.40.50.1390,IPR025827,IPR006119,IPR038109, PF07508,SSF53041,IPR011109,PTHR30461,Coil, PS51736,cd00338,PF00239
MKKFPIDLSCLTEEEISQFQEDPYTLYNGDQDVALYLRYSSTGQSDQSIEGQLRDCRAFCKANHYRIVAIYVDRATTARKDMEKRVHLMEMVADSAKQNWEYVIVWKLDRFARNRNDSAIMKMRLRKNGVKVLSATEHLTDSPESIILESVLEGMAEFFSAELSQKVTRGMRESALKCHSVGGHIPLGYNVENHKLVVDPDTAHIVQEAFSLYANGESVADICRKFNSAGYKTAKNTEFNRSSFKAMFRNTRYIGTYTYKDIVIENGIPAIIDKELFETVQRRLSKTATAPARGKAKVDYLLSGKLFCGHCGASMNGESGAGRHGKVYHYYSCYTKKRKLGCDKRPLKKDYIEGIVASDALNLLTDQLIDEIADMAIRQSEQDLINDTHIPQLTAQLSEVEKSITNITAAIEKGIASETLMNRLVQLEHEKKTISKEIKAEEKFVYRIDRDQIVFWLSQFKYGNIEDENFRRRLIDLLVNSVTVWDEPDGYKITTAYNLTSCKTKTFRVEKNPAAEEATGFDFGESECTIERISEPYIVWGTVFVQTKRHSLP

SEQ ID NO: 2036 - protein, 553 aa, Unknown
  Description of Unknown: Integrase B2037 sequence
  PTHR30461:SF3,cd00338,SM00857,G3DSA:1.10.10.2600,IPR036162, PF13408,PS51737,G3DSA:3.40.50.1390,IPR025827,IPR006119, IPR038109,PF07508,IPR011109,SSF53041,PTHR30461, PS51736,Coil,PF00239
MKNCVIDLSTLTPEERRQFAENPGVLSYSCPETCCLYMRYSSERQSEQSIEGQLRELVAYCLQHGYRVSAVYVDRAVSAHTGMNKRAAFQQMLADSKRADWNTVLVWKLDRFARNRQDSAAARAVLIKNGCMVVSATENITDSPEGRLLESVLEGLNEYYSEDLKQKIKRGNRESALKGQALGGSVPLGYKIEKKKWVLDPLTAPLVEEAFTRYAAGETATAICADFNARGHRTSKGSLFNKSSFKNIFRNEKYIGVYKYTDIRQEDAVPRIVTDDVWQAVQSRLRSNAAAPARGKAKVAYLLSGKVFCGKCGGPMIGDTGTGKTGGKYSYYTCAGRKQRHSCDKRSVPKGWLENMVARDALDALTDEVIDYVATAAARQSENEIRQNTNIPVYQQEIADIERKVRNLTKAIESSDTAPDALVARISELEARKKGLQAQLKEAQHGVVPLTKESIVYFLESVRSQAIPLETQKYMLIDLFVNSVTVYDDDPDHIIIKTAYNLTSIPAKTYKVPTSKLNLCSDLGLNGPPYNTKTNSITVVGMVFVCTRRHALP

SEQ ID NO: 2037 - protein, 553 aa, Unknown
  Description of Unknown: Integrase B2038 sequence
  PTHR30461:SF3,SM00857,G3DSA:1.10.10.2600,IPR036162,PF13408, IPR025827,G3DSA:3.40.50.1390,PS51737,IPR006119,IPR038109, PF07508,SSF53041,IPR011109,PF00239,PTHR30461, PS51736,Coil,cd00338
MKKFPIDLSCLTEEEISQFQEDPYTLYNGDQNVAIYLRYSSTGQSDQSIEGQLRDCRTFCKANHYRIVAIYVDRATTARKDVEKRVHLMEMISDSAKQNWEYVIVWKLDRFARNRNDSAIMKMRLRKNGVKVLSATEHLTDSPESIILESVLEGMAEFFSAELSQKVTRGMRESALKCHSVGGHIPLGYKVENHKLVIDPDTAHIVQEAFSLYANGESVADICRKFNSAGYKTAKNTEFNRSSFKAMFRNTRYIGTYTYKDIVIENGIPAIIDKELFETVQRRLSKTATAPARGKAKVDYLLSGKLFCGHCGASMNGESGAGRHGKVYHYYSCYTKKRKLGCNKRPLKKDYIEGIVARDALNLLTDQLIDEIADMAIRQSEQDLINDTHIPQLTAQLSEVEKSITNITAAIEKGIASETLMNRLVQLEHEKKTLNKEIKSEEKFVYRIDRDQIVFWLSQFKYGNIEDEDFRRRLIDLLVNSVTVWDEPDGYKITTAYNLTSCKTKTFRVEKNPAAEEATGFDFGESECTIERISEPYIVWGTVFVQTKRHSLP

SEQ ID NO: 2038 - protein, 553 aa, Unknown
  Description of Unknown: Integrase B2039 sequence
  PTHR30461:SF3,SM00857,G3DSA:1.10.10.2600,IPR036162,PF13408, IPR025827,G3DSA:3.40.50.1390,PS51737,IPR006119,IPR038109, PF07508,IPR011109,SSF53041,PF00239,PTHR30461, PS51736,Coil,cd00338
MKKFPIDLSCLTEEEISQFQEDPYTLYNGDQNVAIYLRYSSTGQSDQSIEGQLRDCRTFCKANHYRIVAIYVDRATTARKDVEKRVHLMEMISDSAKQNWEYVIVWKLDRFARNRNDSAIMKMRLRKNGVKVLSATEHLTDSPESIILESVLEGMAEFFSAELSQKVTRGMRESALKCHSVGGHIPLGYKVENHKLVVDPDTAHIVQEAFSLYANGESVAAICRKFNSAGYKTAKNTEFNRSSFKAMFRNTRYIGTYTYKDIVIENGIPAIIDKELFETVQRRLSKTATAPARGKAKVDYLLSGKLFCGHCGASMNGESGAGRHGKVYHYYSCYTKKRKLGCDKRPLKKDYIEGIVARDALNLLTDQLIDEIADMAIRQSEQDLINDTHIPQLTAQLSEVEKSITNITAAIEKGIASETLMNRLVQLEHEKKTLNKEIKAEEKFVYRIDRDQIVFWLSQFKYGNIEDENFRRRLIDLLVNSVTVWDEPDGYKITTAYNLTSCKTKTFRVEKNPAAEEATGFDFGESECTIERISEPYIVWGTVFVQTKRHSLP

SEQ ID NO: 2039 - protein, 553 aa, Unknown
  Description of Unknown: Integrase B2040 sequence
  PTHR30461:SF3,SM00857,G3DSA:1.10.10.2600,IPR036162,PF13408, IPR025827,G3DSA:3.40.50.1390,PS51737,IPR006119,IPR038109, PF07508,IPR011109,SSF53041,PTHR30461,Coil, PS51736,cd00338,PF00239
MKKFPIDLSCLTEEEISQFQEDPYTLYNGDQEVALYLRYSSTGQSDQSIEGQLRDCRAFCKANHYRIVAIYVDRATTARKDVEKRVHLMEMVADSAKQNWEYVIVWKLDRFARNRNDSAIMKMRLRKNGVKVLSATEHLTDSPESIILESVLEGMAEFFSAELSQKVTRGMRESALKCHSVGGHIPLGYKVENHKLVVDPDTAHIVQEAFSLYANGVSVADICRKFNSAGYKTAKNTEFNRSSFKAMFRNTRYIGTYTYKDIVIENGIPAIIDKELFETVQRRLSKTATAPARGKAKVDYLLSGKLFCGHCGASMNGESGAGRHGKVYHYYSCYTKKRKLGCDKRPLKKDYIEGIVARDALNLLTDQLIDEIADMAIRQSEQDLINDTHIPQLTAQLSEVEKSITNITAAIEKGIASETLMNRLVRLEHEKKTLNKEIKAEEKFVYRIDRDQIVFWLSQFKYGNIEDEDFRRRLIDLLVNSVTVWDEPDGYKITTAYNLTSCKTKTFRVEKNPAAEEATGFDFGESECTIERISEPYIVWGTVFVQTKRHSLP

SEQ ID NO: 2040 - protein, 553 aa, Unknown
  Description of Unknown: Integrase B2041 sequence
  PTHR30461:SF3,SM00857,G3DSA:1.10.10.2600,IPR036162,PF13408, PS51737,IPR025827,G3DSA:3.40.50.1390,IPR006119,IPR038109, PF07508,IPR011109,SSF53041,PF00239,PTHR30461, PS51736,Coil,cd00338
MKKFPIDLSCLTEEEISQFQEDPYTLYNGDQDVALYLRYSSTGQSDQSIEGQLRDCRTFCKANHYRIVAIYVDRATTARKDVEKRVHLMEMVADSAKQNWEYVIVWKLDRFARNRNDSAIMKMRLRKNGVKVLSATEHLTDSPESIILESVLEGMAEFFSAELSQKVTRGMRESALKCHSVGGHIPLGYKVENHKLVVDPDTAHIVQEAFSLYANGESVADICRKFNSAGYKTAKNTEFNRSSFKAMFRNTRYIGTYTYKDIVIENGIPAIIDKELFETVQRRLSKTATAPARGKAKVDYLLSGKLFCGHCGASMNGESGAGRHGKVYHYYSCYTKKRKLGCDKRPLKKDYIEGIVARDALNLLTDQLIDEIADMAIRQSEQDLINDTHIPQLTAQLTEVEKSITNITAAIEKGIASETLMNRLVQLEHEKKTLNKEIKAEEKFVYRIDRDQIVFWLSQFKYGNIEDEDFRRRLIDLLVNSVTVWDEPDGYKITTAYNLTSCKTKTFRVEKNPAAEEATGFDFGESECTIERISEPYIVWGTVFVQTKRHSLP

SEQ ID NO: 2041 - protein, 553 aa, Unknown
  Description of Unknown: Integrase B2042 sequence
  PTHR30461:SF3,cd00338,SM00857,G3DSA:1.10.10.2600,IPR036162, PF13408,PS51737,G3DSA:3.40.50.1390,IPR025827,IPR006119, IPR038109,PF07508,IPR011109,SSF53041,PTHR30461, PS51736,Coil,PF00239
MKLPIDLSCLTEEEISQFQEDPYTLYNGDQDVALYLRYSSTGQSDQSIEGQLRDCRTFCKANHYRIVAIYVDRATTACKDVEKRVHLMEMISDSAKQNWEYVIVWKLDRFARNRNDSAIMKMRLRKNGVKVLSATEHLTDSPESIILESVLEGMAEFFSAELSQKVTRGMRESALKCHSVGGHIPLGYKVENHKLVVDPDTAHIVQEAFSLYANGESVADICRKFNSAGYKTAKNTEFNRSSFKAMFRNTRYIGTYTYKDIVIENGIPAIIDKELFETVQRRLSKTATAPARGKAKVDYLLSGKLFCGHCGASMNGESGAGRHGKVYHYYSCYTKKRKLGCDKRPLKKDYIEGIVARDALNLLTDQLIDEIADMAIRQSEQDLINDTHIPQLTAQLSEVEKSITNITAAIEKGIASETLMNRLVQLEHEKKTLNKEIKAEEKFVYRIDRAQIVFWLSQFKYGNIEDEDFRRRLIDLLVNSVTVWDEPDGYKITTAYNLTSCKTKTFRVEKNPAAEEATGFDFGESECTKSPRNRLISRTFAFHKFRFGDTAFF

SEQ ID NO: 2042 - protein, 553 aa, Unknown
  Description of Unknown: Integrase B2043 sequence
  PTHR30461:SF3,SM00857,G3DSA:1.10.10.2600,IPR036162,PF13408, IPR025827,G3DSA:3.40.50.1390,PS51737,IPR006119,IPR038109, PF07508,IPR011109,SSF53041,PF00239,PTHR30461, PS51736,Coil,cd00338
MKKFPIDLSCLTEEEISQFQEDPYTLYNGDQDVALYLRYSSTGQSDQSIEGQLRDSRAFCKANHYRIVAIYVDRATTARKDVEKRVHLMEMVADSAKQNWEYVIVWKLDRFARNRNDSAIMKMRLRKNGVKVLSATEHLTDSPESIILESVLEGMAEFFSAELSQKVTRGMRESALKCHSVGGHIPLGYKVENHKLVVDPDTAHIVQEAFSLYANGESVADICRKFNSAGYKTAKNTEFNRSSFKAMFRNTRYIGTYTYKDIVIENGIPAIIDKELFETVQQRLSKTATAPARGKAKVDYLLSGKLFCGHCGASMNGESGAGRHGKVYHYYSCYTKKRKLGCDKRPLKKDYIEGIVARDALNLLTDQLIDEIADMAIRQSEQDLINDTHIPQLTAQLSEVEKSITNITAAIEKGIASETLMNRLVQLEHEKKTISKEIKAEEKFVYRIDRDQIVFWLSQFKYGNIEDENFRRRLIDLLVNSVTVWDEPDGYKITTAYNLTSCKTKTFRVEKNPAAEEATGFDFGESECTIERISEPYIVWGTVFVQTKRHSLP

SEQ ID NO: 2043 - protein, 553 aa, Unknown
  Description of Unknown: Integrase B2044 sequence
  PTHR30461:SF3,cd00338,SM00857,G3DSA:1.10.10.2600,IPR036162, PF13408,PS51737,IPR025827,G3DSA:3.40.50.1390,IPR006119, IPR038109,PF07508,IPR011109,SSF53041,PTHR30461, PS51736,Coil,PF00239
MYEDIKTACLYVRFSSHNQTEQSIEGQTRVCRDFCKRHNIRIVEIYADRATSASKDIEKRVQFLKMIKDSEKGLFDAVIVYKLDRFARSRYDSATYKYRLKRNGVQLISATENISNDPEGIILESVLEGMAEFYSAELSQKINRGMRESAYKHNSIGGAIPLGYKIEDKKLVIDPKTAPIVKEAFEKYADGETVAEICRQFNARGYKTSKGTAFGKSSFTKIFRNERYIGVYTFHDYRAEDAIPAIIDKDLWDRVQLRVGKIKNAPARNKAKVVYLLSGKIFCGHCGSKMNGNCNAGNYCYYQCYGKKNGNVDCKKKNIRKEFIERLVAQDALSLLTDEYIEQIATIACEKNQHEIELDSALPTIRDRIHQVDLSLNHLLKAIESGSAPDMLVKRMGELEKEKKDLQAQAKKESEDIVELDKAQVIYWLEQFRGGSIEDEEFCRMLIDLFVNSVTVWDEDDNTYKVTVAYNLTSLPTKTYRLNKGGTLSDFASNAPAQQGIGNGLDTDTFLPIVQGDTVSVDVVTALMHQPPHSAVLAVIHDGDRFSLVVLHK

SEQ ID NO: 2044 - protein, 553 aa, Unknown
  Description of Unknown: Integrase B2045 sequence
  PTHR30461:SF3,SM00857,G3DSA:1.10.10.2600,IPR036162,PF13408, IPR025827,PS51737,G3DSA:3.40.50.1390,IPR006119,IPR038109, PF07508,SSF53041,IPR011109,PF00239,PTHR30461, PS51736,Coil,cd00338
MKKFPIDLSCLTEEEISQFQEDPYTFYNGDQDVALYLRYSSTGQSDQSIEGQLRDCRAFCKANHYRIVAIYVDRATTARKDVEKRVHLMEMISDSAKQNWEYVIVWKLDRFARNRNDSAIMKMRLRKNGVKVLSATEHLTDSPESIILESVLEGMAEFFSAELSQKVTRGMRESALKCHSVGGHIPLGYKVENHKLVVDPDTAHIVQEAFSLYANGESVADICRKFNSAGYKTAKNTEFNRSSFKAMFRNTRYIGTYTYKDIVIENGIPAIIDKELFETVQRRLSKTATAPARGKAKVDYLLSGKLFCGHCGASMNGESGAGRHGKVYHYYSCYTKKRKLGCDKRPLKKDYIEGIVARDALNLLTDQLIDEIADMAIRQSEQDLINDTHIPQLTAQLSEVEKSITNITAAIEKGIASETLMNRLVQLEHEKKTLNKEIKAEEKFVYRIDRDQIVFWLSQFKYGNIEDENFRRRLIDLLVNSVTVWDEPDGYKITTAYNLTSCKAKTFRVEKNPAAEEATGFDFGESECTIERISEPYIVWGTVFVQTKRHSLP

SEQ ID NO: 2045 - protein, 553 aa, Unknown
  Description of Unknown: Integrase B2046 sequence
  PTHR30461:SF3,SM00857,G3DSA:1.10.10.2600,IPR036162,PF13408, IPR025827,PS51737,G3DSA:3.40.50.1390,IPR006119,IPR038109, PF07508,SSF53041,IPR011109,PF00239,PTHR30461, PS51736,Coil,cd00338
MKKFPIDLSCLTEEEISQFQEDPYTLYNGDQDVALYLRYSSTGQSDQSIEGQLRDCRTFCKANHYRIVAIYVDRATTARKDVEKRVHLMEMISDSAKQNWEYVIVWKLDRFARNRNDSAIMKMRLRKNGVKVLSATEHLTDSPESIILESVLEGMAEFFSAELSQKVTRGMRESALKCHSVGGHIPLGYKVENHKLVVDPDTAHIVQEAFSLYANGESVADICRKFNSAGYKTAKNTEFNRSSFKAMFRNTRYIGTYTYKDIVIENGIPAIIDKELFETVQRRLSKTATAPARGKAKVDYLLSGKLFCGHCGASMNGESGAGRHGKVYHYYSCYTKKRKLGCDKRPLKKDYIEGIVARDALNLLTDQLIDEIADMAIRQSEQDLINDTHIPQLTAQLSEVEKSITNITAAIEKGIASETLMNRLVQLEHEKKTINKEIKAEEKFVYRIDRDQIVFWLSQFKYGNIEDENFRRRLIDLLVNSVTVWDEPDGYKITTAYNLTSCKTKTFRVEKNPTAEEVTGFDFGESECTIERISEPYIVRGTVFVQTKRHSLP

SEQ ID NO: 2046 - protein, 553 aa, Unknown
  Description of Unknown: Integrase B2047 sequence
  PTHR30461:SF3,SM00857,G3DSA:1.10.10.2600,IPR036162,PF13408, PS51737,IPR025827,G3DSA:3.40.50.1390,IPR006119,IPR038109, PF07508,SSF53041,IPR011109,PF00239,PTHR30461, PS51736,Coil,cd00338
MKKFPIDLSCLTEEEISQFQEDPYTLYNGDQDVALYLRYSSTGQSDQSIEGQLRDCRTFCKANHYRIVAIYVDRATTARKDVEKRVHLMEMISDSAKQNWEYVIVWKLDRFARNRNDSAIMKMRLRKNGVKVLSATEHLTDSPESIILESVLEGMAEFFSAELSQKVTRGMRESALKCHSVGGHIPLGYKVENHKLVVDPDTAHIVQEAFSLYANGESVADICRKFNSAGYKTAKNTEFNRSSFKAMFRNTRYIGTYTYKDIVIENGIPAIIDKELFEMVQRRLSKTATAPARGKAKVDYLLSGKLFCGHCGASMNGESGAGRHGKVYHYYSCYTKKRKLGCDKRPLKKDYIEGIVARDALNLLTDQLIDEIADMAIRQSEQDLINDTHIPQLTAQLSEVEKSITNITAAIEKGIASETLMNRLVQLEHEKKTLNKEIKAEEKFVYRIDRDQIVFWLSQFKYGNIEDEDFRRRLIDLLVNSVTVWDEPDGYKITTAYNLTSCKTKTFRVEKNPAAEEATGFDFGESECTIERISEPYIVWGTVFVQTKRHSLP

SEQ ID NO: 2047 - protein, 553 aa, Unknown
  Description of Unknown: Integrase B2048 sequence
  PTHR30461:SF3,cd00338,SM00857,G3DSA:1.10.10.2600,IPR036162, PF13408,IPR025827,PS51737,G3DSA:3.40.50.1390,IPR006119, IPR038109,PF07508,SSF53041,IPR011109,PTHR30461, PS51736,Coil,PF00239
MQTIPIDLSALTAQERQQFAENPSVLSSDCDAVCCLYMRYSSERQTEQSIEGQLRELIAHCKQHRYRIAAIYVDRAISAHASMEKRPSFQQMLSDSVRAPWKTVLVYKLDRFARNREDSAIARMRLRKAGCNVESAKEGISKNPEGVILEALLEGMAEYYSLELSQKITRGMRESAIKGNSLGGQIPLGYKIENKKFVIDPLTAPLVVEAFSRYGDGETAASICADFNARGYRTASGAKFNRSSFKNIFRNEKYIGVYKYKEMRQEGIIPRLVTDDAWVAVQSRLKANEAAPARGKAKVPYLLAGKIFCGHCGAPMVGECGRGKGGKIYNYYSCATRKKSRSCEKKPVPKDWIEDVVAQDALDVLTDDIIDFVASIAAQQSEDEIKKNTQIPVIRQKIAEIDSGIRNLTKAIETAAVAPDAIIMRISELEAQKKALSEQLVNEERGVIPLEKETVVTYLRAVREKAIPLETQKPMLIDMLVNSVTVYDNDPGFLTFVTAYRLSQIPAKTFRIPVSTAHGCSDMGLNALPLGANPNTIVVVGMVFVQAKKHALP

SEQ ID NO: 2048 - protein, 553 aa, Unknown
  Description of Unknown: Integrase B2049 sequence
  PTHR30461:SF3,SM00857,G3DSA:1.10.10.2600,IPR036162,PF13408, PS51737,IPR025827,G3DSA:3.40.50.1390,IPR006119,IPR038109, PF07508,IPR011109,SSF53041,PF00239,PTHR30461, PS51736,Coil,cd00338
MKKFPIDLSCLTEEEISQFQEDPYTLYNGDQDVALYLRYSSTGQSDQSIEGQLRDCRAFCKANHYRIVAIYVDRATTARKDVEKRVHLMEMVADSAKQNWEYVIVWKLDRFARNRNDSAIMKMRLRKNGVKVLSATEHLTDSPESIILESVLEGMAEFFSAELSQKVTRGMRESALKCHSVGGHIPLGYKVENHKLVVDPDTAHIVQEAFSLYANGESVADICRKFNSAGYKTAKNTEFNRSSFKAMFRNTRYIGTYTYKDIVIENGIPAIIDKELFETVQRRLSKTATAPARGKAKVDYLLSGKLFCGHCGASMNGESGAGRHGKVYHYYSCYTKKRKLGCDKRPLKKDYIEGIVARDALNLLTDQLIDEIADMAIRQSEQDLINDTHIPQLTAQLSEVEKSIMNITAAIEKGIASETLMNRLVQLEHEKKTLNKEIKAEEKFVYRIDRDQIVFWLSQFKYGNIEDEDFRRRLIDLLVNSVTVWDEPDGYKITTAYNLTSCKTKTFRVEKNPVAEEATGFDFGESECTIERISEPYIVWGTVFVQTKRHSLP

SEQ ID NO: 2049 - protein, 553 aa, Unknown
  Description of Unknown: Integrase B2050 sequence
  PTHR30461:SF3,SM00857,G3DSA:1.10.10.2600,IPR036162,PF13408, PS51737,G3DSA:3.40.50.1390,IPR025827,IPR006119,IPR038109, PF07508,IPR011109,SSF53041,PTHR30461,Coil, PS51736,cd00338,PF00239
MKKFPIDLSCLTEEEISQFQEDPYTLYNGDQNVAIYLRYSSTGQSDQSIEGQLRDCRTFCKANHYRIVAIYVDRATTARKDVEKRVHLMEMISDSAKQNWEYVIVWKLDRFARNRNDSAIMKMRLRKNGVKVLSATEHLTDSPESIILESVLEGMAEFFSAELSQKVTRGMRESALKCHSVGGHIPLGYKVENHKLVVDPDTAHIVQEAFSLYANGESVADICRKFNSAGYKTAKNTEFNRSSFKAMFRNTRYIGTYTYKDIVIENGIPAIIDKELFETVQRRLSKTATAPARGKAKVDYLLSGKLFCGHCGASMNGESGAGRHGKVYHYYSCYTKKRKLGCDKRPLKKDYIEGIVARDALNLLTDQLIDEIADMAIRQSEQDLINDTHIPQLTDQLSEVEKSITNITAAIEKGIASETLMNRLVQLEHEKKTLNKEIKAEEKFVYRIDRDQIIFWLSQFKYGNIEDEDFRRRLIDLLVNSVTVWDEPDGYKITTAYNLTSCKTKTFRVEKNLAAEEATGFDFGESECTIERISEPYIVWGTVFVQTKRHSLP

SEQ ID NO: 2050 - protein, 553 aa, Unknown
  Description of Unknown: Integrase B2051 sequence
  PTHR30461:SF3,SM00857,G3DSA:1.10.10.2600,IPR036162,PF13408, PS51737,G3DSA:3.40.50.1390,IPR025827,IPR006119,IPR038109, PF07508,SSF53041,IPR011109,PF00239,PTHR30461, PS51736,Coil,cd00338
MKEFPIDLSCLTEEEISQFQEDPYTLYNGDQNVAIYLRYSSTGQSDQSIEGQLRDCRTFCKANHYRIVAIYVDRATTARKDVEKRVHLMEMISDSAKQNWEYVIVWKLDRFARNRNDSAIMKMRLRKNGVKVLSATEHLTDSPESIILESVLEGMAEFFSAELSQKVTRGMRESALKCHSVGGHIPLGYKVENHKLVVDPDTAHIVQEAFSLYANGESVADICRKFNSAGYKTAKNTEFNRSSFKAMFRNTRYIGTYTYKDIVIENGIPAIIDKELFETVQRRLSKTATAPARGKAKVDYLLSGKLFCGHCGASMNGESGAGRHGKVYHYYSCYTKKRKLGCDKRPLKKDYIEGIVARDALNLLTDQLIDEIADMAIRQSEQDLINDTHIPQLAAQLSEVEKSIANITAAIEKGIASETLMNRLVQLEHEKKTLNKEIKAEEKFVYRIDRDQIVFWLSQFKYGNIEDEDFRRRLIDLLVNSVTVWDEPDGYKITTAYNLTSCKTKTFRVEKNPAAEEATGFDFGESECTIERISEPYIVWGTVFVQTKRHSLP

SEQ ID NO: 2051 - protein, 553 aa, Unknown
  Description of Unknown: Integrase B2052 sequence
  PTHR30461:SF3,SM00857,G3DSA:1.10.10.2600,IPR036162,PF13408, IPR025827,G3DSA:3.40.50.1390,PS51737,IPR006119,IPR038109, PF07508,SSF53041,IPR011109,PF00239,PTHR30461, PS51736,Coil,cd00338
MKEFPIDLSCLTEEEISQFQEDPYTLYNGDQNVAIYLRYSSTGQSDQSIEGQLRDCRTFCKANHYRIVAIYVDRATTARKDVEKRVHLMEMISDSAKQNWEYVIVWKLDRFARNRNDSAIMKMRLRKNGVKVLSATEHLTDSPESIILESVLEGMAEFFSAELSQKVTRGMRESALKCHSVGGHIPLGYKVENHKLVVDPDTAHIVQEAFSLYANGESVAAICRKFNSAGYKTAKNTEFNRSSFKAMFRNTRYIGTYTYKDIVIENGIPAIIDKELFETVQRRLSKTATAPARGKAKVDYLLSGKLFCGHCGASMNGESGAGRHGKVYHYYSCYTKKRKLGCDKRPLKKDYIEGIVARDALNLLSDQLIDEIADMAIRQSEQDLINDTHIPQLTAQLSEVEKSITNITAAIEKGIASETLMNRLVQLEHEKKTLNKEIKAEEKFVYRIDRDQIVFWLSQFKYGNIEDEDFRRRLIDLLVNSVTVWDEPDGYKITTAYNLTSCKTKTFRVEKNPAAEEATGFDFGESECTIERISEPYIVWGTVFVQTKRHSLP

SEQ ID NO: 2052 - protein, 553 aa, Unknown
  Description of Unknown: Integrase B2053 sequence
  PTHR30461:SF3,cd00338,SM00857,G3DSA:1.10.10.2600,IPR036162, PF13408,PS51737,G3DSA:3.40.50.1390,IPR025827,IPR006119, IPR038109,PF07508,IPR011109,SSF53041,PTHR30461, PS51736,Coil,PF00239
MKFPIDLSTLTKEEISQFEEDPFTLYNGDHDVALYLRYSSSGQSDQSIEGQLRDCRAFCKANHYRIVAIYIDRATTARKDVEKRIHLMEMIADSAKQRWDYVVVWKLDRFSRNRNDSAIMKMRLRKNGVKVLSATEHLSDNPESILLESVLEGMAEFFSAELSQKVTRGMRESALKCHSVGGHVPLGYKIENHKLVVNPDTAHIVQEAFALYANGVSVAEIARKFNAAGYKTAKNTEFNRSSFKVMFQNVRYIGTYTYKDIRIENGVPAIIDRELFDAVQRRLSKTATAPARGKAKVDYLLSGKLFCGHCGASMNGESGVGRSGKTYHYYSCYTKKRRLGCEKRPLRKDYIEEIVARSAFELLTDQLIDEIADMAIKQSEQDMVNETRIPQLTEQLSEIEKSIANITTAIEKGIASETLMNRLVQLEHEKKTINKEIKSEEKYVYRIDRDQIVFWLSQFKCGNIEDENFRRRLIDLLVNSVTVWDEPDGYKITTAYNLTSCKTKTFRVEKSPATENVTGFGFGESECAIGLKSEPYYIIYGTIFVQTKRHSLS

SEQ ID NO: 2053 - protein, 553 aa, Unknown
  Description of Unknown: Integrase B2054 sequence
  cd03768,SM00857,IPR006118,G3DSA:1.10.10.2600,IPR036162, PS51737,G3DSA:3.40.50.1390,IPR006119,IPR038109,PF07508, SSF53041,IPR011109,PTHR30461,PS00397,PS51736, Coil,PF00239
MEKSKRVVGYARVSTEAQDITRQIELITAYCSDRNYHLIKIIQEKISGARKDRKSLNELLDVDDAVADMIIVSELSRLSREDDILSVLSTINELLKQGVDILFLDKQDRIYKAGTILSLYDIITLSVEAKASADERYKIAGRMQTGLRSKLAEFSNMFAGGTVPFGYKVIHNPDYKLNQTPKNLLVVDAKEAEAVKYLFQQLIDGNTIRQTVRVYNKLYPYKLSYSGICRIIRNPKYKGEIYRRGKLYGQIPELQIITPEDFDKANKQMRENSLFQSNAPKYYNPLKGLLFCPCGCGLYMKPNHNSYLIYRCSSAYNDKQKCENYGVKCAYILSSVWTCVKETLHTEEYKRFNTQRANELQGINKQIRETITRKVNSVDELKTQSASLIAKIKKLNNDDLINELETDYNVLCKQIKQTEQEISELNGQIAENDAEIKRNVEQKDFSKMEQSALYKEKLQKAVYHSLSAMRGILEIVFKNGMTRYVLIKKHRNGGTYLLPDTFKGDMERKQIIVPSLRTDKDNPYSAQPMNLRYTFDEFFKAMPVEEYEIPITE

SEQ ID NO: 2054 - protein, 553 aa, Unknown
  Description of Unknown: Integrase B2055 sequence
  PTHR30461:SF3,IPR036162,PS51737,IPR011109,PTHR30461, PF00239,G3DSA:1.10.10.2600,IPR006119,SSF53041,cd00338, SM00857,IPR025827,IPR038109,PS51736,cd18688, PF13408,G3DSA:3.40.50.1390,PF07508,Coil
MQTIPIDLSALTPEERQQFADNPSVLSSDCEAVCCLYMRYSSDRQTEQSIEGQLRELIAYCKHHSYRVAAIYVDRAISAHASMDKRPAFQQMLSDSARSSWKTVLVYKLDRFARNREDSAIARMRLRKNGCNVESAKEGISKNPEGVILEALLEGMAEYYSLELSQKVRRGMSETARKGNSTGGTTPLGYTVVDKRLQIDPMTAHLVEEAFRRYADGDTVAEICDDFNARGYRTTRGTKFNKSSFKNVFRNEKYIGVYKFDDVRTDNAVPRIISDELWRAVQSRLKTSEQAPARGKAKVPYLLSGKIFCGHCGAPMVGECGRGKGGKTYNYYSCANRKKTHLCDKKPVPKDWLEDVVAQDALDVLTDEIIEFVAEIAAQQSEEDIQKNTQIPVIRKKISEIENKIRNLTKALECASVAPDAIVERLAELEAQKRGLSTQLSDEERGVIPLTKESVVVYLKAVREKAVPLETQKAMLIEMLVNSVTVYDDEPGFLKFVTAYRLTQIPSKTYRVPTPAVSPCSDIGRVGSPLDANPNTITVVGMVFIQTRRHALP

SEQ ID NO: 2055 - protein, 553 aa, Unknown
  Description of Unknown: Integrase B2056 sequence
  PTHR30461:SF3,SM00857,G3DSA:1.10.10.2600,IPR036162,PF13408, IPR025827,G3DSA:3.40.50.1390,PS51737,IPR006119,IPR038109, PF07508,SSF53041,IPR011109,PF00239,PTHR30461, PS51736,Coil,cd00338
MKKFPIDLSCLTEEEISQFQEDPYTLYNGDQNVAIYLRYSSTGQSDQSIEGQLRDCRTFCKANHYRIVAIYVDRATTARKDVEKRVHLMEMISDSAKQNWEYVIVWKLDRFARNRNDSAIMKMRLRKNGVKVLSATEHLTDSPESIILESVLEGMAEFFSAELSQKVTRGMRESALKCHSVGGHIPLGYKVENHKLVVDPDTAHIVQEAFSLYANGESVAAICRKFNSAGYKTAKNTEFNRSSFKAMFRNTRYIGTYTYKDIVIENGIPAIIDKELFETVQRRLSKVAEAPARGKAKVDYLLSGKLFCGHCGASMNGESGAGRHGKVYHYYSCYTKKRKLGCDKRPLKKDYIEGIVARDALNLLTDQLIDEIADMAIRQSEQDLINDTHIPQLTAQLSEVEKSITNITAAIEKGIASETLMNRLVQLEHEKKTINKEIKAEEKFVYRIDRDQIIFWLSQFKYGNIEDENFRRRLIDLLVNSVTVWDEPDGYKITTAYNLTSCKTKTFRVEKNPAAEEATGFDFGESECTIERISEPYIVWGTVFVQTKRHSLP

SEQ ID NO: 2056 - protein, 553 aa, Unknown
  Description of Unknown: Integrase B2057 sequence
  PTHR30461:SF3,SM00857,G3DSA:1.10.10.2600,IPR036162,PF13408, PS51737,IPR025827,G3DSA:3.40.50.1390,IPR006119,IPR038109, PF07508,IPR011109,SSF53041,PF00239,PTHR30461, PS51736,Coil,cd00338
MKKFPIDLSCLTEEEISQFQENPYTLYNGDQDVALYLRYSSTGQSDQSIEGQLRDCRTFCKANHYRIVAIYVDRATTARKDVEKRVHLMEMVADSAKQNWEYVIVWKLDRFARNRNDSAIMKMRLRKNGVKVLSATEHLTDSPESIILESVLEGMAEFFSAELSQKVTRGMRESALKCHSVGGHIPLGYKVENHKLVVDPDTAHIVQEAFSLYANGESVADICRKFNSAGYKTAKNTEFNRSSFKAMFRNTRYIGTYTYKDIVIENGIPAIIDKELFETVQRRLSKTATAPARGKAKVDYLLSGKLFCGHCGASMNGESGAGRHGKVYHYYSCYTKKRKLGCDKRPLKKDYIEGIVARDALNLLTDQLIDEIADMAIRQSEQDLINDTHIPQLTAQLSEVEKSITNITAAIEKGIASETLMNRLVQLEHEKKTLNKEIKAEEKFVYRIDRDQIVFWLSQFKYGNIEDEDFRRRLIDLLVNSVTVWDEPDGYKITTAYNLTSCKTKTFRVEKNPAAEEATGFDFGESECTIERISEPYIVWGKVFVQTKRHSLP

SEQ ID NO: 2057 - protein, 553 aa, Unknown
  Description of Unknown: Integrase B2058 sequence
  PTHR30461:SF3,SM00857,G3DSA:1.10.10.2600,IPR036162,PF13408, IPR025827,G3DSA:3.40.50.1390,PS51737,IPR006119,IPR038109, PF07508,IPR011109,SSF53041,PF00239,PTHR30461, PS51736,Coil,cd00338
MQMIPIDLSALTASEQQQFTENPSVLSTDCDVVCCLYMRYSSDRQTEQSIEGQLRELLTFCQQHRYRVAAIYVDRAISAHASMEKRPAFQQMLSDSSRAAWKTVLVYKLDRFARNREDAAVARMRLRKNGCNVESAKEGISKNPEGVILESILEGMAEYYSLELSQKITRGMRESALKGQAVGGSVPLGYKIEKKKWVLDPLTAPLVSEAFTRYADGETVADICADFNARGYRTAKGAQFNKSSFKNIFRNEKYIGVYKYHDIRMEDALPRVVEDDVWRKVQSRLKVNEQAPARGKAKVPYLLAGKIFCGHCGSPMVGECGRGKGGKTYNYYSCANRKRNGGCDKKPAPKDWIEDVVAHDALKVLTDEVIEYVATVAAQQSENEIQQNTNIPALQAQIAETDRKIKNLLKALEAASTAPDVLVARIADLESQKKGLTAQLSEEKQSVIPLTKEMVIYFLESVRSQVLDLETQKPMLFSLLINSVTVYDDEPGYMKFKTAYNLTQIPTKTYRVPTSGICKCSDMGLISSPLDTYPNTIAVVGMVFVQTKIHALP

SEQ ID NO: 2058 - protein, 553 aa, Unknown
  Description of Unknown: Integrase B2059 sequence
  PTHR30461:SF3,SM00857,G3DSA:1.10.10.2600,IPR036162,PF13408, PS51737,G3DSA:3.40.50.1390,IPR025827,IPR006119,IPR038109, PF07508,IPR011109,SSF53041,PTHR30461,Coil, PS51736,cd00338,PF00239
MKKFPIDLSCLTEEEISQFQEDPYTLYNGDQDVALYLRYSSTGQSDQSIEGQLRDCRTFCKANHYRIVAIYVDRATTARKDVEKRVHLMEMVADSAKQNWEYVIVWKLDRFARNRNDSAIMKMRLRKNGVKVLSATEHLTDSPESIILESVLEGMAEFFSAELSQKVTRGMRESALKCHSVGGHIPLGYKVENHKLVVDPDTAHIVHEAFSLYANGESVADICRKFNSAGYKTAKNTEFNRSSFKAMFRNTRYIGTYTYKDIVIENGIPAIIDKELFETVQRRLSKTATAPARGKAKVDYLLSGKLFCGHCGASMNGESGAGRHGKVYHYYSCYTKKRKLGCDKRPLKKDYIEGIVARDALNLLTNQLIDEIADMAIRQSEQDLINDTHIPQLTAQLSEVEKSITNITAAIEKGIASETLMNRLVQLEHEKKTINKEIKAEEKFVYRIDRDQIVFWLSQFKYGNIEDENFRRRLIDLLVNSVTVWDEPDGYKITTAYNLTSCKTKTFRVEKNPAAEEATGFDFGESECTIERISEPYIVWGTVFVQTKRHSLP

SEQ ID NO: 2059 - protein, 553 aa, Unknown
  Description of Unknown: Integrase B2060 sequence
  cd03768,PTHR30461:SF3,SM00857,G3DSA:1.10.10.2600,IPR036162, PF13408,IPR025827,G3DSA:3.40.50.1390,PS51737,IPR006119, IPR038109,PF07508,IPR011109,SSF53041,PTHR30461, PS51736,Coil,PF00239
MNSNIAIYSRKSKFTGKGESIENQILKCKKFIEFKFNINPELITEDNIFIDEDYTGRNENRPRFQDMRNKILTGDIKHVVIYQLNRFGRNARDIHNSMAMCEEHNCVMYSATEGFDTSTSFGRAVMGILASLAQLETEQLAERVKDNMYTLAKMGRWLGGQAPLGFDGSKDYYIDEQGKERSITKLKENKEELSLVKSIYDKYIEKKSLSQVSKWSLSHNLKGKNGGNLDKSAINAILQNPVYVKSNNDVMQRLANEGFDVCGSANGNGLLRYGKEDVIMAVSNHKGIIEADLWLKVQDILKANKSKAPRLGKTNTALLTGILKCNCGSPMRVAYGGIKKDGTRSFYYTCVMKNNSGGTRCNSKNISGPIIEEKLITYLRLYDVNVLIKELESTLSETSKINSEFSTDKIDLDIEKCNKSINNLLSKLKLIDDIDVSKILLDEIANEKNKLNELNEKRESLLNSQAKISLVQMDISCIINKLNKFNAAFDSLSLEQKQEQLKDLLETIIYRDGKFELTFNKKKLDNANSILSSVITDNKLSQFSVPSFCMSYK

SEQ ID NO: 2060 - protein, 553 aa, Unknown
  Description of Unknown: Integrase B2061 sequence
  PTHR30461:SF3,SM00857,G3DSA:1.10.10.2600,IPR036162,PF13408, PS51737,G3DSA:3.40.50.1390,IPR025827,IPR006119,IPR038109, PF07508,SSF53041,IPR011109,PF00239,PTHR30461, PS51736,Coil,cd00338
MKKFPIDLSCLTEEEISQFQEDPYTLYNGDQEVALYLRYSSTGQSDQSIEGQLRDCRAFCKANHYRIVAIYVDRATTARKDVEKRVHLMEMVADSAKQNWEYVIVWKLDRFARNRNDSAIMKMRLRKNGVKVLSATEHLTDSPESIILESVLEGMAEFFSAELSQKVTRGMRESALKCHSVGGHIPLGYKVENHKLVVDPDTAHIVQEAFSLYANGESVADICRKFNSAGYKTAKNTEFNRSSFKAMFRNTRYIGTYTYKDIVIENGIPAIIDKELFETVQRRLSKTATAPARGKAKVDYLLSGKLFCGHCGASMNGESGAGRHGKVYHYYSCYTKKRKLGCDKRPLKKDYIEGIVARDALNLLTDQLIDEIADMAIRQSEQDLINDTHIPQLTAQLSEVEKSITNITAAIEKGIASETLMNRLVQLEYEKKTLNKEIKAEEKFVYRIDRDQIVFWLSQFKYGNIEDEDFRRRLIDLLVNSVTVWDEPDGYKITTAYNLTSCKTKTFRVEKNPAAEEATGFDFGESECTIERISEPYIVWGTVFVQTKRHSLP

SEQ ID NO: 2061 - protein, 553 aa, Unknown
  Description of Unknown: Integrase B2062 sequence
  PTHR30461:SF3,SM00857,G3DSA:1.10.10.2600,IPR036162,PF13408, PS51737,G3DSA:3.40.50.1390,IPR025827,IPR006119,IPR038109, PF07508,IPR011109,SSF53041,PF00239,PTHR30461, PS51736,Coil,cd00338
MQTIPIDLSALTAQERQQFAENPSVLSSDCDAVCCLYLRYSSERQTEQSIEGQLRELIAHCKQHRYRIAAIYVDRAISAHASMEKRPSFQQMLSDSVRAPWKTVLVYKLDRFARNREDSAIARMRLRKAGCNVESAKEGISKNPEGVILEALLEGMAEYYSLELSQKITRGMRESAIKGNSLGGQIPLGYKIENKKFVIDPLTAPLVVEAFSRYGDGETAASICADFNARGYRTASGAKFNRSSFKNIFRNEKYIGVYKYKEMRQEGIIPRLITDDAWIAVQSRLKANEAAPARGKAKAAYLLAGKIFCGHCGAPMVGECGRGKGGKIYNYYSCATRKKSRSCEKKPVSKDWIEDVVAQDALNVLTDDIIDFVASIAAQQSEDEIKKNTQIPVIRQKIAEIDSGIRNLTKAIETAAVAPDAIIMRISELEAQKKALSEQLVNEERGVIPLEKETVVTYLRAVREKAIPLETQKPMLIDMLVNSVTVYDNDPGFLTFVTAYRLSQIPAKTFRIPVSHAPGCSDMGLNALPLGVNPNTIVVVGMVFVQTKKHALP

SEQ ID NO: 2062 - protein, 553 aa, Unknown
  Description of Unknown: Integrase B2063 sequence
  PTHR30461:SF3,cd00338,SM00857,G3DSA:1.10.10.2600,IPR036162, PF13408,IPR025827,G3DSA:3.40.50.1390,PS51737,IPR006119, IPR038109,PF07508,IPR011109,SSF53041,PTHR30461, PS51736,Coil,PF00239
MQTIPIDLSALTLEERQQFADNPSVLSSDCEAVCCLYMRYSSDRQTEQSIEGQLRELIAYCKHHSYRVAAIYVDRAISAHASMDKRPAFQQMLSDSARSSWKTVLVYKLDRFARNREDSAIARMRLRKNGCNVESAKEGISKNPEGVILEALLEGMAEYYSLELSQKITRGMRESAIKGNCLGGQIPLGYKIENKKYVIDPLTAPLVKEAFSRYGDGETAASICADFNARGYRTASGAEFNKSSFKNIFRNEKYIGVYKYKEMRREGIIPRIIADDAWIAVQSRLKDNEAAPARGKAKVAYLLAGKIFCGHCGAPMTGECGRGKSGKMYNYYSCATRKHHNSCEKKPVPKDWLEDVVAQDALDVLTDEIIEFVAEVAAQQSEEDIQKNTQIPVIRKKISEIENKIHNLTKALECASVAPDAIVERLAELEAQKKGLATQLSDEERGVVPLTKESVVVYLKAVRENAVPLETQKAMLIDMLVNSVTVYDDEPGFLKLIYAYRLTQIPARTYRVPISEKVPCSDFRTQPAPLDANPNTITVVGMVFIQTKRHALP

SEQ ID NO: 2063 - protein, 553 aa, Unknown
  Description of Unknown: Integrase B2064 sequence
  PTHR30461:SF3,SM00857,G3DSA:1.10.10.2600,IPR036162,PF13408, IPR025827,G3DSA:3.40.50.1390,PS51737,IPR006119,IPR038109, PF07508,SSF53041,IPR011109,PF00239,PTHR30461, PS51736,Coil,cd00338
MQTIPIDLSALTPEERQQFADNPSVLSSDCEAVCCLYMRYSSDRQTEQSIEGQLRELIAYCKHHSYRVAAIYVDRAISAHASMDKRPAFQQMLADSARSSWKTVLVYKLDRFARNREDSAIARMRLRKNGCNVESAKEGISKNPEGVILEALLEGMAEYYSLELSQKITRGMRESAIKGNCLGGQIPLGYKIENKKYVIDPLTAPLVKEAFSRYGDGETAASICADFNARGYRTASGAEFNKSSFKNIFRNEKYIGVYKYKEMRREGIIPRIIADDAWIAVQSRLKVNESAPARGKAKVAYLLAGKIFCGHCGAPMTGECGRGKSGKMYNYYSCATRKHHNSCEKKPVPKDWLEDVVAQDALDVLTDEIIEFVAEIAAQQSEEDIQKNTQIPVIRKKISEIENKIRNLTKALECASVAPDAIVERLAELEAQKKGLSTQLSDEERGVIPLTKESVVVYLKAVREKAVPLETQKAMLIEMLVNSVTVYDDEPGFLKLVYAYRLTQIPTRTYRVPIPAKVPCSDFRTQPAPLDANPNTITVVGMVFIQTRRHALP

SEQ ID NO: 2064 - protein, 553 aa, Unknown
  Description of Unknown: Integrase B2065 sequence
  SM00857,G3DSA:1.10.10.2600,IPR036162,PF13408,IPR025827, G3DSA:3.40.50.1390,PS51737,IPR006119,IPR038109,PF07508, IPR011109,SSF53041,PF00239,PTHR30461,PS51736, Coil,cd00338
MKKFPIDLSCLTEEEISQFQEDPYTLYNGDQDVALYLRYSSTGQSDQSIEGQLRDCRAFCKANHYRIVAIYVDRATTARKDVEKRVHLMEMVADSAKQNWEYVIVWKLDRFARNRNDSAIMKMRLRKNGVKVLSATEHLTDSPESIILESVLEGMAEFFSAELSQKVTRGMRESALKCHSVGGHIPLGYKVENHKLVVDPDTAHIVQEAFSLYANGESVADICRKFNSAGYKTAKNTEFNRSSFKAMFRNTRYIGTYTYKDIVIENGIPAIIDKELFETVQRRLSKTATAPARGKAKVDYLLSGKLFCGHCGASMNGESGAGRHGKVYHYYSCYTKKRKLGCDKRPLKKDYIEGIVARDALNLLTDQLIDEIADMAIRQSEQDLINDTHIPQLTAQLTEVEKSIINITAAIEKGIASETLMNRLVQLEHEKKTLNKEIKAEEKFVYRIDRDQIVFWLSQFKYGNIEDEDFRRRLIDLLVNSVTVWDEPDGYKITTAYNLTSCKTKTFRVEKNPAAEEATGFDFGESECTIERISEPYIVWGTVFVQTKRHSLP

SEQ ID NO: 2065 - protein, 553 aa, Unknown
  Description of Unknown: Integrase B2066 sequence
  PTHR30461:SF3,cd00338,SM00857,G3DSA:1.10.10.2600,IPR036162, PF13408,IPR025827,PS51737,G3DSA:3.40.50.1390,IPR006119, IPR038109,PF07508,SSF53041,IPR011109,PTHR30461, PS51736,Coil,PF00239
MQTIPIDLSALTPEERQQFADNPSVLSSDCEAVCCLYMRYSSDRQTEQSIEGQLRELIAYCKHHSYRVAAIYVDRAISAHASMDKRPAFQQMLSDSARSSWKTVLVYKLDRFARNREDSAIARMRLRKNGCNVESAKEGISKNPEGVILEALLEGMAEYYSLELSQKVRRGMSETARKGNSTGGTTPLGYTVVDKRLQIDPITSHLVEEAFRRYADGDTVAAICDDFNARGYRTTRGTKFNKSSFKNVFRNEKYIGVYKFDDVRTDNAVPRIISDELWRAVQSRLKTSEQAPARGKAKVPYLLSGKIFCGHCGAPMVGECGRGKGGKTYNYYSCANRKKTRLCDKKPVPKDWLEDVVAQDALDVLTDEIIEFVAEVAAQQSEEDIQKNTQIPVIRKKISEIEIKIRNLTKALECAPVAPDAIVERLAELEAQKKGLSTQLSDEERGVIPLTKESVVVYLKAVREKAVPLETQKAMLIEMLVNSVTVYDDEPGFLKFVTAYRLTQIPSKTYRVPTPAASSCSDIGRVGSPLDANPNTITVVGMVFIQTKRHALP

SEQ ID NO: 2066 - protein, 553 aa, Unknown
  Description of Unknown: Integrase B2067 sequence
  cd03768,SM00857,IPR006118,G3DSA:1.10.10.2600,IPR036162, PS51737,G3DSA:3.40.50.1390,IPR006119,IPR038109,PF07508, IPR011109,SSF53041,PTHR30461,PS00397,PS51736, Coil,PF00239
MEKSKRVVGYARVSTEAQDITRQIELITAYCNDRNYHLIKIIQEKISGARKDRKSLNELLEVDDTVADMIIVSELSRLSREDDILSVLSTINELLKQGVDILFLDKQDRIYKAGTVLSLYDIITLSVEAKASADERYKIAGRMQTGLRSKLAEFTNMFAGGTVPFGYKIIHNPEYKLNQTPKNLLIVDTPKAEAVKYLFQQLIDGNTIRQTVRVYNKLFPYKLSYSGICRIIRNPKYKGEIYRRGKLYGIMNELQIITPEDFDKANKQMRENSLFQSNAPKYYNPLKGLLFCPCGCSLYMKPNHNSYLIYRCSSAYNEKQKCENYGVKCAYILSSVWICVKETLHTEEYKRFNTQRANELQGVNKQIRETIIRKVNSVDELKAQSASLIAKIKKLNNEDLISELETDYNVLCKQIKQTEQEISELNGQIVENDAEIKRNMEQKDFSKMEQSALYKEKLQKAVYHSLSAMRGFLEIIFKNGMTRYVLIKKHRNGGAYLLPDTFKGDMERKQIIVPSLRIDKNNPYSTQPINLRYTFDEFFKAMPVEEYQIPITE

SEQ ID NO: 2067 - protein, 553 aa, Unknown
  Description of Unknown: Integrase B2068 sequence
  PTHR30461:SF3,SM00857,G3DSA:1.10.10.2600,IPR036162,PF13408, PS51737,G3DSA:3.40.50.1390,IPR025827,IPR006119,IPR038109, PF07508,SSF53041,IPR011109,PF00239,PTHR30461, PS51736,Coil,cd00338
MKKFPIDLSCLTEEEISQFQEDPYTLYNGDQEVALYLRYSSTGQSDQSIEGQLRDCRAFCKANHYRIVAIYIDRATTARKDVEKRVHLMEMVADSAKQNWEYVIVWKLDRFARNRNDSAIMKMRLRKNGVKVLSATEHLTDSPESIILESVLEGMAEFFSAELSQKVTRGMRESALKCHSVGGHIPLGYKVENHKLVVDPDTAHIVQEAFSLYANGESVADICRKFNSAGYKTAKNTEFNRSSFKAMFRNTRYIGTYTYKDIVIENGIPAIIDKELFETVQRRLSKTATAPARGKAKVDYLLSGKLFCGHCGASMNGESGAGRHGKVYHYYSCYTKKRKLGCDKRPLKKDYIEGIVARDALNLLTDQLIDEIADMAIRQSEQDLINDTHIPQLTAQLTEVEKSITNITAAIEKGIASETLMNRLVQLEHEKKTLNKEIKAEEKFVYRIDRDQIVFWLSQFKYGNIEDEDFRRRLIDLLVNSVTVWDEPDGYKITTAYNLTSCKTKTFRVEKNPAAEEATGFDFGESECTIERISEPYIVWGTVFVQTKRHSLP

SEQ ID NO: 2068 - protein, 553 aa, Unknown
  Description of Unknown: Integrase B2069 sequence
  PTHR30461:SF3,SM00857,G3DSA:1.10.10.2600,IPR036162,PF13408, IPR025827,G3DSA:3.40.50.1390,PS51737,IPR006119,IPR038109, PF07508,IPR011109,SSF53041,PF00239,PTHR30461, PS51736,Coil,cd00338
MKKFPIDLSCLTEEEISQFQEDPYTLYNGDQEVALYLRYSSTGQSDQSIEGQLRDCRAFCKANHYRIVAIYVDRATTARKDVEKRLHLMEMISDSAKQNWEYVIVWKLDRFARNRNDSAIMKMRLRKNGVKVLSATEHLTDSPESIILESVLEGMAEFFSAELSQKVTRGMRESALKCHSVGGHIPLGYKVENHKLVVDPDTAHIVQEAFSLYANGESVADICRKFNSAGYKTAKNTEFNRSSFKAMFRNTRYIGTYTYKDIVIENGIPAIIDKELFETVQRRLSKTATAPARGKAKVDYLLSGKLFCGHCGASMNGESGAGRHGKVYHYYSCYTKKRKLGCDKRPLKKDYIEGIVARDALNLLTDQLIDEIADMAIRQSEQDLINDTHIPQLTAQLSEVEKSITNITAAIEKGIASETLMNRLVQLEHEKKTLNKEIKAEEKFVYRIDRDQIIFWLSQFKYGNIEDEDFRRRLIDLLVNSVTVWDEPDGYKITTAYNLTSCKTKTFRVEKNPAAEEATGFDFGESECTIERISEPYIVWGTVFVQTKRHSLP

SEQ ID NO: 2069 - protein, 552 aa, Unknown
  Description of Unknown: Integrase B2070 sequence
  PTHR30461:SF3,SM00857,G3DSA:1.10.10.2600,IPR036162,PF13408, PS51737,G3DSA:3.40.50.1390,IPR025827,IPR006119,IPR038109, PF07508,IPR011109,SSF53041,PF00239,PTHR30461, PS51736,Coil,cd00338
MKSPIDLSCLTEEEISQFQEDPYTLYNGDQNVAIYLRYSSTGQSDQSIEGQLRDCRTFCKANRYRIVAIYVDRATTARKDVEKRVHLMEMVADSAKQNWEYVIVWKLDRFARNRNDSAIMKMRLRKNGVKVLSATEHLTDSPESIILESVLEGMAEFFSAELSQKVTRGMRESALKCHSVGGHIPLGYKVENHKLVVDPDTAHIVQEAFSLYANGESVAGICRKFNSAGYKTAKNTEFNRSSFKAMFRNTRYIGTYTYKDIVIENGIPAIIDNELFETVQRRLSKTATAPARGKAKVDYLLSGKLFCGHCGASMNGESGAGRHGKVYHYYSCYMKKRKLGCDKRPLKKDYIEGIVARDALNLLTDQLIDEIADMAIRQSEQDLINDTHIPQLTAQLSEVEKSITNITAAIEKGIASETLMNRLVQLEHEKKTLNKEIKAEEKFVYRIDRDQIVFWLSQFKYGNIEDEDFRRRLIDLLVNSVTVWDEPDGYKITTAYNLTSCKTKTFRVEKNPAAEEATGFDFGESECTIERISEPYIVWGTVFVQTKRHSLP

SEQ ID NO: 2070 - protein, 552 aa, Unknown
  Description of Unknown: Integrase B2071 sequence
  cd03768,PTHR30461:SF3,SM00857,G3DSA:1.10.10.2600,IPR036162, PS51737,G3DSA:3.40.50.1390,IPR006119,IPR038109,PF07508, IPR011109,SSF53041,PTHR30461,PS51736,Coil, PF00239
MEHRPAFQQMLTDMRAGKINYIVAYKLDRVTRSVRDLEVLISDLEKHNCYLVCDRDDVNTSTANGRFFVRMLTVLSQLEIEIVSERTKFGLTGAIKSGHIPNRCPLGYKREGKKMIIDETTKDLVIRIFNMYLEGKSYQTIANILNEERVPTSTKANWKDSTIEKMINNKIYMGDYERFKRVGKEQGKEPVIYRDVVEPIISRAMFDEVQAQKEKNQRAFCRDRVYIFMQKLICPKCGKLMTCKGAGGKKKKYMYYHCTDCKLYLREDLIEDVTIDLIMNLIEYDMTVKQYFFPVLADKKERDTAKLDKEIANLKKQKDRIKEAYIKGIVEVNDFSEEYRVIKEKLNLLEEKRIQAIDLNKQTFSPQQIMADRDVEKEKLIRSNEFYNMLMLQWSNKTKEEKQEFISKFIENITIDKNEKGSYELVNIKFRSSFIEQICKILEYGMFDFASPCTIGKEESTITTTVQMDKKELQEYMNRLSDYYEVSYYELDRPDAPKKGYQKKYYRMQYKNEKGERLFKLVELIANDKSFPIQKDNHIIGEIRVKEREKVS

SEQ ID NO: 2071 - protein, 552 aa, Unknown
  Description of Unknown: Integrase B2072 sequence
  SM00857,G3DSA:1.10.10.2600,IPR036162,PF13408,IPR025827, G3DSA:3.40.50.1390,PS51737,IPR006119,IPR038109,PF07508, SSF53041,IPR011109,PTHR30461,Coil,cd00338, PF00239
MAYRKITDIKDTIGMRAVFYARVSTAEEEQLNAIELQIEENRGCIKDHGWKLVGEYIDRSKSGTMVKGRDDYQRLYEDLYEDLFDIVVIKDQERLQRNTLDWYLFINRVVQTGKLLFMYMDGKFYSPDDALITGVRAIIAEEFSRNLSKKLHNYHDHRIEKARQGQEIALQGSGNVYGWDKKDGKYYINPEQAKVRRLMCEGIMARKGSTLIAKELNDAGYRNTVGKPWKPMDIPKFVYDCKNVGTMIINKERHDFESKQTIKLPKEEWVYVENALPPIVTQEEWDLICKIHEERVIATGSDRRGKKTSGYSFSGKLVCGICGAPYWRKQRVSKDEYWVCSTKQTKGRRTRKRDSTMGKAGEINPLGCDNENISYNSLMEIMGVVSERLQANTDTIKHDMINWLTKLRKQLLEANGGHTEADLQRELSRKSKLLDAYLDGILNKQEYQKKAEELDERIIQLKAETEKNKANSGDIAEIDKVLANIDEEVSRYVDGNEKLKVEYLLEHLEQVQIFPDKVIVIVPILSEGIVVEKTQYVSREKWLGEKYNNNFF

SEQ ID NO: 2072 - protein, 552 aa, Unknown
  Description of Unknown: Integrase B2073 sequence
  PTHR30461:SF3,IPR036162,PS51737,IPR011109,PTHR30461, PF00239,G3DSA:1.10.10.2600,IPR006119,SSF53041,cd00338, SM00857,IPR025827,IPR038109,PS51736,mobidb-lite, PF13408,G3DSA:3.40.50.1390,PF07508,Coil
MGKKQKTNGGDAVIYARYSSHNQRDVSIEQQVEACRKHAAELGLTVTATYEDRAISGKTDKRPSFQRMMRDAEQHKFAYVLAWKSNRIGRNMMQALVNESRLVDCGVKVFYAEEDFDDNAAGRFALRSMMNVNQFYIENMAEDVKRGLYDNAKKGLVNGSLPLGYKRGADGKPEIDEPKAAIVREIYTRVAAGELFASIAADLNARGIRTARGREWNKGSFHVLCHNDRYRGIYMYGDIRIPGGMPRIISDELFYDAQEAYGMKKDNRYGRARHGAENYLLTGKLYCGHCGSYMVGISGTSKTGEMHYYYACQKHRLEHTCEKKAIRRDVIENAVARVIMMYCLDDETIDFIVDSTIAYFKQKDHELHIEAMENELAAVQQAISNLMKAIEAGIITPTTRTRLLDLEEQQAKLSAKINTAKAERVEIDRDDLIAGLQLFRTGDIKNKKFLAKLFNTFLLAVYLYDDNRLKIVFSFTGNHNNIEIPLELDNDCPDSESGPYETEVRMSHLECRKNSGTPPSSGGAEKGDGCSGGRFVRTAPLPPHKKTPQAYA

SEQ ID NO: 2073 - protein, 552 aa, Unknown
  Description of Unknown: Integrase B2074 sequence
  PTHR30461:SF3,IPR036162,PS51737,IPR011109,PTHR30461, PS00397,PF00239,G3DSA:1.10.10.2600,IPR006119,SSF53041, SM00857,IPR025827,IPR038109,PS51736,cd03768, IPR006118,PF13408,G3DSA:3.40.50.1390,PF07508,Coil
MNKKSAIYVRVSTSHQIDKDSLPLQRKDLINYSKLILGIDNYVVFEDAGYSGKNTDRPAFKDMFNRIKEGEFSHLLVWKIDRISRNLLDFCSMYDELKKYNCTFISKNEQFDTSSAMGEAMLKIILVFAELERKLTGERVAATMLDRATKGLWNGAPIPLGYKWDKIIKFPIIDDEERLTVELIYNKYLETESTSAVMKYLNQENIKTKRNGSWTTKTVGDILRNPFYKGTYRYNFRESARGKKKKENEWIVLDNNHDPIIALDLWTKCNNILDENAKKNSARFRAKSKTHIFAGLLECGECHKSFYSKSDKTSLDGYTPSIYTCSSRYNHLGCNQKTISDTIIGNFTLNFISNMIKLSKTYKKLSPEDIEKNLLSGYSFNDVKGIIEIDDIFNSFYNTSSKTFAPTKQKISKPSDIDLNKLDADLKKQHRALERLENLYLYDEKEMSEKDYILKKNIINTKIKEIDAKIKSSATISTSTYNINFFLNTATLELSKEIIEGNINMKSLIQRVGRDIIKEFVNSLITKITVRDRKVISIQFTNGLISTFIYEV

SEQ ID NO: 2074 - protein, 552 aa, Unknown
  Description of Unknown: Integrase B2075 sequence
  cd03768,PTHR30461:SF3,SM00857,G3DSA:1.10.10.2600,IPR036162, PS51737,G3DSA:3.40.50.1390,IPR006119,IPR038109,PF07508, IPR011109,SSF53041,PTHR30461,PS51736,Coil, PF00239
MEHRPAFQQMLTDMRAGKINYIVAYKLDRVTRSVRDLEVLISDLEKHNCYLVCDRDDVNTSTANGRFFVRMLTVLSQLEIEIVSERTKFGLTGAIKSGHIPNRCPLGYKREGKKMIIDETTKDLVIRIFNMYLEGKSYQTIANILNEERVPTSTKANWKDSTIEKMINNKIYMGDYERFKRVGKEQGKEPVIYRDVVEPIISRAMFDEVQAQKEKKQRAFCRDRVYIFMQKLICPKCGKLMTCKGAGGKKKKYMYYHCTDCKLYLREDLIEDVTIDLIMNLIEYDMTVKQYFFPVLADKKERDTAKLDKEIANLKKQKDRIKEAYIKGIVEVNDFSEEYRVIKEKLNLLEEKRIQAIDLNKQTFSPQQIMDDRDVEKEKLIRSNEFYNMLMLQWSNKTKEEKQEFISKFIENITIDKNEKGSYELVNIKFRSSFIEQICKILEYGMFDFASPCTIGKEESTITTTVQMDKKELQEYMNRLSDYYEVSYYELDRPDAPKKGYQKKYYRMQYKNEKGERLFKLVELIANDKSFPIQKDNHIIGEIRVKEREKVS

SEQ ID NO: 2075 - protein, 552 aa, Unknown
  Description of Unknown: Integrase B2076 sequence
  PTHR30461:SF3,cd00338,SM00857,G3DSA:1.10.10.2600,IPR036162, PF13408,PS51737,IPR025827,G3DSA:3.40.50.1390,IPR006119, IPR038109,PF07508,IPR011109,SSF53041,PTHR30461, PS51736,Coil,PF00239
MKYPIDLSCLTEEEISQFQEDPYTLYNGDQDVALYLRYSSTGQSDQSIEGQLRDCRAFCKANHYRIVAIYVDRATTARKDVEKRVHLMEMVADSAKQNWEYVIVWKLDRFARNRNDSAIMKMRLRKNGVKVLSATEHLTDSPESIILESVLEGMAEFFSAELSQKVTRGMRESALKCHSVGGHIPLGYKVENHKLVVNPDTAHIVQEAFSLYANGESVADICRKFNSAGYKTAKNTEFNRSSFKAMFRNTRYIGTYTYKDIVIENGIPAIIDKELFETVQRRLSKTATAPARGKAKVDYLLSGKLFCGHCGASMNGESGAGRHGKVYHYYSCYTKKRKLGCDKRPLKKDYIEGIVARDALNLLTDQLIDEIADMAIRQSEQDLINDTHIPQLTAQLSEVEKSITNITAAIEKGIASETLMNRLVQLEHEKKTLNKEIKAEEKFVYRIDRDQIVFWLSQFKYGNIEDEDFRRRLIDLLVNSVTVWDEPDGYKITTAYNLTSCKTKTFRVEKNPAAKEATGFDFGESECTIERISEPYIVWGTVFVQTKRHSLP

SEQ ID NO: 2076 - protein, 552 aa, Unknown
  Description of Unknown: Integrase B2077 sequence
  cd00338,SM00857,G3DSA:1.10.10.2600,IPR036162,PF13408, IPR025827,PS51737,G3DSA:3.40.50.1390,IPR006119,IPR038109, PF07508,IPR011109,SSF53041,PTHR30461,PS51736, Coil,PF00239
MTHGAYILARYSTENQSEASIEVQVDRCTEWCNQHSIPVLDVFADRAISGMKETRPEYQRMMQQLYSGGADTVVIYDQSRMFRNMVYWFQFRETLQRIGVHVVSVTQPTVGGDLSDPAVFLNEGVTALFNQMWVLQTQQKVREGVRQRAKSGKHTGGIPALGYRVENERLVVDESEAETVRLIFGLYAAGQSYIDIIAELNRRGLKTKRGNAFGKNSIHDLLKNEKYVGRALFGGKPVSYDGTRNAHAARGEHLEVACPSIVSEELFDAVQARLAANKHQNTGKRVTAVEQPLKGKIFCGTCGGAMTIHYKYPARGGERYEYYKCATKQRGKGCSGMSIRKDELEDTVANAVLAMLGAPKSRDKLLSVLRDQRDNIIKTSAPKLKELQAEYDSLASQIEKALDAVMAGLTSPALIERTNALESKKAQVAEEIALLKSNVEHSSLRDEQLAPLLDKLIKSAKENPTAILAAVLRVEVYPDTIKIWTIFDDGPAPGDGPITKSNVASLVKSPDTGKWSLGTFMGTASGVPSNVPNIFVVAAFSVLREHKNKERV

SEQ ID NO: 2077 - protein, 552 aa, Unknown
  Description of Unknown: Integrase B2078 sequence
  PTHR30461:SF3,IPR036162,PS51737,IPR011109,PTHR30461, PF00239,G3DSA:1.10.10.2600,IPR006119,SSF53041,cd00338, SM00857,IPR025827,IPR038109,PS51736,mobidb-lite, PF13408,G3DSA:3.40.50.1390,PF07508,Coil
MGKKQKTNGGDAVIYARYSSHNQRDVSIEQQVEACRKHAAELGLTVTATYEDRAISGKTDKRPSFQRMMRDAEQHKFAYVLAWKSNRIGRNMMQALVNESRLVDCGVKVFYAEEDFDDNAAGRFALRSMMNVNQFYIENMAEDVKRGLYDNAKKGLVNGSLPLGYKRGADGKPEIDEPKATIVREIYTRVAAGELFASIADDLNARGIKTARGREWNKGSFHVLCHNDRYRGIYMYGDIRIPGGMPRIISDELFYDAQEAYSMKKDNRYGRARHGAENYLLTGKLYCGHCGGYMVGISGTSKTGEMHYYYACQKHRLEHTCEKKAIRRDVIENAVARAIMMYCLDDETIDFIVDSTIAYFKQKDHELHIEAMENELAAVQQAISNLMKAIEAGIITPTTRTRLLDLEEQQAKLSAKINTAKAERVEIDRDDLIAGLQLFRTGDIKNKKFLAKLFNTFLIAVYLYDDNRLKIVFSFTGNHNSVEIPLELDNDCPDSEIVSDETEVRMSHLECRKNLGSPPSSGEAEKGDDCSDGRFVRTAPLPPHKKTPQAYA

SEQ ID NO: 2078 - protein, 552 aa, Unknown
  Description of Unknown: Integrase B2079 sequence
  SM00857,G3DSA:1.10.10.2600,IPR036162,PF13408,IPR025827, PS51737,G3DSA:3.40.50.1390,IPR006119,IPR038109,PF07508, SSF53041,IPR011109,PF00239,PTHR30461,PS51736, Coil,cd00338
MMHGAYILARYSTENQSEASIEVQVERCQEWCEKQNLSVLDVFADRAISGMKETRPEYQRMMQALYAGGADTVVIYDQSRMFRNMVYWFQFRETLQRIGVHVVSVTQPTVGGDLNDPAVFLNEGVTALFNQMWVLQTQQKVREGVRQRAKSGKHTGGIPALGYRVENERLVIDDAEAETVRLIFGLYAAGQSYIDIIAELNRRGLKTKRGNAFGKNSIHDLLKNEKYVGRSLFGGKPVSYDGTRNAHAARGEHLEVACPSIVSEELFDAVQARLAANKHQNTGKRVTAVEQPLKGRIFCGTCGGAMTIHYKYPARGGERYEYYKCATKQRGKGCSGMSIRKDELEETVASAVLSMLGAPKSRDKLLSVLKEQRDNIIKTSAPKLKELQAEYDSLASQIEKALDAVMAGLTSPALIERTNALESKKAQVAEEIALLKSNVEHSSLRDEQLAPLLDKLIKSAKENPTAILAAVLRVEVYPDTIKIWTIFDDGPAPGNGPITKSNVASLVKSPDTGKWSLGTFMGTASGVPSNVPNIFVVAAFSVLREHKNKERV

SEQ ID NO: 2079 - protein, 552 aa, Unknown
  Description of Unknown: Integrase B2080 sequence
  cd00338,SM00857,G3DSA:1.10.10.2600,IPR036162,PF13408, IPR025827,G3DSA:3.40.50.1390,PS51737,IPR006119,IPR038109, PF07508,SSF53041,IPR011109,PTHR30461,PS51736, Coil,PF00239
MMHGAYILARYSTENQSEASIEVQVERCQEWCEKQNLSVLDVFADRAISGMKETRPEYQRMMQALYAGGADTVVIYDQSRMFRNMVYWFQFRETLQRIGVHVVSVTQPTVGGDLNDPAVFLNEGVTALFNQMWVLQTQQKVREGVRQRAKSGKHTGGIPALGYRVENERLVIDDAEAETVRLIFGLYAAGQSYIDIIAELNRRGLKTKRGNAFGKNSIHDLLKNEKYVGRALFGGKPVSYDGTRNAHAARGEHLEVACPSIVSEELFDAVQARLAANKHQNTGKRVTAVEQPLKGRIFCGTCGGAMTIHYKYPARGGERYEYYKCATKQRGKGCSGMSIRKDELEETVASAVLSMLGAPKSRDKLLSVLKEQRDNIIKTSAPKLKELQAEYDSLASQIEKALDAVMAGLTSPALIERTNALESKKAQVAEEIALLKSNVEHSSLRDEQLAPLLDKLIKSAKENPTAILSAVLRVEVYPDTIKIWTIFDDGPAPGDGPITKSNVASLVKSPDTGKWSLGTFMGTASGVPTNVPNIFVVAAFSVLREHKNKERV

SEQ ID NO: 2080 - protein, 552 aa, Unknown
  Description of Unknown: Integrase B2081 sequence
  PTHR30461:SF3,cd00338,SM00857,G3DSA:1.10.10.2600,IPR036162, PF13408,IPR025827,G3DSA:3.40.50.1390,PS51737,IPR006119, IPR038109,PF07508,IPR011109,SSF53041,PTHR30461, PS51736,Coil,PF00239
MKLPIDLSCLTEEEISQFQEDPYTLYNGDQNVALYLRYSSAGQSDQSIEGQLRDCRAFCKANHYRIVAIYVDRATTARKDVEKRVHLMEMIADSAKQNWEYVIVWKLDRFARNRNDSAIMKMRLRKNGVKVLSATEHLSDNPEGILLESVLEGMAEFFSAELSQKVTRGMRESALKCHSVGGHVPLGYKIENHKLVINPDTAHIVQEAFSLYANGESVADIARKFNAAGYRTAKNTEFNRSSFKVMFRNVRYIGTYTYKDIQIENGVPAIIDKELFEAVQRRLSKAAEAPARGKAKVDYLLSGKLFCGHCGASMNGESGMGRGGKVYHYYSCYTKKRKLGCEKRPLKKDYIEEVVARDALNLLTDQLIDEIADMAIRQSEQDLIDDTRIPQLTAQLSEVEKSIMNITAAIEKGIASETLMNRLVQLEHEKKTLNKEIKSEEKFAYRIDRDQIVFWLSQFKYGNIEDEDFRRRLINLLINSVTVWDEPDGYKITTAYNLTSCETKTFRIKKNPAAEATGFDFGELECAIGLKSEPCYIIYGTIFVQTRRHSLS

SEQ ID NO: 2081 - protein, 552 aa, Unknown
  Description of Unknown: Integrase B2082 sequence
  PTHR30461:SF3,SM00857,G3DSA:1.10.10.2600,IPR036162,PF13408, IPR025827,G3DSA:3.40.50.1390,PS51737,IPR006119,IPR038109, PF07508,IPR011109,SSF53041,PTHR30461,Coil, PS51736,cd00338,PF00239
MKMMQNDNRTAITYYRYSSHRQGEQSIEGQRAEAERWAKANGYTIVREYADRAMTGTNDDREQFQLMLRELEKLRPAVLILWKVDRMGRNKEEIAFNKYRCKKNGVKVIYTAESIPDTPEGVILESVLEGMAEYYSLQLSQNVRRGHRVSASKCQSTGGACPLGYRVGPDKHLEIDPEKAAIVRQVFERYANGETQPEIIQSLNEQGLRTLRGKPFSRNSLRTLLKNEKYIGVYTYNHGEVRVEGGVPAIIDVEMFQKAQKMLKFNKRSSSHKWTKANYLLTGKLFCGCCGEQMCGVSGYSSTKVKYHYYACSGHHNYKKARSTCRKKNVKKEWIEGLVLREAKLLLLNEDLLDFIAENTYQYYVEANTDTAYTDALQANLREIERSLENIMRAVEAGIFNDTTKARMEELEAQKQQIRHALDLTKLDRGLQLTKDHILYFLKRFRDLDFENAACQRQIIDTFINSVFVYDDHITLTFNYSGDDRTITLAETDAAAGGESFVFAPSCGTKKFRSRFGFGTFFFSLTKQGQDAILKTERALLLAADPFDLSRN

SEQ ID NO: 2082 - protein, 552 aa, Unknown
  Description of Unknown: Integrase B2083 sequence
  PTHR30461:SF3,cd00338,SM00857,G3DSA:1.10.10.2600,IPR036162, PF13408,IPR025827,G3DSA:3.40.50.1390,PS51737,IPR006119, IPR038109,PF07508,SSF53041,IPR011109,PTHR30461, PS51736,Coil,PF00239
MARSKRNEYSSAEQIGVIYARYSSHNQKEESIEQQIAECSDFAAKNGIRIVGIYADKAVSGRSDRRPNFQRMMRDAEKRQFQIVVAYKSNRIARNMLNALQYEARLDLLGIKTLYAKEEFGNTAAGRFALRTMMNVNQFYSENMGEDIKRGMVDNANECKVNGMLPLGYVKSKEGKYAIAPDEAAVVREIFDSVLKDVPVAEIARSLNQRGIRTKLGREWNKNSFHIMLKNDNYIGVYRHSGVVVEDGIPPILEKEVFAAVQEKLANKKKTAGRRSANGEYLLTGKLFCGYCGSYMIGVSGTGENGTVHNYYQCQKRHAEGRCEKKNVRRDFIEKLIARLTQDYILQDDTIEWIADSTMSFQAMARRESGVAQLERDLADNRKVAKNIMAAIEQGIITETTKARLLEVEETIHDLERSLSIAKAASQPIERERVVFSLEQMREGNVGSKEHQKKLIDTFVKSVTLWDDRIQIDYYHTPGKHKFSYSLEELTSKAENESNASDVRTDSLELHHCRRELHRFTTAFLLATAPLRLYGTIKKTQEFKFLRLFCMY

SEQ ID NO: 2083 - protein, 552 aa, Unknown
  Description of Unknown: Integrase B2084 sequence
  SM00857,G3DSA:1.10.10.2600,IPR036162,PF13408,IPR025827, G3DSA:3.40.50.1390,PS51737,IPR006119,IPR038109,PF07508, SSF53041,IPR011109,PTHR30461,Coil,PS51736, cd00338,PF00239
MAKKKKPAGGNAIIYARYSSHNQRDVSIEQQIEACRKHAAELGLTITDTYEDRAISGRTDNRPAFQRMMHDAENGRFSYVLAWKSNRMGRNMMQAMVNESRLMDCGVKVYYAEEDFDDSAAGRFALRSMMNVNQFYSDNLAEDVRRGLMDNANKCMANGRQPLGYKRGEDGKVVVDEPAAAIVREVYARVASGELFTDIARDLNRRGIKTADKGEWNKNSFHRLCSNEKYRGIYIYGDVRIEGGIPSIIDDTLWYKVQEALRVKKLKRNGRHRPGEDDYLLTGKLRCGKCGGYMIGMSGRSKTGDIHYYYACQNRRVGHTCDKKNIRRDIIEPAVAQAIKEYCLTDDAIEWIADKTIEYWEEADRNLQLDSIEGDLAAVQSSISNVMKAIEMGVVTETTRDRLIELEKQRTDLKSKLALAKEEVIHVDRKKLISSLLLFRNGDIHDRQYQEDLFNTFLISVYVYDDDDNGHLKLIFNAFGENNTVDLPINFGETGDVPVFSDREKVRASSPSVNQKAIRFMPDGFFRSILLYKNSVPSLRRYAHFYAVITEC

SEQ ID NO: 2084 - protein, 552 aa, Unknown
  Description of Unknown: Integrase B2085 sequence
  SM00857,G3DSA:1.10.10.2600,IPR036162,PF13408,IPR025827, G3DSA:3.40.50.1390,PS51737,IPR006119,IPR038109,PF07508, SSF53041,IPR011109,PF00239,PTHR30461,PS51736, Coil,cd00338
MTHGAYILARYSTENQSEASIEVQVDRCTEWCNQHSIPVLDVFADRAISGMKETRPEYQRMMQQLYSGGADTVVIYDQSRMFRNMVYWFQFRETLQRIGVHVVSVTQPTVGGDLSDPAVFLNEGVTALFNQMWVLQTQQKVREGVRQRAKSGKHTGGIPALGYRVENERLVVDEPEAETVRLIFGLYAAGQSYIDIIAELNRRGLKTKRGNAFGKNSIHDLLKNEKYVGRSLFGGKPVSYDGTRNAHAARGEHLEVACPSIVSEELFDAVQARLAANKHQNTGKRVTAVEQPLKGRIFCGTCGGAMTIHYKYPARGGERYEYYKCATKQRGKGCSGMSIRKDELEETVASAVLSMLGAPKSRDKLLSVLKEQRDNIIKTSAPKLKELQAEYDSLASQIEKALDAVMAGLTSPALIERTNALESKKAQVAEEIALLKSNVEHSSLRDEQLAPLLDKLIKSAKENPTAILAAVLRVEVYPDTIKIWTIFDDGPAPGDGPITKSNVASLVKSPDTGKWSLGTFMGTASGVPSNVPNIFVVAAFSVLREHKNKERV

SEQ ID NO: 2085 - protein, 552 aa, Unknown
  Description of Unknown: Integrase B2086 sequence
  PTHR30461:SF3,IPR036162,PS51737,IPR011109,PTHR30461, PF00239,G3DSA:1.10.10.2600,IPR006119,SSF53041,cd00338, SM00857,IPR025827,IPR038109,PS51736,mobidb-lite, PF13408,G3DSA:3.40.50.1390,PF07508,Coil
MPRKKKLQEVGGLRLVAYYRYSNGGQQTEQSIEGQRRDCEAYAKAHGYKIVHEYIDRHISGKSDSRPAFQQMISDSDSHLFDAVICWKTDRLARSRYDSIIYKTRLRKNGVKILYAAETVVDGPEGIIIEGLMESLAEYYSAELAQKLRRGQRESALKCIALGGNRSFGYDIGPDKHYCINEKQAPAVRYIFEQYAAGATAADIVRELTARGYRTSRGNPFNKNSICRIITNEMYLGVYKYADIRIEGGVPAMIDRELFNRCQTQLAFNRAHGGGKGAPRADYVLVGKLDCGLCGHAMKGASATGHTGSKHYYYTCTQHVEKKCPKTSIEKNYLEQVIVDGVAKYVLTPEKISQIVDCMMELQAKEQEPKGNPERDALEAELAECRRKQNNILEAIEEGGSARLAARLRALEEQEAQLTFALGEINNAPAPPQFSREALTFMFEQFRREEDEVDEEYRRRILDTFVSSILLYEDRAEVRFNITDQKTGDFERVILPISANKKPPEDDDTTSNSEGSTALRLVDEPQRRTNPCVEISPYSVIFIIPLPGKLVR

SEQ ID NO: 2086 - protein, 552 aa, Unknown
  Description of Unknown: Integrase B2087 sequence
  PTHR30461:SF3,IPR036162,PS51737,IPR011109,PTHR30461, PF00239,G3DSA:1.10.10.2600,IPR006119,SSF53041,cd00338, SM00857,IPR025827,IPR038109,PS51736,mobidb-lite, PF13408,G3DSA:3.40.50.1390,PF07508,Coil
MGKKQKTNGGDAVIYARYSSHNQRDVSIEQQVEACRKHAAELGLTVTATYEDRAISGKTDKRPSFQRMMRDAEQHKFAYVLAWKSNRIGRNMMQALVNESRLVDCGVKVFYAEEDFDDNAAGRFALRSMMNVNQFYIENMAEDVKRGLYDNAKKGLVNGSLPLGYKRGADGKPEIDEPKAAIVREIYTRVAAGELFASIADDLNARGIKTARGREWNKGSFHVLCHNDRYRGIYMYGDIRIPGGMPRIISDELFYDAQEAYSMKKDNRYGRARHGAENYLLTGKLYCGHCGGYMVGISGTSKTGEMHYYYACQKHRLEHTCEKKAIRRDVIENAVARAIMMYCLDDETIDFIVDSTIAYFKQKDHELHIEAMENELAAVQQAISNLMKAIEAGIITPTTRTRLLDLEEQQAKLSAKINTAKAERVEIDRDDLIAGLQLFRTGDIKNKKFLAKLFNTFLIAVYLYDDNRLKIVFSFTGNHNSVEIPLELDNDCPDSEIVSDETEVRMSHLECRKNLGSPPSSGEAEKGDDCSDGRFVRTAPLPPHKKTPQAYA

SEQ ID NO: 2087 - protein, 552 aa, Unknown
  Description of Unknown: Integrase B2088 sequence
  PTHR30461:SF3,IPR036162,PS51737,IPR011109,PTHR30461, PF00239,G3DSA:1.10.10.2600,IPR006119,SSF53041,cd00338, SM00857,IPR025827,IPR038109,mobidb-lite,PS51736, PF13408,G3DSA:3.40.50.1390,PF07508,Coil
MGKKQKATGGNAVIYARYSSHNQRDVSIEQQVEACRKHAAELGLTVTATYEDRAISGKTDKRPSFQRMMRDAEQHKFAYVLAWKSNRIGRNMMQALVNESRLVDCGVKVFYAEEDFDDNAAGRFALRSMMNVNQFYIENMAEDVKRGLYDNAKKGLVNGSLPLGYKRGADGKPEIDEPKAAIVREIYTRVAAGELFASIAADLNARGIRTARGREWNKGSFHVLCHNDRYRGIYMYGDIRIPGGMPRIISDELFYDAQEAYGMKKDNRYGRARHGAENYLLTGKLYCGHCGSYMVGISGTSKTGEMHYYYACQKHRLEHTCEKKAIRRDVIENAVARVIMMYCLDDETIDFIVDSTIAYFKQKDHELHIEAMENELAAVQQAISNLMKAIEAGIITPTTRTRLLDLEEQQAKLSAKINTAKAERVEIDRDDLIAGLQLFRTGDIKNKKFLAKLFNTFLLAVYLYDDNRLKIVFSFTGNHNNIEIPLELDNDCPDSESGPYETEVRMSHLECRKNSGTPPSSGGAEKGDGCSGGRFVRTAPLPPHKKTPQAYA

SEQ ID NO: 2088 - protein, 552 aa, Unknown
  Description of Unknown: Integrase B2089 sequence
  SM00857,G3DSA:1.10.10.2600,IPR036162,PF13408,IPR025827, G3DSA:3.40.50.1390,PS51737,IPR006119,IPR038109,PF07508, SSF53041,IPR011109,PTHR30461,Coil,cd00338, PF00239
MAYRKITDIKDTIGMRAVFYARVSTAEEEQLNAIELQIEENRGCIKDHGWKLVGEYIDRSKSGTMVKGRDDYQRLYEDLYEDLFDIVVIKDQERLQRNTLDWYLFINRVVQTGKLLFMYMDGKFYSPDDALITGVRAIIAEEFSRNLSKKLHNYHDHRIEKARQGQEIALQGSGNVYGWDKKDGKYYINPEQAKVRRLMCEGIMARKGSTLIAKELNDAGYRNTVGKPWKPMDIPKFVYDCKNVGTMIINKERHDFESKQTIKLPKEEWVYVENALPPIVTQEEWDLICKIHEERVIATGSDRRGKKTSGYSFSGKLVCGICGAPYWRKQRVSKDEYWVCSTKQTKGRRTRKRDSTMGKAGEINPLGCDNENISYNSLMEIMEVVSERLQANTDTIKHDMINWLTKLRKQLLEANGGHTEADLQRELSRKSKLLDAYLDGILNKQEYQTKAEELDERIIQLKAETEKNKANSGDIAEIDKVLANIDEEVSRYVDGNEKLKVEYLLEHLEQVQIFPDKVIVIVPILSEGIVVEKTQYVSREKCAKKKDVFKRS

SEQ ID NO: 2089 - protein, 552 aa, Unknown
  Description of Unknown: Integrase B2090 sequence
  PTHR30461:SF3,IPR036162,PS51737,IPR011109,PTHR30461, PF00239,G3DSA:1.10.10.2600,IPR006119,SSF53041,cd00338, SM00857,IPR025827,IPR038109,PS51736,mobidb-lite, PF13408,G3DSA:3.40.50.1390,PF07508,Coil
MPRKKKLQEVGGLRLVAYYRYSNGGQQTEQSIEGQRRDCEAYAKAHGYKIVHEYIDRHISGKSDSRPAFQQMISDSDSHLFDAVICWKTDRLARSRYDSIIYKTRLRRNGVKILYAAETVVDGPEGIIIEGLMESLAEYYSAELAQKLRRGQRESALKCIALGGNRSFGYDIGPDKHYCINEKQAPAVRYIFEQYAAGATAADIVRELTARGYRTSRGNPFNKNSICRIITNEMYLGVYKYADIRIEGGVPAMIDRELFNRCQTQLAFNRAHGGGKGAPRADYVLVGKLDCGLCGHAMKGASATGHTGSKHYYYTCTQHVEKKCPKTSIEKNYLEQVIVDGVAKYVLTPEKISQIVDCMMELQAKEQEPKGNPERDALEAELAECRRKQNNILEAIEEGGSARLAARLRALEEQEAQLTFSLGEINNAPTPPQFSREALTFMFEQFRREEGEVDEEYRRRILDTFVSSILLYEDRAEVKFNITDQKTGDFERVILPISANKKPPEDDDTTSNSEGSTALRLVDEPQRRTNPCVEISPYSVIFIIPLPGKMVR

SEQ ID NO: 2090 - protein, 552 aa, Unknown
  Description of Unknown: Integrase B2091 sequence
  PTHR30461:SF3,SM00857,G3DSA:1.10.10.2600,IPR036162,PF13408, IPR025827,G3DSA:3.40.50.1390,PS51737,IPR006119,IPR038109, PF07508,IPR011109,SSF53041,PTHR30461,cd00338, PF00239
MPTSKNTARKYAAGGSSDNSCGVEPLRAVIYARYSSSGQREESIEGQLRDCYEFAKKHGIIVIGEYIDKAMTGRVDRRPDFQRMMKDSEKGRFNCVLLWKMDRFARNRYDSAMYKYKLKKNGIRIFYAKETIPDGPEGIILESVMEGYAEYYSENLAQNVKRGNYDSALELKTLGKTCLGLKTGPDGRYMIDQAEAAIVRRIFEEYAEGERAKDIYERLNSEGYRTSRGGKFNKNSLRRILSNKKYIGVYEYEDIYVENGIPAIITDRDLFERVQKMLKINHDAPARGKAQNFLLTTKLFCGLCGSPMIGDGGTSHTGKAYAYYSCTKRKRGRSCKKESVPKDWIEDLVVGELVKIVHNDELIEQIADRVMEYQKREKDQSGLHALEIRQKENEKAISNMLAAIEAGIITPSTKTRLMELEADRADIEKGIAHELLAEPEFERDQIIYFLERFRSGDINDEAYRIMLVDTFLNSVYLYDDDHLVLVMNYSGENCKVDLKLVEGAVSGDGCKGSAFAPSSALKKDSVFTGSFFLFMIIECSRSAHSIICSWMR

SEQ ID NO: 2091 - protein, 552 aa, Unknown
  Description of Unknown: Integrase B2092 sequence
  PTHR30461:SF3,IPR036162,PS51737,IPR011109,PTHR30461, PF00239,G3DSA:1.10.10.2600,IPR006119,SSF53041,cd00338, SM00857,IPR025827,IPR038109,mobidb-lite,PS51736, PF13408,G3DSA:3.40.50.1390,PF07508,Coil
MPRKKKLQEVGGLRLVAYYRYSNGGQQSEHSIEGQRRDCEAYAKAHGYKIVHEYIDRHISGKSDSRPAFQQMISDSDSHLFDAVICWKTDRLARSRYDSIIYKTRLRKNGVKILYAAETVVDGPEGIIIEGLMESLAEYYSAELAQKLRRGQRESALKCIALGGNRSFGYDIGPDKHYCINEKQAPAVRYIFEQYAAGATAADIVRELTARGYRTSRGNPFNKNSICRIITNEMYLGVYKYADIRIEGGVPAMIDRELFNRCQTQLAFNRVHGGGKGAPRADYVLVGKLDCGLCGHAMKGASATGHTGSKHYYYTCTQHVEKKCPKTSIEKNYLEQVIVDGVAKYVLTPEKISQIVDCMMELQAKEQEPKGNPEKDALEAELAECRRKQNNILEAIEEGGSARLAARLRTLEEQEAQLTFALGEINNAPTPPQFSREALTFMFEQFRREEDEVDEEYRRRILDTFVSSILLYEDRAEVKFNITDQKTGDFERVILPISANKKPPEDDDITSNSEGSTALRLVDEPQRRTNPCVEISPYSVIFIIPLPGKLVR

SEQ ID NO: 2092 - protein, 552 aa, Unknown
  Description of Unknown: Integrase B2093 sequence
  cd00338,SM00857,G3DSA:1.10.10.2600,IPR036162,PF13408, PS51737,IPR025827,G3DSA:3.40.50.1390,IPR006119,IPR038109, PF07508,IPR011109,SSF53041,PTHR30461,PS51736, Coil,PF00239
MARKKKSVSGDAVIYARYSSHNQRDVSIEQQIEACRKYAASLGLKITVTYEDRAISGRTDNRPAFQRMMRDAEDGKFCYVLAWKSNRMGRNMMQAMVNEARLVDCGVKVYYAEEDFDDSAAGRFALRSMMNVNQFYSDNLAEDVRRGLMDNASKCIANGKQPFGYKRGSDGKVVLDEPAAAVVREVFTRVASGETNTSIARDLNRRGIKTGSNGEWNKCSFHGLCTNERYRGIYIYGETRIEGGVPRIIDDRLWHKVQEAIRMRNRRKNGRHRPGEDDYLLTGKLRCGHCGGYMIGMSGTSKTGTIHHYYACQNRRVGRTCDKKNIRRDIIEPAVAQAIKQYCLTDDVIEWIADKTIEYWEDEDRKLQITSLENELADIKSSISNVMKAIEQGVITSTTRDRLIELETQQSDLSAKLNSAKEDLVHVDRKNLISSLLLFRNGDVYDRQYQEDLFNTFLVAAYVYDDGNRLKLVFNCFGDSNTVDLDLCSDENNDNSSISNEANCGNLFAQALKQSTIRELGEHSSICMVGSVFVLLCPLPTVDRKPTLVNRH

SEQ ID NO: 2093 - protein, 552 aa, Unknown
  Description of Unknown: Integrase B2094 sequence
  PTHR30461:SF3,IPR036162,PS51737,IPR011109,PTHR30461, PF00239,G3DSA:1.10.10.2600,IPR006119,SSF53041,cd00338, SM00857,IPR025827,IPR038109,PS51736,mobidb-lite, PF13408,G3DSA:3.40.50.1390,PF07508,Coil
MGKKQKTNGGDAVIYARYSSHNQRDVSIEQQVEACRKHAAELGLTVTATYEDRAISGKTDKRPSFQRMMRDAEQHKFAYVLAWKSNRIGRNMMQALVNESRLVDCGVKVFYAEEDFDDNAAGRFALRSMMNVNQFYIENMAEDVKRGLYDNAKKGLVNGSLPLGYKRGADGKPEIDEPKAAIVREIYTRVAAGELFASIAADLNARGIRTARGREWNKGSFHVLCHNDRYRGIYMYGDIRIPGGMPRIISDELFYDAQEAYGMKKDNRYGRARHGAENYLLTGKLYCGHCGSYMVGISGTSKTGEMHYYYACQKHRLEHTCEKKAIRRDVIENAVARVIMMYCLDDETIDFIVDSTIAYFKQKDHELHIEAMENELAAVQQAISNLMKAIEAGIITPTTRTRLLDLEEQQAKLSGKINTAKAERVEIDRDDLIAGLQLFRTGDIKNKKFLAKLFNTFLLAVYLYDDNRLKIVFSFTGNHNNIEIPLELDNDCPDSESGPYETEVRMSHLECRKNSGTPPSSGGAEKGDGCSGGRFVRTAPLPPHKKTPQAYA

SEQ ID NO: 2094 - protein, 552 aa, Unknown
  Description of Unknown: Integrase B2095 sequence
  PTHR30461:SF3,IPR036162,PS51737,IPR011109,PTHR30461, PF00239,G3DSA:1.10.10.2600,IPR024590,IPR006119,SSF53041, SM00857,PF11898,IPR025827,IPR038109,PS51736, cd03768,PF13408,G3DSA:3.40.50.1390,PF07508,Coil
MKIAIYSRKSKATDKGESIENQINACKDYILKWSNLNTSDAQFIIYQDEGFTGSNTERPQFQKLLNDAKKDKFNMLICYRLDRVSRNIADFSNTYELLQEHGIEFVSVKEQFDTSTPIGRAMLNIAMVFAQLERETIAERIKDNMLGLARTGRWLGGTTPTGFNSEPIEYLDHNMNTKKMYKLSIDENEIEKVKLIFTKFMELKSLRSTESYLLIHDIYSKNNCKYTAATIKDILTNPVYAAADSNMYDYLSSLGCQICNEEKDFDGAYGIMSYNKTDQVGKSISTKDYSEWIISIGKHTPIVEGMDWVSIQGILNSNTQNSFYTKETMQYGLLTNMIKCAHCGANMKIKKGKINAKSELAYSYVCTTKEMSRRTKCNVKNVIGQEVDADVFNYLVDLAENNEFMSSIFKSNKAFVTQSIEEINHKVQDLTAQIEDNDLSMKNLMSQLAKLPAEHPLVDLYMKQLSELDTSTKALKSQIQQLHENGEQQQVINLNLDSLRKAFTHLKDLKDSTDIHMQRSIIRSIVDYITWDGENLQINLFGQDILKKNSVS

SEQ ID NO: 2095 - protein, 552 aa, Unknown
  Description of Unknown: Integrase B2096 sequence
  PTHR30461:SF3,IPR036162,PS51737,IPR011109,PTHR30461, PF00239,G3DSA:1.10.10.2600,IPR006119,SSF53041,cd00338, SM00857,IPR025827,IPR038109,PS51736,mobidb-lite, PF13408,G3DSA:3.40.50.1390,PF07508,Coil
MGKKQKTNGGDAVIYARYSSHNQRDVSIEQQVEACRKHAAELGLTVTATYEDRAISGKTDKRPSFQRMMRDAEQHKFAYVLAWKSNRIGRNMMQALVNESRLVDCGVKVFYAEEDFDDNAAGRFALRSMMNVNQFYIENMAEDVKRGLYDNAKKGLVNGSLPLGYKRGADGKPEIDEPKAAIVREIYTRVAAGELFASIADDLNARGIKTARGREWNKGSFHVLCHNDRYRGIYMYGDIRIPGGMPRIISDELFYDAQEAYSMKKDNRYGRARHGAENYLLTGKLYCGHCGGYMVGISGTSKTGEMHYYYACQKHRLEHTCEKKAIRRDVIENAVARAIMMYCLDDETIDFIVDSTIAYFKQKDHELHIEAMENELAAVQQAISNLMKAIEAGIITPTTRTRLLDLEEQQAKLSAKINTAKAERVEIDRDDLIAGLQLFRTGDIKNKKFLAKLFNTFLIAVYLYDDNRLKIVFSFTGNHNSVEIPLELDNDCPDSEIVSDETEVRMRHLECRKNLGSPPSSGEAEKGDDCSDGRFVRTAPLPPHKKTPQAYA

SEQ ID NO: 2096 - protein, 552 aa, Unknown
  Description of Unknown: Integrase B2097 sequence
  cd00338,SM00857,G3DSA:1.10.10.2600,IPR036162,PF13408, PS51737,G3DSA:3.40.50.1390,IPR025827,IPR006119,IPR038109, PF07508,IPR011109,SSF53041,PTHR30461,PS51736, Coil,PF00239
MTHGAYILARYSTENQSEASIEVQVERCREWCEKQNLPVLDVFADRAISGMKETRPEYQRMMQQLYSGGADTVVIYDQSRMFRNMVFWFQFRETLQRIGVHVVSVTQPTVGGDLSDPAVFLNEGVTALFNQMWVLQTQQKVREGVRQRAKSGKHTGGIPALGYRVENERLVVDESEAETVRLIFGLYAAGQSYIDIIAELNRRGLKTKRGNAFGKNSIHDLLKNEKYVGRALFGGKPVSYDGTRNAHAARGEHLEVACPSIVSEELFDAVQARLAANKHQNTGKRVTAVEQPLKGKIFCGTCGGAMTIHYKYPARGGERYEYYKCATKQRGKGCSGMSIRKDELEDTVANAVLAMLGAPKSRDKLLSVLRDQRDNIIKTSAPKLKELQAEYDSLASQIEKALDAVMAGLTSPALIERTNALESKKAQVAEEIALLKSNVEHSSLRDEQLAPLLDKLIKSAKENPTAILAAVLRVEVYPDTIKIWTIFDDGPAPGDGPITKSNVASLVKSPDTGKWSLGTFIGTASGVPSNVPNIFVVAAFTVLRERKNKERV

SEQ ID NO: 2097 - protein, 551 aa, Unknown
  Description of Unknown: Integrase B2098 sequence
  PTHR30461:SF3,IPR036162,PS51737,IPR011109,PTHR30461, PF00239,G3DSA:1.10.10.2600,IPR006119,SSF53041,cd00338, SM00857,IPR025827,IPR038109,PS51736,mobidb-lite, PF13408,G3DSA:3.40.50.1390,PF07508,Coil
MKKRINTNSAARAVIYARYSSANQRDCSIEQQVEKCRELAAREGVTVIEIYADRAISGKTDRRPNFQRMMKDASLRQFDVVLAWKSNRMGRNMLQAMMNEEQLRSNGIRTIYAEEDFDDTAAGRFALRNMMNVNQFYSENMAEDISRGLMDNASKCMSNGSLPLGYKTGKDQKVVLDEAEAAIVQEIFTRVSCYEPFIDIARDLNRRGIKTKKGAEWGRSSFHTICRNERYRGIYIYRDIRVEGGMPRIVSDELFYKVQEVLKVKKNPQGRRKRSGYEEYLLTGKLYCGHCGSPMTGIAGTSKTGAMHYYYTCQKRRTDHSCDKKAVRRDQIEKAVAIAIQQQLLTDENIQMMADETMAYNARTEIKYRLQSLQQQLYSNETSTANIMKAIEMGIITDTTKARLLALEQEHGQLLAKIDTAKAEMVPINREDFVSLLDIYRTGDVNNKKYLAALFDTFLVRVDLYDDHFKITFDPTGGKMPVDIPIGAEDSPESPGDSPESSDFEASPQDAEKFVLALHNRTKREQNEHKTTVKMVGNVFVLFCSIPSLTH

SEQ ID NO: 2098 - protein, 551 aa, Unknown
  Description of Unknown: Integrase B2099 sequence
  PTHR30461:SF3,cd00338,SM00857,G3DSA:1.10.10.2600,IPR036162, PF13408,IPR025827,G3DSA:3.40.50.1390,PS51737,IPR006119, IPR038109,PF07508,SSF53041,IPR011109,PTHR30461, PS51736,Coil,PF00239
MKITKFPIDLSMLTEEEIDQFRQDPSTLFEGDTDVCLYLRFSSERQREQSIEGQLRDCRTFCKLNSYRITAIYVDRATTARKDVEKRVHFQEMIRDSEKKPWEYVVVWKLDRFARNRTDSALFKFRLRKNGVKVISATENISEKPEGIILEAVLEGMAEFYSADLSQKITRGMRESALKCHSIGGHVPLGYKIEDHKLVINPATAHIVQEAFELYANGETVADICRMFNAKGYRTAKGVEFNRNSFKSMFRNKRYIGVYTYKDIEVEDGVPAIIDKELFETVGRRLSKNAEAPARGKAKVDYLLAGKLFCGHCGGSMNGESGTSKTGAIYNYYTCYTRKRKHACDKKPLKKDWIEYIVAQDAMELLTDDTIQEMADMAISQTEQDLRENTRIPELTERMKETESGIANITKAIEKGVASDALMNRLMELEKEKKNLLRLLAEEEKYVCKIERSQIVYWLTEFKGGRIEDERYRRIIIDLMVNSVTVWDEPDGFRITTAYNLTSCKSKTFRIDPSGTKGFGFEGLESTIERISEPYIVWGKIFVQTKRHPLP

SEQ ID NO: 2099 - protein, 551 aa, Unknown
  Description of Unknown: Integrase B2100 sequence
  PTHR30461:SF3,SM00857,G3DSA:1.10.10.2600,IPR036162,PF13408, PS51737,G3DSA:3.40.50.1390,IPR025827,IPR006119,IPR038109, PF07508,IPR011109,SSF53041,PF00239,PTHR30461, PS51736,Coil,cd00338
MYEEIKTACLYLRYSSSNQTEQSIEGQMHVCQDFCQRHNIRIVEMYIDRATSASKDIEKRVEFLKMIKDSEKGNFDAVIVYKLDRFARSRYDSATYKYRLKRNGVQLVSATENITQDPEGIILESVLEGMAEFYSAELSQKINRGMKESAMKHNSIGGAIPLGYKTVDKKLVIDETTAPIVREAFQMYADGESVAEICRTFNNRGYKTSKGTRFGKSSFTKIFRNEKYIGVYKYHDYRAEDVIPPIIDKDLWDRVQVRVGKIKKAPARNKAKHTYLLTGKLFCGHCGSSMNADGNSNGYLYYRCYGKKNMNESCKKRNMEKNLIERLVAQDAMSFLTDEYIEKIATIACDRNRQEIESDSPIPVIRDRIRQVDVSLNNLLKAIETGSAPDMLVKRMGELETEKKDMEVQLKKEMAHQVYIEKEQVIFWLEKFREGDINDEEFCHTVIDLFVNSVTVWDEPDDKFRITIAYNLTSIPQKTYRLSKDGRLSDYASNTPDRKTDINRIILLHVLHFSCDSRTECFICHFTGSSAAFICPVKVCCRIWLLRLNFI

SEQ ID NO: 2100 - protein, 551 aa, Unknown
  Description of Unknown: Integrase B2101 sequence
  PTHR30461:SF3,cd00338,SM00857,G3DSA:1.10.10.2600,IPR036162, PF13408,PS51737,G3DSA:3.40.50.1390,IPR025827,IPR006119, IPR038109,PF07508,SSF53041,IPR011109,PTHR30461, PS51736,Coil,PF00239
MTLPVDLRCLTEEELTQFLEDPTTLFEGDYDVVLYLRYSSSGQSDQSIEGQLRDCRAFCKANHYRIVGIYVDRATTARKDVEKRVHLMEMIADSAKQNWRYVVVWKLDRFARNRNDSAVMKVRLRKNGVKVLSATEHLTDSPESIILESVLEGMAEFFSAELSQKVTRGMRETALKCNSVGGHIPLGYKVVDHKLAIDPNTAPIVCEAFALYANGVSVAEICRQFNAKGYRTAKNSQFNRSSFKAMFRNQRYIGIYKYKDIVVENGIPAIVDKDVFAKVQERLHKATGAPARGKAKVDYLLSGKLFCGHCGSPMDGESGTGRRGRVYNYYVCYSKKRKRGCDKRPLRKDYIEKIVAQDALNLLTDDLIEEIADKAIQQSEMDILTETRLPVLTAKKQEVETSIKNITTAVEKGIASETLMTRLVELEHEKKNLEKEIKAEEKYIYKIDRHQIVFWLSQFRHGDIENEDCRRQLIDLLINSVTVWDEPDGYKITTAYNLTSCKTKTFRISDHSKSSIKGFVFEESWRAIGRESEPCIVWGSILVQTKRHPLF

SEQ ID NO: 2101 - protein, 551 aa, Unknown
  Description of Unknown: Integrase B2102 sequence
  PTHR30461:SF3,IPR036162,PS51737,IPR011109,PTHR30461, PF00239,G3DSA:1.10.10.2600,IPR006119,SSF53041,cd00338, SM00857,IPR025827,IPR038109,mobidb-lite,PS51736, PF13408,G3DSA:3.40.50.1390,PF07508,Coil
MKKRINTNSAARAVIYARYSSANQRDCSIEQQVEKCRELAAREGVTVIEIYADRAISGKTDRRPNFQRMMKDASLRQFDVVLAWKSNRIGRNMLQAMMNEEQLRSNGIRTVYAEEDFDDTAAGRFALRNMMNVNQFYSENMAEDISRGLMDNASKCMSNGSLPLGYKTGKDQKVVLDEAEAAIVQEIFTRVSCYEPFIDIARDLNRRGIKTKKGAEWGRSSFHTICRNERYRGIYIYRDIRVEGGMPRIVSDELFYKVQEVLKVKKNPQGRRKRSGYEEYLLTGKLYCGHCGSPMTGIAGTSKTGAMHYYYTCQKRRTDHSCDKKAVRRDQIEKAVAIAIQQQLLTDENIQMMADETMAYNARTEIKYRLQSLQQQLYSNETSTANIMKAIEMGIITDTTKARLLALEQEHGQLLAKIDTAKAEMVPINREDFVSLLDIYRTGDVNNKKYLAALFDTFLVRVDLYDDHFKITFDPTGGKMPVDIPIGAEDSPESPGDSPESSDFEASPQDAEKFVLALHNRTKREQNEHKTTIKMVGNVFVLFCSIPSLTH

SEQ ID NO: 2102 - protein, 551 aa, Unknown
  Description of Unknown: Integrase B2103 sequence
  PTHR30461:SF3,SM00857,G3DSA:1.10.10.2600,IPR036162,PF13408, IPR025827,PS51737,G3DSA:3.40.50.1390,IPR006119,IPR038109, PF07508,IPR011109,SSF53041,PF00239,PTHR30461, PS51736,Coil,cd00338
MKITKFPIDLSMLTEEEIDQFRQDPSTLFEGDTDVCLYLRFSSERQREQSIEGQLRDCRTFCKLNSYRITAIYVDRATTARKDVEKRVHFQEMIRDSEKKPWEYVVVWKLDRFARNRTDSALFKFRLRKNGVKVISATENISEKPEGIILEAVLEGMAEFYSADLSQKITRGMRESALKCHSIGGHVPLGYKIEDHKLVINPATAHIVQEAFELYANGETVADICRIFNTKGYRTAKGVEFNRNSFKSMFRNKRYIGVYTYKDIEVEGGVPAIIDKELFETVGHRLSKNAEAPARGKAKVDYLLAGKLFCGHCGGSMNGESGTSKTGAIHNYYTCYTRKRKHACDKKPLKKDWIEYIVAQDAMELLTDDTIQELADMAISQTEQDLRENTRIPELTDRMKETESGITNITKAIEKGIASDALMNRLVELEKEKKNLLRLLAEEEKYVCKIERSQIVYWLTEFKGGRIEDERYRRIIIDLMINSVTVWDEPDGFRITTAYNLTSCKSKTFRIAPSGEKGFGFEGSECTIERISEPYIVWGKIFVQTKRHPLP

SEQ ID NO: 2103 - protein, 551 aa, Unknown
  Description of Unknown: Integrase B2104 sequence
  PTHR30461:SF3,cd00338,SM00857,G3DSA:1.10.10.2600,IPR036162, PF13408,IPR025827,PS51737,G3DSA:3.40.50.1390,IPR006119, IPR038109,PF07508,SSF53041,IPR011109,PTHR30461, PS51736,Coil,PF00239
MKNMKFPIDLSMLTEEEINQFREDPSTLFQGETDVTLYLRFSSERQKEQSIEGQLRDCIAYCKRKNYRIVAIYVDRATTARKDVEKRVHFQQMISDSVHQLWSLVIVWKLDRFARNREDSAVFKMRLRRNGVKVESATEGISKNPEGIILEAVLEGIAEYYSADLSQKITRGMRESALKCHSIGGHVPLGYKIEDHRLVVNPATAHIVQEAFELYANGETVADICRMFNAKGYRTAKGAEFNRNSFKSIFRNKRYIGVYSYKDFQKEGGVPAIIDKDLFEAVQKRLSATAEAPARGKAKVDYLLAGKLFCGHCGASMNGDSGTSKTGAIHNYYTCYTRKRQHACDKKPLRKEWIEDIVAQDAMELLTTETIHELADMAISQTEQDLRDNTRIPELSERMKEVESGISNITKAVEKGIASDALMNRLVELEKEKKSLLRQITEEEKYVCKIDRDQIIHWLEKFKDGSIEDESFKRIIIDLMINSVTVWDEPDGFRITTAYNLTSCKNKTFRISPSSSGEFGFEGSESTIGRKSEPCIVWGTICVQTKIHPLP

SEQ ID NO: 2104 - protein, 551 aa, Unknown
  Description of Unknown: Integrase B2105 sequence
  SM00857,IPR006118,G3DSA:1.10.10.2600,IPR036162,PF13408, PS51737,G3DSA:3.40.50.1390,IPR025827,IPR006119,IPR038109, PF07508,SSF53041,IPR011109,PTHR30461,PS00397, PS51736,cd00338,PF00239
MDTSKYMPACYCRVSTVHQIDKESIPAQVHMLTNYCVGMLQCKKSDIEFYIDAGYSGKNTKRPQFEKMMDDVESGKRNIVLAFKIDRISRNLLDFARFLEVLKSHNADFVSLSESFDTSSVMGQGMLKLVCLFGEMERGITRERVMAVSKDIISRGGHLGAPTPLGYNYDKGTKKYSINESEAKTIKLMFKMVQDGYSTNYIANHLNDHNITSKRGGLWTSTTVNHILHNPAFKGLYIWNRKTSGRQKVKDKKEWMYQKDVYPVIIPEKDWQAVQDLLKNRKTGRAFMQSTAPHFFSNLIICGECGRLLRYRSDRPRRSGFTPTIYTCPGHTFHWGCPNSAYLSDIVLAPFVLRYISNMYKLSWMTDSVQSSQQLKSILLEGMPSNCRIANLPTIYGLFTRANTEPVPGDVAIIKAAANNAKVEREKELAKYYKALDRLKDLYLYGDSDLSKENYVAERKKIELKIASIMGKTQKEEKQVSPKLSIDASKYETILSMLPDTTDYMKILEKCGHKLLADFFHDCIKSIVTSNRQVVRITFRNGVSHNFIYEN

SEQ ID NO: 2105 - protein, 551 aa, Unknown
  Description of Unknown: Integrase B2106 sequence
  PTHR30461:SF3,cd00338,SM00857,G3DSA:1.10.10.2600,IPR036162, PF13408,PS51737,IPR025827,G3DSA:3.40.50.1390,IPR006119, IPR038109,PF07508,IPR011109,SSF53041,PTHR30461, Coil,PF00239
MKKFKFPIDLSMLTEEEINQFREDPSTLFQGDTDVCLYLRFSSERQKEQSIEGQLRDCIAYCKRKNYRIVAIYVDRATTARKDVEKRVHFQEMITASVHQTWKLVVVWKLDRFARNREDSAVFKMRLRKNGVKVESATEGISKNPEGIILEAVLEGIAEYYSADLSQKITRGMRESALKCHSIGGHVPLGYKIEDHKLVINPDTAHIVQEAFELYANGETVADICRMFNAKGYRTAKGAEFNRNSFKSMFRNRRYIGVYRYKDFEKEGGVPPIIDKDLFETVQKRLSANAEAPARGKAKVDYLLAGKLFCGHCGGSMNGESGTSKTGAVHNYYACYTRKRQHSCDKKPLRKEWIEQIVAQDAMELLTDDAIQEMADMAISQTEKDLRENTRIPELSERMKETESGIANITKAVEKGIASDALMSRLVELEKEKKNLLRLIAEEEKYVCKIDRDQIVYWLTKFKDGNIEDENFKRIIIDLIVNSVTVWDEPDGFRITTAYNLTSCKNKTFRIPSSPDKGFGFEGLESTIERKSEPCFVWGTIFVQTKRHSLP

SEQ ID NO: 2106 - protein, 551 aa, Unknown
  Description of Unknown: Integrase B2107 sequence
  PTHR30461:SF3,cd00338,SM00857,G3DSA:1.10.10.2600,IPR036162, PF13408,IPR025827,G3DSA:3.40.50.1390,PS51737,IPR006119, IPR038109,PF07508,IPR011109,SSF53041,PTHR30461, PS51736,Coil,PF00239
MYEEIKTACLYLRYSSSNQTEQSIEGQMHVCQDFCKRHNIKIVEMYIDRATSASKDIEKRVEFLKMIKDSEKGNFDAVIVYKLDRFARSRYDSATYKYRLKRNGVQLISATENITQDPEGIILESVLEGMAEFYSAELSQKINRGMRESAMKHNSIGGAIPLGYKTVDKKLIVDETTAPIVREAFQMYADGESVAEICRTFNSRGYKTSKGTRFGKSSFTKIFRNEKYIGVYKYHDYRAEDVIPPIIDKDLWDRVQVRVGKIKKAPARNKAKHTYLLTGKLFCGHCGSAMNADGNSQGYLYYRCYGKKNLDKQCNKRNMEKNLIERLVAQDAMSFLTDEYIEKIATIACDRNKQEIESDSPIPVIRDRIRQVDVSLNNLLKAIETGSAPDMLVKRMGELETEKKDMEVQLKKEMAHQVYIEKEQVIFWLEKFREGDINDEEFCQTVIDLFVNSVTVWDEPDDKFRITIAYNLTSIPQKTYRLSKDGRLSDYASNTPDWESQKDLVIRTHIHLFFHNRRSIFFITHFHTASGFFIHPVKISLCIWNFRLNLK

SEQ ID NO: 2107 - protein, 551 aa, Unknown
  Description of Unknown: Integrase B2108 sequence
  cd03768,PTHR30461:SF3,SM00857,G3DSA:1.10.10.2600,IPR036162, PF13408,IPR025827,G3DSA:3.40.50.1390,PS51737,IPR006119, IPR038109,PF07508,IPR011109,SSF53041,PTHR30461, PS51736,Coil,PF00239
MIAAIYSRKSKFTGKGESIENQVNLCKEYALHNLRDKNITEFLVYEDEGFSGGSVDRPEFKRLINDIKLKKIDIIICYKLDRISRNVSDFSNTIELLNKYNVGFISIKEQFDTSTPMGRAMMYISSVFAQLERETIAERVRDNMLELAKTGRWLGGATPMGYESKKITYIDENMKERSLVKLKQVPEELEIIKLIFNKYLYFKSLSKVETYLLQKNIKTKRGSNFSKSNLRVILNNPVYVKSDNKIIDYLVDMGITVCGEPDGQSGILTYNKQMTIRNDKGKAVRVYRDTDDWVAAVSSQKGIIEADDWLEAQKILSDNKDKFPNQGKTHNALLTGILRCSKCDSPMQIAHGHISKKTGKKIYYYTCPLKKNSKSVRCDNRNAKVEEVDKIIIDHLKELPLNKKAIIKNLLKQNKKAKETTIASNEKSIKNEIATKEKQIDTLLTKLSIDDDVSDLIIDKIKKLKNELNSLKVDLLNVNNTKTKLNEVEVSLNFIELLLDKCSIIDTLSVEEKKQIIDVFVTDAEWNGDDYFFGADFLGSEPIEENELKKK

SEQ ID NO: 2108 - protein, 551 aa, Unknown
  Description of Unknown: Integrase B2109 sequence
  SM00857,IPR006118,G3DSA:1.10.10.2600,IPR036162,PF13408, PS51737,G3DSA:3.40.50.1390,IPR025827,IPR006119,IPR038109, PF07508,SSF53041,IPR011109,PTHR30461,PS00397, PS51736,cd00338,PF00239
MDTSKYMPACYCRVSTVHQIDKESIPAQVHMLTNYCVGMLQCKKSDIEFYIDAGYSGKNTKRPQFEKMMDDVESGKRNIVLAFKIDRISRNLLDFARFLEVLKSHNTDFVSLSESFDTSSVMGQGMLKLVCLFGEMERGITRERVMAVSKDIISRGGHLGAPTPLGYNYDKGTKKYSINESEAKTVKLMFKMVQDGYSTNYIANHLNDNHITSKRGGLWTSTTVNHILHNPAFKGLYIWNRKTSGRQKVKDKKEWMYQKDVYPVIIPEKDWQAVQDLLKNRKTGRAFMQSTAPHFFSNLIICGECGRLLRYRSDRPRRSGFTPTIYTCPGHTFHWGCPNSAYLSDIVLAPFVLRYISNMYKLSWITDSVQSSQQLNSILLDGMPSNCRLANLPTIYGLFTRANTEPVPGDVAIIKAAANNAKVEREKELAKYYKALDRLKDLYLYGDSDLSKENYVAERKKIELKIASIMGKTQKEEKQVSPKLSIDASKYETILSMLHDTADYMQVLQKCGHKLLSDFFHDCIKSIVTNQRQVVRITFNNGVSHNFIYEN

SEQ ID NO: 2109 - protein, 551 aa, Unknown
  Description of Unknown: Integrase B2110 sequence
  PTHR30461:SF3,cd00338,SM00857,G3DSA:1.10.10.2600,IPR036162, PF13408,IPR025827,G3DSA:3.40.50.1390,PS51737,IPR006119, IPR038109,PF07508,IPR011109,SSF53041,PTHR30461, PS51736,Coil,PF00239
MKSVKFPIDLSMLTEEEIDQFRQDPSTLLEGDTDVSLYLRFSSERQREQSIEGQLRDCRSFCKVNRYRIAAIYVDRATTARKDVEKRIHFQEMIRDSEKKPWKYVVVWKLDRFARNRTDSALFKFRLRKNGVRVISATEAISEKPEGIILEAVLEGMAEFYSADLSQKITRGMRESALKCHSIGGHVPLGYKIEDHKLVVDPNTAHIVQEAFQLYANGETVAEICRMFNTKGYRTAKGAEFNRNSFKSMFRNERYIGVYTYRDIRIEGGVPAIIDKELFETVSHRLSVNAEAPARGKAKVDYLLAGKLFCGHCGGSMNGESGTSKTGAIHNYYTCYSRKRHHSCDKRPLKKEWIERIVAQDAMELMTDEVIEELADMAMAQTDQDLKENTRIPELTERKKEIESGIANITKAIEKGIASDSLMERLVELEKDKKKILRLLEEEEKYVCRIDREQIIFWLEKFKDGNLEDEGFRRIIIDLIVNSVTVWDEPDGFRITTAYNLTSCKNKTYRVSPSSGKGFGFEGSESTIERKSEPYIVWGTVFVQTKKHTLP

SEQ ID NO: 2110 - protein, 551 aa, Unknown
  Description of Unknown: Integrase B2111 sequence
  PTHR30461:SF3,IPR036162,PS51737,IPR011109,PTHR30461, PF00239,G3DSA:1.10.10.2600,IPR006119,SSF53041,cd00338, SM00857,IPR025827,IPR038109,mobidb-lite,PS51736, PF13408,G3DSA:3.40.50.1390,PF07508,Coil
MKKRISPNSAARAVIYARYSSANQRDCSIEQQVAKCRELAARLGLTVIDVYEDRAISGKTDRRPNFQRMMKDADLRQFDVVLAWKSNRMGRNMLQAMTNEERLRDNGIRTVYAEEDFDDTAAGRFALRNMMNVNQFYSENMAEDITRGLMDNAAKCLSNGSLPLGYKPGDDRHVVLDEAEAAIVQEIFTRVSCYEPFIDIARDLNRRGIKTKKGSEWGRSSFHTICRNERYRGIYIYRDVRIEGGMPRIVSDELFYKVQEVLKVKKNPQGRRKRSGYEEYLLTGKLFCGHCGSPMTGIAGTSKTGAMHYYYTCQKRRTDHSCDKKAVRRDQIERAVGVAIQQQLLTDENIQMMADKLMEYNARTETKYRLQGLQDQLNANKTATANILKAIEMGIITDATKARLLELEKEQGQLLVKIDEAKAEMVPISRNDFVKLLYIYKEGEPTDKKYLAALFDNFLVRVDLYDDHLKITFDPTGGRQPIDMPIGAEESPESPGDSSESSDFEASSQDAEKFVLALHNCTKREQNEHKTTVKMVGNVFVLFCSIPSLTH

SEQ ID NO: 2111 - protein, 551 aa, Unknown
  Description of Unknown: Integrase B2112 sequence
  PTHR30461:SF3,cd00338,SM00857,G3DSA:1.10.10.2600,IPR036162, PF13408,PS51737,IPR025827,G3DSA:3.40.50.1390,IPR006119, IPR038109,PF07508,SSF53041,IPR011109,PTHR30461, Coil,PF00239
MYEEIKTACLYLRYSSSNQTEQSIEGQMHVCQDFCKRHNIRIVEMYIDRATSASKDIEKRVEFLKMIKDSEKGNFNAVIVYKLDRFARSRYDSATYKYRLKRNGVQLISATENITQDPEGIILESVLEGMAEFYSAELSQKINRGMRESAMKHNSIGGAIPLGYKTVDKKLVIDETTAPIVREAFQMYADGESVAEICRTFNNRGYKTSKGTRFGKSSFTKIFRNEKYIGVYKYHDYRAEDVIPPIIDKDLWDRVQVRVGKIKKAPARNKARHTYLLTGKLFCGHCGSAMNADGNSQGYLYYRCYGKKNLDKQCNKRNMEKNLIERLVAQDAMSFLTDEYIEKIATIACDRNKQEIESDSPIPVIRDRIRQVDVSLNNLLKAIETGSAPDMLVKRMGELETEKKDMEVQLKKEMAHQVYIDKEQVIFWLEKFREGDINDEEFCQTVIDLFVNSVTVWDEPDDKFKITIAYNLTSIPQKTYRLSKDGRLSDYASNTPDWESQKDLIIRTHIHLFLHNLRPVFLITHFHTAAGFFIHPVKISLCIWNFWLNLK

SEQ ID NO: 2112 - protein, 551 aa, Unknown
  Description of Unknown: Integrase B2113 sequence
  PTHR30461:SF3,cd00338,SM00857,G3DSA:1.10.10.2600,IPR036162, PF13408,PS51737,IPR025827,G3DSA:3.40.50.1390,IPR006119, IPR038109,PF07508,IPR011109,SSF53041,PTHR30461, Coil,PF00239
MKKFKFPIDLSMLTEEEINQFREDPSTLFQGDTDVCLYLRFSSERQKEQSIEGQLRDCIAYCKRKNYRIVAIYVDRATTARKDVEKRVHFQEMITASVHQTWKLVVVWKLDRFARNREDSAVFKMRLRKNGVKVESATEGISKNPEGIILEAVLEGIAEYYSADLSQKITRGMRESALKCHSIGGHVPLGYKIEDHKLVINPDTAHIVQEAFELYANGETVADICRMFNAKGYRTAKGVEFNRNSFKSMFRNRRYIGVYRYKDFEKEGGVPPIIDKDLFETVQKRLSVNAEAPARGKAKVDYLLAGKLFCGHCGGSMNGESGTSKTGAVHNYYACYTRKRQHSCDKKPLRKEWIEQIVAQDAMELLTDNAIQEMADMAISQTEKDLRENTRIPELSERMKETESGIANITKAVEKGIASDALMSRLVELEKEKKNLLRLIAEEEKYVCKIDRDQIVYWLTKFKDGNIEDENFKRIIIDLMVNSVTVWDEPDGFRITTAYNLTSCKNKTFRISSSSDKGFGFEGLESTIERKSEPCFVWGTIFVQTKRHSLP

SEQ ID NO: 2113 - protein, 551 aa, Unknown
  Description of Unknown: Integrase B2114 sequence
  PTHR30461:SF3,IPR036162,PS51737,IPR011109,PTHR30461, PS00397,PF00239,G3DSA:1.10.10.2600,IPR006119,SSF53041, SM00857,IPR025827,IPR038109,PS51736,cd03768, IPR006118,PF13408,G3DSA:3.40.50.1390,PF07508,Coil
MNKKSAIYVRVSTSHQIDKDSLPLQRKDLINYSKLILGIDNYVVFEDAGYSGKNTDRPAFKDMFNRIKEGEFSHLLVWKIDRISRNLLDFCSMYDELKKYNCTFISKNEQFDTSSAMGEAMLKIILVFAELERKLTGERVAATMLDRATKGLWNGAPIPLGYKWDKAIKFPVIDNEERLTVELIYNKYIETESTSAVVKYLNQHNIRTKRDGSWTTKTVGDILRNPFYKGTYRYNFRESARGKKKKENEWIVLDNNHDPIIDLDLWTKCNNILDENAKKNSARFRAKSKTHIFAGLLECGECHKSFYSKSDKTSLDGYTPSIYTCSSRYNHLGCNQKTISDTIIGNFTLNFISNMIKLYKTYKKLSPEDIEKKLLLGSSFNDVKGIIEIDDIFNSFYNTSSKIFKPNKQETKPANVDLNKLDADLKKQHRALERLENLYLYAEDEMSEKDYILKKNIINTKIKEIDTKIKSSATISTSTYNINFFLNTATLELSKEIIEGNINMKSLIQRVGRDIIKEFVNSLITKITVRDRKVISIQFTNGLISTFIYEV

SEQ ID NO: 2114 - protein, 551 aa, Unknown
  Description of Unknown: Integrase B2115 sequence
  PTHR30461:SF3,cd00338,SM00857,G3DSA:1.10.10.2600,IPR036162, PF13408,PS51737,IPR025827,G3DSA:3.40.50.1390,IPR006119, IPR038109,PF07508,SSF53041,IPR011109,PTHR30461, Coil,PF00239
MYEEIKTACLYLRYSSSNQTEQSIEGQMHVCQDFCKRHNIRIVEMYIDRATSASKDIEKRVEFLKMIKDSEKGNFNAVIVYKLDRFARSRYDSATYKYRLKRNGVQLISATENITQDPEGIILESVLEGMAEFYSAELSQKINRGMRESAMKHNSIGGAIPLGYKTVDKKLVIDETTAPIVREAFQMYADGESVAEICRTFNNRGYKTSKGTRFGKSSFTKIFRNEKYIGVYKYHDYRAEDVIPPIIDKDLWDRVQVRVGKIKKAPARNKARHTYLLTGKLFCGHCGSAMNADGNSQGYLYYRCYGKKNLDKQCNKRNMEKNLIERLVAQDAMSFLTDEYIEKIATIACDRNKQEIESDSPIPVIRDRIRQVDVSLNNLLKAIETGSAPDMLVKRMGELETEKKDMEVQLKKEMAHQVYIDKEQVIFWLEKFREGDINDEEFCQTVIDLFVNSVTVWDEPDDKFKITIAYNLTSIPQKTYRLSKDGRLSDYASNTPDWESQKDLVIRTHIHLFLHNLRSVFLITHFHTAAGFFIHPVKISLCIWNFWLNLK

SEQ ID NO: 2115 - protein, 551 aa, Unknown
  Description of Unknown: Integrase B2116 sequence
  PTHR30461:SF3,cd00338,SM00857,G3DSA:1.10.10.2600,IPR036162, PF13408,IPR025827,G3DSA:3.40.50.1390,PS51737,IPR006119, IPR038109,PF07508,IPR011109,SSF53041,PTHR30461, PS51736,Coil,PF00239
MKKTKNSVQRAVIYARYSCSNQTEQSIEGQLADCEKFAEKYNYYIVDTYIDRAMSATTDRRPQFQQMIADSATGGFDVIIVWKLDRFARNRYDSAVNKQKLNANGVKVISVMEHIEDTPEGALMESVLEGFAEYFSKDLSQKVSRGMRETALKFKATGLIPYGYKKTSDNICVPDEHTAPVVKKIFEMYSGGMINKDICDWLNSHGYRTSNGNLFRNQYLRKILNRRRYTGSYTYGDLELHDENQRIISDELFDRVQIQLQAKRRTGRIAREQYILVGKLFCGYCRNPIRGESGRNHQNRIYTYYKCSVNKTGGKCPKTTVQRDIIENNTIKFILNNFLNDEIINSVVDTIQASETAENNSAELITLRTQIEDTDRKINNLLTAIENGVFTPSTKQRLNDLENVKEKLKYELIVKQSEKNNFNATAFKRFLKNIDVDDFKTTEQRQKLINLVLYREYLWNDKVLYIFNLTPSKPNDSVDIDSYVDALLTSTGSTSPTDGVPQVAISELLFGYFFVMGFFPFHKHFALSCFALCHHLYLLPYRPQHCSEHSM

SEQ ID NO: 2116 - protein, 551 aa, Unknown
  Description of Unknown: Integrase B2117 sequence
  PTHR30461:SF3,SM00857,G3DSA:1.10.10.2600,IPR036162,PF13408, PS51737,G3DSA:3.40.50.1390,IPR025827,IPR006119,IPR038109, PF07508,SSF53041,IPR011109,PF00239,PTHR30461, PS51736,Coil,cd00338
MKITKFPIDLSMLTEEEIDQFRQDPSTLFEGDTDVSLYLRFSSERQREQSIEGQLRDCRTFCKLNGYRITAIYVDRATTARKDVEKRVHFQEMIRDSEKKPWEYVVVWKLDRFARNRTDSALFKFRLRKNGVKVISATENISEKPEGIILEAVLEGMAEFYSADLSQKITRGMRESALKCHSIGGHVPLGYKIEDHKLVINPATAHIVQEAFELYANGETVADICRMFNAKGYRTAKGVEFNRNSFKSMFRNKRYIGVYTYKDIEMEGGVPAIIDKELFETVGRRLSKNAEAPARGKAKVDYLLAGKLFCGHCGGSMNGESGTSKTGAVHNYYTCYTRKRKHACEKKPLKKEWIEYIVAQDAMELLTDDTIQELADMAISQTEQDLRENTRIPELTERMKETESGIANITNAVEKGIASDALMNRLVELEKEKKNLLRLLAEEEKYVCKIERSQIVYWLTEFKGGRIEDERYRRIIIDLMVNSVTVWDEPDGFRITTAYNLTSCKNKTFRINPSSEKGFGFEGSKSTIERISEPYIVWGKIFVQTKRHPLP

SEQ ID NO: 2117 - protein, 551 aa, Unknown
  Description of Unknown: Integrase B2118 sequence
  SM00857,IPR006118,G3DSA:1.10.10.2600,IPR036162,PF13408, IPR025827,G3DSA:3.40.50.1390,PS51737,IPR006119,IPR038109, PF07508,IPR011109,SSF53041,PTHR30461,PS00397, PS51736,cd00338,PF00239
MDTSKYMPACYCRVSTVHQIDKESIPAQVHMLTNYCVGMLQCKKSDIEFYIDAGYSGKNTKRPQFEKMMDDVESGKRNIVLAFKIDRISRNLLDFARFLEVLKSHNADFVSLSESFDTSSVMGQGMLKLVCLFGEMERGITRERVMAVSKDIISRGGHLGAPTPLGYNYDKGTKKYSINESEAKTIKLMFKMVQDGYSTNYIANHLNDNHITSKRGGLWTSTTVNHILHNPAFKGLYIWNRKTSGRQKVKDKKEWMYQKDVYPVIIPEKDWQAVQDLLKNRKTGRAFMQSTAPHFFSNLMICGECGRLLRYRSDRPRRSGFTPTIYTCPGHTFHWGCPNSAYLSDIVLAPFVLRYISNMYKLSWMTDSVQSSQQLNSILLDGMPSNCRLANLPTIYGLFTRANTEPVPGDVAIIKAAANNAKVEREKELAKYYKALDRLKDLYLYGDSDLSKEMYVAERKKIELKIASIMGKTQKEEKQVSPKLSIDASKYETILSMLHDTADYMQILEKCGHKLLADFFHDCIKSIVTSNRQVMRITFCNGVSHNFIYEN

SEQ ID NO: 2118 - protein, 551 aa, Unknown
  Description of Unknown: Integrase B2119 sequence
  cd00338,SM00857,G3DSA:1.10.10.2600,IPR036162,PF13408, PS51737,IPR025827,G3DSA:3.40.50.1390,IPR006119,IPR038109, PF07508,IPR011109,SSF53041,PTHR30461,PS51736, Coil,PF00239
MTAVIYARYSSDNQREESIEGQIRECTAYAEKNGITVVKHYIDRALSAKTDNRPDFQQMIKDSEKRLFDIVLVWKLDRFARNRYDSAHYEYQLERNHVKLVSATEPISDSPAGIMVKSMLTGMAEYYSAELSEKVVRGMTENVLKGKYNGGTIPIGFKVDEKKFFQIDPLKAPFVVEAFQRYNDGATMKELMNWLNDSGVTTNRNQKFTYNSVQKLLTNKRYIGENHFKDIVMPDSIPAIVDKDLFEEVQQKIKKNSRAPARHKAEDDYLLTTKLFCGMCGAMMFGECGTGRNKVVHHYYKCATAKRFKTCKKKTVRKEWLEDLVIAETMKLIQDDAVIDAIVAEVMELQDQENTTLPLLEKQMREVENGIENMLNAIQAGVLTNSTKLRLEKLEAQQKELEIRIAEEKIARPRLSENQVRFWLTRFRKLDPNVKSHRETLINTFVNAVYLYDEKVLITFNYKDGTKTITFDEIAAKDAPEGNGSDLGCFAPPRTPVSNGYRSFCFICLEKGTQGWIRTATATTAASCDPGSFSARLATSARTCIASVPYL

SEQ ID NO: 2119 - protein, 551 aa, Unknown
  Description of Unknown: Integrase B2120 sequence
  SM00857,IPR006118,G3DSA:1.10.10.2600,IPR036162,PF13408, PS51737,G3DSA:3.40.50.1390,IPR025827,IPR006119,IPR038109, PF07508,SSF53041,IPR011109,PTHR30461,PS00397, PS51736,cd00338,PF00239
MDTSKYMPACYCRVSTVHQIDKESIPAQVHMLTNYCIGMLQCKKSDIEFYIDAGYSGKNTKRPQFEKMMDDVESGKRNIVLAFKIDRISRNLLDFARFLEVLKSHNADFVSLSESFDTSSVMGQGMLKLVCLFGEMERGITRERVMAVSKDIISRGGHLGAPTPLGYNYDKGTKKYSINESEAKTIKLMFKMVQDGYSTNYIANHLNDNHITSKRGGLWTSTTVNHILHNPAFKGLYIWNRKTSGRQKVKDKKEWMYQKDVYPVIIPEKDWQAVQDLLKNRKTGRAFMQSTAPHFFSNLIICGECGRLLRYRSDRPRRSGFTPTIYTCPGHTFHWGCPNSAYLSDIVLAPFVLRYISNMYKLSWITDSVQSSQQLNSILLEGMPSNCRLANLPTIYGLFTRANTEPVPGDVAIIKAAANNAKVEREKELVKYYKALDRLKDLYLYGDSDLSKENYVAERKKIELKIASIMGKTQKEEKQVSPKLSIDASKYETILSMLPDAADYMQVLQKCGHKLLSDFFHDCIKSIVTNQRQVVRITFNNGVSHNFIYEK

SEQ ID NO: 2120 - protein, 551 aa, Unknown
  Description of Unknown: Integrase B2121 sequence
  PTHR30461:SF3,IPR036162,PS51737,IPR011109,PTHR30461, PF00239,G3DSA:1.10.10.2600,IPR006119,SSF53041,cd00338, SM00857,IPR025827,IPR038109,mobidb-lite,PS51736, PF13408,G3DSA:3.40.50.1390,PF07508,Coil
MKKRINTNSAARAVIYARYSSANQRDCSIEQQVEKCRELAAREGVTVIEIYADRAVSGKTDRRPNFQRMMKDASLRQFDVVLAWKSNRMGRNMLQAMMNEEQLRSNGIRTIYAEEDFDDTAAGRFALRNMMNVNQFYSENMAEDISRGLMDNASKCMSNGSLPLGYKTGKDQKVVLDEAEAAIVQEIFTRVSCYEPFIDIARDLNRRGIKTKKGAEWGRSSFHTICRNERYRGIYIYRDIRVEGGMPRIVSDELFYKVQEVLKVKKNPQGRRKRSGYEEYLLTGKLYCGHCGSPMTGIAGTSKTGAMHYYYTCQKRRTDHSCDKKAVRRDQIEKAVAIAIQQQLLTDENIQMMADETMAYNARTEIKYRLQSLQQQLYSNETSTANIMKAIEMGIITDTTKARLLALEQEHGQLLAKIDTAKAEMVPINREDFVSLLDIYRTGDVNNKKYLAALFDTFLVRVDLYDDHFKITFDPTGGKMPVDIPIGAEDSPESPGDSPESSDFEASPQDAEKFVLALHNRTKREQNEHETTIKMVGNVFVLFCSIPSLTH

SEQ ID NO: 2121 - protein, 551 aa, Unknown
  Description of Unknown: Integrase B2122 sequence
  PTHR30461:SF3,SM00857,G3DSA:1.10.10.2600,IPR036162,PF13408, PS51737,G3DSA:3.40.50.1390,IPR025827,IPR006119,IPR038109, PF07508,IPR011109,SSF53041,PF00239,PTHR30461, PS51736,Coil,cd00338
MKITKFPIDLSMLTEEEIDQFRQDPSTLFEGDTDVCLYLRFSSERQREQSIEGQLRDCRTFCKLNSYRITAIYVDRATTARKDVEKRVHFQEMIRDSEKKPWEYVVVWKLDRFARNRTDSALFKFRLRKNGVKVISATENISEKPEGIILEAVLEGMAEFYSADLSQKITRGMRESALKCHSIGGHVPLGYKIEDHKLVINPATAHIVQEAFELYANGETVADICRIFNTKGYRTAKGVEFNRNSFKSMFRNKRYIGVYTYKDIEVEGGVPAIIDKELFETVGHRLSKNAEAPARGKAKVDYLLAGKLFCGHCGGSMNGESGTSKTGAIHNYYTCYTRKRKHACDKKPLKKDWIEYIVAQDAMELLTDDTIQELADMAISQTEQDLRENTRIPELTDRMKETESGITNITKAIEKGIASDALMNRLVELEKEKKNLLRLLAEEEKYVCKIERSQIVYWLTEFKGGRIEDERYRRIIIDLMINSVTVWDEPDGFRITTAYNLTSCKSKTFRIAPSGEKGFGFEGSESTIERKSEPYIVWGTVFVQTKRHTLP

SEQ ID NO: 2122 - protein, 551 aa, Unknown
  Description of Unknown: Integrase B2123 sequence
  PTHR30461:SF3,cd00338,SM00857,G3DSA:1.10.10.2600,IPR036162, PF13408,PS51737,G3DSA:3.40.50.1390,IPR025827,IPR006119, IPR038109,PF07508,IPR011109,SSF53041,PTHR30461, PS51736,Coil,PF00239
MKITKFPIDLSMLTEEEIDQFRQDPSTLFEGDTDVSLYLRFSSERQREQSIEGQLRDCRTFCKLNSYRITAIYVDRATTARKDVEKRVHFQEMIRDSEKKPWEYVVVWKLDRFARNRTDSALFKFRLRKNGVKVISATENISEKPEGIILEAVLEGMAEFYSADLSQKITRGMRESALKCHSIGGHVPLGYKIEDHKLVINPATAHIVQEAFELYANGETVADICRMFNAKGYRTAKGVEFNRNSFKSMFRNKRYIGVYTYKDIEMEGGVPAIIDKELFETVGRRLSKNAEAPARGKAKVDYLLAGKLFCGHCGGSMNGESGTSRTGAVHNYYTCYTRKRKHACEKKPLKKEWIEYIVAQDAMELLTDDTIQELADMAISQTEQDLRENTRIPELTERMKETESGITNITNAIEKGIASDALMNRLVELEKEKKNLLRLLAEEEKYVCKIERSQIVYWLTEFKGGRIEDERYRRIIIDLMVNSVTVWDEPDGFRITTAYNLTSCKSKTFRIDPSGEKGFGFEGSKSTIERISEPYIVWGKIFVQTKRHPLP

SEQ ID NO: 2123 - protein, 551 aa, Unknown
  Description of Unknown: Integrase B2124 sequence
  PTHR30461:SF3,IPR036162,PS51737,IPR011109,PTHR30461, PF00239,G3DSA:1.10.10.2600,IPR006119,SSF53041,cd00338, SM00857,IPR025827,IPR038109,mobidb-lite,PS51736, PF13408,G3DSA:3.40.50.1390,PF07508,Coil
MRKKSNLNAATRAVIYARYSSANQRDCSIEQQVAKCRELAARLGLTVIDVYEDRAISGKTDRRPNFQRMMKDADLRQFDVVLAWKSNRMGRNMLQAMTNEERLRDNGIRTVYAEEDFDDTAAGRFALRNMMNVNQFYSENMAEDITRGLMDNAAKCLSNGSLPLGYKPGDDRHVVLDEAEAAIVQEIFTRVSCYEPFIDIARDLNRRGIKTKKGSEWGRSSFHTICRNERYRGIYIYRDVRIEGGMPRIVSDELFYKVQEVLKVKKNPQGRRKRSGYEEYLLTGKLFCGHCGSPMTGIAGTSKTGAMHYYYTCQKRRTDHSCDKKAVRRDQIERAVGVAIQQQLLTDENIQMMADKLMEYNARTETKYRLQGLQDQLNANKTATANILKAIEMGIITDATKARLLELEKEQGQLLVKIDEAKAEMVPISRNDFVKLLYIYKEGEPTDKKYLAALFDNFLVRVDLYDDHLKITFDPTGGRQPIDMPIGAEESPESPGDSSESSDFEASSQDAEKFVLALHNCTKREQNEHKTTVKMVGNVFVLFCSIPSLTH

SEQ ID NO: 2124 - protein, 551 aa, Unknown
  Description of Unknown: Integrase B2125 sequence
  PTHR30461:SF3,SM00857,G3DSA:1.10.10.2600,IPR036162,PF13408, IPR025827,PS51737,G3DSA:3.40.50.1390,IPR006119,IPR038109, PF07508,SSF53041,IPR011109,PTHR30461,PS51736, cd00338,PF00239
MPRKKAPAAEVPRLVAYYRYSGGSRQTEQSIEGQRRDCEAYARAHGMTILREYVDRHISGKTDDRPAFQQLVADSAAHIFDAVICWKTDRLARNRYDSAVYKKKLRDNGVEILYAAESNISGAEGIIIEGLMEALAEYYSAELAEKARRGMRESALKGKALGSSRPLGLTVDAGKHYIIEPTGAEAVRYIFEQYAAGLSSSSIVERLNAMGLRTSHGGPFNKSSINRIIQNEMYRGVYVSKKFDVRIEGAIPAIIDNDLWKRAQNMFERNRQSRTPHASRADYILSGKLYCGECGCLMKGVCGRSSGNGQMYHYYACPGRSIGRACTRKNIPQDELEAMVVNSVADLLLEPELLEQIADAIVELQQAEAARPDPEKQALEKSLSDVRSKIQNILTAIENGTSSAALSARLADLEQQESTLSYQLSSLTAKKPLTFTRDQILFLLQQFRVSPSERTKAYCRRLVDTFVDHIELTNTELILYFNISDETIDKNKKAPRSNPSKESSTEKRLVRLTFSQSNLSVTIFPSYFFLTCPLSHQPLPSGTSSSISSFR

SEQ ID NO: 2125 - protein, 551 aa, Unknown
  Description of Unknown: Integrase B2126 sequence
  PTHR30461:SF3,SM00857,G3DSA:1.10.10.2600,IPR036162,PF13408, PS51737,IPR025827,G3DSA:3.40.50.1390,IPR006119,IPR038109, PF07508,IPR011109,SSF53041,PF00239,PTHR30461, PS51736,Coil,cd00338
MKKFPIDLSCLTEEEISQFQEDPYTLYNGDQDVALYLRYSSTGQSDQSIEGQLRDCRAFCKANHYRIVAIYVDRATTARKDVEKRVHLMEMVADSAKQNWEYVIVWKLDRFARNRNDSAIMKMRLRKNGVKVLSATEHLTDSPESIILESVLEGMAEFFSAELSQKVTRGMRESALKCHSVGGHIPLGYKVENHKLVVDPDTAHIVQEAFSLYANGESVADICRKFNSAGYKTAKNTEFNRSSFKAMFRNTRYIGIYTYKDIVIENGIPAIIDKELFETVQRRLSKTATAPARGKAKVDYLLSGKLFCGHCGASMNGESGAGRHGKVYHYYSCYTKKRKLGCDKRPLKKDYIEGIVARDALNLLTDQLIDEIADMAIRQSEQDLINDTHIPQLTAQLSEVEKSITNITTAIEKGIASETLMNRLVQLEHEKKTLNKEIKAEEKFVYRIDRDQIVFWLSQFKYGNIEDEDFRRRLIDLLVNSVTVWDEPDGYKITTAYNLTSCKTKTFRVEKNPAAEEATGFDFGESECTSRCELFMVCNDFFNICSFLRRN

SEQ ID NO: 2126 - protein, 551 aa, Unknown
  Description of Unknown: Integrase B2127 sequence
  PTHR30461:SF3,cd00338,SM00857,G3DSA:1.10.10.2600,IPR036162, PF13408,PS51737,IPR025827,G3DSA:3.40.50.1390,IPR006119, IPR038109,PF07508,SSF53041,IPR011109,PTHR30461, Coil,PF00239
MYEEIKTACLYLRYSSSNQTEQSIEGQMHVCQDFCKRHNIRIVEMYIDRATSASKDIEKRVEFLKMIKDSEKGNFNAVIVYKLDRFARSRYDSATYKYRLKRNGVQLISATENITQDPEGIILESVLEGMAEFYSAELSQKINRGMRESAMKHNSIGGAIPLGYKTVDKKLVIDETTAPIVREAFQMYADGESVAEICRTFNNRGYKTSKGTRFGKSSFTKIFRNEKYIGVYKYHDYRAEDVIPPIIDKDLWDRVQVRVGKIKKAPARNKARHTYLLTGKLFCGHCGSAMNADGNSQGYLYYRCYGKKNLDKQCNKRNMEKNLIERLVAQDAMSFLTDEYIEKIATIACDRNKQEIESDSPIPVIRDRIRQVDVSLNNLLKAIETGSAPDMLVKRMGELETEKKDMEVQLKKEMAHQVYIDKEQVIFWLEKFREGDINDEEFCQTVIDLFVNSVTVWDEPDDKFKITIAYNLTSIPQKTYRLSKDGRLSDYASNTPDWESQKDLVIRTHIHLFLHNLRSVFLITHFHTASGFFIHPVKISLCIWNLRLNLK

SEQ ID NO: 2127 - protein, 551 aa, Unknown
  Description of Unknown: Integrase B2128 sequence
  PTHR30461:SF3,IPR036162,PS51737,IPR011109,PTHR30461, PS00397,PF00239,G3DSA:1.10.10.2600,IPR006119,SSF53041, SM00857,IPR025827,IPR038109,PS51736,cd03768, IPR006118,PF13408,G3DSA:3.40.50.1390,PF07508,Coil
MNKKSAIYVRVSTSHQIDKDSLPLQRKDLINYSKLILGINDYVIFEDAGYSGKNTDRPAFKDMFNRIKEGEFSHLLVWKIDRISRNLLDFCSMYDELKKYNCTFISKNEQFDTSSAMGEAMLKIILVFAELERKLTGERVAATMLDRATKGLWNGAPIPLGYKWDKAIKFPVIDDEERLTVELIYDKYIETESTSAVMKYLNQENIKTKRNGSWTTKTVGDILRNPFYKGTYRYNFRESARGKKKKENEWIVLDNNHDPIIDLDLWTKCNNILDENAKKNSARFRAKSKTHIFAGLLECGECHKSFYSKSDKTSLDGYTPSIYTCSSRYNHLGCNQKTISDTIIGNFTLNFISNMIKLSKTYKKLSPEDIEKKLLLGSSFNDVKGIIEIDDIFNSFYNTSSKIFKPNKQETKPANVDLNKLDADLKKQHRALERLENLYLYAEDEMSEKDYILKKNIINTKIKEIDTKIKSSATISTSTYNINFFLNTATLELSKEIIEGNINMKSLIQRVGRDIIKEFVNSLITKITVRDRKVISIQFTNGLISTFIYEV

SEQ ID NO: 2128 - protein, 551 aa, Unknown
  Description of Unknown: Integrase B2129 sequence
  PTHR30461:SF3,IPR036162,PS51737,IPR011109,PTHR30461, PF00239,G3DSA:1.10.10.2600,IPR006119,SSF53041,cd00338, SM00857,IPR025827,IPR038109,mobidb-lite,PS51736, PF13408,G3DSA:3.40.50.1390,PF07508,Coil
MKKRINTNSAARAVIYARYSSANQRDCSIEQQVEKCRELAAREGVTVIEIYADRAVSGKTDRRPNFQRMMKDASLRQFDVVLAWKSNRMGRNMLQAMMNEEQLRSNGIRTIYAEEDFDDTAAGRFALRNMMNVNQFYSENMAEDISRGLMDNASKCMSNGSLPLGYKTGKDQKVVLDEAEAAIVQEIFTRVSCYEPFIDIARDLNRRGIKTKKGAEWGRSSFHTICRNERYRGIYIYRDIRVEGGMPRIVSDELFYKVQEVLKVKKNPQGRRKRSGYEEYLLTGKLYCGHCGSPMTGIAGTSKTGAMHYYYTCQKRRTDHSCDKKAVRRDQIEKAVAIAIQQQLLTDENIQMMADETMAYNARTEIKYRLQSLQQQLYSNETSTANIMKAIEMGIITDTTKARLLALEQEHGQLLAKIDTAKAEMVPINREDFVSLLDIYRTGDVNNKKYLAALFDTFLVRVDLYDDHFKITFDPTGGKMPVDIPIGAEDSPESLGDSPESSDFEASPQDAEKFVLALHNRTKREQNEHKTTVKMVGNVFVLFCSIPSLTH

SEQ ID NO: 2129 - protein, 551 aa, Unknown
  Description of Unknown: Integrase B2130 sequence
  PTHR30461:SF3,SM00857,G3DSA:1.10.10.2600,IPR036162,PF13408, PS51737,IPR025827,G3DSA:3.40.50.1390,IPR006119,IPR038109, PF07508,IPR011109,SSF53041,PTHR30461,Coil, cd00338,PF00239
MKKFKFPIDLSMLTEEEINQFREDPSTLFQGEIDVCLYLRFSSERQKEQSIEGQLRDCIAHCKRKSYRIVAIFVDRATTARKDVEKRVHFQEMITASVHQTWKLVIVWKLDRFARNREDSAVFKMRLRKNGVKVESATEGISKNPEGIILEAVLEGIAEYYSADLSQKITRGMRESALKCHSIGGHVPLGYKIEDHKLVINPNTAHIVQEAFELYANGETVADICRMFNTKGYRTAKGAEFNRNSFKSMFRNKRYIGVYTYKEIEKEGGVPAIIDKELFETVQRRLSANAEAPARGKAKVDYLLAGKLFCGHCGGSMNGESGTSKTGTVHNYYTCYTRKRQHSCDKKPLRKEWIEQVVAQDAMNLLTDDAIQEMADMAISQTERDLRENTRIPELSEKMKETESGIANITKAVEKGIASDALMNRLVELEKEKKNLLRLLAEEEKYVCKIDRDQIIYWLTKFKDGNIEDEKFKRIIIDLMVNSVTVWDEPDGFRITTAYNLTSCKNKTFRIPSSSDKGFGFEGLESTIERKSEPCFVWGTIFVQTKRHSLP

SEQ ID NO: 2130 - protein, 551 aa, Unknown
  Description of Unknown: Integrase B2131 sequence
  PTHR30461:SF3,SM00857,G3DSA:1.10.10.2600,IPR036162,PF13408, PS51737,G3DSA:3.40.50.1390,IPR025827,IPR006119,IPR038109, PF07508,IPR011109,SSF53041,PTHR30461,Coil, cd00338,PF00239
MKKFKFPIDLSMLTEEEINQFREDPSTLFQGDTDVCLYLRFSSERQKEQSIEGQLRDCIAYCKRKNYRIVAIYVDRATTARKDVEKRVHFQEMITASVHQTWKLVIVWKLDRFARNREDSAVFKMRLRKNGVKVESATEGISKNPEGIILEAVLEGIAEYYSADLSQKITRGMRESALKCHSIGGHVPLGYKIEDHKLVINPNTAHIVQEAFELYANGETVADICRMFNAKGYRTAKGAEFNRNSFKSMFRNRRYIGVYRYKDFEKEGGVPPIIDKDLFETVQKRLSANAEAPARGKAKVDYLLAGKLFCGHCGGSMNGESGTSKTGAVHNYYACYTRKRQHSCDKKPLRKEWIEQIVAQDAMELLTDDAIQEMADMAISQTEKDLRENTRIPELSERMKETESGIANITKAVEKGIASDALMSRLVELEKEKKNLLRLIAEEEKYVCKIDRDQIVYWLTKFKDGNIEDENFKRIIIDLMVNSVTVWDEPDGFRITTAYNLTSCKNKTFRIPSSSDKGFGFEGLESTIERKSEPCFVWGTIFVQTKRHSLP

SEQ ID NO: 2131 - protein, 551 aa, Unknown
  Description of Unknown: Integrase B2132 sequence
  PTHR30461:SF3,IPR036162,PS51737,IPR011109,PTHR30461, PF00239,G3DSA:1.10.10.2600,IPR006119,SSF53041,cd00338, SM00857,IPR025827,IPR038109,mobidb-lite,PS51736, PF13408,G3DSA:3.40.50.1390,PF07508,Coil
MKKRINTNSAARAVIYARYSSANQRDCSIEQQVEKCRELAAREGVTVIEIYADRAISGKTDRRPNFQRMMKDASLRQFDVVLAWKSNRMGRNMLQAMMNEEQLRGNGICTIYAEEDFDDTAAGRFALRNMMNVNQFYSENMAEDISRGLMDNASKCMSNGSLPLGYKTGKDQKVVLDEAEAAIVQEIFTRVSCYEPFIDIARDLNRRGIKTKKGAEWGRSSFHTICRNERYRGIYIYRDIRVEGGMPRIVSDELFYKVQEVLKVKKNPQGRRKRSGYEEYLLTGKLYCGHCGSPMTGIAGTSKTGAMHYYYTCQKRRTDHSCDKKAVRRDQIEKAVAIAIQQQLLTDENIQMMADETMAYNARTEIKYRLQSLQQQLYSNETSTANIMKAIEMGIITDTTKARLLALEQEHGQLLAKIDTAKAEMVPINREDFVSLLDIYRTGDVNNKKYLAALFDTFLVRVDLYDDHFKITFDPTGGKMPVDIPIGAEDSPESPGDSPESSDFEASPQDAEKFVLALHNRTKREQNEHKTTVKMVGNVFVLFCSIPSLTH

SEQ ID NO: 2132 - protein, 551 aa, Unknown
  Description of Unknown: Integrase B2133 sequence
  PTHR30461:SF3,SM00857,G3DSA:1.10.10.2600,IPR036162,PF13408, IPR025827,PS51737,G3DSA:3.40.50.1390,IPR006119,IPR038109, PF07508,IPR011109,SSF53041,PF00239,PTHR30461, Coil,cd00338
MKKFKFPIDLSMLTEEEINQFREDPSTLFQGEIDVCLYLRFSSERQKEQSIEGQLRDCIAHCKRKSYRIVAIFVDRATTARKDVEKRVHFQEMITASVHQTWKLVIVWKLDRFARNREDSAVFKMRLRKNGVKVESATEGISKNPEGIILEAVLEGIAEYYSADLSQKITRGMRESALKCHSIGGHVPLGYKIEDHRLVINPNTAHIVQEAFELYANGETVADICRMFNTKGYRTAKGAEFNRNSFKSMFRNKRYIGVYTYKEIEKEGGVPAIIDKELFETVQRRLSANAEAPARGKAKVDYLLAGKLFCGHCGGSMNGESGTSKTGAIHHYYSCYSRKRHHSCDKKPLRKEWIEQIVAQDAMELLTDDAIQEMADMAISQTEKDLRENTRIPELSERMKETESGIANITKAVEKGIASDALMNRLVELEKEKKNLLRLIAEEEKYVCKIDRDQIVYWLTKFKDGNIEDENFKRIIIDLMVNSVTVWDEPDGFRITTAYNLTSCKNKTFRIPSSSDKGFGFEGLESTIERKSEPCFVWGTIFVQTKRHSLP

SEQ ID NO: 2133 - protein, 551 aa, Unknown
  Description of Unknown: Integrase B2134 sequence
  PTHR30461:SF3,cd00338,SM00857,G3DSA:1.10.10.2600,IPR036162, PF13408,PS51737,G3DSA:3.40.50.1390,IPR025827,IPR006119, IPR038109,PF07508,IPR011109,SSF53041,PTHR30461, PS51736,Coil,PF00239
MTFPVDLSCLTEEELAQFREDPTTLFEGDYDVVLYLRYSSSGQSDQSIEGQLRDCRAFCKANHYRIVGIYVDRATTARKDVEKRVHLMEMIADSAKQNWRYVVVWKLDRFARNRNDSAVMKVRLRKNGVKVLSATEHLTDSPESIILESVLEGMAEFFSAELSQKVTRGMRETALKCNSVGGHIPLGYKVVDHKLAIDPNTAPIVCEAFALYANGVSVAEICRQFNAKGYRTAKNSQFNRSSFKSMFRNQRYIGIYKYKDIAVENGIPAIVDKDVFAKVQERLHKATGAPARGKAKVDYLLSGKLFCGHCGSPMDGESGTGRRGRVYNYYVCYSKKRKRGCDKRPLRKDYIENIVAQDALNLLTDDLIEEIADKAIQQSEMDILTETRLPVLTAKKQEVETSIKNITTAVEKGIASETLMTRLVELEHEKKNLEKEIKAEEKYIYKIDRHQIVFWLSQFRHGDVENENCRRQLIDLLINSVTVWDEPDGYKITTAYNLTSCKTKTFRISDHSKSSIKGFVFEESWRAIGRESEPCIVWGSILVQTKRHPLF

SEQ ID NO: 2134 - protein, 551 aa, Unknown
  Description of Unknown: Integrase B2135 sequence
  PTHR30461:SF3,cd00338,SM00857,G3DSA:1.10.10.2600,IPR036162, PF13408,IPR025827,G3DSA:3.40.50.1390,PS51737,IPR006119, IPR038109,PF07508,SSF53041,IPR011109,PTHR30461, PS51736,Coil,PF00239
MKRTAIYARYSSDNQRAESIDEQIRACRYYAQQTGLYDIVAVYKDEALSGYKNAHKRDGFAQLMADAEAGKFEAVMVYELSRFSRNGSDTIVNTEKLARLGIEFVSVREKLDQTPEGRMMMFVITGMNEYYSANLAIETMRGLKENAYQAKHTGGIPPLGYDLDSNGHYIINPEEAVAVRLIFDMYLEGNGYTAICDELNRRGYRTKRGTLFVRNSMYDLLRNEKYTGSFIYNHMAKAKNGKRNRHAYKSDSEVIRVENAFPAIISKEEYRKVLKLMEQNKRKGARNAAVHDYLLSGKVYCGHCGKSMYGETRYRKEYSYSYYSCNGHKSKICGKHSIRCDKLEAEVIRQLNELFFSDEILDRVSEKIYDDSQNHFMDERAAILRKRSADIKKKIDNGTKAILDGVDSDELRSAVKELSAQKKQIDQQIVQIEAAADNNGRTFEEVREMAKNFSDISKLPRDQQKRIVQKFIWRIYVYDSENPDDGDIVKIVLAPTEAARDELNSMAEDYVAITDMLTSTSGTSQGVPMKFDNNINIIVWTNCIIILSAKV

SEQ ID NO: 2135 - protein, 550 aa, Unknown
  Description of Unknown: Integrase B2136 sequence
  PTHR30461:SF3,SM00857,G3DSA:1.10.10.2600,IPR036162,PS51737, G3DSA:3.40.50.1390,IPR006119,IPR038109,PF07508,IPR011109, SSF53041,PTHR30461,Coil,cd00338,PF00239
MYRPPELTLNPDEILVYLRKSRSDDPLMSVEEVLAKHETILDEWSEKNLGGLVPEENKYREVVSGETLKERPEINTVLRRIESPKIKAVAAVEPQRLTRGDLEDIGRLMKLFKHTKTLIITPTRTYDLQDDYDWDAFERELKRGNEFLEYTKKILNRGRLLSVSQGNYIGSIPPYGYKKVFVTDGKRKCPTLEVVEDQAEVVRTIFDLFVNQNYGSCKIRNYLNDMHVPAPRGEKWTENGMRDMLTNVHYIGKVKWNWRKNITTVEESEIVTHRPKAQPGEYLIFEGKHEAIISEALFNAAQEKIGHTGRVKSEHEMVNPFAGILFCKCGKALTMKVQKGADGSMSSRFYCANLRNCGTSSCMCNEIVEKVSDTLKQAIQDFTVMLDSGDKESIKRHTARIKILETKLQDLEKREMALWEAQADPDLSVRMPNHIFLALNDKIVKEREQTTLMLEQTYASMPNPKLYRENIQRFSDAVEALNSPEVPAAIKNKLLKACIERIEYSKPKAERIKSSSKRIWVNGHRIRTNPLPTGGNWTSPEISLDIKLRV

SEQ ID NO: 2136 - protein, 550 aa, Unknown
  Description of Unknown: Integrase B2137 sequence
  PTHR30461:SF3,SM00857,G3DSA:1.10.10.2600,IPR036162,PS51737, G3DSA:3.40.50.1390,IPR006119,IPR038109,PF07508,SSF53041, IPR011109,PTHR30461,Coil,mobidb-lite, cd00338,PF00239
MYYQPKIDFKPEEVIDYLRKSRSDDPLLTVEEVLSKHEAMLDEWAEKHLGAVVPEENKYREVVSGETIAERPEINRVLRLIESPKYKAVAVVEPQRLTRGDLEDIGRLMKLLKHTNTLVITPQRIYDLRDEYDWDAFERELKRGNDYLEYTKKILNRGRLLSVSQGNYVGNTPPYGYDKTFVTEGKRKCPILVPNKAEADVVRMMFDLYVNKDMGCTNICKKFDEMGIKPPKGDYWSPAAMTKMLQNIHYIGKVKWNHRKTLTIVEEGEFKKTRPVAQVGEFLIYDGKHEAIIPEELFNAAQAKKGKNTRQKPNTKVRNPFAGLIWCRCGRAMSLRTYKNRDAAPRLLCDGQTHCKTGSCLYSEMEERVISILTDCIKDFEIRLKNDEGDSAKLHARLIKNLEAKQKELDEKELAQWEAQADPDPAKRMPPHIFQQLNEKLLKEKEEVRQALCKAYESMPEPVNYEEKITQFSEALNALKDPNIDAATKNRLLKACIERIEYHRDTPQRIKSQQVRYYDPEQKRTRYRSPLSTGGNWTSPEIVLDVKLKA

SEQ ID NO: 2137 - protein, 550 aa, Unknown
  Description of Unknown: Integrase B2138 sequence
  PTHR30461:SF3,SM00857,G3DSA:1.10.10.2600,IPR036162,PS51737, G3DSA:3.40.50.1390,IPR006119,IPR038109,PF07508,IPR011109, SSF53041,PF00239,PTHR30461,mobidb-lite,Coil, cd00338
MYYQPKIDFKPEEVIDYLRKSRSDDPLLTVEEVLSKHEAMLDEWAEKHLGAVVPEENKYREVVSGETIAERPEINRVLRLIESPRYKAVAVVEPQRLTRGDLEDIGRLMKLLKHTNTLVITPQRIYDLRDEYDWDAFERELKRGNDYLEYTKKILNRGRLLSVSQGNFVGNTAPYGYDKTFVTEGKRKCPILVPNKEEADVVRMMFDLYVNKDMGCTNICKKFDAMGIKPPKGEHWSAAAMTKMLENIHYIGKVKWNHRKTLTIVEEGEFKKTRPVAKVGEYLIYDGKHEAIVPEELFNAAQAKKGKNTRQKPNTKVRNPFAGLIWCKCGRAMSLRIYKNRDAAPRLLCDGQTYCKTGSCLYTEMEERVSAILADCIRDFQVRLKNNEGDSVKLHMRLINNLEAKQKELEAKELAQWEAQADPDPAKRMPPHIFQKLNEKLLKEKEEVRQALCKAYESMPEPVDYEEKIAQFTEALNALHNPDVDAATKNRLLKACIERIEYHRDAPQRIRSKQVRYYDKEQKRTRNKSPLNTGGNWTSPEIVLDVKLRV

SEQ ID NO: 2138 - protein, 550 aa, Unknown
  Description of Unknown: Integrase B2139 sequence
  PTHR30461:SF3,cd00338,SM00857,G3DSA:1.10.10.2600,IPR036162, PS51737,G3DSA:3.40.50.1390,IPR006119,IPR038109,PF07508, IPR011109,SSF53041,PTHR30461,Coil,PF00239
MYYQPKIDFKPEEVIDYLRKSRSDDPLLTVEEVLSKHEAMLDEWAEKHLGAVVPEENKYREVVSGETIAERPEINRVLRLIESPKYKAVAVVEPQRLTRGDLEDIGRLMKLLKHTNTLVITPQRIYDLRDEYDWDAFERELKRGNDYLEYTKKILNRGRLLSVSQGNYVGNTPPYGYDKTFVTEGKRKCPILVPNKAEADVVRMMFDLYVNKDMGCTNICKKFDEMGIKPPKGDYWSPAAMTKMLQNIHYIGKVKWNHRKTLTIVEEGEFKKTRPVAQVGEFLIYDGKHEAIIPEELFNAAQAKKGKNTRQKPNTKVRNPFAGLIWCKCGRAMSLRTYKNRDAAPRLLCDGQTHCKTGSCLYSEMEERVISILTDCIKDFEIRLKNDEGDSAKLHARLIKNLEAKQKELDEKELAQWEAQADPDPAKRMPPHIFQQLNEKLLKEKEEVRQALCKAYESMPEPVNYEEKITQFSEALNALKDPNIDAATKNRLLKACIERIEYHRDTPQRIKSQQVRYYDPNQKRTRYKSPLSTGGNWTSPEIVLDVKLKA

SEQ ID NO: 2139 - protein, 550 aa, Unknown
  Description of Unknown: Integrase B2140 sequence
  PTHR30461:SF3,cd00338,SM00857,G3DSA:1.10.10.2600,IPR036162, PS51737,G3DSA:3.40.50.1390,IPR006119,IPR038109,PF07508, IPR011109,SSF53041,PTHR30461,Coil, PF00239
MYYQPKIDFKPEEVIDYLRKSRSDDPLLTVEEVLSKHEAMLDEWAEKHLGAVVPEENKYREVVSGETIAERPEINRVLRLIESPKYKAVAVVEPQRLTRGDLEDIGRLMKLLKHTNTLVITPQRIYDLRDEYDWDAFERELKRGNDYLEYTKKILNRGRLLSVSQGNYVGNTPPYGYDKTFVTEGKRKCPILVPNKAEADVVRMMFDLYVNKDMGCTNICKKFDEMGIKPPKGDYWSPAAMTKMLQNIHYIGKVKWNHRKTLTIVEEGEFKKTRPVAQVGEFLIYDGKHEAIIPEELFNAAQAKKGKNTRQKPNTKVRNPFAGLIWCRCGRAMSLRTYKNRDAAPRLLCDGQTHCKTGSCLYSEMEERVISILTDCINDFEIRLKNDEGDSAKLHARLIKNLEAKQKELDEKELAQWEAQADPDPAKRMPPHIFQQLNEKLLKEKEEVRQALCKAYESMPEPVNYEEKITQFSEALNALKDPNIDAATKNRLLKACIERIEYHRDTPQRIKSQQVRYYDPKQKRTRYKSPLSTGGNWTSPEIVLDVKLKA

SEQ ID NO: 2140 - protein, 550 aa, Unknown
  Description of Unknown: Integrase B2141 sequence
  PTHR30461:SF3,cd00338,SM00857,G3DSA:1.10.10.2600,IPR036162, PS51737,G3DSA:3.40.50.1390,IPR006119,IPR038109,PF07508, IPR011109,SSF53041,PTHR30461,mobidb-lite,Coil, PF00239
MYYQPKIDFKPEEVIDYLRKSRSDDPLLTVEEVLSKHEAMLDEWAEKHLGAVVPEENKYREVVSGETIAERPEINRVLRLIESPKYKAVAVVEPQRLTRGDLEDIGRLMKLLKHTNTLVITPQRIYDLRDEYDWDAFERELKRGNDYLEYTKKILNRGRLLSVSQGNYVGNTPPYGYDKTFVTEGKRKCPILVPNKAEADVVRMMFDLYVNKDMGCTNICKKFDEMGIKPPKGDYWSPAAMTKMLQNIHYIGKVKWNHRKTLTIVEEGEFKKTRPVAQVGEFLIYDGKHEAIIPEELFNAAQAKKGKNTRQKPNTKVRNPFAGLIWCRCGRAMSLRTYKNRDAAPRLLCDGQTHCKTGSCLFSEMEERVISILTDCIKDFEIRLKNDEGDSAKLHARLIKNLEAKQKELDEKELAQWEAQADPDPAKRMPPHIFQQLNEKLLKEKEEVRQALCKAYESMPEPVNYEEKITQFSEALNALKDPNIDAATKNRLLKACIERIEYHRDTPQRIKSQQVRYYDPEQKRTRYKSPLSTGGNWTSPEIVLDVKLKA

SEQ ID NO: 2141 - protein, 550 aa, Unknown
  Description of Unknown: Integrase B2142 sequence
  PTHR30461:SF3,cd00338,SM00857,G3DSA:1.10.10.2600,IPR036162, PS51737,G3DSA:3.40.50.1390,IPR006119,IPR038109,PF07508, IPR011109,SSF53041,PTHR30461,mobidb-lite,Coil, PF00239
MYYQPKIDFKPEEVIDYLRKSRSDDPLLTVEEVLSKHEAMLDEWAEKHLGAVVPEENKYREVVSGETIAERPEINRVLRLIESPKYKAVAVVEPQRLTRGDLEDIGRLMKLLKHTNTLVITPQRIYDLRDEYDWDAFERELKRGNDYLEYTKKILNRGRLLSVSQGNYVGNTPPYGYDKTFVTEGKRKCPILVPNKAEADVVRMMFDLYVNKDMGCTNICKKFDEMGIKPPKGDYWSPAAMTKMLQNIHYIGKVKWNHRKTLTIVEEGEFKKTRPVAQVGEFLIYDGKHEAIIPEELFNAAQAKKGKNTRQKPNTKVRNPFAGLIWCRCGRAMSLRTYKNRAAAPRLLCDGQTHCKTGSCLYSEIEERVISILTDCIKDFEIRLKNDEGDSAKLHARLIKNLEAKQKELDEKELAQWEAQADPDPAKRMPPHIFQQLNEKLLKEKEEVRQALCKAYESMPEPVNYEEKITQFSEALNALKDPNIDAATKNRLLKACIERIEYHRDTPQRIKSQQVRYYDQKQKRTRYKSPLSTGGNWTSPEIVLDVKLKA

SEQ ID NO: 2142 - protein, 550 aa, Unknown
  Description of Unknown: Integrase B2143 sequence
  PTHR30461:SF3,SM00857,G3DSA:1.10.10.2600,IPR036162,PS51737, G3DSA:3.40.50.1390,IPR006119,IPR038109,PF07508,SSF53041, IPR011109,PF00239,PTHR30461,mobidb-lite,Coil, cd00338
MYYQPKIDFKPEEVIDYLRKSRSDDPLLTVEEVLSKHEAMLDEWAEKHLGAVVPEENKYREVVSGETIAERPEINRVLRLIESPRYKAVAVVEPQRLTRGDLEDIGRLMKLLKHTNTLVITPQRIYDLRDEYDWDAFERELKRGNDYLEYTKKILNRGRLLSVSQGNYVGNIAPYGYDKTFVTEGKRKCPILVPNKEEADVVRMMFDLYVNKNMGCTTICKKFDEMGIKPPKGEHWSMAAMTKMLENIHYIGKVKWNHRKTLTIVEEGEFKKTRPVAKVGEYLIYDGKHEAIVPEELFNAAQAKKGRNTRQKPTTKVRNPFAGLIWCKCGRAMSLRIYKNRDSAPRLLCDGQTYCKTGSCLYSEMEERVSAILADCIRDFQVRLKNNEGDSVKLHMRLINNLEAKQKELEAKELAQWEAQADPDPAKRMPPHIFQKLNEKLLKEKEEVRQALCKAYESMPEPVDYEEKIAQFTEALNALHNPDVDAATKNRLLKACIERIEYHRDAPQRIRSKQVRYYDKEQKRTRHKSPLNTGGNWTSPEIVLDVKLRV

SEQ ID NO: 2143 - protein, 550 aa, Unknown
  Description of Unknown: Integrase B2144 sequence
  PTHR30461:SF3,SM00857,G3DSA:1.10.10.2600,IPR036162,PS51737, G3DSA:3.40.50.1390,IPR006119,IPR038109,PF07508,IPR011109, SSF53041,PF00239,PTHR30461,mobidb-lite,Coil, cd00338
MYYQPKIDFKPEEVIDYLRKSRSDDPLLTVEEVLSKHESMLDEWAEKHLGAVVPEENKYREVVSGETIAERPEINRVLRLIESPRYKAVAVVEPQRLTRGDLEDIGRLMKLLKHTNTIVITPQRIYDLRDEYDWDAFERELKRGNDYLEYTKKILNRGRLLSVSQGNYVGNTAPYGYDKTFVTEGKRKCPILVPNKEEADVVRMMFDLYVNKDMGCTTICKKFDEMGIKPPKGEHWSTAAMTKMLENIHYIGKVKWNHRKTLTIVEEGEFKKTRPVAKVGEYLIYDGKHEAIVSEELFNAAQAKKGRNTRQKRNTKIRNPFAGLIWCKCGRAMSLRTYKNRDAEPRLLCDGQTYCKTGSCTYADIEQRVSTILADCIRDFQVRLKNNEGDSVKLHMRLINNLEAKQKELEAKELAQWEAQADPDPAKRMPQHIFQQLNERLLREKEEVRQALCKAYESMPEPVDYAEKIKLFTEALNALHNPDMDAQTKNRLLKACIERIEYHRDAPQRIRSQQVRYYDKEQKRTRNKSPLNTGGNWTSPEIVLDVKLRV

SEQ ID NO: 2144 - protein, 550 aa, Unknown
  Description of Unknown: Integrase B2145 sequence
  PTHR30461:SF3,cd00338,SM00857,G3DSA:1.10.10.2600,IPR036162, PS51737,G3DSA:3.40.50.1390,IPR006119,IPR038109,PF07508, IPR011109,SSF53041,PTHR30461,Coil,PF00239
MYYQPKIDFTPDEVIDYLRKSRSDDPTLTVEEVLAKHEAILDEWSEKNLGGIVPEENKYREVVSGETLKERPEINKVIKRIESPKIKAIQIVEPQRLTRGDLEDIGRIMKLLKHTNTLVITPNRIYNLHDDYDWDALERELKRGNEFLEYTKKILNRGRLLSVSQGNYIGNTPPYGYRKEFVMEGKKKCPILVPNKDEAEVVRMMFDLYVNEDMGCWNICKKFDEMGIKPPKGDHWSANAMTKMLENIHYIGKVKWNHRKTITIVEDGEFVQTRPVAKIGEYLIYDGKHKAIVSEELFNAAQAKKGKNARLKPNTKIRNPLAGLLWCKCGRAMSLRTYKAHNAQPRLLCDGQTYCKTGSCTYDEMIVRVEEILKNCISDFEVRLKSDEGDSAKLHARLIKNLEKKKKELEAKELAQWETQSHPDPAQRMPQHIFQQLNEKLLKEKEEVQQALCKAYESMPEPVDYEEKIKMFQDALDALQNPDASAAEKNKLLKACIERIEYHRDKPERIKSQQVRFYDPVLKKTRNKSPLKTGGNWTTPNIELDVKLKV

SEQ ID NO: 2145 - protein, 550 aa, Unknown
  Description of Unknown: Integrase B2146 sequence
  PTHR30461:SF3,cd00338,SM00857,G3DSA:1.10.10.2600,IPR036162, PF13408,IPR025827,G3DSA:3.40.50.1390,PS51737,IPR006119, IPR038109,PF07508,SSF53041,IPR011109, PTHR30461,PS51736,Coil,PF00239
MTVKKFPIDLSCLTEEEISQFQEDPYTLYNGDQDVALYLRYSSTGQSDQSIEGQLRDCRAFCKANHYRIVAIYVDRATTARKDVEKRVHLMEMVADSAKQNWEYVIVWKLDRFARNRNDSAIMKMRLRKNGVKVLSATEHLTDSPESIILESVLEGMAEFFSAELSQKVTRGMRESALKCHSVGGHIPLGYKVENHKLVVDPDTAHIVQEAFSFYANGESVADICRKFNSAGYKTAKNTEFNRSSFKAMFRNTRYIGTYTYKDIVIENGIPAIIDKELFETVQRRLSKTATAPARGKAKVDYLLSGKLFCGHCGASMNGESGAGRHGKVYHYYSCYTKKRKLGCDKRPLKKDYIEGIVARDALNLLTDQLIDEIADMAIRQSEQDLINDTHIPQLTAQLSEVEKSIMNITAAIEKGIASETLMNRLVQLEHEKKTLNKEIKAEEKFVYRIDRDQIVFWLSQFKYGNIEDENFRRRLIDLLVNSVTVWDEPDGYKITTAYNLTSCKTKTFRVDKNPAAEEATGFDFGESECTKSPRNRLISRTFVFHKFRI

SEQ ID NO: 2146 - protein, 550 aa, Unknown
  Description of Unknown: Integrase B2147 sequence
  PTHR30461:SF3,cd00338,SM00857,G3DSA:1.10.10.2600,IPR036162, PS51737,G3DSA:3.40.50.1390,IPR006119,IPR038109,PF07508, IPR011109,SSF53041,PTHR30461,PS51736,Coil, PF00239
MYYQPKINFSPNEVIAYLRKSRSDDPLLTVEEVLSKHETMLDEWAEKNLGAAVPEENKFREVVSGETIAERPEINRVLRLIESPKYKAVAVVEPQRLTRGDLEDIGRIMKLLKHTSTLVITPQRIYDLRDEYDWDTFERELKRGNDYLEYTKKILNRGRLLSVSQGNYIGNVPPYGYSKTFVTEGKRRYPILVPNKEEADVVRMMFDLYVNKDMGCQNICNRFDEMGIKPPKGEHWSPSAMAKMLENIHYIGKVKWNYRKTLTIVEEGEFKKTRPIAKAGEYLIYDGKHEAIVSEELFNAAQAKKGKHTRQKPNTKIRNPFAGLLWCKCGRAMSLRAYKSNISAPRLLCDGQTHCKTGSCLYSEMNERVCSILTNCIHDFEIRLQNNEGDSVKQHMRLIKNLEVRQKELEEKELAQWEAQADPDPAKRMPQHVFQQLNERLLKEKEEVRQALCKAYESMPEPVNYEEKIAQFTEALNALKNPKVDAATKNRLLKACIDRIEYYRDAPQRIRSQKVIYYDPEQKRTRCKSPLNVGGNWTAPKIILDVKLKV

SEQ ID NO: 2147 - protein, 550 aa, Unknown
  Description of Unknown: Integrase B2148 sequence
  PTHR30461:SF3,SM00857,G3DSA:1.10.10.2600,IPR036162,PS51737, G3DSA:3.40.50.1390,IPR006119,IPR038109,PF07508,IPR011109, SSF53041,PF00239,PTHR30461,mobidb-lite,Coil, cd00338
MYYQPKIDFKPEEVIDYLRKSRSDDPLLTVEEVLSKHEAMLDEWAEKHLGVVVPEENKYREVVSGETIAERPEINRVLRLIESPKYKAVAVVEPQRLTRGDLEDIGRLMKLLKHTNTLVITPQRIYDLRDEYDWDAFERELKRGNDYLEYTKKILNRGRLLSVSQGNYVGNTPPYGYDKTFVTEGKRKCPILVPNKAEADVVRMMFDLYVNKDMGCTNICKKFDKMGIKPPKGDYWSPAAMTKMLQNIHYIGKVKWNHRKTLTIVEEGEFKKTRPVAQVGEFLIYDGKHEAIIPEELFNAAQAKKGKNTRQKPNTKVRNPFAGLIWCRCGRAMSLRTYKNRDAAPRLLCDGQTHCKTGSCLYSEMEERVISILTDCIKDFEIRLKNDEGDSAKLHARLIKNLEAKQKELDEKELAQWEAQADPDPAKRMPPHIFQQLNEKLLKEKEEVRQALCKAYESMPEPVNYEEKITQFSEALNALKDPNIDAATKNRLLKACIERIEYHRDTPQRIKSQQVRYYDQKQKRTRYKSPLSTGGNWTSPEIVLDVKLKA

SEQ ID NO: 2148 - protein, 550 aa, Unknown
  Description of Unknown: Integrase B2149 sequence
  PTHR30461:SF3,cd00338,SM00857,G3DSA:1.10.10.2600,IPR036162, PF13408,PS51737,G3DSA:3.40.50.1390,IPR025827,IPR006119, IPR038109,PF07508,SSF53041,IPR011109,PTHR30461, PS51736,Coil,PF00239
MKKTKTKCYLYTRVSTSMQVDGYSLDAQRDKLRKYAEYEDMVVAGEYSDEGFSGKNIQGRHEFQRMLQDIQDCKDGVEYVLVFKLSRFGRNAADVLNSLQLMQDFGVNLICVEDGIDSSKDSGKLMISVLSAVAEIERENIRTQTMAGREQKAREGKWNGGFAPYGYRLEKGELLIAEDEVDVIRTIFDRYIHTNDGVSGVAKYLNRQGFVKKLRQNGTIPGFSASFVKSIIDNPVYMGKIAYGRRRTEKKIGTRNEMHVVEQSEFPVYEGKHEAIISEEDWNLAQEKRKINAYRREKVNDPTHAHILSGILKCPCCGKSLYGNIAKAHSKDKKTRYYYYCKNTVTPTGHECTFRLNIEQTEMNRMVASIISAMVSDPRFANAIKAKIGSAVDTNDLEKQLEALQAQLRQTLGTKARLERQMDGLDVNDPYYDRKISDLQRRYDEQYGRIDEIEVQIDDVQSQIRNIRQEKISGDNIYRLLLAFDQVYEAASEVERKEFMRAFIERIELFPEKQLDGNWIRKIIFNFPVPVNGTEVKELPLENETMVETV

SEQ ID NO: 2149 - protein, 550 aa, Unknown
  Description of Unknown: Integrase B2150 sequence
  PTHR30461:SF3,SM00857,G3DSA:1.10.10.2600,IPR036162,PF13408, PS51737,G3DSA:3.40.50.1390,IPR025827,IPR006119,IPR038109, PF07508,SSF53041,IPR011109,PF00239,PTHR30461, PS51736,Coil,cd00338
MKRDKFPIDLSMLTQEEIDQFREDPSTLYEGDIDVCLYLRFSSERQREQSIEGQLRDCRAYCKFNRYRIVAIYVDRALTARKDVEKRLHFQQMISDSDKKPWEYVVVWKLDRFARNRTDSALFKFRLRKNGVRVMSATESISEKPEGIILEAVLEGMAEFYSADLSQKITRGMRESALKCHSIGGHVPLGYKIEDHRLVIDPATAHIVQEAFQLYANGETVAEICRIFNAKGYRTAKGVEFNRNSFKSMFRNERYIGIYTYKDIRIEDGVPAIIDKELFDTVRRRLSVNAEAPARGKAKVDYLLAGKLFCGHCGGSMNGESGTSKTGAIHNYYTCYTRKRQRSCDKKPLRKEWIEQVVAQDAIALMTDEVIEELADMAMAQTDQDLKENTRIPELTERKKEIEQGIANITKAIEKGIASETLMERLVELEKDKKDLLRQLAEEEKYVVRIDRDQIVFWLGKFKNGNIEDESFKRIIIDLIVNSVTVWDEPDGFRITTAYNLTSCKNKTFRVNKDSGSGSVSGFGFEGSESTIRTGVRFPSGPPFGPYSNT

SEQ ID NO: 2150 - protein, 550 aa, Unknown
  Description of Unknown: Integrase B2151 sequence
  PTHR30461:SF3,IPR036162,PS51737,IPR011109,PTHR30461, PS00397,PF00239,G3DSA:1.10.10.2600,IPR006119,SSF53041, SM00857,IPR025827,IPR038109,PS51736,cd03768, IPR006118,PF13408,G3DSA:3.40.50.1390,PF07508,Coil
MKINMRVAIYVRVSTDEQADRGTIESQIEFGNKYCDLHAISEFEFYRDDGITGTLPLEERPEGARLFNDAKEKKFDTLLIYKLDRLGRSARVILNAVYELEQYGIKVKSMTEPFDTGDPAGRFLLTMLAGVADLERSTILERLWHGANRAARDGKWIGGIVPYGYFVNDQRFLEISTEKMPGLDLSEADVVKLIFDLYTKNRLTHVKICDYLNALKIPPSYALAGRKVTKGKRKENTAGIWIPHQIGRMIKNSTYKGIHIYGKRSSKQRELIPREVPAIVSVEQWDLAQVLLKENKLEFFKEKTRNYLLRGLILCEECGHHYTGAPYTQYKTKEKKTFYRCIGKQVYKNKEKERCKVKNIPGTWLENMVWEDCLNFINNPGDVLQSINQKIEETKVETRNYEEELKLITSSIQQVDAERQSILDLYRKKLISSADIETQFSKINMESELLLKKKNEIESLLAANDSSVARANSAEDYLAYLRNKIKDGNPSFQQKREIVKAIVEKIKVRNIDINGKTEIDIKILYRFSPHQTTLSPNTCNTRLQLRLFPQ

SEQ ID NO: 2151 - protein, 550 aa, Unknown
  Description of Unknown: Integrase B2152 sequence
  PTHR30461:SF3,cd00338,SM00857,G3DSA:1.10.10.2600,IPR036162, PF13408,PS51737,IPR025827,G3DSA:3.40.50.1390,IPR006119, IPR038109,PF07508,IPR011109,SSF53041,PTHR30461, PS51736,Coil,PF00239
MARKKNIAAGLDAVIYARYSSHNQREVSIEQQIAECTKHAAALGLRIVGTYEDRAISGKTDNRPRFQQMMRDAEKGKFQAVVAWKSNRIGRNMLQAMVNEAKLDDYGVKVFYAEEDFDDTAAGRFALRNMMNVNQFYSENMAEDITRGLYDNASKCMANGRQPLGYKRGEDGRVVLDEANAAVVREIFTRVAAGDLFVDIARDLNAQGIKTSKGANWNKGSFQSICQNERYRGIYIYGDVRVADGIPRIVSDDLWYRVQEAMRMKKNPVGTRHRVGAEDYLLTGKLRCGHCGSYMTGVSGTSRNGELHYYYTCQKRRTEHACDKKNIRRDVIEPAVAQAIKMYCLTDDVIAWIADRTVEYWEKHDNDLQIEALEQQLEENKKATSNMLKAIEMGIITEATRTRMVELETEQSRLSVQLNVAKEDVVKIDREQIISYLELLQQGDIHDRDFQMELFKNFLVAVYVYDDNRMKLVFSCMGDQNSVEIPLETGEDPPDGGLSPDAKMFVLTPDSSTRRKSTARKRVVLFCCCQTSEGLAHPGERRAWTARGSP

SEQ ID NO: 2152 - protein, 550 aa, Unknown
  Description of Unknown: Integrase B2153 sequence
  PTHR30461:SF3,cd00338,SM00857,G3DSA:1.10.10.2600,IPR036162, PS51737,G3DSA:3.40.50.1390,IPR006119,IPR038109,PF07508, SSF53041,IPR011109,PTHR30461,mobidb-lite,Coil, PF00239
MYYQPKIDFKPEEVIDYLRKSRSDDPLLTVEEVLSKHEAMLDEWAEKHLGAVVPEENKYREVVSGETIAERPEINRVLRLIESPKYKAVAVVEPQRLTRGDLEDIGRLMKLLKHTNTLVITPQRIYDLRDEYDWDAFERELKRGNDYLEYTKKILNRGRLLSVSQGNYVGNTPPYGYDKTFVTEGKRKCPILVPNKAEADVVRMMFDLYVNKDMGCTNICKKFDEMGIKPPKGDYWSPAAMTKMLQNIHYIGKVKWNHRKTLTIVEEGEFKKTRPVAQVGEFLIYDGKHEAIIPEELFNAAQAKKGKNTRQKPNTKVRNPFAGLIWCRCGRAMSLRTYKNRDAAPRLLCDGQTHCKTGSCLYSEMEERVISLLTDCINDFVIRLKNDEGDSAKLHARLIKNLEAKQKELDDKELAQWEAQADPDPAKRMPPHIFQQLNEKLLKEKEEVRQALCKAYESMPEPVNYEEKITQFSEALNALKDPNIDAATKNRLLKACIERIEYHRDTPQRIKSQQVRYYDPEQKRTRYKSPLSTGGNWTSPEIVLDVKLKA

SEQ ID NO: 2153 - protein, 550 aa, Unknown
  Description of Unknown: Integrase B2154 sequence
  PTHR30461:SF3,cd00338,SM00857,G3DSA:1.10.10.2600,IPR036162, PS51737,G3DSA:3.40.50.1390,IPR006119,IPR038109,PF07508, IPR011109,SSF53041,PTHR30461,mobidb-lite,Coil, PF00239
MYYQPKIDFKPEEVIDYLRKSRSDDPLLTVEEVLSKHEAMLDEWAEKHLGAVVPEENKYREVVSGETIAERPEINRVLRLIESPKYKAVAVVEPQRLTRGDLEDIGRLMKLLKHTNTLVITPQRIYDLRDEYDWDAFERELKRGNDYLEYTKKILNRGRLLSVSQGNYVGNTPPYGFDKTFVTEGKRKCPILVPNKAEADVVRMMFDLYVNKDMGCTNICKKFDEMGIKPPKGDYWSPAAMTKMLQNIHYIGKVKWNHRKTLTIVEEGEFKKTRPVAQVGEFLIYDGKHEAIIPEELFNAAQAKKGKNTRQKPNTKVRNPFAGLIWCKCGRAMSLRTYKNRDAAPRLLCDGQTHCKTGSCLYSEMEERVISILTDCIKDFEIRLKNDEGDSAKLHARLIKNLEAKQKELDEKELAQWEAQADPDPAKRMPPHIFQQLNEKLLKEKEEVRQALCKAYESMPEPVNYEEKIAQFSEALNALKDPNIDAATKNRLLKACIERIEYHRDTPQRIKSQQVRYYDPEQKRTRYKSPLSTGGNWTSPEIVLDVKLKA

SEQ ID NO: 2154 - protein, 550 aa, Unknown
  Description of Unknown: Integrase B2155 sequence
  PTHR30461:SF3,SM00857,G3DSA:1.10.10.2600,IPR036162,PS51737, G3DSA:3.40.50.1390,IPR006119,IPR038109,PF07508,SSF53041, IPR011109,PF00239,PTHR30461,mobidb-lite,Coil, cd00338
MYYQPKIDFKPEEVIDYLRKSRSDDPLLTVEEVLSKHEAMLDEWAEKHLGAVVPEENKYREVVSGETIAERPEINRVLRLIESPRYKAVAVVEPQRLTRGDLEDIGRLMKLLKHTNTLVITPQRIYDLRDEYDWDAFERELKRGNDYLEYTKKILNRGRLLSVSQGNYVGNTAPYGYDKTFITEGKRKCPILVPNKEEADVVRMMFDLYVNKDMGCTTICKKFDEMGIKPPKGEHWSAAAMTKMLENIHYIGKVKWNHRKTLTIVEEGEFRKTRPVAKVGEYLIYDGKHEAIVPEELFNAAQAKKGRNTRQKPNTKIRNPFAGLIWCKCGRAMSLRTYSAHNSAPRLLCDGQTYCKTGSCLYTEMEERVSAILADCIRDFQVRLKNNEGDSVKLHMRLINNLEAKQKELEAKELAQWEAQADPDPAKRMPPHIFQKLNEKLLKEKEEVRQALCKAYESMPEPVDYEEKIAQFTEALNALHNPDVDAATKNRLLKACIERIEYHRDAPQRIRSKQVRYYDKEQKRTRNKSPLNTGGNWTSPEIVLDVKLRV

SEQ ID NO: 2155 - protein, 550 aa, Unknown
  Description of Unknown: Integrase B2156 sequence
  PTHR30461:SF3,SM00857,G3DSA:1.10.10.2600,IPR036162,PS51737, G3DSA:3.40.50.1390,IPR006119,IPR038109,PF07508,IPR011109, SSF53041,PF00239,PTHR30461,mobidb-lite,Coil, cd00338
MYYQPKIDFKPEEVIDYLRKSRSDDPLLTVEEVLSKHEAMLDEWAEKHLGAVVPEENKYREVVSGETIAERPEINRVLRLIESPKYKAVAVVEPQRLTRGDLEDIGRLMKLLKHTNTLVITPQRIYDLRDEYDWDAFERELKRGNDYLEYTKKILNRGRLLSVSQGNYVGNTPPYGYDKTFVTEGKRKCPILVPNKAEADVVRMMFDLYVNKDMGCTNICKKFDEMGIKPPKGDYWSPAAMTKMLQNIHYIGKVKWNHRKTLTIVEEGEFKKTRPVAQVGEFLIYDGKHEAIIPEELFNAAQAKKGKNTRQKPNTKVRNPLAGLIWCRCGRAMSLRTYKNRDAAPRLLCDGQTHCKTGSCLYSEMEERVISILTDCIKDFEIRLKNDEGDSAKLHARLIKNLEAKQKELDEKELAQWEAQADPDPAKRMPPHIFQQLNEKLLKEKEEVRQALCKAYESMPEPVNYEEKITQFSEALNALKDPNIDAATKNRLLKACIERIEYHRDTPQRIKSQQVRYYDQKQKRTRYKSPLSTGGNWTSPEIVLDVKLKA

SEQ ID NO: 2156 - protein, 550 aa, Unknown
  Description of Unknown: Integrase B2157 sequence
  PTHR30461:SF3,SM00857,G3DSA:1.10.10.2600,IPR036162,PS51737, G3DSA:3.40.50.1390,IPR006119,IPR038109,PF07508,SSF53041, IPR011109,PF00239,PTHR30461,Coil,cd00338
MYRPPELTLNPDEVLIYLRKSRSDDPLMSVEEVLAKHETILDEWSEKNLGGLVPEENKYREVVSGETLKERPEINTVLRRIESPKIKAVAAVEPQRLTRGDLEDIGRLMKLFKHTKTLIITPTRTYDLQDDYDWDAFERELKRGNEFLEYTKKILNRGRLLSVSQGNYIGSIPPYGYKKVFVTDGKRKCPTLEVVEDQAEVVRTIFDLFVNQNYGSCKIRNYLNDMHVPAPRGEKWTENGMRDMLTNVHYIGKVKWNWRKNITTVEESEIVTHRPKAQPGEYLTFEGKHEAIISEALFNAAQEKIGHTGRVKSEHEMVNPFAGILFCKCGKALTMKVQKGADGNMSSRFYCANLRNCGTSSCMCNEIVEKVSNTLKQAIQDFTVMLDSGDKESIKRHTARIKILETKLQDLEKREMALWEAQADPDLSVRMPNHIFLALNDKIVKEREQTTFMLEQAYASMPNPKLYRENIQRFSDAVEALNSPEVPAAIKNKLLKACIERIEYSKPKAERIKSSSKRIWVNGHRIRTNPLPTGGNWTSPEISLDIKLRV

SEQ ID NO: 2157 - protein, 550 aa, Unknown
  Description of Unknown: Integrase B2158 sequence
  PTHR30461:SF3,cd00338,SM00857,G3DSA:1.10.10.2600,IPR036162, PF13408,IPR025827,PS51737,G3DSA:3.40.50.1390,IPR006119, IPR038109,PF07508,IPR011109,SSF53041, PTHR30461,PS51736,Coil,PF00239
MKKFPIDLSCLTEEEISQFQEDPYTLYNGDQNVAIYLRYSSTGQSDQSIEGQLRDCRTFCKANHYRIVAIYVDRATTARKDVEKRVHLMEMISDSAKQNWEYVIVWKLDRFARNRNDSAIMKMRLRKNGVKVLSATEHLTDSPESIILESVLEGMAEFFSAELSQKVTRGMRESALKCHSVGGHIPLGYKVENHKLVVDPDTAHIVQEAFSLYANGESVAAICRKFNSAGYKTAKNTEFNRSSFKAMFRNTRYIGTYTYKDIVIENGIPAIIDKELFETVQRRLSKTATAPARGKAKVDYLLSGKLFCGHCGASMNGESGAGRHGKVYHYYSCYTKKRKLGCDKRPLKKDYIEGIVARDALNLLTDQLIDEIADMAIRQSEQDLINDTHIPQLTAQLSEVEKSIMNITAAIEKGIASETLMNRLVQLEHEKKTLNKEIKAEEKFVYRIDRDQIVFWLSQFKYGNIEDEDFRRRLIDLLVNSVTVWDEPDGYKITTAYNLTSCKTKTFRVEKNPAAEEATGFDFGESECAIPPQAIHCGGFLLSVGGWDVP

SEQ ID NO: 2158 - protein, 550 aa, Unknown
  Description of Unknown: Integrase B2159 sequence
  PTHR30461:SF3,cd00338,SM00857,G3DSA:1.10.10.2600,IPR036162, PS51737,G3DSA:3.40.50.1390,IPR006119,IPR038109,PF07508, IPR011109,SSF53041,PTHR30461,mobidb-lite,Coil, PF00239
MYYQPKIDFKPEEVIDYLRKSRSDDPLLTVEEVLSKHEAMLDEWAEKHLGAVVPEENKYREVVSGETIAERPEINRVLRLIESPKYKAVAVVEPQRLTRGDLEDIGRLMKLLKHTNTLVITPQRIYDLRDEYDWDAFERELKRGNDYLEYTKKILNRGRLLSVSQGNYVGNTPPYGYDKTFVTEGKRKCPILVPNKAEADVVRMMFDLYVNKDMGCTNICKKFDEMGIKPPKGDYWSPAAMTKMLQNIHYIGKVKWNHRKTLTIVEEGEFKKTRPVAQVGEFLIYDGKHEAIIPEELFNAAQAKKGKNTRQKPNTKVRNPFAGLIWCRCGRAMSLRTYKNRDAAPRLLCDGQTHCKTGSCLYSEMEERVISILTDCINDFVIRLKNDEGDSAKLHARLIKNLEAKQKELDEKELAQWEAQADPDPAKRMPPHIFQQLNEKLLKEKEEVRQALCKAYESMPEPVNYEEKITQFSEALNALKDPNIDAATKNRLLKACIERIEYHRDTPQRIKSQQVRYYDQKQKRTRYKSPLSTGGNWTSPEIVLDVKLKA

SEQ ID NO: 2159 - protein, 550 aa, Unknown
  Description of Unknown: Integrase B2160 sequence
  PTHR30461:SF3,SM00857,G3DSA:1.10.10.2600,IPR036162,PS51737, G3DSA:3.40.50.1390,IPR006119,IPR038109,PF07508,IPR011109, SSF53041,PF00239,PTHR30461,Coil,cd00338
MYYQPKIDFKPEEVIDYLRKSRSDDPLLTVEEVLSKHEAMLDEWAEQHLGAVVPEENKYREVVSGETIAERPEINRVLRLIESPRYKAVAVVEPQRLTRGDLEDIGRLMKLLKHTNTLVITPQRIYDLRDEYDWDAFERELKRGNDYLEYTKKILNRGRLLSVSQGNFVGNTAPYGYDKTFVTEGKRKCPILIPNKEEADVVRMMFDLYVNKDMGCTTICKKFDEMGIKPPRGEHWSAAAMTKMLENIHYIGKVKWNHRKTLTIVEEGEFKKTRPVAKVGEYLIYDGKHEAIVPEELFNAAQAKKGKNTRQKPNTKIRNPFAGLIWCKCGRAMSLRIYKNRDAAPRLLCDGQTHCRTGSCLYTEIEDRVKVILSDCIKDFEVRLKNNEGDSVKLHMRLINNLEAKQKELEAKELAQWEAQADPDPAKRMPPHIFQKLNEKLLKEKEEVRQALCKAYESMPEPVDYEEKIKLFTEALNALRNPDVDAATKNRLLKACIERIEYHRDAPQRIRSKQVRYYDKEQKRTRFKSPLNTGGNWTSPEIVLDVKLRV

SEQ ID NO: 2160 - protein, 550 aa, Unknown
  Description of Unknown: Integrase B2161 sequence
  PTHR30461:SF3,cd00338,SM00857,G3DSA:1.10.10.2600,IPR036162, PF13408,IPR025827,G3DSA:3.40.50.1390,PS51737,IPR006119, IPR038109,PF07508,IPR011109,SSF53041, PTHR30461,PS51736,Coil,PF00239
MARKKNIAAGLDAVIYARYSSHNQREVSIEQQIAECTKHAAALGLRIVGTYEDRAISGKTDNRPRFQQMMRDAEKGKFQAVVAWKSNRIGRNMLQAMVNEAKLDDYGVKVFYAEEDFDDTAAGRFALRNMMNVNQFYSENMAEDITRGLYDNANKCMANGRQPLGYKRGADGKVMLDEPAAAVVREIFTRVAAGDLFVDIARDLNAKGIKTSKGATWNKGSFQSICQNERYKGIYIYGNVRIVDGIPRIVSDELWYKVQEAMRMKKNPVGTRHRVGAEDYLLTGKLRCGHCGSYMTGVSGTSRNGELHYYYTCQKRRTEHACNKKNVRRDVIEPAIAQAIKMYCLTDDVIEWVANRTVEYWEKHDNDLHIEALEQQLEENKKATSNMLKAIEMGIITDATRSRMIELETEQSKLAVQLNAAKADVVKIDRDDLIDELQIFRDMDVNNRSVQAELFKDFLVAAYIYDDNRLKLVFSFMGKDNSIEIPLETGEDPPDGEDSPDAKMFVLTPDCSTRNESTTQKCVVLFCCCQTSEGLAHPGECRAWTARGSP

SEQ ID NO: 2161 - protein, 550 aa, Unknown
  Description of Unknown: Integrase B2162 sequence
  PTHR30461:SF3,SM00857,G3DSA:1.10.10.2600,IPR036162,PF13408, PS51737,G3DSA:3.40.50.1390,IPR025827,IPR006119,IPR038109, PF07508,IPR011109,SSF53041,PTHR30461,PS51736, cd00338,PF00239
MSKRESKSGQKCLAAEQIGVIYARYSSHNQKEESIEQQIAECSDFAAKNGIRIVGIYADKAVSGRSDRRPNFQRMMRDAEKRHFQIVVAYKSNRIARNMLNALQYEARLDLFGIKTLYAKEEFGNTAAGRFALRTMMNVNQFYSENMGEDIKRGMVDNANECKVNGMLPLGYVKSKEGKYAVAPGEAAVVREIFDSFLKDVPVAEIARSLNQRGIRTKLGREWNKNSFHIMLKNDNYIGVYRHSGVVVEDGIPPILEREVFAAVQEKLANKKKTAGRRSANGEYLLTGKLFCGYCGSYMIGVSGTGENGTVHNYYQCQKRHAESRCEKKNVRRDFIEKLIARLTQDYILQDETIEWIADSTMSFQAVARRKSGITQLERDLADNRKIAKNIMAAIEQGIITETTKARLLEVEGTIHDLERSLSIAKAASQPIERERVVFSLEQMREGNVGSKEHQKKLIDTFVKSVTLWDDRIQIDYYHTPGKHKFSYSLEELTSKVENESNAADVRAESLQVHHKRVIRTRYGDGEIRITAFGFVFLCPLPCSKKEADV

SEQ ID NO: 2162 - protein, 550 aa, Unknown
  Description of Unknown: Integrase B2163 sequence
  PTHR30461:SF3,SM00857,G3DSA:1.10.10.2600,IPR036162,PF13408, IPR025827,PS51737,G3DSA:3.40.50.1390,IPR006119,IPR038109, PF07508,IPR011109,SSF53041,PF00239,PTHR30461, PS51736,Coil,cd00338
MIVVAYARYSSEAQRDGYSIEAQVRAITEWAEREGHTVLRVYIDEARSATTDNRERFQDMISDAAKGEFQAVVVHKLDRFARNRYDSAVYRHALKQHGVRVISVLEPLDDSPESAMMEAVLEGMAEYYSRNLSREVRKGKKEAALLGRFVGGPVPFGYSVTKDHRYAINEEEALVIRQMFSMLENGSSFADVARWATSQGYRTRTGRYFTEAGISCLVSNTLLIGRYTYAAKSRVGQEPIVFDDAIPPIIDAATFWRVNEMKKARERGPRPRKKEEEYLLTGYLFCELCGRHVYGFKSKSSFTTKDGEKHEYEKRAYRCSTKGGVNPGRRLDPGYVRNACALKNLPKEALESFVFSAIDDVLFGGLTADWIVAELTVRKKTEKRPDQAVLSSYKKELSKIKTQKERLLDLYLSGGIDKGVYSARAGDFAAREQFLAAEVSRLSTPATADVDANKIKAALDAFRKSANADSPEYKRRLLSAFVEKITVSNERLVIYFKFPVPGAGDKIEKDYGDYFVRKPNNNLSFICLRTEFSMTAVLAGNWREYVVSLV

SEQ ID NO: 2163 - protein, 550 aa, Unknown
  Description of Unknown: Integrase B2164 sequence
  PTHR30461:SF3,cd00338,SM00857,G3DSA:1.10.10.2600,IPR036162, PS51737,G3DSA:3.40.50.1390,IPR006119,IPR038109,PF07508, IPR011109,SSF53041,PTHR30461,Coil,PF00239
MYYQPKIDFTPDEVIDYLRKSRSDDPTLTVEEVLAKHEAILDEWSEKNLGGIVPEENKYREVVSGETLKERPEINKVIKRIESPKIKAIQIVEPQRLTRGDLEDIGRIMKLLKHTNTLVITPNRIYNLHDDYDWDALERELKRGNEFLEYTKKILNRGRLLSVSQGNYIGNTPPYGYRKEFVMEGKKKCPILVPNKDEAEVVRMMFDLYVNEDMGCWNICKKFDEMGIKPPKGDHWSANAMTKMLENIHYIGKVKWNHRKTITIVEDGEFVQTRPVAKIGEYLIYDGKHKAIVSEELFNAAQAKKGKNARLKPNTKIRNPLAGLLWCKCGRAMSLRTYKAHNAQPRLLCDGQTYCKTGSCTYDEMIVRVEEILKNCISDFEVRLKSDEGDSAKLHARLIKNLEKKKKELEAKELAQWETQSHPDPAQRMPQHIFQQLNEKLLKEKEEVQQALCKAYESMPEPVDYEEKIKMFQDALDALQNPDASAAEKNKLLKACIERIEYHRDKPERIKSQQVRFYDPVLKKTRNRSPLKTGGNWTTPNIELDVKLKV

SEQ ID NO: 2164 - protein, 550 aa, Unknown
  Description of Unknown: Integrase B2165 sequence
  PTHR30461:SF3,SM00857,G3DSA:1.10.10.2600,IPR036162,PF13408, IPR025827,G3DSA:3.40.50.1390,PS51737,IPR006119,IPR038109, PF07508,SSF53041,IPR011109,PF00239, PTHR30461,PS51736,Coil,cd00338
MKTKKLPIDLSMLTVEEQQQFVDDPTTLVRGNINVTLYLRFSSDRQSEQSIEGQLRDCIAYCKRKEYRITAIYIDRATTARKDIEKRVQFQQMISDSKHGLWELVIVWKLDRFARNREDSAVFKMRLRKNGVRVESATEAISNTPEGIILESVLEGIAEYYSADLSQKITRGMRESALKGHSIGGHVPLGYKIENHRLVVNPATAPIVQEAFERYANGESIADICRLFNLKGYRTAKGVEFNRSSFKSLFRNTRYIGTYTYKEIKMEDTIPAIIDKELFEMVQKRLSKVAEAPARGKAKVDYLLSGKLFCGHCGASMNGESGTSKTGTVHNYYSCYGRKRKQGCDKRPLRKEWIETIVAQDALNLLTDDTIEELADMALFQSEQDMKETTRIPALTAQQKEIEQSISNITKAIEKGVASDTLLNRLTDLEKEKKNILKQITEENKLFYQIDRKQITAWLYQFKNGDISDDSFKRQLIDLLVNSVTVWDEPDGYRITTAYNLTTCKTKTFRVDSSGQEFGLEGLSSTIGRISEPYIVWGTVFVQTKRHSLS

SEQ ID NO: 2165 - protein, 550 aa, Unknown
  Description of Unknown: Integrase B2166 sequence
  PTHR30461:SF3,SM00857,G3DSA:1.10.10.2600,IPR036162,PS51737, G3DSA:3.40.50.1390,IPR006119,IPR038109,PF07508,IPR011109, SSF53041,PTHR30461,Coil,cd00338,PF00239
MYRPPELTLNPDEVLVYLRKSRSDDPLMSVEEVLAKHETILDEWSEKNLGGLVPEENKYREVVSGETLKERPEINTVLRRIESPKIKAVAAVEPQRLTRGDLEDIGRLMKLFKHTKTLIITPTRTYDLQDDYDWDAFERELKRGNEFLEYTKKILNRGRLLSVSQGNYIGSIPPYGYKKVFVTDGKRKCPTLEVVEDQAEIVRTIFDLFVNQNYGSCKIRNYLNDMHVPAPKGEKWTENGMRDMLTNVHYIGKVKWNWRKNITTVEESEIVTHRPKAQPGEYLIFDGKHEAIISEALFSAAQEKIGHTGRVKSEHEMVNPFAGILFCKCGKALTMKVQKGADGNMSSRFYCANLRNCGTSSCMCNEIVEKVSDTLKQAIQDFTVMLDSGDKESIKRHTARIKILETKLQDLEKREMALWEAQADPDLSVRMPNHIFLALNDKIVKEREQTTLMLEQTYASMPNPKLYRENIQRFSDAVEALNSPEVPAAIKNKLLKACIERIEYSKPKAERIKSSSKRIWVNGHRIRTNPLPTGGNWTSPEISLDIKLRV

SEQ ID NO: 2166 - protein, 550 aa, Unknown
  Description of Unknown: Integrase B2167 sequence
  PTHR30461:SF3,cd00338,SM00857,G3DSA:1.10.10.2600,IPR036162, PS51737,G3DSA:3.40.50.1390,IPR006119,IPR038109,PF07508, IPR011109,SSF53041,PTHR30461,Coil, PF00239
MYYQPKIDFKPEEVIDYLRKSRSDDPLLTVEEVLSKHEAMLDEWAEKHLGAVVPEENKYREVVSGETIAERPEINRVLRLIESPKYKAVAVVEPQRLTRGDLEDIGRLMKLLKHTNTLVITPQRIYDLRDEYDWDAFERELKRGNDYLEYTKKILNRGRLLSVSQGNYVGNTPPYGYDKTFVTEGKRKCPILVPNKAEADVVRMMFDLYVNKDMGCTNICKKFDEMGIKPPKGDYWSPAAMTKMLQNIHYIGKVKWNHRKTLTIVEEGEFKKTRPVAQVGEFLIYDGKHEAIIPEELFNAAQAKKGKNTRQKPNTKVRNPFAGLIWCKCGRAMSLRTYKNRDAAPRLLCDGQTHCKTGSCLYSEMEERVISILTDCINDFVIRLKNDEGDSAKLHARLIKNLEAKQKELDEKELAQWEAQADPDPAKRMPPHIFQQLNEKLLKEKEEVRQALCKAYESMPEPVNYEEKITQFSEALNALKDPNIDAATKNRLLKACIERIEYHRDTPQRIKSQQVRYYDPKQKRTRYKSPLSTGGNWTSPEIVLDVKLKA

SEQ ID NO: 2167 - protein, 550 aa, Unknown
  Description of Unknown: Integrase B2168 sequence
  PTHR30461:SF3,SM00857,G3DSA:1.10.10.2600,IPR036162,PF13408, PS51737,G3DSA:3.40.50.1390,IPR025827,IPR006119,IPR038109, PF07508,IPR011109,SSF53041,PTHR30461,Coil, cd00338,PF00239
MLENLIADLRRVYCLYRVSTLGQVEKDDIPMQKQYCREFVGQHPGWEIIKEFSEKGVSGFKVSAKDRDAIQEIQRDALQNKFDILLVFMFDRLGRREDETPFVVEWFVKNGIEVWSAKEGQQRFDTHVDKLLNYIRYWQASGESIKTSVRTKTRMEQLTQEGHFTGGGVPFGYRLEHKGRTNKRNQDVGDLVIDPDEAEIVKLIFQKYLCEGYGAQRLCRYLAEQGITNRKGRNIPTTSINRIIKNPIYTGVIRNGDSQSEVLPELQIIDAETYERAQQMMEKRVTHHGDVPLNTKGRSLLVGNVYCGHCGGRLTLTTSGRKRVRKDGTIVRETRARYQCHYNVRHPGECDGQSGYGVDKLDKLVDQIIRIQLGRIQNAPSQELIAKQQAQEVELVKSRLNLLNEQYRQKQREYQDLRAETIKVIQGTSRLNADLLNSLVSETAEQIKQLAAQIQSTTAELEETVQTASQVLREYDQLISWGEMYDHCTFEAKKMIVAKFVKAIRVRRDYEIDIEFNVSFEEFQALYLEGEPEEAKRPGTDTVLAIETKK

SEQ ID NO: 2168 - protein, 550 aa, Unknown
  Description of Unknown: Integrase B2169 sequence
  PTHR30461:SF3,SM00857,G3DSA:1.10.10.2600,IPR036162,PS51737, G3DSA:3.40.50.1390,IPR006119,IPR038109,PF07508,IPR011109, SSF53041,PTHR30461,Coil,mobidb-lite,cd00338, PF00239
MYYQPKIDFKPEEVIDYLRKSRSDDPLLTVEEVLSKHEAMLDEWAEKHLGAVVPEENKYREVVSGETIAERPEINRVLRLIESPKYKAVAVVEPQRLTRGDLEDIGRLMKLLKHTNTLVITPQRIYDLRDEYDWDAFERELKRGNDYLEYTKKILNRGRLLSVSQGNYVGNTPPYGYDKTFVTEGKRKCPILVPNKAEADVVRMMFDLYVNKDMGCTNICKKFDEMGIKPPKGDYWSPAAMTKMLQNIHYIGKVKWNHRKTLTIVEEGEFKKTRPVAQVGEFLIYDGKHEAIIPEELFNAAQAKKGKNTRQKPNTKVRNPFAGLIWCRCGRAMSLRTYKNRDAAPRLLCDGQTHCKTGSCLYSEMEERVISILTDCIKDFEIRLKNDEGDSAKLHARLIKNLEAKQKELDEKELAQWEAQADPDPAKRMPPHIFQQLNEKLLKEKEEVRQALCKAYESMPEPVNYEEKITQFSEALNALKDPNIDAATKNRLLKACIERIEYHRDTPQRIKSQQVRYYDQKQKRTRYKSPLSTGGNWTSPEIVLDVKLKA

SEQ ID NO: 2169 - protein, 550 aa, Unknown
  Description of Unknown: Integrase B2170 sequence
  PTHR30461:SF3,cd00338,SM00857,G3DSA:1.10.10.2600,IPR036162, PF13408,PS51737,IPR025827,G3DSA:3.40.50.1390,IPR006119, IPR038109,PF07508,IPR011109,SSF53041,PTHR30461, Coil,PF00239
MKKFKFPIDLSMLTEEEINQFQEDPSTLLQGDTDVCLYLRFSSERQKEQSIEGQLRDCIAYCKRKNYRIVAIYVDRATTARKDVEKRVHFQEMITASVHQTWKLVIVWKLDRFARNREDSAVFKMRLRKNGVKVESATEGISKNPEGIILEAVLEGIAEYYSADLSQKITRGMRESALKCHSIGGHVPLGYKIEDHKLVINPDTAHIVQEAFELYANGETVADICRMFNAKGYRTAKGAEFNRNSFKSMFRNRRYIGVYRYKDFEKEGGVPPIIDKDLFETVQKRLSANAEAPARGKAKVDYLLAGKLFCGHCGGSMNGESGTSKTGAVHNYYACYTRKRQHSCDKKPLRKEWIEQIVAQDAMELLTDDAIQEMADMAISQTEKDLRENTRIPELSERMKETESGIANITKAVEKGIASDALMNRLVELEKEKKNLLRLIAEEEKYVCKIDRDQIVYWLTKFKDGNIEDENFKRIIIDLMVNSVTVWDEPDGFRITTAYNLTSCKNKTFRISSSSDQGFGFEGLESTRWTLHEHLLFQRRLCRKGVAVMS

SEQ ID NO: 2170 - protein, 550 aa, Unknown
  Description of Unknown: Integrase B2171 sequence
  PTHR30461:SF3,SM00857,G3DSA:1.10.10.2600,IPR036162,PF13408, PS51737,G3DSA:3.40.50.1390,IPR025827,IPR006119,IPR038109, PF07508,IPR011109,SSF53041,PTHR30461,Coil, PS51736,cd00338,PF00239
MKKFPIDLSCLTEEEISQFQEDPYTLYNGDQDVALYLRYSSTGQSDQSIEGQLRDCRTFCKANHYRIVAIYVDRATTARKDVEKRVHLMEMVADSAKQNWEYVIVWKLDRFARNRNDSAIMKMRLRKNGVKVLSATEHLTDSPESIILESVLEGMAEFFSAELSQKVTRGMRESALKCHSVGGHIPLGYKVENHKLVVDPDTAHIVQEAFSLYANGESVADICRKFNSAGYKTAKNTEFNRSSFKAMFRNTRYIGTYTYKDIVIENGIPAIIDKELFETVQRRLSKTATAPARGKAKVDYLLSGKLFCGHCGASMNGESGAGRHGKVYHYYSCYTKKRKLGCDKRPLKKDYIEGIVARDALNLLTDQLIDEIADMAIRQSEQDLINDTHIPQLTAQLSEVEKSITNITAAIEKGIASETLMNRLVQFEHEKKTLNKEIKAEEKFVYRIDRDQIVFWLSQFKYGNIEDEDFRRRLIDLLVNSVTVWDEPDGYKITTAYNLTSCKTKTFRVEKNPAAEEATGFDFGESECTSNSKSPTRPPVIFYTARWSSG

SEQ ID NO: 2171 - protein, 550 aa, Unknown
  Description of Unknown: Integrase B2172 sequence
  PTHR30461:SF3,SM00857,G3DSA:1.10.10.2600,IPR036162,PS51737, G3DSA:3.40.50.1390,IPR006119,IPR038109,PF07508,SSF53041, IPR011109,PF00239,PTHR30461,mobidb-lite,Coil, cd00338
MYYQPKIDFKPEEVIDYLRKSRSDDPLLTVEEVLSKHEAMLDEWAEKHLGAVVPEENKYREVVSGETIAERPEINRVLRLIESPRYKAVAVVEPQRLTRGDLEDIGRLMKLLKHTNTLVITPQRIYDLRDEYDWDAFERELKRGNDYLEYTKKILNRGRLLSVSQGNYVGNTAPYGYDKTFVTEGKRKCPILVPNKEEADVVRMMFDLYVNKDMGCTNICKKFDAMGIKPPKGEYWSANAVTKMLQNIHYIGKVKWNHRKTMTIVEEGEFKKTRPVAKVGEYLIYDGKHEAIIPEELFNAAQAKKGKNTRQKPNTKIRNPFAGLLWCKCGRAMSLRTYKNRDAAPRLLCDGQTHCRTGSCLYTEIEDRVKVILSDCIKDFEVRLKNNEGDSVKLHMRLIKNLETKQKELEEKELAQWEAQADPDPAKRMPQHIFQQLNEKLLKEKEDVRQALCKAYESMPEPVNYEEKIAQFTEALNALNSHDVDAETKNRLLKACIDRIEYHREAPQRIRSQQVRYYDKEQKRTRHKSPLNTGGNWTSPEIVLDVILKA

SEQ ID NO: 2172 - protein, 550 aa, Unknown
  Description of Unknown: Integrase B2173 sequence
  PTHR30461:SF3,SM00857,G3DSA:1.10.10.2600,IPR036162,PF13408, PS51737,G3DSA:3.40.50.1390,IPR025827,IPR006119,IPR038109, PF07508,IPR011109,SSF53041,PF00239,PTHR30461, Coil,cd00338
MKKFKFPIDLSMLTEEEINQFREDPSTLFQGDTDICLYLRFSSERQKEQSIEGQLRDCIAYCKRKNYRIVAIYVDRATTARKDIEKRVHFQEMITASVHQTWKLVIVWKLDRFARNREDSAVFKMRLRKNGVKVESATEGISKNPEGIILEAVLEGIAEYYSADLSQKITRGMRESALKCHSIGGHVPLGYKIEDHKLVINPDTAHIVQEAFELYANGETVADICRMFNAKGYRTAKGAEFNRNSFKSMFRNRRYIGVYRYKDFEKEGGVPPIIDKDLFETVQKRLSANAEAPARGKAKVDYLLAGKLFCGHCGGSMNGESGTSKTGAVHNYYACYTRKRQHSCDKKPLRKEWIEQIVAQDAMELLTDDAIQEMADMAISQTEKDLRENTRIPELSERMKETESGIANITKAVEKGIASDALMSRLVELEKEKKNLLRLIAEEEKYVCKIDRDQIVYWLTKFKDGNIEDENFKRIIIDLMVNSVTVWDEPDGFRITTAYNLTSCKNKTFRIPSSSDKGFGFEGLESTTREPYEPTRFVWLSFVSGLFCAT

SEQ ID NO: 2173 - protein, 550 aa, Unknown
  Description of Unknown: Integrase B2174 sequence
  PTHR30461:SF3,SM00857,G3DSA:1.10.10.2600,IPR036162,PS51737, G3DSA:3.40.50.1390,IPR006119,IPR038109,PF07508,SSF53041, IPR011109,PF00239,PTHR30461,PS51736,Coil, cd00338
MYYQPKINFSPNEVIAYLRKSRSDDPLLTVEEVLSKHETMLDEWAEKNLGAAVPEENKFREVVSGETIAERPEINRVLRLIESPKYKAVAVVEPQRLTRGDLEDIGRIMKLLKHTSTLVITPQRIYDLRDEYDWDTFERELKRGNDYLEYTKKILNRGRLLSVSQGNYIGNVPPYGYSKTFVTEGKRRYPILVPNKEEADVVRMMFDLYVNKDMGCQNICNRFDEMGIKPPKGKHWSPSAMAKMLENIHYIGKVKWNYRKTLTIVEEGEFKKTRPIAKAGEYLIYDGKHEAIVSEELFNAAQAKKGKHTRQKPNTKIRNPFAGLLWCKCGRAMSLRAYKSNISAPRLLCDGQTHCKTGSCLYSEMNERVCSILTNCIHDFEIRLQNNEGDSVKQHMRLIKNLEAKQKELEEKELAQWEAQADPDPAKRMPQHIFQQLNEKLLKEKEEVRQTLCKAYESMPEPVNYEEKIAQFTEALNALKNPKVDAATKNRLLKACIDRIEYYRDAPQRIRSQKVIYYDPEQKRTRCKSPLNVGGNWTAPEIILDVKLKV

SEQ ID NO: 2174 - protein, 550 aa, Unknown
  Description of Unknown: Integrase B2175 sequence
  PTHR30461:SF3,IPR036162,PS51737,IPR011109,PTHR30461, PF00239,G3DSA:1.10.10.2600,IPR006119,PF14287,SSF53041, IPR025378,SM00857,IPR025827,cd03770,IPR038109, PS51736,PF13408,G3DSA:3.40.50.1390,PF07508
MSRKKQVNQKITALYCRISLEDGGDNESMSISNQKLMLRDFAEKNGMFQYEYYVDDGYTGRNFNRPSFQRMIADIEAGKIGCVITKDLSRLGRNYIEAGSYIEIFFPKHNVRYIAITDGVDSLTRQEMDITPFKNILNDMYSRDISKKVLAGRMTRSRQGKFCGGQPPLGLMRDPEDKGHLIRDPETAPVIRKIYDMALDGWGCMRIAKQLMDDKVPITRVKSNTECDVNYYSWGSARISHILRNPFYKGAHLVCRTHQKGIRSNTYDIIPREDWEIIEDCHEAIISPEEWEQVQEIIDRRPTIMKGNSCPFYNLFHGIIYCATCGKSMQVRYEKVGRTGKNRFTGEQREPIDKAYYICQTYNRLGKNACTSHKIEARDLYNLVLKDIQELAKTALKDADAFYQRLSSRMERRYLLDASQTQKECQRLESRNCEIDEMFLSLYTDKAKGILTEQRFMKLTATLEQEQEANQKRLRDLLLMMRHSDEQENEVRTFIKEIRRYAAIEELDEAVLNRLISKILVGEVKKIDGQKVQEVRIVYNFVGEIPEITA

SEQ ID NO: 2175 - protein, 550 aa, Unknown
  Description of Unknown: Integrase B2176 sequence
  PTHR30461:SF3,cd00338,SM00857,G3DSA:1.10.10.2600,IPR036162, PF13408,IPR025827,PS51737,G3DSA:3.40.50.1390,IPR006119, IPR038109,PF07508,IPR011109,SSF53041,PTHR30461, Coil,PF00239
MKKFKFPIDLSMLTEEEINQFREDPSTLFQGEIDVCLYLRFSSERQKEQSIEGQLRDCIAHCKRKSYRIVAIFVDRATTARKDVEKRVHFQEMITASVHQTWKLVIVWKLDRFARNREDSAVFKMRLRKNGVKVESATEGISKNPEGIILEAVLEGIAEYYSADLSQKITRGMRESALKCHSIGGHVPLGYKIEDHRLVINPNTAHIVQEAFELYANGETVADICRMFNTKGYRTAKGAEFNRNSFKSMFRNKRYIGVYTYKEIEKEGGVPAIIDKELFETVQRRLSANAEAPARGKAKVDYLLSGKLFCGHCGASMNGESGAGRHGKVYHYYSCYTKKRKLGCDKRPLKKDYIEGIVARDALNLLTDQLIDEIADMAIRQSEQDLINDTHIPQLTAQLSEVEKSITNITAAIEKGIASETLMNRLVQLEHEKKTLNKEIKAEEKFVYRIDRDQIVFWLSQFKYGNIEDEDFRRRLIDLLVNSVTVWDEPDGYKITTAYNLTSCKTKTFRVEKNPAAEEATGFDFGGSECTKSPRNRLISRTFAFHKFRF

SEQ ID NO: 2176 - protein, 550 aa, Unknown
  Description of Unknown: Integrase B2177 sequence
  PTHR30461:SF3,cd00338,SM00857,G3DSA:1.10.10.2600,IPR036162, PF13408,PS51737,IPR025827,G3DSA:3.40.50.1390,IPR006119, IPR038109,PF07508,IPR011109,SSF53041,PTHR30461, PS51736,Coil,PF00239
MARKKNIAAGLDAVIYARYSSHNQREVSIEQQIAECTKHAAALGLRIVGTYEDRAISGKTDNRPRFQQMMRDAEKGKFQAVVAWKSNRIGRNMLQAMVNEAKLDDYGVKVFYAEEDFDDTAAGRFALRNMMNVNQFYSENMAEDITRGLYDNASKCMANGRHPLGYKRGEDGRVVLDEANAAVVREIFTRVAAGDLFVDIARDLNAQGIKTSKGANWNKGSFQSICQNERYRGIYIYGDVRVADGIPRIVSDDLWYRVQEAMRMKKNPVGTRHRVGAEDYLLTGKLRCGHCGSYMTGVSGTSRNGELHYYYTCQKRRTEHACDKKNIRRDVIEPAVAQAIKMYCLTDDVIEWMADRTVEYWEKHDNDLQIEALEQQLEENKKATSNMLKAIEMGIITEATRTRMVELETEQSRLSVQLNAAKEDVVKIDREQIISYLELLQQGDIHDRDFQMELFKNFLVAVYVYDDNRMKLVFSCMGDQNSVEIPLETGEDPPDGGLSPDAKMFVLTPDSSTRRKSTARKRVVLFCCCQTSEGLAHPGERRAWTARGSP

SEQ ID NO: 2177 - protein, 550 aa, Unknown
  Description of Unknown: Integrase B2178 sequence
  PTHR30461:SF3,IPR036162,PS51737,IPR011109,PTHR30461, PF00239,G3DSA:1.10.10.2600,IPR006119,PF14287,SSF53041, IPR025378,SM00857,IPR025827,cd03770,IPR038109, PS51736,PF13408,G3DSA:3.40.50.1390,PF07508
MSRKKQVYEKITALYCRISLDDGGDNESMSISNQKLMLRDFAEKHGMFQYEYYVDEGYTGRNFNRPSFQRMIADIEAGKIGCVITKDLSRLGRNYIEAGSYIEIFFPKHNVRYIAVTDGVDSLTRQEMDITPFKNILNDMYSRDISKKVLAGRMTRSRQGKFCGGQPPLGLMRDPEDKGHLILDPETAPVIRKIYDMALDGWGCMRIAKQLMDDKIPITRVKSNTECDVNYYSWGSARISHILRNPFYKGAHLVCRTHQKGIRSNTYDIIPREEWEVIEGCHEAIVTPEEWEQVQEIIDRRPTIMKGNACPFYNLFHGLVYCATCGKSMQVRYEKVGRTGKNRFTGEMREPIDRAYYICQTYNRLGKNACTSHKIEARDLYNLVLKDIQELAEQAMKDADAFYQRLSSRMECRYLVDASQTEKERKRLEVRNQEIDGMFLSLYTDKAKGILTEQRFMKLTAALEQEQEANQKRLHDLAVMQSRADAQESEVRTFIKEIRRYAAIEELDESVLNRLISKILIGEVKKVDGQKVQEVRIVYNFVGEIPEIAA

SEQ ID NO: 2178 - protein, 550 aa, Unknown
  Description of Unknown: Integrase B2179 sequence
  PTHR30461:SF3,IPR036162,PS51737,IPR011109,PTHR30461, PS00397,PF00239,G3DSA:1.10.10.2600,IPR006119,SSF53041, SM00857,IPR025827,IPR038109,PS51736,cd03768, IPR006118,PF13408,G3DSA:3.40.50.1390,PF07508,Coil
MKIAIYCRVSTHHQIDKESLPFQEQDLKNYCECVLGSNNYVVFKDPGYSGKNTERPDFKNMFERIRKNEFTHLLVWKIDRISRNLLDFCSMYNELKQYNCTFISKNEQFDTSSAMGEAMLKIILVFAELERNLTSERVSAIMINRAQEGRWNGANVPLGYYWDASSAFPLIDNAESEIIKSIYNIYEKEQSANRVLDYLVENNIKTKRGGNWTTKTICDVIRNPFYMGTYRYNYRESARGKLKDSSEWIIKENNHQAIISKKQWQKCNDIMDENARTNHSKNRRYNQIHIFRGLLRCNVCGGNMYGAKDRPRKDGFRPSRYRCSNSHKETCNNKIVTDVTLGPFVINYLINFINLINNSKQINSIDDIKSFLLNGIDFKDIDLTEDTLFNIYVSLNINNKLIPLPDTESKDMKVNSEEIKLTREINKFKKALKRLDDLYYFDEKGISEKDYLIKKKDFENKLNDANNKLKSISENEPTNFYDFDFLSSASEFLLQNNIKKHIDFKMFYMTIDNEKIYNFVKSLVKEIFINEDGSIYSITFKNGLVHYFIY

SEQ ID NO: 2179 - protein, 550 aa, Unknown
  Description of Unknown: Integrase B2180 sequence
  cd00338,SM00857,G3DSA:1.10.10.2600,IPR036162,PS51736, PS51737,G3DSA:3.40.50.1390,PF13408,IPR025827,IPR006119, IPR038109,PF07508,SSF53041,IPR011109,PTHR30461, mobidb-lite,Coil,PF00239
MTQSRPEPKVIVIPAKEESPQDQEKKKNLRVAAYCRVSTKKDEQLNSYENQKAYYTEKIMANPDWTMADIFADEGITGTSACKRKDFLRMIRQCRQGKIDMILAKSVSRFARNTVDTLNYTRELRGMGIPVIFEEQNINSIYPESEFLITIHGAFAQSESEGISSRVKWGKHQAMRTGKANIQYKTLLGYEKNPDGEMVVNAEQAETVRRIFEMYLSGQTLRSIKEALESGGFKNSAGTMEWTTSNLRTILSDEKYCGDVLLQKTFIQDCISKKVIKNTGQLPMYLIQNHHEAIIPRDRFDAVQVELARRKTLTSSTKRSAPTGMSRYSGKYALSGLLFCGECGTAYRRVVWTQHGEKRAVWRCSSRLDYGKKYCKESPTLDESPLQQAVLAAINASMSGCKVLADQLVDAMEQELAPIPGESMSLGDIDRAVAELGKQFDTLLAEAANGDADEYAERFRTISTTMEELKRRKAAILGIRQEQEQISRRIHAAASAMTAATVGITEWDDCVVYQLLEKVTVLTGNRIKVTFRNGVEIEQTVDQPKRRKFI

SEQ ID NO: 2180 - protein, 550 aa, Unknown
  Description of Unknown: Integrase B2181 sequence
  PTHR30461:SF3,SM00857,G3DSA:1.10.10.2600,IPR036162,PS51737, G3DSA:3.40.50.1390,IPR006119,IPR038109,PF07508,SSF53041, IPR011109,PF00239,PTHR30461,Coil,cd00338
MYYQPKIDFKPEEVIDYLRKSRSDDPLLTVEEVLSKHEAMLDEWAEKHLGAVVPEENKYREVVSGETIAERPEINRVLRLIESPKYKAVAVVEPQRLTRGDLEDIGRLMKLLKHTNTLVITPQRVYDLRDEYDWDAFERELKRGNDYLEYTKKILNRGRLLSVSQGNYVGNTPPYGYDKTFVTEGKRKCPILVPNKAEADVVRMMFDLYVNKDMGCTNICKKFDEMGIKPPKGDYWSPAAMTKMLQNIHYIGKVKWNHRKTLTIVEEGEFKKTRPVAQVGEFLIYDGKHEAIIPEELFNAAQAKKGKNTRQKPNTKVRNPFAGLIWCRCGRAMSLRTYKNRDAAPRLLCDGQTHCKTGSCLYSEMEERVISILTDCIKDFEIRLKNDEGDSAKLHARLIKNLEAKQKELDEKELAQWEAQADPDPAKRMPPHIFQQLNEKLLKEKEEVRQALCKAYESMPEPVNYEEKITQFSEALNALKDPNIDAATKNRLLKACIERIEYHRDTPQRIKSQQVRYYDQKQKRTRYKSPLCTGGNWTSPEIVLDVKLKA

SEQ ID NO: 2181 - protein, 550 aa, Unknown
  Description of Unknown: Integrase B2182 sequence
  PTHR30461:SF3,cd00338,SM00857,G3DSA:1.10.10.2600,IPR036162, PS51737,G3DSA:3.40.50.1390,IPR006119,IPR038109,PF07508, IPR011109,SSF53041,PTHR30461,Coil, PF00239
MYYQPKIDFKPEEVIDYLRKSRSDDPLLTVEEVLSKHEAMLDEWAEKHLGAVVPEENKYREVVSGETIAERPEINRVLRLIESPKYKAVAVVEPQRLTRGDLEDIGRLMKLLKHTNTLVITPQRIYDLRDEYDWDAFERELKRGNDYLEYTKKILNRGRLLSVSQGNYVGNTPPYGYDKTFVTEGKRKCPILVPNKAEADVVRMMFDLYVNKDMGCTNICKKFDEMGIKPPKGDYWSPAAMTKMLQNIHYIGKVKWNHRKTLTIVEEGEFKKTRPVAQVGEFLIYDGKHEAIIPEELFNAAQAKKGKNTRQKPNTKVRNPFAGLIWCKCGRAMSLRTYKNRDAAPRLLCDGQTHCKTGSCLYSEMEERVISILTDCIKDFEIRLKNDEGDSAKLHARLIKNLEAKQKELDEKELAQWEAQADPDPAKRMPPHIFQQLNEKLLKEKEEVRQALCKAYESMPEPVNYEEKITQFSEALNALKDPNIDAATKNRLLKACIERIEYHRDTPQRIKSQQVRYYDPKQKRTRYKSPLSTGGNWTSPEIVLDVKLKA

SEQ ID NO: 2182 - protein, 550 aa, Unknown
  Description of Unknown: Integrase B2183 sequence
  PTHR30461:SF3,SM00857,G3DSA:1.10.10.2600,IPR036162,PS51737, G3DSA:3.40.50.1390,IPR006119,IPR038109,PF07508,IPR011109, SSF53041,PF00239,PTHR30461,mobidb-lite,Coil, cd00338
MYYQPKIDFKPEEVIDYLRKSRSDDPLLTVEEVLSKHEAMLDEWAEKNLGGVVPEENKYREVVSGETIAERPEINRVLRLIESPRYKAVAVVEPQRLTRGDLEDIGRLMKLLKHTNTLVATPQRIYDLRDEYDWDAFERELKRGNDYLEYTKKILSRGRLLSVSQGNYVGNTPPYGYDKTFVTEGKRKCPILVPNKAEADVVRIMFDLYVNKDMGCWNICKKFDEMGIKPPKGDHWSANAMTKMLQNIHYIGKVKWNHRKTLTVVEEGEFKKTRPVAKVGEYMIYDGKHEAIIDEALFNAAQAKKGRNTRQKPTTKIRNPLAGLLYCKCGRAMSLRTYKAHNTEPRLLCDGQTYCKTGSCTYAEMEERVCNILRDCIHDFEIRLKNNEGDSIKLHARLIKNLEAKQKELDEKELAQWEAQADPDPAKRMPPHIFQQLNEKLLREKEEVRQALCKAYESMPEPVDYEEKIEQFTTALNAMQDAKMDAATKNRLLKDCFERIEYHRDAPQRIKSQQVRYYDKEQKRTRHKSPLNTGGNWTSPEITLDVKLRV

SEQ ID NO: 2183 - protein, 549 aa, Unknown
  Description of Unknown: Integrase B2184 sequence
  SM00857,G3DSA:1.10.10.2600,IPR036162,PF13408,IPR025827, PS51737,G3DSA:3.40.50.1390,IPR006119,IPR038109,PF07508, SSF53041,IPR011109,PTHR30461,Coil,cd00338, PF00239
MAYRKITDIRDTIGMRAVFYARVSTAEEEQLNAIELQIEENRGCIKEHGWKLVGEYIDRSKSGTMVKGRDDYQRLYEDLYEDLFDIVVIKDQERLQRNTLDWYLFINRVVQTGKLLFMYMDGKFYSPDDALITGVRAIIAEEFSRNLSKKLHNYHDHRIEKARQGQEIALQGSGNVYGWDKKDGKYYINPEQAKVRRLMCEGIMARKGSTLIAKELNDAGYRNTVGKPWKPMDIPKFVYDCKNVGTMIINKERHDFESKQTIKLPKEEWVYVENALPPIVTQEEWDLICKIHEERVIATGSDRRGKKTSGYSFSGKLVCGICGAPYWRKQRVSKDEYWVCSTKQTKGRRTRKRDSTMGKAGEINPLGCDNENISYNSLMEIMGVVSERLQANTDTIKHDMINWLTKLRKQLLEANGGHTEADLQRELSRKSKLLDAYLDGILNKQEYQKKAEELDERIIQLKAETEKNKANSGDIEEIDKVLANIDEEVSRYVDGNEKLKVEYLLEHLEQVQIFPDKVIVIVPILSEGIVVEKDQYVSREKWSRKNYSN

SEQ ID NO: 2184 - protein, 549 aa, Unknown
  Description of Unknown: Integrase B2185 sequence
  PTHR30461:SF3,cd00338,SM00857,G3DSA:1.10.10.2600,IPR036162, PF13408,IPR025827,PS51737,G3DSA:3.40.50.1390,IPR006119, IPR038109,PF07508,IPR011109,SSF53041,PTHR30461, PS51736,Coil,PF00239
MASQKYKKKSDNLIITGVIYARYSSHSQKEESIEQQIEECTAFAVTNGISVVGIYADKAISGRTDRRNEFQRLMRDAEKRKFDVVIAYKSNRISRNMLNALQYESRLDSFGIKTLYAKEEFGNTAAGRFALRTMMNVNQFYSENMAEDIRRGLKDNAAECKVNGSLPYGYKKGEDGKYAIDEPRAAIVREIFSKIVDDVPYADIIRSLNDRGILTKTRKPFNKNSFNRMLRNERYIGIYEHSGVRVVGGVPAIISEEVFYAVQRKLQEGLNSDGAKRKSNSDYLLTGKLYCGECGSPMVGYAGTSRNGTLHYYYTCKSRGNDGCTKHNVRRDFIEQFVVDLTRACLSRADVTDWLVSGYIELKKQAQETSDVPVMEEELSSRKKALDNIMKAIEAGIFNETTSARMQELETEIHDLERSIALGKAMFEEPVDGERMRFYLEKLRNGTPDNQAYRKELLRTMVKAIRLWDDRIEIEYNFTGTDGDGNNYRVVTEFLKGDSGSASGVHTEPPQPHQIRLIVLIREYLKLSTFFFLQKCLRHKAFRQSDTLE

SEQ ID NO: 2185 - protein, 549 aa, Unknown
  Description of Unknown: Integrase B2186 sequence
  PTHR30461:SF3,IPR036162,PS51737,IPR011109,PTHR30461, PF00239,G3DSA:1.10.10.2600,IPR006119,PF14287,SSF53041, IPR025378,SM00857,IPR025827,cd03770,IPR038109, PS51736,PF13408,G3DSA:3.40.50.1390,PF07508,Coil
MNRNKKIVKKVTALYCRISLDDGNANESMSISNQKLLLKDYAEKNGLLPYEYYVDDGYTGRNFNRPSFKRMIADIEAGKVGCVITKDLSRLGRNYIEAGGYIEVFFPKHNVRYIAVTDGVDSLTRQEMDITPFKNILNDMYSRDISKKVLAGRMTRSRQGKFCGGQPPLGLMRDPADRGHLVLDPQTAPTIRKIYDLALNGWGCMRIAKQLMEEKIPITRVKSNTACDVNYYSWGSARISHILRNPFYKGAHLVCRTHQKGIRSGTVDTIPRKDWEVIEDCHEAIVSPEDWEKVQELIDRRPPIMQGNACPFYNLFHGMVYCATCGKSMQARYEKVGRTGKNRFTGKEREPIDKAYYICQTYNRLGKDACTSHKIEARDLYNLVLKDIQELAEMALKDADAFYRRLCSRMERRYLSDASEMEKERERLEKRNQEIDEMFLNLYTDKAKGILSEQRFLKLTAAMEKEQEENQSRIKDLSLLLHRSNEQENDVRSFIREIRRYAAIQELDETVLNRLISRILVGEINKVDGEKVQEVKIIYNFVGEIPAAQ

SEQ ID NO: 2186 - protein, 549 aa, Unknown
  Description of Unknown: Integrase B2187 sequence
  PTHR30461:SF3,IPR036162,PS51737,IPR011109,PTHR30461, PF00239,G3DSA:1.10.10.2600,IPR006119,SSF53041,cd00338, SM00857,IPR025827,IPR038109,PS51736,cd18688, PF13408,G3DSA:3.40.50.1390,PF07508,Coil
MQTIPIDLSALTPEERQQFADNPSVLSSDCEAVCCLYMRYSSDRQTEQSIEGQLRELIAYCKHHSYRVAAIYVDRAISAHASMDKRPAFQQMLADSARSSWKTVLVYKLDRFARNREDSAIARMRLRKNGCNVESAKEGISKNPEGVILEALLEGMAEYYSLELSQKVRRGMSETARKGNSTGGTTPLGYTVVDKRLQIDPMTAHLVEEAFRRYADGDTVAAICDDFNARGYRTTRGTKFNKSSFKNVFRNEKYIGVYKFDDVRADNAVPRIISDELWRAVQSRLKTSEQAPARGKAKVPYLLSGKIFCGHCGAPMVGECGRGKGGKTYNYYSCANRKKAHLCDKKPVPKDWLEDVVAQDALDVLTDEIIEFVAEIAAQQSEEDIQKNTQIPVIRKKISEIENKIRNLTKALECASVAPDAIVERLAELEAQKKGLSTQLSDEERGVIPLTKESVVVYLKAVREKAVPLETQKAMLIEMLVNSVTVYDDEPGFLKFVTAYRLTQIPSKTYRVPTPAVSPCSDIGRVGSPEKARFGVLFRLFQKTKGLLK

SEQ ID NO: 2187 - protein, 549 aa, Unknown
  Description of Unknown: Integrase B2188 sequence
  PTHR30461:SF3,cd00338,SM00857,G3DSA:1.10.10.2600,IPR036162, PF13408,PS51737,IPR025827,G3DSA:3.40.50.1390,IPR006119, IPR038109,PF07508,IPR011109,SSF53041,PTHR30461, PS51736,Coil,PF00239
MYSTVSGPIHPPLAFGYCRKSTTGQREESIEAQQRAIVAYAAAMGYQLVHIYKDHGNSGRSGERPEFQQMLQDAVPAGVQFIIVHKLDRFFRNAERQTLIEAQLRRQGIRVLSASEHFDDTPQGQFMRNITKAINQWYSANLATEVMKGMRENAMGARNTGGPPPLGYAVDKTTGKFVLQPTEAAAVQMIFRMYRQGCGYTEIIDALNAAGHVTRRGRPFGKNSLYDILRNEKYTGTYVWNRLAPADPDGRTNRRNLKPRSEWVCVEGGMPQIITPEEFKEVQAEMNNRKHRSAAYTAKAFYLLSGLVYCGGCGGSMSGEAHRYKSHGKPVEYRYYTCSAKKRLHADGEHARPVPAASLEGAVVDYLQRVIFNPANMDTLCAALLQSMEPDPRHTDLAADLKRQAAEVQLKIDRIYAAIEKGLDPSSAIERINTLQQQRLALLAQATDLDMTDDVAKINIDQLREVWSRIQLKDMEPVQLRAVIREMVHKIIVFDDGPGGFRVRIILNPGHVAPANIPENVETASLSELQDFSTNGGRGLPLPKAAYLV

SEQ ID NO: 2188 - protein, 549 aa, Unknown
  Description of Unknown: Integrase B2189 sequence
  SM00857,G3DSA:1.10.10.2600,IPR036162,PF13408,IPR025827, G3DSA:3.40.50.1390,PS51737,IPR006119,IPR038109,PF07508, SSF53041,IPR011109,PTHR30461,Coil,cd00338, PF00239
MAYRKITDIRDTIGMRAVFYARVSTAEEEQLNAIELQIEENRGCIKDHGWKLVGEYIDRSKSGTMVKGRDDYQRLYEDLYEDLFDIVVIKDQERLQRNTLDWYLFINRVVQTGKLLFMYMDGKFYSPDDALITGVRAIIAEEFSRNLSKKLHNYHDHRIEKARQGQEIALQGSGNVYGWDKKDGKYYINPEQAKVRRLMCEGIMARKGSTLIAKELNDAGYRNTVGKPWKPMDIPKFVYDCKNVGTMIINKERHDFESKQTIKLPKEEWVYVENALPPIVTQEEWDLICKIHEERVIATGSDRRGKKTSGYSFSGKLVCGICGAPYWRKQRVSKDEYWVCSTKQTKGRRTRKRDSTMGKAGEINPLGCDNENISYNSLMEIMGVVSERLQANTDTIKHDMINWLTKLRKQLLEANGGHTEADLQRELSRKSKLLDAYLDGILNKQEYQKKAEELDERIIQLKAETEKNKANSGDIAEIDKVLANIDEEVSRYVDGNEKLKVEYLLEHLEQVQIFPDKVIVIVPILSEGIVVEKTQYVSREKWCWKKHNI

SEQ ID NO: 2189 - protein, 549 aa, Unknown
  Description of Unknown: Integrase B2190 sequence
  PTHR30461:SF3,SM00857,G3DSA:1.10.10.2600,IPR036162,PF13408, PS51737,G3DSA:3.40.50.1390,IPR025827,IPR006119,IPR038109, PF07508,IPR011109,SSF53041,PTHR30461,PS51736, cd00338,PF00239
MAKRSAKKNEYSSAEQIGVIYARYSSHNQKEESIEQQIAECSDFAAKNGIRIVGIYADKAVSGRSDRRPNFQRMMRDAEKRQFQIVVAYKSNRIARNMLNALQYEARLDLLGIKTLYAKEEFGNTAAGRFALRTMMNVNQFYSENMGEDIKRGMVDNANECKVNGMLPLGYVKSKEGKYAIAPDEAAVVREIFDSVLKDVPVAEIARSLNQRGIHTKLGREWNKNSFHIMLKNDNYIGVYRHSGVVVEDGIPPILEKEVFTAVQEKLANKKKTAGRRSANGEYLLTGKLFCGYCGSYMIGVSGTGENGTVHNYYQCQKRHAEGRCEKKNVRRDFIEKLIARLTQDYILQDDTIEWIADSTMSFQAMARRESGVAQLERDLADNRKVAKNIMAAIEQGIITETTKARLLEVEGTIHDLERSLSIAKAASQPIERERVVFSLEQMREGNVGSKEHQKKLIDTFVKSVTLWDDRIQIDYYHTPGKHKFSYSLEELTSKAENESNASDVRTDSLELHHKRVIRTQYGDGEIRITAFGFVFLCPLPSSKKEADV

SEQ ID NO: 2190 - protein, 549 aa, Unknown
  Description of Unknown: Integrase B2191 sequence
  SM00857,G3DSA:1.10.10.2600,IPR036162,PF13408,IPR025827, PS51737,G3DSA:3.40.50.1390,IPR006119,IPR038109,PF07508, SSF53041,IPR011109,PTHR30461,Coil,cd00338, PF00239
MAYRKITDIRDTIGMRAVFYARVSTAEEEQLNAIELQIEENRGCIKDHGWKLVGEYIDRSKSGTMVKGRDDYQRLYEDLYEDLFDIVVIKDQERLQRNTLDWYLFINRVVQTGKLLFMYMDGKFYSPDDALITGVRAIIAEEFSRNLSKKLHNYHDHRIEKARQGQEIALQGSGNVYGWNKKDGKYYINPEQAKVRRLMCEGIMARKGSTLIAKELNDAGYRNTVGKPWKPMDIPKFVYDCKNVGTMIINKERHDFESKQTIKLPKEEWVYVENALPPIVTQEEWDLICKIHEERVIATGSDRRGKKTSGYSFSGKLVCGICGAPYWRKQRVSKDEYWVCSTKQTKGRRTRKRDSTMGKAGEINPLGCDNENISYNSLMEIMEVVSERLQANTDTIKQDMINWLTKLRKQLLEANGGHTEADLQRELSRKSKLLDAYLDGILNKQEYQTKAEELDERIIQLKAETEKNKANSGDIAEIDKVLANIDEEVSRYVDGNEKLKVEYLLEHLEQVQIFPDKVIVIVPILSEGIVVEKTQYVSREKRRWKNNAV

SEQ ID NO: 2191 - protein, 549 aa, Unknown
  Description of Unknown: Integrase B2192 sequence
  SM00857,G3DSA:1.10.10.2600,IPR036162,PF13408,IPR025827, PS51737,G3DSA:3.40.50.1390,IPR006119,IPR038109,PF07508, SSF53041,IPR011109,PTHR30461,Coil,cd00338, PF00239
MAYRKITDIRDTIGMRAVFYARVSTAEEEQLNAIELQIEENRGCIKDHGWKLVGEYIDRSKSGTMVKGRDDYQRLYEDLYEDLFDIVVIKDQERLQRNTLDWYLFINRVVQTGKLLFMYMDGKFYSPDDALITGVRAIIAEEFSRNLSKKLHNYHDHRIEKARQGQEIALQGSGNVYGWDKKDGKYYINPEQARVRRLMCEGIMARKGSTLIAKELNDAGYRNTVGKPWKPMDIPKFVYDCKNVGTMIINKERHDFESKQTIKLPKEEWVYVENALPPIVTQEEWDLICKIHEERVIATGSDRRGKKTSGYSFSGKLVCGICGAPYWRKQRVSKDEYWVCSTKQTKGRRTRKRDSTMGKAGEINPLGCDNENISYNSLMEIMGVVSERLQANTDTIKHDMINWLTKLRKQLLEANGGHTEVDLQRELSRKSKLLDAYLDGILNKQEYQKKAEELDERIIQLKAETEKNKANSGDIAEIDKVLANIDEEVSRYVDGNEKLKVEYLLEHLEQVQIFPDKVIVIVPILSDGIVVEKAQYVSREKWFRKDYIL

SEQ ID NO: 2192 - protein, 549 aa, Unknown
  Description of Unknown: Integrase B2193 sequence
  SM00857,G3DSA:1.10.10.2600,IPR036162,PF13408,IPR025827, G3DSA:3.40.50.1390,PS51737,IPR006119,IPR038109,PF07508, SSF53041,IPR011109,PTHR30461,Coil,cd00338, PF00239
MAYRKITDIRDTIGMRAVFYARVSTAEEEQLNAIELQIEENRGCIKDHGWKLVGEYIDRSKSGTMVKGRDDYQRLYDDLYEDLFDIVVIKDQERLQRNTLDWYLFINRVVQTGKLLFMYMDGKFYSPDDALITGVRAIIAEEFSRNLSKKLHNYHDHRIEKARQGQEIALQGSGNVYGWDKKDGKYYINPEQAKVRRLMCEGIMARKGSTLIAKELNEAGYRNTVGKPWKPMDIPKFVYDCKNVGTMIINKERHDFESKQTIKLPKEEWVYVENALPPIVTQEEWDLICKIHEERVIATGSDRRGKKTSGYSFSGKLVCGICGAPYWRKQRVSKDEYWVCSTKQTKGRRTRKRDSTMGKAGEINPLGCDNENISYNSLMEIMGVVSERLQANTDTIKHDMINWLTKLRKQLLEANGGHTEADLQRELSRKSKLLDAYLDGILNKQEYQKKAEELDERIIQLKTETEKNKANSGDIAEIDKVLANIDEEVSRYVDGNEKLKVEYLLEHLEQVQIFPDKVIVIVPILSEGIVVEKTQYVSREKRRRKKYGN

SEQ ID NO: 2193 - protein, 549 aa, Unknown
  Description of Unknown: Integrase B2194 sequence
  SM00857,G3DSA:1.10.10.2600,IPR036162,PF13408,IPR025827, G3DSA:3.40.50.1390,PS51737,IPR006119,IPR038109,PF07508, SSF53041,IPR011109,PTHR30461,Coil,cd00338, PF00239
MAYRKITDIKATIGMRAVFYARVSTAEEEQLNAIELQIEENRGCIKDHGWKLVGEYIDRSKSGTMVKGRDDYQRLYEDLYEDLFDIVVIKDQERLQRNTLDWYLFINRVVQTGKLLFMYMDGKFYSPDDALITGVRAIIAEEFSRNLSKKLHNYHDHRIEKARQGQEIALQGSGNVYGWDKKDGKYYINPEQAKVRRLMCEGIMARKGSTLIAKELNEAGYRNTVGKPWKPMDIPKFVYDCKNVGTMIINKERHDFESKQTIKLPKEEWVYVENALPPIVTQEEWDLICKIHEERVIATGSDRRGKKTSGYSFSGKLVCGICGAPYWRKQRVSKDEYWVCSTKQTKGRKTRKRDSTMGKAGEINPLGCDNENISYNSLMEIMEVVSERLQANTDTIKQDMINWLTKLRKQLLEANGGHTEADLQRELSRKSKLLDAYLDGILSKEEYQRKAEELDERIIQLKAETEKNKANSGDIAEIDKVLDNIDEEVARYVDGNEKLKVEYLLEHLEQVQIFPDKVIVIVPILSEGIVVEKTQYVSREKWGWEKHNI

SEQ ID NO: 2194 - protein, 549 aa, Unknown
  Description of Unknown: Integrase B2195 sequence
  PTHR30461:SF3,SM00857,G3DSA:1.10.10.2600,IPR036162,PF13408, IPR025827,G3DSA:3.40.50.1390,PS51737,IPR006119,IPR038109, PF07508,SSF53041,IPR011109,PTHR30461,PS51736, cd00338,PF00239
MMKFPIDLSMLTEEEIDQFREDPSTLFEGDTDVSLYLRFSSERQREQSIEGQLRDCRAFCKMNRYRIVAIYVDRATTARKDVEKRTHFQEMIRDSDKQPWEAVVVWKLDRFARNRTDSALFKFRLRKNGVRVISATEAISEKPEGIILEAVLEGMAEFYSADLSQKITRGMRESALKCHSIGGHVPLGYKIENHKLVIDPNTAHIVQEAFQLYANGETVADICRLFNFKGYRTAKGVEFNRNSFKSMFRNKRYIGIYTYKDIEIEGGVPAIIDKELFETVHHRLSVNAEAPARGKAKVDYLLAGKLFCGHCGGSMNGESGTSKTGAIHNYYTCYTRKRQHSCDKKPLKKDWIEYIVAQDAMALMTDEVIEELADMAMAQTEQDLKENTRIPELSDRLKEIESGISNITRAIEKGIASDTLMERLVELEKDKKKVLRLLADEEKYICRIDREQIIFWLNKFKGGSIKDEGFRRVMIDLIVNSVTVWDEPDGFRITTAYNLTSCKNKTYRVSPSSGKEFGFEGPESTIERKSEPYIVWGTVFVQTKRHALP

SEQ ID NO: 2195 - protein, 549 aa, Unknown
  Description of Unknown: Integrase B2196 sequence
  PTHR30461:SF3,cd00338,SM00857,G3DSA:1.10.10.2600,IPR036162, PF13408,IPR025827,G3DSA:3.40.50.1390,PS51737,IPR006119, IPR038109,PF07508,SSF53041,IPR011109,PTHR30461, PS51736,Coil,PF00239
MDLCKIRNEISRGESIYNIPLRVTFYARVSTDKDEQLNSLDNQILYFKNFIMENSNWKYVPGYIDEGISGTSVKNRTNFLKMIHDAKKGKFDLILTKEISRFSRNTVDSIKYTQELLASDVGVLFLSDNINTILPDSELRLTIMSSIAQEEVRKLSERVRFGMKRSREKGHVLGNNVITGFTKEKGKLKIDEKEAKMIRRIYSLYASGEYGLSKISKILYEEGYKTKKGDYIHITTLRRMITNPKYKGFYCTNTVMTKDYRNKKQIRLPMDEWIIEDSKGEIPAIVSEELWDKANKLLKIKKVNYLKNVAEPRVFSKRYPYSGNIYCEHHNSKYKRVNNNGNSYWICNEYATHGDKTCKTPKLYEKELDKIFKNVYSYLINNFDEIKGKLINIYKNSTFNACNEIEKLKKEINNLNYKKESLLELYIEKVIEKSEFETRNDKYNNKIENIKKEKKELEKKDINATLKQIKKLELGDFINENFERLSKLLIDKIVVKKSADKTRVILNIYINLFNITYIWDYNNFEKISSLCSHNENHDSNNCFRKRKSK

SEQ ID NO: 2196 - protein, 549 aa, Unknown
  Description of Unknown: Integrase B2197 sequence
  PTHR30461:SF3,IPR036162,PS51737,IPR011109,PTHR30461, PF00239,G3DSA:1.10.10.2600,IPR006119,SSF53041,cd00338, SM00857,IPR025827,IPR038109,mobidb-lite,PS51736, PF13408,G3DSA:3.40.50.1390,PF07508,Coil
MRKKSNLNAATRAVIYARYSSANQRDCSIEQQVAKCRELAARLGLTVIDVYEDRAISGKTDRRPNFQRMMKDADLRQFDVVLAWKSNRMGRNMLQAMTNEERLRDNGIRTVYAEEDFDDTAAGRFALRNMMNVNQFYSENMAEDITRGLMDNAAKCLSNGSLPLGYKPGDDRHVVLDEAEAAIVQEIFTRVSCYEPFIDIARDLNRRGIKTKKGSEWGRSSFHTICRNERYRGIYIYRDVRIEGGMPRIVSDELFYKVQEVLKVKKNPQGRRKRSGYEEYLLTGKLFCGHCGSPMTGIAGTSKTGAMHYYYTCQKRRTDHSCDKKAVRRDQIERAVGVAIQQQLLTDENIQMMADKLMEYNARTETKYRLQGLQDQLNANKTATANILKAIEMGIITDATKARLLELEKEQGQLLVKIDEAKAEMVPISRNDFVKLLYIYKEGEPTDKKYLAALFDNFLVRVDLYDDHLKITFDPTGGRQPIDMPIGAEKSPESPGDSSESSNFEASSHDAEKFVLALHNCTKASVLTAFERLLRTLAFFIQRVSLRRS

SEQ ID NO: 2197 - protein, 549 aa, Unknown
  Description of Unknown: Integrase B2198 sequence
  PTHR30461:SF3,SM00857,G3DSA:1.10.10.2600,IPR036162,PS51736, PS51737,G3DSA:3.40.50.1390,IPR006119,IPR038109,PF07508, IPR011109,SSF53041,PTHR30461,Coil,mobidb-lite, cd00338,PF00239
MYYKEYPKIYYYETKEYGRKSRMDDPLLTVAETLQRHSEIIDEYAQKYLGGSIPEENKYMEVGSGESIADRPEITRLLKDIEDPAVKAIVVVDVQRLSRGDLEDAGKLIRLLRYTNTLVITPMKTYDLRDEYDRDAFERELKRGNEYLEYFKKIQARGRLASVKAGNYVGSVAPYGFDRIEKYDEVAKKNYFTLIERKDQADIVRMIFNWYCNDDIGVTAICRRLEDIGAKTKTGCATWKPSIIFGILENVHYIGCVRWNWRKTVKIIENQEIKKLRPKAKVDEYLIFEGKHDGIVSEEVFNRARIIKGTRHRTKRNLSLKNPFSGLMYCKTCGSKIGYNTFKRNGVEYAPPKLVCNNQVHCKTGSVDYNEVLDYMCKVLKDCIEDFKVRIENDQDDSVKLHKDLIERLTKQLKETEQKEQDQWEAQYDPDPNKRLPQHIFEKLNKKVLAEKEEINRALEKAKGSAPKHIDYREELVKTTDALKALKDSDLDAKIANQYLKAIIDRIEYHRPEIVRINKKNAEIFETDVRKGLQYHVAPYTIRVKLKCE

SEQ ID NO: 2198 - protein, 549 aa, Unknown
  Description of Unknown: Integrase B2199 sequence
  PTHR30461:SF3,SM00857,G3DSA:1.10.10.2600,IPR036162,PF13408, PS51737,G3DSA:3.40.50.1390,IPR025827,IPR006119,IPR038109, PF07508,IPR011109,SSF53041,PTHR30461,PS51736, cd00338,PF00239
MAKRSAKKNEYQSAEQVGVIYARYSSHNQKEESIEQQISECSDFAAKNGIRIVGIYADKAVSGRSDRRPNFQRMMRDAEKRQFQIVIAYKSNRIARNMLNALQYEARLDLLGIKTLYAKEEFGNTAAGRFALRTMMNVNQFYSENMGEDIKRGMVDNANECKVNGMLPLGYVKSKEGKYAIAPDEAAVVREIFDSVLKDVPVAEIARSLNQRGIHTKLGREWNKNSFHIMLTNDNYIGVYRHSGVVVEDGIPPILEKEVFAAVQEKLANKKKTAGRRSANGEYLLTGKLFCGYCGSYMIGVSGTGENGTVHNYYQCQKRHAEGRCEKKNVRRDFIEKLIARLTQDYILQDDTIEWIADSTMSFQAMARRESGVAQLERDLADNRKVAKNIMAAIEQGIITETTKARLLEVEGTIHDLERSLSIAKAASQPIERERVVFSLEQMREGNVGSKEHQKKLIDTFVKSVTLWDDRIQIDYYHTPGKHKFSYSLEELTSKAENESNASDVRTDSLELHHKRVIRTRYGDGEIHITAFGFVFLCPLPCSKKEAAV

SEQ ID NO: 2199 - protein, 549 aa, Unknown
  Description of Unknown: Integrase B2200 sequence
  PTHR30461:SF3,IPR036162,PS51737,IPR011109,PTHR30461, PF00239,G3DSA:1.10.10.2600,PF14287,IPR006119,SSF53041, IPR025378,SM00857,IPR025827,cd03770,IPR038109, PS51736,PF13408,G3DSA:3.40.50.1390,PF07508,Coil
MKQSNQNEITALYCRLSQDDGVDGESNSIQNQRNILERYAREHRFPNPRFYVDDGYSGGSFNRPGFQQMMTDMENGKIRTIITKDLSRLGRNQLHTGLYIEERFPMFGVRYIAINDNVDTDRSESTELMPFKNLFNEWFIRDTSRKIRAVQRAKAERGERLGTRAPYGYRKDEQDRKKLVVDEEAAAVVRRIFALCAAGQGPSQIARLLKREQVLCPTTYAYKTFGVAHSSLNLNDPYGWSDSTIANMLENEIYLGNTINLRYSTRSYKDKRKVEHPREKCMVLENTHPALVSREVWDIVQRVRQHKRRPTKMDEQNKYSGLVVCADCGSTMVLHRAHTMSRSYNHFTCRTYKKDGTLCTAHYIRECVLDDVVLEDLRRVTAMAREHTQEFAAYIGSRQSADIRKEARGLERELTAMKKRSRELDSIFKRLYEDSVLGRITAEQFQTLSGSYTQEMEVLNRAIPEKETAIQRLREQVSGTDHFISLAKRYTDIQELTPELLRLFIQKIVVHEKDVKWSKHAQQTVEIHYNDIGYVELTSPEGQSTPKGA

SEQ ID NO: 2200 - protein, 549 aa, Unknown
  Description of Unknown: Integrase B2201 sequence
  PTHR30461:SF3,cd00338,SM00857,G3DSA:1.10.10.2600,IPR036162, PF13408,PS51737,G3DSA:3.40.50.1390,IPR025827,IPR006119, IPR038109,PF07508,SSF53041,IPR011109,PTHR30461, PS51736,Coil,PF00239
MDLCKIRNEISRGESIYNIPLRVTFYARVSTDKDEQLNSLDNQILYFKNFIMENSNWKYVPGYIDEGISGTSVKNRTNFLKMIHDAKKGKFDLILTKEISRFSRNTVDSIKYTQELLASDVGVLFLSDNINTILPDSELRLTIMSSIAQEEVRKLSERVRFGMKRSREKGHVLGNNVITGFTKEKGKLKIDEKEAKMIRRIYSLYASGEYGLSKISKILYEEGYKTKKGDYIHITTLRRMITNPKYKGFYCTNTVMTKDYRNKKQIRLPMDEWIIEDSKGEIPAIVSEELWDKANKLLKIKKVNYLKNVAEPRVFSKRYPYSGNIYCEHHNSKYKRVNNNGNSYWICNEYATHGDKTCKSPKLYEKELDKIFKNVYSYLINNFDEIKGKLINIYKNSTFNACNEIEKLKKEINNLNYKKESLLELYIEKVIEKSEFETRNDKYNNKIENIKKEKKELEKKDINATLKQIKKLELGDFINENFERLSKLLIDKIVVKKSADKTRVILNIYINLFNITYIWDYNNFEKISSLCSHNENHDSNNCFRKRKSK

SEQ ID NO: 2201 - protein, 549 aa, Unknown
  Description of Unknown: Integrase B2202 sequence
  PTHR30461:SF3,SM00857,G3DSA:1.10.10.2600,IPR036162,PF13408, PS51737,G3DSA:3.40.50.1390,IPR025827,IPR006119,IPR038109, PF07508,SSF53041,IPR011109,PTHR30461,PS51736, cd00338,PF00239
MAKRSAKKNEYQSAEQVGVIYARYSSHNQKEESIEQQIAECSDFAAKNGIRIVGIYADKAVSGRSDRRPNFQRMMRDAEKRQFQIVVAYKSNRIARNMLNALQYEARLDLLGIKTLYAKEEFGNTAAGRFALRTMMNVNQFYSENMGEDIKRGMVDNANECKVNGMLPLGYVKSKEGKYAIAPDEAAVVREIFDSVLKDVPVAEIARSLNQRGIHTKLGREWNKNSFHIMLKNDNYIGVYRHSGVVVEDGIPPILEKEVFAAVQEKLANKKKTAGRRSANGEYLLTGKLFCGYCGSYMIGVSGTGENGTVHNYYQCQKRHAEGRCEKKNVRRDFIEKLIARLTQDYILQDDTIEWIADSTMSFQAMARRESGVAQLERDLADNRKVAKNIMAAIEQGIITETTKARLLEVEGTIHDLERSLSIAKAASQPIERERVVFSLEQMREGNVGSKEHQKKLIDTFVKSVTLWDDRIQIDYYHTPGKHKFSYSLEELTSKAENESNASDVRTDSLELHHKRVIRTRYGDGEIRITAFGFVFLCPLPSSKKEADV

SEQ ID NO: 2202 - protein, 549 aa, Unknown
  Description of Unknown: Integrase B2203 sequence
  PTHR30461:SF3,SM00857,G3DSA:1.10.10.2600,IPR036162,PF13408, IPR025827,G3DSA:3.40.50.1390,PS51737,IPR006119,IPR038109, PF07508,SSF53041,IPR011109,PTHR30461,Coil, PS51736,cd00338,PF00239
MPDDCAVIYARYSSHAQRDVSIEDQVADCRIYAERLGLTVLEVYADHATTGRSDDRCQFQRMIQDAKKGRWKTVLTWKTDRFARNRYDSAVYKARLKRYGVHVQYAKESIPDGPEGILMEGMLESYAEYFSANLAQNVRRGLNSNAQKCKLNGPAPLGYRRGSDGGYEIVESEAAVVRRIYQSITQGTGYAELVRELNAAGIKTKRGSSWTKNSFHKILRNEAYIGVYQYGEHRTEDAIPPIITKEEFAAVQNKLETYKKHNAHTGEIREYLLTGKLFCGNCGEGMVGICGTSKSGVRHYYYMCKGHQAHRCDLKNVKAAQLEDQVVSYTMQYVLQDDVIAELVDKLLEYQAQQQDSGMLEALRAELADVQGRLDNLMEAIEAGIITKTTKARLSELESEQERLTHSITVETCRNTGLSREQLIFLFDMFRAGDMRDLDFRRRLIDTFVNAVFVYDDGRLKIVYNFREGNETVTKEFVDSVESGAVDSVRMVVNSVYHGHPKGCPFSFSLKASSPISNGRSGCFNINIVSKQEVIGGITAEALLLTAPD

SEQ ID NO: 2203 - protein, 549 aa, Unknown
  Description of Unknown: Integrase B2204 sequence
  SM00857,G3DSA:1.10.10.2600,IPR036162,PF13408,IPR025827, G3DSA:3.40.50.1390,PS51737,IPR006119,IPR038109,PF07508, IPR011109,SSF53041,PTHR30461,Coil,cd00338, PF00239
MAYRKITDIRDTIGMRAVFYARVSTAEEEQLNAIELQIEENRGCIKDHGWKLVGEYIDRSKSGTMVKGRDDYQRLYEDLYEDLFDIVVIKDQERLQRNTLDWYLFINRVVQTGKLLFMYMDGKFYSPDDALITGVRAIIAEEFSRNLSKKLHNYHDHRIEKARQGQEIALQGSGNVYGWDKKDGKYYINPEQAKVRRIMCEGIMARKGSTLIAKELNDAGYRNTVGKPWKPMDIPKFVYDCKNVGTMIINKERHDFESKQTIKLPKEEWVYVENALPPIVTQEEWDLICKIHEERVIATGSDRRGKKTSGYSFSGKLVCGICGAPYWRKQRVSKDEYWVCSTKQTKGRRTRKRDSTMGKAGEINPLGCDNENISYNSLMEIMGVVSERLQANTDTIKHDMINWLTKLRKQLLEANGGHTEADLQRELSRKSKLLDAYLDGILNKQEYQKKAEELDERIIQLKAETEKNKANSGDIAEIDKVLANIDEEVSRYVDGNEKLKVEYLLEHLEQVQIFPDKVIVIVPILSDGIVVEKTQYLSREKWCRKNNAV

SEQ ID NO: 2204 - protein, 549 aa, Unknown
  Description of Unknown: Integrase B2205 sequence
  PTHR30461:SF3,IPR036162,PS51737,IPR011109,PTHR30461, PF00239,G3DSA:1.10.10.2600,IPR006119,SSF53041,cd00338, SM00857,IPR025827,IPR038109,PS51736,cd18688, PF13408,G3DSA:3.40.50.1390,PF07508,Coil
MQTIPIDLSALTPEERQQFADNPSVLSSDCEAVCCLYMRYSSDRQTEQSIEGQLRELIAYCKHHSYRVAAIYVDRAISAHASMDKRPAFQQMLSDSARSSWKTVLVYKLDRFARNREDSAIARMRLRKNGCNVESAKEGISKNPEGVILEALLEGMAEYYSLELSQKVRRGMSETARKGNSTGGTTPLGYTVVDKRLQIDPMTAHLVEEAFRRYADGDTVAAICDDFNARGYRTTRGTKFNKSSFKNVFRNEKYIGVYKFDDVRADNAVPRIISDELWRAVQSRLKASEQAPARGKAKVPYLLSGKIFCGHCGAPMVGECGRGKGGKTYNYYSCANRKKAHLCDKKPVPKDWLEDVVAQDALDVLTDEIIEFVAEIAAQQSEEDIQKNTQIPVIRKKISEIENKIRNLTKALECASVAPDAIVERLAELEAQKKGLSTQLSDEERGVIPLTKESVVVYLKAVREKAVPLETQKAMLIEMLVNSVTVYDDEPGFLKFVTAYRLTQIPSKTYRVPTPAVSPCSDIGRVGSPEKARFGVLFRLFQKTKDLLK

SEQ ID NO: 2205 - protein, 549 aa, Unknown
  Description of Unknown: Integrase B2206 sequence
  PTHR30461:SF3,SM00857,G3DSA:1.10.10.2600,IPR036162,PF13408, PS51737,G3DSA:3.40.50.1390,IPR025827,IPR006119,IPR038109, PF07508,IPR011109,SSF53041,PTHR30461,Coil, PS51736,cd00338,PF00239
MKKKFPIDLSMLTPEEIDQFREDPYTLYHGDIEVSLYLRFSSERQKEQSIEGQLRDCRAFCKRSGYRIVAIYVDRALTARKDAEKRVQFQQMIVDSEKRHWQYLVVWKLDRFARNRNDSAIYKMRLKKNGVRVISATENISENPEGIILEAVLEGMAEFYSAELSQKITRGMRESAMKCHSIGGHVPLGYKIKDHKLVIDPVGAAIVQEAFQLYANGDTVADICRLFNNKGYRTAKGAEFNRNSFKSMFKNERYIGIYTYRDLRIEDGVPAIVDKELFEIVQQRLRKNGEAPARGKAKVDYLLSGKLFCGHCGASMNGESGTGRHGGKFHYYSCYNRKRHRNCDKKPLKKEYIERVVVEDAITLLTDEVIEELADMAISQSDIDLKENTRVPELTAKCDEIDKAIGNITKAIEKGIASDALMERLMVLEKDKKDALRQLREEEKYIYRIDRDQVIYWLYQFKEGDIEDENFRRHIIDLLVNSVTVWDEPDGYRITSAYNLTSAPTKTFKVNGAFSGEGFGFEKLTSTISTAAYLLRWIFYCQRGENMVS

SEQ ID NO: 2206 - protein, 549 aa, Unknown
  Description of Unknown: Integrase B2207 sequence
  SM00857,G3DSA:1.10.10.2600,IPR036162,PF13408,IPR025827, G3DSA:3.40.50.1390,PS51737,IPR006119,IPR038109,PF07508, SSF53041,IPR011109,PTHR30461,Coil,cd00338, PF00239
MAYRKITDIRDTIGMRAVFYARVSTAEEEQLNAIELQIEENRGCIKDHGWKLVGEYIDRSKSGTMVKGRDDYQRLYEDLYEDLFDIVVIKDQERLQRNTLDWYLFINRVVQTGKLLFMYMDGKFYSPDDALITGVRAIIAEEFSRNLSKKLHNYHDHRIEKARQGQEIALQGSGNVYGWDKKDGKYYINPEQAKVRRLMCEGIMARKGSTLIAKELNDAGYRNTVGKPWKPMDIPKFVYDCKNVGTMIINKERHDFESKQTIKLPKEEWVYVENALPPIVTQEEWDLICKIHEERVIATGSDRRGKKTSGYSFSGKLVCGICGAPYWRKQRVSKDEYWVCSTKQTKGRRTRKRDSTMGKAGEINPLGCDNENISYNSLMEIMGVVSERLQANTDTIKHDMINWLTKLRKQLLEANGGHTEADLQRELSRKSKLLDAYLDGILNKQEYQKKAEELDERIIQLKAETEKNKANSGDIAEIDKVLANIDEEVSRYVDGNEKLKVEYLLEHLEQVQIFPDKVIVIVPILSEGIVVEKTQYVSREKWCRKDNAY

SEQ ID NO: 2207 - protein, 549 aa, Unknown
  Description of Unknown: Integrase B2208 sequence
  PTHR30461:SF3,SM00857,G3DSA:1.10.10.2600,IPR036162,PF13408, PS51737,IPR025827,G3DSA:3.40.50.1390,IPR006119,IPR038109, PF07508,SSF53041,IPR011109,PF00239,PTHR30461, PS51736,Coil,cd00338
MKKFPIDLSCLTEEEISQFQEDPYTLYNGDQDVALYLRYSSTGQSDQSIEGQLRDCRAFCKANHYRIVAIYVDRATTARKDVEKRVHLMEMVADSAKQNWEYVIVWKLDRFARNRNDSAIMKMRLRKNGVKVLSATEHLTDSPESIILESVLEGMAEFFSAELSQKVTRGMRESALKCHSVGGHIPLGYKVENHKLVVDPDTAHIVQEAFSLYANGESVADICRKFNSAGYKTAKNTEFNRSSFKAMFRNTRYIGTYTYKDIVIENGIPAIIDKELFETVQRRLSKTATAPARGKAKVDYLLSGKLFCGHCGASMNGESGAGRHGKVYHYYSCYTKKRKLGCDKRPLKKDYIEGIVARDALNLLTDQLIDEIADMAIRQSEQDLINDTHIPQLTAQLSEVEKSITNITAAIEKGIASETLMNRLVQLEHEKKTLNKEIKAEEKFVYRIDRDQIVFWLSQFKYGNIEDEDFRRRLIDLLVNSVTVWDEPDGYKITTAYNLTSCKTKTFRVEKNPAAKEATGFDFGESECAMKKSCNPWDCKTFLFFLLCR

SEQ ID NO: 2208 - protein, 549 aa, Unknown
  Description of Unknown: Integrase B2209 sequence
  PTHR30461:SF3,IPR036162,PS51737,IPR011109,PTHR30461, PF00239,G3DSA:1.10.10.2600,IPR006119,PF14287,SSF53041, IPR025378,SM00857,IPR025827,cd03770,IPR038109, PS51736,PF13408,G3DSA:3.40.50.1390,PF07508,Coil
MSRKKQVYEKITALYCRISLDDGGDNESMSISNQKLMLRDFAEKHGMFQYEYYVDDGYTGRNFNRPSFQRMIADIEAGKVGCVVTKDLSRLGRNYIEAGSYIEIFFPKHNVRYIAVTDGVDSLTRQEMDITPFKNILNDMYSRDISKKVLAGITTRSRQGKFCGGTPPFGLMRDPEDKGHLILDPETAPIIRKIYDYALDGLGCMRISKRLMEEKIPITRVKANTEFDANYYSWGGARISHILRNPFYKGAHLVFRTHQKGIRSNTYDIIPRDQWEVIEGCHEAIVTPEEWQQVQELIDRRPTIQGNSCPFYNLFHGLVYCATCGKSMQVRYEKVGRTGKNRFTGEMREPIDKAYYICQTYNRMGCKVCSSHKIEARDLYNLVLKDIQELAAQAMKDADAFYQRLSSRMERRYLVDASQTEKERKRLEARNQEIDGMFLSLYTDKAKGVLTEQRFMKLTAALEQEQEANQKRLHDLALMQSRADAQESEVRTFIKEIRRYAAIEELDEAVLNRLISKILIGEVKKVDGQKVQEVKIVYNFVGEIPEIAA

SEQ ID NO: 2209 - protein, 549 aa, Unknown
  Description of Unknown: Integrase B2210 sequence
  PTHR30461:SF3,SM00857,G3DSA:1.10.10.2600,IPR036162,PF13408, IPR025827,G3DSA:3.40.50.1390,PS51737,IPR006119,IPR038109, PF07508,IPR011109,SSF53041,PTHR30461,Coil, cd00338,PF00239
MARTATKHPAKPKRGKKLEAEEPGVLYGRYSSHNQKDISVEQQFEKGYGLAGEYGIRIVETYADRAVSGRTDKRKDFQRMMADAAKGKFRYVIAWKSNRMGRNMLEALVNEAKLQELGVRVLYVEEDFDDTAAGRFAARSMMNVNQFYSENMAEDIKRGLYDNASNCMVANGHLPYGYKRDDTLHYVIDEAKAAVIREIFVRVSCGEPLVDIYDSLNARGIKTSYGRPWGRSSFQKILSNERYREIYIYGDVRKEGGIPRIVSDELYFKVQEVLKTKKNPQGRHRVNGDYLLTGKLFCGNCKSPMIGISGTGRTGKLHYYYVCQKKRSEKTCDKKNVRRDEVEYQIAKAIFDNALQDQVIEWIADSTIAYNDRKEAEGHIGILEDQFADVQRSLKNIMSAIEQGIVTETTKSRLLELESERSEIEGKIAAAKADIVPVNREQLIEWLLSLREGDIHDKKYQARLFDTFLIAAYLYDDGTAKLVFSFAGDKNTVTVPLAEAVDSVEENTAEGSFKLCLAPPIPNTKVFGIFVYSQKNLYISNGKVLNPNG

SEQ ID NO: 2210 - protein, 549 aa, Unknown
  Description of Unknown: Integrase B2211 sequence
  PTHR30461:SF3,IPR036162,PS51737,IPR011109,PTHR30461, PF00239,G3DSA:1.10.10.2600,IPR006119,SSF53041,cd00338, SM00857,IPR025827,IPR038109,PS51736,mobidb-lite, PF13408,G3DSA:3.40.50.1390,PF07508,Coil
MRKKSNLNAATRAVIYARYSSANQRDCSIEQQVAKCRELAARLGLTVIDVYEDRAISGKTDRRPNFQRMMKDADLRQFDVVLAWKSNRMGRNMLQAMTNEERLRDNGIRTVYAEEDFDDTAAGRFALRNMMNVNQFYSENMAEDITRGLMDNAAKCLSNGSLPLGYKPGDDRHVVLDEAEAAIVQEIFTRVSCYEPFIDIARDLNRRGIKTKKGSEWGRSSFHTICRNERYRGIYIYRDVRIEGGMPRIVSDELFYKVQEVLKVKKNPQGRRKRSGYEEYLLTGKLFCGHCGSPMTGIAGTSKTGAMHYYYTCQKRRTDHSCDKKAVRRDQIERAVGVAIQQQLLTDENIQMMADKLMEYNARTETKYRLQGLQDQLNANKTATANILKAIEMGIITDATKARLLELEKEQGQLLVKIDEAKAEMVPISRNDFVKLLYIYKEGEPTDKKYLAALFDNFLVRVDLYDDHLKITFDPTGGRQPIDMPIGAEESPESPGDSPESSDFEASPQDAEKFVLALHNRTKASVLTAFERLLRTLAFFIQRVSLRRS

SEQ ID NO: 2211 - protein, 549 aa, Unknown
  Description of Unknown: Integrase B2212 sequence
  SM00857,G3DSA:1.10.10.2600,IPR036162,PS51737,G3DSA:3.40.50.1390, IPR006119,IPR038109,PF07508,IPR011109,SSF53041, PF00239,PTHR30461,Coil,cd00338
MEEFYDVIDYNTILEKINNDLNNEIYLFYLRKSREDIEYEKENKEYKTLERHQKRLITLATSMGIKVNEDYIIPEVVSGDSIAERNSIKVVLKLIEHPKVKGVWVIDVQRLTRGDLGDQDKIIKTFKYTNTLIMTPEKEYNLQFPADEEYLIDKLAYSRKEYLGIKKRLTEGRKDSVMEGKVPYSRAAFGYERYKLKGQKGYSLRIVPEQAEIVKDIFKMCLEGKGTFAIATELNKLGIPSPNGCKWRKNGIREMLHNKTYIGKVKWQERQQIKIIEDSQIKTKTKRNKENEYLICDGLHEAIISEEDFEKVQELLKQSSTKYVPLDLSMKNPLSGILRCSVCGKVMARREGGQNVYYSPRGSGLNPKYYKAKDLVWCSTNKECGTVSNNLEDVEDMIIESLKEIVKQRKQILNNYTKNENTVLDNINNQLEIIDNQIIKEEKKLNKLRDFLEDGIYDKKVYIERSSIILSNLEKLKNKKLEINENNEHLKMEKLREAIPKVEKGIKEYYKLDVVDRNIFLNEFIEKVLYTKTKIRSESDLKLDIYPKF

SEQ ID NO: 2212 - protein, 549 aa, Unknown
  Description of Unknown: Integrase B2213 sequence
  PTHR30461:SF3,cd00338,SM00857,G3DSA:1.10.10.2600, IPR036162,PF13408,PS51737,IPR025827, G3DSA:3.40.50.1390,IPR006119,IPR038109,PF07508, IPR011109,SSF53041,PTHR30461,PS51736,Coil,PF00239
MYSTVSGPMHPPLAFGYCRKSTTGQREESIEAQQRAIVAYAAAMGYQLVHIYKDHGNSGRSGERPEFQQMLQDAVPAGVQFIIVHKLDRFFRNAERQTLIEAQLRRQGIRVLSASEHFDDTPQGQFMRNITKAINQWYSANLATEVMKGMRENAMGARNTGGPPPLGYAVDKTTGKFVLQPTEAAAVQMIFRMYRQGCGYTEIIDALNAAGHVTRRGRPFGKNSLYDILRNEKYTGTYVWNRLAPADPDGRTNRRNLKPRSEWVCVEGGMPQIITPEEFKEVQAEMNNRKHRSAAYTAKAFYLLSGLVYCGGCGGSMSGEAHRYKSHGKPVEYRYYTCSAKKRLHADGEHARPVPAASLEGAVVDYLQRVIFNPANMDTLCAALLQSMEPDPRHTDLAADLKRQAAEVQLKIDRIYAAIEKGLDPSSAIERINTLQQQRLALLAQATDLDMTDDVAKINIDQLREVWSRIQLKDMEPVQLRAVIREMVHKIIVFDDGPGGFRVRIILNPGHVAPANIPENVETASLSELQDFSTNGGRGLPLPKAAYLV

SEQ ID NO: 2213 - protein, 549 aa, Unknown
  Description of Unknown: Integrase B2214 sequence
  SM00857,G3DSA:1.10.10.2600,IPR036162,PF13408,IPR025827, G3DSA:3.40.50.1390,PS51737,IPR006119,IPR038109,PF07508, IPR011109,SSF53041,PTHR30461,Coil,cd00338, PF00239
MAYRKITDIRDTIGMRAVFYARVSTAEEEQLNAIELQIEENRGCIKDHGWKLVGEYIDCSKSGTMVKGRDDYQRLYEDLYEDLFDIVVIKDQERLQRNTLDWYLFINRVVQTGKLLFMYMDGKFYSPDDALITGVRAIIAEEFSRNLSKKLHNYHDHRIEKARQGQEIALQGSGNVYGWDKKDGKYYINPEQAKVRRLMCEGIMARKGSTLIAKELNDAGYRNTVGKPWKPMDIPKFVYDCKNVGTMIINKERHDFESKQTIKLPKEEWVYVENALPPIVTQEEWDLICKIHEERVIATGSDRRGKKTSGYSFSGKLVCGICGAPYWRKQRVSKDEYWVCSTKQTKGRRTRKRDSTMGKAGEINPLGCDNENISYNSLMEIMGVVSERLQANTDTIKQDMINWLTKLRKQLLEANGGHTEADLQRELSRKSKLLDAYLDGILNKQEYQKKAEELDERIIQLKAETEKNKANSGDIAEIDKVLANIDEEVSRYVDGNEKLKVEYLLEHLEQVQIFPDKVIVIVPILSEGIVVEKTQYVSREKWCRKKHNI

SEQ ID NO: 2214 - protein, 549 aa, Unknown
  Description of Unknown: Integrase B2215 sequence
  PTHR30461:SF3,cd00338,SM00857,G3DSA:1.10.10.2600,IPR036162, PF13408,IPR025827,G3DSA:3.40.50.1390,PS51737,IPR006119, IPR038109,PF07508,IPR011109,SSF53041,PTHR30461, PS51736,Coil,PF00239
MDSSPFLMQERMGIELMAKNKKAGFEPDMQDAVIYTRYSSHNQRDCSIEQQVADCEIFARQNNLRVVKVYADRHLSGTTDNRPQFQQMLKDAAHGHWAYVICWKIDRFARNRYDSATYKFRLKKAGVRVLYAKESIPDGPEGILLESVLEGSAEYYSAALAQNIRRGMKYNAEQCKVNSGSIPFGYCKGPDGRFAIHEANAEVVREIFRKAAAGMPFVDIANDLNSRGLKTSRGGRWNKGSFRLLMNEAYIGVYHFSDTRIEGGMPALIDQGTFWAANERLKANSSVRGRHQDGGDYLLTGKLKCAHCGSYMIGFSGTGKSGELHYYYGCQKRRRERTCKKANVPREWIERVVVKAALDYVLRPDVMEWIADAVMEYQEREAASAQLAALTAELEENQKATDNVMKAIEAGIITSTTKQRLLDLEAKAQDLKRAIELEKLSHVRLERDQVLFWLDRFRGGSLQSQEFRRKVIDAFVSVVYLSDDHLRIAFNYSGGSNAEADFDLVMDAEAAAGELSKKFAQGHVASTKQEKSEPVSDWRRVRIFRFLRV

SEQ ID NO: 2215 - protein, 549 aa, Unknown
  Description of Unknown: Integrase B2216 sequence
  SM00857,G3DSA:1.10.10.2600,IPR036162,PF13408,PS51737, G3DSA:3.40.50.1390,IPR025827,IPR006119,IPR038109,PF07508, IPR011109,SSF53041,PTHR30461,Coil,cd00338, PF00239
MAYRKITDIRDTIGMRAVFYARVSTAEEEQLNAIELQIEENRGCIKEHGWKLVGEYIDRSKSGTMVKGRDDYQRLYEDLYEDLFDIVVIKDQERLQRNTLDWYLFINRVVQTGKLLFMYMDGKFYSPDDALITGVRAIIAEEFSRNLSKKLHNYHDHRIEKARQGQEIALQGSGNVYGWDKKDGKYYINPEQAKIRRLMCEGIMARKGSTLIAKELNDAGYRNTVGKPWKPMDIPKFVYDCKNVGTMIINKERHDFESKQTIKLPKEEWVYVENALPPIVTQEEWDLICKIHEERVIATGSDRRGKKTSGYSFSGKLVCGICGAPYWRKQRVSKDEYWVCSTKQTKGRRTRKRDSTMGKAGEINPLGCDNENISYNSLMEIMGVVSERLQANTDTIKHDMINWLTKLRKQLLEANGGHTEADLQRELSRKSKLLDAYLDGILNKQEYQKKAEELDERIIQLKAETEKNKANSGDIAEIDKVLANIDEEVSRYVDGNEKLKVEYLLEHLEQVQIFPDKVIVIVPILSEGIVVEKTQYVSREKWCRKKYSV

SEQ ID NO: 2216 - protein, 549 aa, Unknown
  Description of Unknown: Integrase B2217 sequence
  PTHR30461:SF3,SM00857,G3DSA:1.10.10.2600,IPR036162,PF13408, PS51737,G3DSA:3.40.50.1390,IPR025827,IPR006119,IPR038109, PF07508,IPR011109,SSF53041,PF00239,PTHR30461, PS51736,Coil,cd00338
MKITKFPIDLSMLTEEEIDQFRQDPSTLFEGDTDVCLYLRFSSERQREQSIEGQLRDCRTFCKLNSYRITAIYVDRATTARKDVEKRVHFQEMIRDSEKKPWEYVVVWKLDRFARNRTDSALFKFRLRKNGVKVISATENISEKPEGIILEAVLEGMAEFYSADLSQKITRGMRESALKCHSIGGHVPLGYKIEDHKLVINPATAHIVQEAFELYANGETVADICRIFNTKGYRTAKGVEFNRNSFKSMFRNKRYIGVYTYKDIEVEGGVPAIIDKELFETVGHRLSKNAEAPARGKAKVDYLLAGKLFCGHCGGSMNGESGTSKTGAIHNYYTCYTRKRKHACDKKPLKKDWIEYIVAQDAMELLTDDTIQELADMAISQTEQDLRENTRIPELTDRMKETESGITNITKAVEKGIASDALMNRLVELEKEKKNLLRLLAEEEKYVCKIERSQIVYWLTEFKGGRIEDERYRRIIIDLMINSVTVWDEPDGFRITTAYNLTSCKSKTFRIAPSGEKGFGFEGSESTNMHQGEPRKGFAFGVSCSAKIG

SEQ ID NO: 2217 - protein, 549 aa, Unknown
  Description of Unknown: Integrase B2218 sequence
  PTHR30461:SF3,SM00857,G3DSA:1.10.10.2600,IPR036162,PF13408, IPR025827,PS51737,G3DSA:3.40.50.1390,IPR006119,IPR038109, PF07508,IPR011109,SSF53041,PF00239,PTHR30461, PS51736,Coil,cd00338
MRVSVNLNAQKPDTTTNAVIYARYSSHGQTEQSIEGQLAKGHEYAAAQGYTVVHEYIDRAMTGRNDNREAFQKMLSDTGKHQFQVVIVWKVDRFGRNREEIAFNKHTCKKNGVRVEYVAESLPNSPEAVILESVLEGMAEYYSIQLSQNIRRGQLESAKKCQCVGGSVPLGYTLDSDKHFVIDPQTAPVVKKIFDLYAEGATISEITGQLNEQGIRTARKQLFTKNSLTKLLKNEKYIGVYTYKDIVRVEGGVPAIVDESTFDRVQELLKINRRAPSHTWTKVEYLLTDKLFCGHCGSPMVGESGFSHTGAKYSYYGCIKRRREKACDKKPVRQDWIEALVLDETVKLLHDDELMEYIIDRTWEYYQVTDKVQEEKAVLEAQLAEVDKAINNLVRAIEAGIFNAATKSRMDELDAQKAALTASLADLELTSGIRITRDHIEYFLLRLRDLDVKDRECQKRLVQTFVNAVFIYDDGRVKITYNYSGQSSTITLNQIASAEKGKGFVCCLPCSTSRNPWRCKGFGFFSAAVYPHHTHKRFLFRTHEKPLCA

SEQ ID NO: 2218 - protein, 549 aa, Unknown
  Description of Unknown: Integrase B2219 sequence
  PTHR30461:SF3,IPR036162,PS51737,IPR011109,PTHR30461, PF00239,G3DSA:1.10.10.2600,IPR006119,SSF53041,G3DSA:3.30.420.40, SM00857,IPR025827,cd03770,IPR038109,PF00814,PS51736 ,SSF53067,PF13408,G3DSA:3.40.50.1390,PF07508,Coil,IPR000905
MEQRPLPTALYCRLSREDGDRMESDSIGNQRKLLEEYIENHPELTVAECYADDGYTGTNFQRPAFQRMLRDMESGRIRCVLVKDLSRFGRDYIETGRYLERWLPEHGVRFIAVTDNIDSARGAYDMMMPLKNLFNTQYARDISQKVKSSLHAKQQRGEFIGAFASYGYCKDPQNHNRLVIDPPAAEVVRRIFTLFENGTGKLRIARHLNEEGIPCPSEYKRLTGEKYRNNHRLAATTYWTYATIHRILQNEMYIGNMEQGRDDRLQMHGKARRKDRSLWTVVPGTHQPIIEQDQWQRVQTLLNANARTPDFQQNVSPFAGFLKCGDCGRAMVRTAWGGKTFYTCGSYKRCGASVCSKHYIAHDALTKVILDDLNRLIAGVENLRQLAQQSAGGVYDLPRASIEGHPLDMSFSGLKTAVVNLTHNAEQKGEPLDRAALARDFTRAVSDELVPRAMLAARTCGRKTLVAAGGVAANTILRADLMAACAHESVKLYLPPLRLCGDNGAMIGAQGYYEYLAGARADLSLNAYATRDIDDAVVAYRAQVRDIFA

SEQ ID NO: 2219 - protein, 549 aa, Unknown
  Description of Unknown: Integrase B2220 sequence
  PTHR30461:SF3,SM00857,G3DSA:1.10.10.2600,IPR036162,PS51737, G3DSA:3.40.50.1390,IPR006119,IPR038109,PF07508,SSF53041, IPR011109,PTHR30461,Coil,PS51736,cd00338, PF00239
MKSTIYARYSTDKQRESSIDDQTRLCRQRAQTEGFEITAIYSDDGVSGSMPVSRRSGGAKLIADALAGRFDALIVESLDRLSRDQVEQESIIRRFEHHGIIIIGVSDGYDSRMDGRKIMRGVRGLINELYLDDLRHKTHRGQEGQVARGFLAGGKSYGYNIIKTDKGSRPEINEQEAKQVKWIFTRYAEGWSAQKIAAELNRQRIPSPRGGTWAVSGIYGSPAKGCGILNNEMYIGRYVWNRSQWVKDPDTGNRQRIDRPESEWKITEMPELRIIDDNLWQAVRNRMGKHGKKIIGRKATTLFGGLMTCPYCGGSIIAVSSRLYGCNTRKDRGSSVCKGILFSRDDADKNLLAILQDEMLTDEAIHEIEDQVHAILARRQKDQRDQKNAAEHRLKELDAEINRLVDAIASIGLSNALKSRLQAAESERDALQAQQSAQKAINKPIHKMDIVGRIRKKIGEMKTVLTSDTKRARKIIADMLGEIRITEKAGNVIAEYDNATQKLLLVSSGVSLNVVAGARYQLERHTKIIAKRKPSIYRLQDQNKQPPKK

SEQ ID NO: 2220 - protein, 549 aa, Unknown
  Description of Unknown: Integrase B2221 sequence
  PTHR30461:SF3,SM00857,G3DSA:1.10.10.2600,IPR036162,PF13408, IPR025827,G3DSA:3.40.50.1390,PS51737,IPR006119,IPR038109, PF07508,IPR011109,SSF53041,PTHR30461,Coil, PS51736,cd00338,PF00239
MQQALNAVIYARYSSHSQQEQSIEGQLRDCYAYAQREGLQVVGEYIDRAISGKTDERPDFQRMIADASKKQFQRVIVWKLDRFARNRYDSAHYKAKLKKYGVKVVSATENISDEPEGIILEGLLESMAEYYSANLSKHVRRGQRESIINGTYLGGVPPIGYKVENKRLVIDERTAPTIRYMFEQYAKGVPKREIIAELNARGIRNKKGKPLTLSSMQAALRNEKYIGIYRYSGQEVTGGCEALIDEATFRKVQERLDKVKHAPAAAKAKIDYLLQGKAFCGYCGSRMVGESGRGKMGNTYHYYACGKRKKEHTCAKKNEKKDFIEWYVVEQTVEYVLTPDRMDYIAAALVAQYEKDFGDNRIKDYEKQLERINGEIRSLVDTLAVCPPSARQPIFDKMELLDVQKTDLEIDIAKLRVAARVQLTEEQIKVWLKQFCKGDLDDMEFRERIIDVFINSVYLYDDKTVIYYNIEGGKQVSYMEMLDSAEEPPFADDPQGSSGVRISNDTPRHLLHRNSIGIAVVFLRQRKPVGQALTNALRTITIDKNYIMR

SEQ ID NO: 2221 - protein, 548 aa, Unknown
  Description of Unknown: Integrase B2222 sequence
  cd00338,SM00857,G3DSA:1.10.10.2600,IPR036162,PF13408, PS51737,G3DSA:3.40.50.1390,IPR025827,IPR006119,IPR038109, PF07508,IPR011109,SSF53041,PTHR30461,PS51736, Coil,PF00239
MSTGTELRAVFYARVSTEEEKQLNALEKQIQENKDVIRDHGWRLVGEYIDEGKTGTTTKRRNDYKRLLKDMTENKFDIVVCKDQDRLQRNTLDWYLFVDNLVTNNLKLFMYLDNKFFKPSEDALITGVKAIIAEEYSRNLSKKLNNSNKRRIERALNGEEVSAMGNGKSLAFKIVNGKWVKDEEEAKLGKKIFELYLEYDSIRKVRDWVNEHGYTNSVGKPFTSESISRILKNEKAKGVIVMGKYHHDFDKKKIVRRSEEELVRIPAPELAYVSEEVFDKVQERLRAKTGNGRGVNAYSDPLSGKIYCGSCGRKLWKHASNGYVNWMCASQVAKGDVECNGTRITTVAIRNIYKKITDNLEVNKEVVKQDIVKWLNELKATLSDTSVNEKIQKDLDKMERKRTKLLEAYLEDFISKDDYKAKYEAIEGQIEEKKKLLVPVEENEDIKVIESVLQNIDDEIDAYVKTLDMEESKVDFLIEHTKRITVLENRDIIIELDLVAGAIIAGKDFLLYVHDTMPQHHGPKHLHPSGPQTAPRCCFRDRFSCDQP

SEQ ID NO: 2222 - protein, 548 aa, Unknown
  Description of Unknown: Integrase B2223 sequence
  PTHR30461:SF3,SM00857,G3DSA:1.10.10.2600,IPR036162,PF13408, PS51737,G3DSA:3.40.50.1390,IPR025827,IPR006119,IPR038109, PF07508,IPR011109,SSF53041,PTHR30461,Coil, PS51736,cd00338,PF00239
MNNFGYSAPRAFGYCRKSTTGQREESIEAQQRAIVSYAAASGFELVKVYKDHGNSGRNGERPQFTQMVQDAIEGGAQFIIVHKLDRFFRNAERQTLVEAQLRRYGVRVLSASEHFDDTPQGQFMRNVTKAINQWYSANLAQEVVKGLRENAMSARNTGGPPPLGYAVDKATGKFVIAPREAEAVQLIFRLYLQDVGYAGILDALNAGGYTTRRGRPFGKNSLYDILRNEKYTGLYIWNRLAPADFDGKTNRRRLKPRDEWVCVENGMPRIIDPADWQRVQDEMEKRRHRNAQHKAKAFYLLSGLVVCGGCGGQMGGEMRRYKSHGQPVEYRYYSCINKKRLHDDGGHVRAVPADKLEKAVVDYLQHVVLRPETMDAICAAVLGATQPGTPPAERASELRKEIGILQQKIDRLYAAIENGLDAPITIQRINDLRKQQAALQAEVDALGEDVRKTADTVEQLRRVWANIRLENMQPEQLRAFIRKFVEKIIVYDDDDGGHRVRIVLNPAHVTPDKLPENLITAPLSELDTFFGYDRQRSTPAKSRLSRLR

SEQ ID NO: 2223 - protein, 548 aa, Unknown
  Description of Unknown: Integrase B2224 sequence
  PTHR30461:SF3,cd00338,SM00857,G3DSA:1.10.10.2600,IPR036162, PF13408,IPR025827,G3DSA:3.40.50.1390,PS51737,IPR006119, IPR038109,PF07508,IPR011109,SSF53041,PTHR30461, PS51736,Coil,PF00239
MSATIPSLMQAPRAFGYCRKSTNEQREESLEAQQRAIVTFAATAGYELVQVYKDHGNSGRRGERPEFQRMLADAAAAGVQYIIVHKLDRFFRNADQQTVVEMQLRRQGIQVISAAEHFDATPQGQFMRNVTKAINQWYSANLAQEVAKGLRENALTARTTGGPPPLGYTVDKSTGQYAIVPREAEAVQLIFKLYQQGAGYTEIIDALNAGGYVTRRGQPFGKNSLYDILRNEKYTGLYIWNRLAPADVDGRTSRRRLKPRDEWVCVENGMPQIIPTEQWQAVQDEMDKRKHRNAQYKAKAFYLLSGLVYCGGCGGVMSGEMHRYNSHGKAVEYRYYRCTAQHRQHDGGAHAHRVNADRLENAVIDYIQHIVLDPVNMDALCVAVLEALQPDGRNAERAKELKQEAGIIQQKVDRLYQAIENGLDAAGAIERINALQKQRMTLLAQANDLDISAESAAASVDELRRVWSGINLRELQPEKMRVIVRDLIYKIVVFDDGPRGSRLRIILNPARLNPSAIPKAIETMPFSELQNFSHTGGSGLPLPKAQQL

SEQ ID NO: 2224 - protein, 548 aa, Unknown
  Description of Unknown: Integrase B2225 sequence
  PTHR30461:SF3,SM00857,G3DSA:1.10.10.2600,IPR036162,PF13408, PS51737,G3DSA:3.40.50.1390,IPR025827,IPR006119,IPR038109, PF07508,IPR011109,SSF53041,PTHR30461,Coil, PS51736,cd00338,PF00239
MATKKKKTVPRQDGVYNRAVIYARYSPGPNQRDESIEGQIRECKDVAKRHGLMVIHEYIDKRMTGTNDDRPDFQRMLRDADRGLFDVVIVWKNDRFARNRYDSAIYKQRLKRNGVKILYAKEHIPDGPEGIILESVLEGMAEYYSANLAQNIRRGQRENALEGKFVGGTVPLGYKLDAEKRYVLDKEKAPLVLEIFERYVAGEAVIDICNDLNARGYLTARKRKFNRSSLHRILANEKYTGLYRFEDIETPGAVPRIISDELFQAAAVRAARNKKHRRTMQEEHVEYMLTGKIFCGHCGESMGGSWGTSKSGVRHYYYVCNGRKTKKSSCRKKPERKEKLEKIVIHSVVNNIICNDNVINYIVDRCMLIQEREIDRSPADTLRRELADTETALKNVMTAIEAGIITATTKDRLVELEERCATLKQGIAAAEITPPKLSREQLLFIFEKYKNRDINDINFVRDVIDTFVHAVYVYDDKILITFNYSDDNTVEVPLSEIEKAAADAASDVFDFCGVISTIPKKLITGIIHCNQLFYFPILIILRPHRASP

SEQ ID NO: 2225 - protein, 548 aa, Unknown
  Description of Unknown: Integrase B2226 sequence
  PTHR30461:SF3,SM00857,G3DSA:1.10.10.2600,IPR036162,PF13408, PS51737,G3DSA:3.40.50.1390,IPR025827,IPR006119,IPR038109, PF07508,SSF53041,IPR011109,PTHR30461,Coil, PS51736,cd00338,PF00239
MKKFPIDLSCLTEEEISQFQEDPYTLYNGDQNVAIYLRYSSTGQSDQSIEGQLRDCRTFCKANHYRIVAIYVDRATTARKDVEKRVHLMEMISDSAKQNWEYVIIWKLDRFARNRNDSAIMKMRLRKNGVKVLSATEHLTDSPESIILESVLEGMAEFFSAELSQKVTRGMRESALKCHSVGGHIPLGYKVENHKLVVDPDTAHIVQEAFSLYANGESVADICRKFNSAGYKTAKNTEFNRSSFKAMFRNTRYIGTYTYKDIVIENGIPAIIDKELFETVQRRLSKTATAPARGKAKVDYLLSGKLFCGHCGASMNGESGAGRHGKVYHYYSCYTKKRKLGCDKRPLKKDYIEGIVARDALNLLTDQLIDEIADMAIRQSEQDLINDTHIPQLTAQLSEVEKSITNITAAIEKGIASETLMNRLVQLEHEKKTLNKEIKAEEKFVYRIDRDQIIFWLSQFKYGNIEDEDFRRRLIDLLVNSVTVWDEPDGYKITTAYNLTSCKTKTFRVEKNPAAEEATGFDFGESECTKSPRNRLISRTFAFHKFRF

SEQ ID NO: 2226 - protein, 548 aa, Unknown
  Description of Unknown: Integrase B2227 sequence
  PTHR30461:SF3,cd00338,SM00857,G3DSA:1.10.10.2600,IPR036162, PF13408,IPR025827,G3DSA:3.40.50.1390,PS51737,IPR006119, IPR038109,PF07508,IPR011109,SSF53041,PTHR30461, PS51736,Coil,PF00239
MSATIPSLMQAPRAFGYCRKSTNEQREESLEAQQRAIVTFAATAGYELVQVYKDHGNSGRRGERPEFQRMLADAAAAGVQYIIVHKLDRFFRNADQQTVVEMQLRRQGIQVISAAEHFDATPQGQFMRNVTKAINQWYSANLAQEVAKGLRENALTARTTGGPPPLGYTVDKSTGQYAIVPREAEAVQLIFKLYQQGAGYTEIIDALNAGGYVTRRGQPFGKNSLYDILRNEKYTGLYIWNRLAPADVDGRTSRRRLKPRDEWVCVENGMPQIIPTEQWQAVQDEMDKRKHRNAQYKAKAFYLLSGLVYCGGCGGVMSGEMHRYNSHGKAVEYRYYRCTAQHRQHDGGAHAHRVNADRLENAVIDYIQHIVLDPVNMDALCVAVLEALQPDGRNAERAKELKQEAGIIQQKVDRLYQAIENGLDAAGAIERINALQKQRMTLLAQANDLDISAESAAASVDELRRVWSGINLRELQPEKMRVIVRDLIYKIVVFDDGPRGSRLRIILNPARLNPAAIPKAIETMPFSELQNFSHTAGSGLPLPKAQQL

SEQ ID NO: 2227 - protein, 548 aa, Unknown
  Description of Unknown: Integrase B2228 sequence
  PTHR30461:SF3,SM00857,G3DSA:1.10.10.2600,IPR036162,PS51737, G3DSA:3.40.50.1390,IPR006119,IPR038109,PF07508,IPR011109, SSF53041,PTHR30461,Coil,cd00338,PF00239
MYKEYPKFYNYEVKEYGRKSRTDDPLLSTDEILEKHSKIVEEYAVKYLGGPIPDDNKYMEVASGESLKDRPEITRLLKDIEDPAVKAIIVVEVQRLSRGDLEDAGRLIRLLRYTNTYVITPMKIYDLRDEYDRDAFERELKRGNEYLEYFKKIQARGRLASVKDGNYIGSTAPYGFDRIEKFEADGKKSYHTLIERKDQADVVRMIFNWYCEEDIGVTAICRRLEDIGAKTKTGQSTWKPSIIFSILENHHYIGCTRWNWRKTVKIIEDQEIKKLRPKAKVDEFLLFEGKHDGIISEEQFNKAREIRGKRHRTRRDLTLKNPFSGIMFCKRCGHKIGYNTYTRNGVEYAPPKLVCNNQVHCKSGSVKYSEVFEYVRKVLKDCIGDFEVRIENDQDDSLKLHTDLMARLTKQLADLEKKEMEQWEAQYDPDPAVRLPQHIFAKLNEKVLKEKEEVNKALEKAKGSAPKHINYRDELIKTKDALRILEDVELDAKTKNQYLKTVIDKMVYERDPIVQITKDNAEKYNVDLSKGMQYYNPPYKITIELKCD

SEQ ID NO: 2228 - protein, 548 aa, Unknown
  Description of Unknown: Integrase B2229 sequence
  PTHR30461:SF3,SM00857,G3DSA:1.10.10.2600,IPR036162,PF13408, IPR025827,G3DSA:3.40.50.1390,PS51737,IPR006119,IPR038109, PF07508,IPR011109,SSF53041,PTHR30461, Coil,PS51736,cd00338,PF00239
MKKFPIDLSCLTEEEISQFQEDPYTLYNGDQNVAIYLRYSSTGQSDQSIEGQLRDCRTFCKANHYRIVAIYVDRATTARKDVEKRVHLMEMISDSAKQNWEYVIVWKLDRFARNRNDSAIMKMRLRKNGVKVLSATEHLTDSPESIILESVLEGMAEFFSAELSQKVTRGMRESALKCHSVGGHIPLGYKVENHKLVVDPDTAHIVQKAFSLYANGESVAAICRKFNSAGYKTAKNTEFNRSSFKAMFRNTRYIGTYTYKDIVIENGIPAIIDKELFEAVQRRLSKTATAPARGKAKVDYLLSGKLFCGHCGASMNGESGAGRHGKVYHYYSCYTKKRKLGCDKRPLKKDYIEGIVARDALNLLTDQLIDEIADMAIRQSEQDLINDTHIPQLTAQLSEVEKSITNITAAIEKGIASETLMNRLVQLEHEKKTISKEIKAEEKFVYRIDRDQIVFWLSQFKYGNIEDENFRRRLIDLLVNSVTVWDEPDGYKITTAYNLTSCKTKTFRVEKNPAAEEATGFDFGESECTKSPRNRLISMTFAFHKLRF

SEQ ID NO: 2229 - protein, 548 aa, Unknown
  Description of Unknown: Integrase B2230 sequence
  PTHR30461:SF3,SM00857,G3DSA:1.10.10.2600,IPR036162,PS51737, G3DSA:3.40.50.1390,IPR006119,IPR038109,PF07508,IPR011109, SSF53041,PTHR30461,Coil,PS51736,cd00338, PF00239
MKSTIYARYSTDKQRESSIDDQTRLCRQRAQTEGFDITAIYSDDGVSGSMPVSRRSGGAKLIADALAGRFDALIVESLDRLSRDQVEQESIIRRFEHHGIIIIGVSDGYDSRMDGRKIMRGVRGLINELYLDDLRHKTHRGQEGQVARGFLAGGKSYGYNIVKTDKGSRPEINDQEAKQVKWIFTRYADGWSVQKIAAELNRQGIPSPRGGTWAVSGIYGSPAKGCGILNNEMYIGRYVWNRSQWVKDPDTGNRQRIDRPESEWKITEMPELRIIDDNLWQAVRNRMGKHGKKIIGRKATTLFGGLMTCPYCGGSIIAVSSRLYGCNTRKDRGASVCKGILFSRDDADKNLLAILQDEMLTDEAIHEIEDQVHAILASRQKDQRDQKNAAEKRLKELDAEINRLVDAIASIGLSNALKSRLQAAESERDALQAQQSEKAINKPIHKMDIVGRIRKKIGEMKTVLTSDTKRARKIIADMLGEIRITEKAGNVIAEYDNATQKLLLVSSGVSLNVVAGARYQLERHTKIIAKRKPSIYRLQNQNKQPLKK

SEQ ID NO: 2230 - protein, 548 aa, Unknown
  Description of Unknown: Integrase B2231 sequence
  PTHR30461:SF3,SM00857,G3DSA:1.10.10.2600,IPR036162,PS51737, G3DSA:3.40.50.1390,IPR006119,IPR038109,PF07508,IPR011109, SSF53041,PF00239,PTHR30461,PS51736,Coil, cd00338
MYKEYPTFYYYDTREYGRKSRTDDPLLSTEEVLEKHSKIIEEYATKYLGGPIPPENKYMEVGSGESLRDRPEITRLLKDIEDPAVKAIIVVDVQRLSRGDLEDAGRLIRLLRYTNTYVITPMKIYDLRDEYDRDAFERELKRGNEYLEYFKKIQARGKLLSVKEGNYVGSTAPYGFDRIEKFEANGKKSYYTLIERKDQADVVRMIFNWYCEEDIGVTAICRRLEDIGAKTKTGHKIWKPSIIFSILENHHYIGCTRWNWRKTVKIIEDQEIKKLRPKAKVDEFLLFEGKHDGIISEDQFNKAREIRGKRHRTRRDLTLKNPFSGIMFCKKCGHKIGYNTYTRNGVEYAPPKLVCNNQVHCKTGSVNFQEVFDYVRKVLRDCIEDFEVRIENDQDDSFKLHRDLVDRLEKQLKDLEKKEIEQWDAQYDPDPNKRLPPHIFAKLNEKVLKEKEEVNRALDKAKDSMPKQVDYREELIKTTDALRVLEDPKLDAKTKNQYLKTVISKMVYKRDPNVQISKENAEKYGIEISKGLRYYTPPYKITIELKCD

SEQ ID NO: 2231 - protein, 548 aa, Unknown
  Description of Unknown: Integrase B2232 sequence
  PTHR30461:SF3,cd00338,SM00857,G3DSA:1.10.10.2600,IPR036162, PF13408,IPR025827,G3DSA:3.40.50.1390,PS51737,IPR006119, IPR038109,PF07508,IPR011109,SSF53041,PTHR30461, PS51736,Coil,PF00239
MSATIPSLMQAPRAFGYCRKSTNEQREESLEAQQRAIVTFAATAGYELVQVYKDHGNSGRRGERPEFQRMLADAAAAGVQYIIVHKLDRFFRNADQQTVVEMQLRRQGIQVISAAEHFDATPQGQFMRNVTKAINQWYSANLAQEVAKGLRENALTARTTGGPPPLGYTVDKSTGQYAIVPREAEAVQLIFKLYQQGAGYTEIIDALNAGGYVTRRGQPFGKNSLYDILRNEKYTGLYIWNRLAPADVDGRTSRRRLKPRDEWVCVENGMPQIIPTEQWQAVQDEMDKRKHRNAQYKAKAFYLLSGLVYCGGCGGVMSGEMHRYNSHGKAVEYRYYRCTAQHRQHDGGAHAHRVNADRLENAVIDYIQHIVLDPVNMDALCVAVLEALQPDGRNAERAKELKQEAGIIQQKVDRLYQAIENGLDAAGAIERINALQKQRMTLLAQANDLDVSAESAAASVDELRRVWSGINLRELQPEKMRAIVRDLIYKIVVFDDGPRGSRLRIILNPARLNPAAIPKAIETMPFSELQNFSHTAGSGLPLPKAQQL

SEQ ID NO: 2232 - protein, 548 aa, Unknown
  Description of Unknown: Integrase B2233 sequence
  PTHR30461:SF3,SM00857,G3DSA:1.10.10.2600,IPR036162,PF13408, IPR025827,PS51737,G3DSA:3.40.50.1390,IPR006119,IPR038109, PF07508,SSF53041,IPR011109,PTHR30461,Coil, PS51736,cd00338,PF00239
MKFKYPAMGTTKNAVIYARYSSHSQREESIEGQLRICHEYAKAEGLAIVGEYIDRAISGTTDARPDFQRMIDDAKKKQFSYVIVYRLDRFARNRYDSVLYKHELKQCGVKVVSATEGIGTGDESILLEALIEASAEYYSMELSRKIKRGRQDSAMKGNFLGGAVPLGYKVVDSKFIIDDETAPIVRYIFERYAAGIGKKQIIDELTAKGYMRRTGKPFTYRAFDSVLRNRKYTGEFTQTGITVEGGCPAIVDTEMFEKVQARLEINRRAPAKAKAKTEYLLSGKMFCGYCGEPMIGISGTGRHEKTFYYYSCVGRRGKSGCKKQHEKKDFIEWYVCEQTVQYMQDPERLSHVAKRIIEINDAEFDGGKVKELERAVENCDNDIRKLVDALTTIPDAGRAALYDKIERIGAAKADMEIDLAKVRVLSEVRYKQEDVEAWIRSMCRGDLMDFEFRRQLIDVFINSVYLFDDRVVIVYNIKNGKQVSAIDVLNAVEELDGVELFPDSAEDSSAGGNGSFLVADAPPYTKNPNLFPIGNGFGFLIFIKDIID

SEQ ID NO: 2233 - protein, 548 aa, Unknown
  Description of Unknown: Integrase B2234 sequence
  PTHR30461:SF3,SM00857,G3DSA:1.10.10.2600,IPR036162,PF13408, PS51737,IPR025827,G3DSA:3.40.50.1390,IPR006119,IPR038109, PF07508,SSF53041,IPR011109,PF00239,PTHR30461, PS51736,Coil,cd00338
MKKFPIDLSCLTEEEISQFQEDPYTLYNGDQEVALYLRYSSTGQSDQSIEGQLRDCRAFCKANHYRIVAIYVDRATTARKDVEKRVHLMEMVADSAKQNWEYVIVWKLDRFARNRNDSAIMKMRLRKNGVKVLSATEHLTDSPESIILESVLEGMAEFFSAELSQKVTRGMRESALKCHSVGGHIPLGYKVENHKLVVDPDTAHIVQEAFSLYANGESVADICRKFNSAGYKTAKNTEFNRSSFKAMFRNTRYIGTYTYKDIVIENGIPAIIDKELFETVQRRLSKTATAPARGKAKVDYLLSGKLFCGHCGASMNGESGAGRHGKVYHYYSCYTKKRKLGCDKRPLKKDYIEGIVARDALNLLTDQLIDEIADMAIRQSEQDLINDTHIPQLTAQLSEVEKSITNITAAIEKGIASETLMNRLVQLEHEKKTLNKEIKAEEKFVYRIDRDQIVFWLSQFKYGNIEDEDFRRRLIDLLVNSVTVWDEPDGYKITTAYNLTSCKAKTFRVEKNPAAEEATGFDFGESECTKSPRNRLISRTFAFHKFRF

SEQ ID NO: 2234 - protein, 548 aa, Unknown
  Description of Unknown: Integrase B2235 sequence
  PTHR30461:SF3,SM00857,G3DSA:1.10.10.2600,IPR036162,PS51737, G3DSA:3.40.50.1390,IPR006119,IPR038109,PF07508,IPR011109, SSF53041,PTHR30461,Coil,cd00338,PF00239
MYKECPKFYNYEVKEYGRKSRTDDPLLSTDEILEKHSKIVEEYAVKYLGGPIPDDNKYMEVASGESLKDRPEITRLLKDIEDPAVKAIIVVEVQRLSRGDLEDAGRLIRLLRYTNTYVITPMKIYDLRDEYDRDAFERELKRGNEYLEYFKKIQARGRLASVKDGNYIGSTAPYGFDRIEKFEADGKKSYHTLIERKDQADVVRMIFNWYCEEDIGVTAICRRLEDIGAKTKTGQSTWKPSIIFSILENHHYIGCTRWNWRKTVKIIEDQEIKKLRPKAKVDEFLLFEGKHDGIIPEEQFNKAREIRGKRHRTRRDLTLKNPFSGIMFCKRCGHKIGYNTYTRHGIEYAPPKLVCNNQVHCKSGSVKYSEVFEYVRRVLKDCISDFEVRIENNQDDSLKLHTDLMARLTKQLADLEKKELEQWDAQYDPDPAKRLPQHIFAKLNEKVLKEKEEVNKALAKAKDSAPKHINYRDELIKTKDALRILEDVELDAKTKNQYLKTVISKMVYERDPIVQITKDNAEKYNMQSSKGTKYYNPPYKITIELKCD

SEQ ID NO: 2235 - protein, 548 aa, Unknown
  Description of Unknown: Integrase B2236 sequence
  PTHR30461:SF3,IPR036162,PS51737,IPR011109,PTHR30461, PS00397,PF00239,G3DSA:1.10.10.2600,IPR006119,SSF53041, cd00338,SM00857,IPR025827,IPR038109, PS51736,IPR006118,PF13408,G3DSA:3.40.50.1390,Coil
MKYAACYCRVSTDEQARFGFSIQAQKDALEKYCKENGYKYEFYIDEGISASSMKKRKALNEMLSKSSTFDMVLFTKLDRLSRNVLDANNINKLLIDNNCTMKAIDEDDIDTSTADGTFIFNLKVSLAQREIGKTSERINFVFKNKREKGEITSGTKKYGYDIVDKHFVVNEKEAENIRNLYQKFIDTNGSPLKTYEYFVTCFPFKGYDAMSNYLRETAYIGKYKLYRKSIYLENYIPRIMDDELFYRVQNLLKRKQKILTKNDKPSLFVGLVFCSVCGNRMYKKQDNRVTSQLIRYCCDNFRKFKIGSTERKCYNSNSIREDTIEDYLLKNLKMKLDEYKVTTKIIKEKAVKSNPKKEENIKNKMYKLKDLYLDDLIDKETYKSEYQKLQAQLQEVQKQTTIVNEKKDFSKVEKILNSDYIKNAGVEDTYIGVAEPIGYGKVASSTVSIFNNILSTRADIAYSVRESLLEAKGNYWSRFINSINPFYWLKIILYIPKSIFSYLGLNTDSILIKVFQLIYWLIGIICTLIITVFPEETKNFIMSFIHFS

SEQ ID NO: 2236 - protein, 548 aa, Unknown
  Description of Unknown: Integrase B2237 sequence
  cd00338,SM00857,G3DSA:1.10.10.2600,IPR036162,PF13408, PS51737,IPR025827,G3DSA:3.40.50.1390,IPR006119,IPR038109, PF07508,IPR011109,SSF53041,PTHR30461,PS51736, Coil,PF00239
MSIGTELRAVFYARVSTEEEKQLNALEKQIHENKDVIRDHGWRLVGEYIDEGKTGTTTKRRNDYKRLLKDMTENKFDIVVCKDQDRLQRNTLDWYLFVDNLVTNNLKLFMYLDNKFFKPSEDALITGVKAIIAEEYSRNLSKKLNNSNKRRIERALNGEEVSAMGNGKSLAFKIVNGKWVKDEEEAKLGKKIFELYLEYDSIRKVRDWVNEHGYTNSVGKPFTSESISRILKNEKAKGVIVMGKYHHDFDKKKIVRRSEEELVRIPAPELAYVSEEVFDKVQERLRAKTGNGRGVNAYSDPLSGKIYCGSCGRKLWKHASNGYVNWMCASQVAKGDVECNGTRITTVAIRNIYKKITDNLEVNKGVVKQDIVKWLNELKATLSDSSVNEKIQKDLDKLERKRTKLLEAYLEDFISKDDYKAKYEAIEGQIEEKKKLLVPVEENEDIKVIESVLQNIDDEIDAYVKTLDMEESKVDFLIEHTKRITVLENRDIIIELDLVAGAIIAGKDFLLYVHDTMPQHHGPKHLHPSGPQTAPRCCFRDRFSCDQP

SEQ ID NO: 2237 - protein, 548 aa, Unknown
  Description of Unknown: Integrase B2238 sequence
  cd03768,PTHR30461:SF3,SM00857,G3DSA:1.10.10.2600,IPR036162, PF13408,PS51737,G3DSA:3.40.50.1390,IPR025827,IPR006119, IPR038109,PF07508,IPR011109,SSF53041,PTHR30461, PS51736,Coil,PF00239
MKVAIYSRKSVFTGKGESIENQIEMCKEYFSRLNGNDVEYSIYEDEGFSGGNINRPRFQQLLKDIKKNSFDALICYRLDRISRNVADFSTTLELLQEHNVDFISIREQFDTSTPMGRAMVYIASVFAQLERETIAERIRDNMLQLSKTGRWLGGVCPLGFTSEKITYVDSEYNERSMFKLSPLEEEMNVVRFIFSKYLATSSIHMALKELLASNIKGKHGGDFASMSLADILKNPVYVQSDSSIKEYYESLGVNFFGEPNGCGIMLYNKKNSKGKLRDMSEWIAAVGKHKGIISSSDWLKVQYSLDRNSKKNNPRQGTSAKALLSGVLKCSICGAPMRVCYGRLRKDGKRNHYYMCTMKAHSCKSRCENPNAKGLELEQEVINRLINYNEETLLRKLTSYADELKSSTPNDMIKNIDKSIDEKKSEMDTLMSQLGKTNNPATQNFILKKADSLSNEIMDLENKLNGIHKKKEQNSIEMRNIEIIMSSFSEFTKLCSTIKDVSNIEDENIKIALRNLINRLVSKISYNGFTKEVVIDIMGSQENCSPSG

SEQ ID NO: 2238 - protein, 548 aa, Unknown
  Description of Unknown: Integrase B2239 sequence
  PTHR30461:SF3,cd00338,SM00857,G3DSA:1.10.10.2600,IPR036162, PF13408,IPR025827,G3DSA:3.40.50.1390,PS51737,IPR006119, IPR038109,PF07508,IPR011109,SSF53041,PTHR30461, PS51736,Coil,PF00239
MSATIPSLMQAPRAFGYCRKSTNEQREESLEAQQRAIVTFAATAGYELVQVYKDHGNSGRRGERPEFQRMLADAAAAGVQYIIVHKLDRFFRNADQQTVVEMQLRRQGIQVISAAEHFDATPQGQFMRNVTKAINQWYSANLAQEVAKGLRENALTARTTGGPPPLGYTVDKSTGQYAIVPREAEAVQLIFKLYQQGAGYTEIIDALNAGGYVTRRGQPFGKNSLYDILRNEKYTGLYIWNRLAPADVDGRTSRRRLKPRDEWVCVENGMPQIIPTEQWQAVQDEMDKRKHRNAQYKAKAFYLLSGLVYCGGCGGVMSGEMHRYNSHGKAVEYRYYRCTAQHRQHDGGAHAHRVNADRLENAVIDYIQHIVLDPVNMDALCVAVLEALQPDGRNAERAKELKQEAGIIQQKVDRLYQAIENGLDAAGAIERINALQKQRMTLLAQANDLDISAESAAASVDELRRVWSGINLRELQPEKMRVIVRDLIYKIVVFDDGPRGSRLLIILNPARLNPSAIPKAIETMPFSELQNFSHTGGSGLPLPKAQQL

SEQ ID NO: 2239 - protein, 548 aa, Unknown
  Description of Unknown: Integrase B2240 sequence
  PTHR30461:SF3,cd00338,SM00857,G3DSA:1.10.10.2600,IPR036162, PF13408,IPR025827,G3DSA:3.40.50.1390,PS51737,IPR006119, IPR038109,PF07508,IPR011109,SSF53041,PTHR30461, PS51736,Coil,PF00239
MSATIPSLMQAPRAFGYCRKSTNEQREESLEAQQRAIVTFAATAGYELVQVYKDHGNSGRRGERPEFQRMLADAAAAGVQYIIVHKLDRFFRNADQQTVVEMQLRRQGIQVISAAEHFDATPQGQFMRNVTKAINQWYSANLAQEVAKGLRENALTARTTGGPPPLGYTVDKSTGQYAIVPREAEAVQLIFKLYQQGAGYTEIIDALNAGGYVTRRGQPFGKNSLYDILRNEKYTGLYIWNRLAPADVDGRTSRRRLKPRDEWVCVENGMPQIIPTEQWQAVQDEMDKRKHRNAQYKAKSFYLLSGLVYCGGCGGTMAGEMHRYNSHGKAVEYRYYRCAAQHRQHDGGVHAHRVNADRLENAVIDYIQHIVLDPVNMDALCVAVLEALQPDGRNAERAKELKQEAGIIQQKVDRLYQAIENGLDAAGAIERINALQKQRMTLLAQANDLDISAESAAASVDELRRVWSGINLRELQPEKMRVIVRDLIYKIVVFDDGPRGSRLRIILNPARLNPAAIPKAIETMPFSELQNFSHTGGSGLPLPKAQQL

SEQ ID NO: 2240 - protein, 548 aa, Unknown
  Description of Unknown: Integrase B2241 sequence
  PTHR30461:SF3,cd00338,SM00857,G3DSA:1.10.10.2600,IPR036162, PF13408,IPR025827,PS51737,G3DSA:3.40.50.1390,IPR006119, IPR038109,PF07508,IPR011109,SSF53041,PTHR30461, PS51736,Coil,PF00239
MCAKKKPAMLEPDMQDAVIYTRYSSHNQRDCSIEQQVADCEIFARQNNLRVVKVYADRHLSGTTDNRPQFQQMLKDASHGHWAYVICWKIDRFARNRYDSATYKFRLKKAGVRVLYAKESIPDGPEGILLESVLEGSAEYYSAALAQNIRRGMKFNAEQCKVNSGSIPFGYCKGPDGRFAIHEANAEVVREIFRKAAAGMPFVDIANDLNSRGLKTSRGGRWNKGSFRLLMNEAYIGVYHFSDTRIEGGMPALIDQGTFWAANERLKANSSVRGRHQDGGDYLLTGKLKCAHCGSYMIGFSGTGKSGELHYYYGCQKRRRERACKKANVPREWIERVVVKAALDYVLRPDVMEWIADAVMEYQEREAASAQLAALTAELEENQKATDNVMKAIEAGIITSTTKQRLLDLEAKAQDLKRAIELEKLSHVRLERDQVLFWLDRFRGGSLQSQEFRRKVIDAFVSVVYLSDDHLRIAFNYSGGSNAEADFDLVMDAEAAAGELSKKFAQGHVASTSKKHLDSLKSRCFFFVYTTLFHALCNDRASRAGGEG

SEQ ID NO: 2241 - protein, 548 aa, Unknown
  Description of Unknown: Integrase B2242 sequence
  PTHR30461:SF3,cd00338,SM00857,G3DSA:1.10.10.2600,IPR036162, PF13408,IPR025827,G3DSA:3.40.50.1390,PS51737,IPR006119, IPR038109,PF07508,IPR011109,SSF53041,PTHR30461, PS51736,Coil,PF00239
MSATIPSLMQAPRAFGYCRKSTNEQREESLEAQQRAIVTFAATAGYELVQVYKDHGNSGRRGERPEFQRMLADAAAAGVQYIIVHKLDRFFRNADQQTVVEMQLRRQGIQVISAAEHFDATPQGQFMRNVTKAINQWYSANLAQEVAKGLRENALTARTTGGPPPLGYTVDKSTGQYAIVPREAEAVQLIFKLYQQGAGYTEIIDALNAGGYVTRRGQPFGKNSLYDILRNEKYTGLYIWNRLAPADVDGRTSRRRLKPRDEWVCVENGMPQIIPTEQWQAVQDEMDKRKHRNAQYKAKAFYLLSGLVYCGGCGGVMSGEMHRYNSHGKAVEYRYYRCTAQHRQHDGGAHAHRVNADRLENAVIDYIQHIVLDPVNMDALCVAVLEALQPDGRNAERAKELKQEAGIIQQKVDRLYQAIENGLDAAGAIERINALQKQRMTLLAQANDLDVSAESAAASVDELRRVWSGINLRELQPEKMRAIVRDLIYKIVVFDDGPRGSRLRIILNPARLNPSAIPKAIETMPFSELQNFSHTAGSGLPLPKAQRL

SEQ ID NO: 2242 - protein, 548 aa, Unknown
  Description of Unknown: Integrase B2243 sequence
  PTHR30461:SF3,cd00338,SM00857,G3DSA:1.10.10.2600,IPR036162, PF13408,IPR025827,PS51737,G3DSA:3.40.50.1390,IPR006119, IPR038109,PF07508,IPR011109,SSF53041,PTHR30461, PS51736,Coil,PF00239
MSATIPSLMQAPRAFGYCRKSTNEQREESLEAQQRAIVTFAATAGYELVQVYKDHGNSGRRGERPEFQRMLADAAVAGVQYIIVHKLDRFFRNADQQTVVEMQLRRQGIQVISAAEHFDATPQGQFMRNVTKAINQWYSANLAQEVAKGLRENALTARTTGGPPPLGYTVDKSTGQYAIVPREAEAVQLIFKLYQQGAGYTEIIDALNAGGYVTRRGQPFGKNSLYDILRNEKYTGLYIWNRLAPADVDGRTSRRRLKPRDEWVCVENGMPQIIPTEQWQAVQDEMDKRKHRNAQYKAKSFYLLSGLVYCGGCGGTMAGETHRYNSHGKAVEYRYYRCAAQHRQHDGGVHAHRVNADRLENAVIDYIQHIVLDPVNMDALCVAVLEALQPDGRNAERAKELKQEAGIIQQKVDRLYQAIENGLDAAGAIERINALQKQRMTLLAQANDLDISAESAAASVDELRRVWSGINLRELQPEKMRVIVRDLIYKIVVFDDGPRGSRLRIILNPARLNPSAIPKAIETMPFSELQNFSHTGGSGLPLPKAQQL

SEQ ID NO: 2243 - protein, 548 aa, Unknown
  Description of Unknown: Integrase B2244 sequence
  PTHR30461:SF3,cd00338,SM00857,G3DSA:1.10.10.2600,IPR036162, PF13408,IPR025827,G3DSA:3.40.50.1390,PS51737,IPR006119, IPR038109,PF07508,IPR011109,SSF53041,PTHR30461, PS51736,Coil,PF00239
MSATIPSLMQAPRAFGYCRKSTNEQREESLEAQQRAIVTFAATAGYELVQVYKDHGNSGRRGERPEFQRMLADAAAAGVQYIIVHKLDRFFRNADQQTVVEMQLRRQGIQVISAAEHFDATPQGQFMRNVTKAINQWYSANLAQEVAKGLRENALTARTTGGPPPLGYTVDKSTGQYAIVPREAEAVQLIFKLYQQGAGYTEIIDALNAGGYVTRRGQPFGKNSLYDILRNEKYTGLYIWNRLAPADVDGRTSRRRLKPRDEWVCVENGMPQIIPTEQWQAVQDEMDKRKHRNAQYKAKSFYLLSGLVYCGGCGGTMAGEMHRYNSHGKAVEYRYYRCTAQHRQHDGGVHAHRVNADRLENAVIDYIQHIVLDPVNMDALCVAVLEALQPDGRNAERAKELKQEAGIIQQKVDRLYQAIENGLDAAGAIERINALQKQRMTLLAQANDLDISAESAAASVDELRRVWSGINLRELQPEKMRVIVRDLIYKIVVFDDGPRGSRLRIILNPARLNPSAIPKAIETMPFSELQNFSHTGGSGLPLPKAQQL

SEQ ID NO: 2244 - protein, 548 aa, Unknown
  Description of Unknown: Integrase B2245 sequence
  PTHR30461:SF3,SM00857,G3DSA:1.10.10.2600,IPR036162,PS51737, G3DSA:3.40.50.1390,IPR006119,IPR038109,PF07508,SSF53041, IPR011109,PF00239,PTHR30461,PS51736,Coil, cd18722,cd00338
MYKEYPTFYYYDTREYGRKSRTDDPLLTTEEVLEKHSKIIEEYAIKYLGGPIPPENKYMEVGSGESLKDRPEITRLLKDIEDPAVKAIIVVDVQRLSRGDLEDAGRLIRLLRYTNTYVITPMKIYDLRDEYDRDAFERELKRGNEYLEYFKKIQARGKLLSVKEGNYVGSTAPYGFDRIEKFEANGKKSYYTLIEREDQADVVRMIFNWYCEEDIGVTAICRRLESIGAKTKTGCKTWKPSIIFSILENHHYIGCTRWNWRKTVKIIEDQEIKKLRPKAKVDEFLLFEGKHDGIISEEQFNKAREIRGKRHRTRRDLTLKNPFSGIMFCKKCGHKIGYNTYTRNGIEYAPPKLVCNNQVHCKTGSVNFQEVFNYVRKVLRDCIEDFEVRIENDRDDSFKLHRDLVERLEKQLKDLEKKEIDQWDAQYDPDPNKRLPQHIFAKLNEKVLKEKEEVNKALDKARDSMPKHVDYREELIKTTDALRILEDPELDAKTKNQYLKMVISKMVYERDPNVRISKENAEKYGFEISKGLHYHTPPYKITIELKCD

SEQ ID NO: 2245 - protein, 548 aa, Unknown
  Description of Unknown: Integrase B2246 sequence
  PTHR30461:SF3,SM00857,G3DSA:1.10.10.2600,IPR036162,PS51737, G3DSA:3.40.50.1390,IPR006119,IPR038109,PF07508,IPR011109, SSF53041,PF00239,PTHR30461,mobidb-lite,Coil, cd00338
MYKEYPKFYYYESLEYGRKSRMDDPLLSVEETLQRHSEIIDEYARKYLGGSIPEENRYMEVGSGESLKDRPEITRLLKAIENPAIKAIVVVDVQRLSRGDLEDAGKLIRLLRYTNTCVITPHKIYDLRDEYDRDAFERELKRGNEYLEYFKKIQARGRLASVKAGNYVGSVAPYGYDRVERYDEVLKKNYFTLVERKDQADVVRMIFNWYCNDDIGVTTICRRLEELGVKTKTGCSTWKPSIIFGILENVHYIGCVRWNWRKTIKVIENQEIKKLRPKAKVDEYLIFEGKHDGIISEEVFNKARIIKGTRHRTKRNLSLKNPFSGIMFCTKCGSKIGYNTYNRNGVEFAPPKLVCNNQVHCKTGSVDYNEVLDYMCKVLRDCIEDFKVRIENDQDDSLKLHKDLIERLTKQLKDAEQKEQDQWEAQYDPDPNKRLPQHIFEKLNKKVLAEKEEINKALDKAKGSAPKHIDYKDELIKTTEALKALEDADLDAKITNQYLKSIIDRIEYDRPQIVRINKKNAEIFETDVRKGLQYHVAPYTIRVKLKCE

SEQ ID NO: 2246 - protein, 548 aa, Unknown
  Description of Unknown: Integrase B2247 sequence
  PTHR30461:SF3,SM00857,G3DSA:1.10.10.2600,IPR036162,PS51737, G3DSA:3.40.50.1390,IPR006119,IPR038109,PF07508,SSF53041, IPR011109,PF00239,PTHR30461,mobidb-lite,Coil, cd00338
MYKEYPKFYYYESLEYGRKSRMDDPLLSVEETLQRHSEIIDEYARKYLGGSIPEENRYMEVGSGESLKDRPEITRLLKAIENPAIKAIIVVDVQRLSRGDLEDAGKLIRLLRYTNTYVITPMKIYDLRDEYDRDAFERELKRGNEYLEYFKKIQARGRLASVKAGNYVGSVAPYGYDRVERYDEVLKKNYFTLVERKDQADVVRMIFNWYCNDDIGVTTICRRLEELGVKTKTGCSTWKPSIIFGILENVHYIGCVRWNWRKTIKIIENQEIKKLRPKAKVDEYLIFEGKHDGIISEEVFNKARIVKGTRHRTKRNLSLKNPFSGIMFCTKCGSKIGYNTYNRNGVEFAPPKLVCNNQVHCKTGSVDYNEVLDYMCKVLRDCIEDFKVRIENDQDDSLKLHKDLIERLTKQLKDAEQKEQDQWEAQYDPDPNKRLPQHIFEKLNKKVLAEKEEINKALDKAKGSAPKHIDYKDELIKTTEALKALEDADLDAKITNQYLKSIIDRIEYDRPQIVRINKKNAEIFETDVRKGLQYHVAPYTIRVKLKCE

SEQ ID NO: 2247 - protein, 548 aa, Unknown
  Description of Unknown: Integrase B2248 sequence
  SM00857,G3DSA:1.10.10.2600,IPR036162,PF13408,PS51737, G3DSA:3.40.50.1390,IPR025827,IPR006119,IPR038109,PF07508, IPR011109,SSF53041,PTHR30461,Coil,PS51736, cd00338,PF00239
MIHGAFILARYSTENQSEASIEVQVERCREWCGKQSLPVLDVFADRAISGMKETRPEYQRMMQALYAGGADTVVIYDQSRMFRNMVYWFQFRETLQRIGVHVVSVTQPTVGGDLNDPAVFLNEGVTALFNQMWVLQTQQKVREGVRQRAKSGKHTGGVPALGYKVENERLVIDETEAETVRLIFGLYAAGQSYTEIIGELNRRSLKTKRGRPFGKNSLHDLLKNEKYVGRVLFGGKPVSYDGTRNSHAARGEYLESACPAIVPRELFDAVQQRLLKNRRSPGRSVVNMDQPLKGKVFCGDCGSAMTICYIIAQKTHSRYAYYKCAAKKRGLSCPSKMIRKDELEDIVASSVLDMLGHPNARATLLDVLRTQRNEFAKVSAPRLDALKKEHSVLQTKIRNSVEAIMNGLSSPELIAQTNAAEARKAEVEAELKTLQDAIEHQGIPDADLPRLLDKLIKNAKSNSAALLSTVLRVEVYPETIKIWTIFDDNPPDRNDKINKKTVPDILPIDVNMDQKFMHKCGDALWRTNIYAKHEIVIAILAARPQKIR

SEQ ID NO: 2248 - protein, 548 aa, Unknown
  Description of Unknown: Integrase B2249 sequence
  SM00857,G3DSA:1.10.10.2600,IPR036162,PF13408,IPR025827, G3DSA:3.40.50.1390,PS51737,IPR006119,IPR038109,PF07508, IPR011109,SSF53041,PTHR30461,Coil,cd00338, PF00239
MAYRKITDIRDTIGMRAVFYARVSTAEEEQLNAIELQIEENRGCIKDHGWKLVGEYIDRSKSGTMVKGRDDYQRLYEDLYEDLFDIVVIKDQERLQRNTLDWYLFINRVVQTGKLLFMYMDGKFYSPDDALITGVRAIIAEEFSRNLSKKLHNYHDHRIEKARQGQEIALQGSGNVYGWDKKDGKYYINPEQAKVRRLMCEGIMARKGSTLIAKELNDAGYRNTVGKPWKPMDIPKFVYDCKNVGTMIINKERHDFESKQTIKLPKEEWVYVENALPPIVTQEEWDLICKIHEERVIATGSDRRGKKTSGYSFSGKLVCGICGAPYWRKQRVSKDEYWVCSTKQTKGRRTRKRDSTMGKAGEINPLGCDNENISYNSLMEIMGVVSERLQANTDTIKQDMINWLTKLRKQLLEANGGHTEADLQRELSRKSKLLDAYLDGILNKQEYQKKAEELDERIIQLKAETEKNKANSGDIAEIDKVLANIDEEVSRYVDGNEKLKVEYLLEHLEQVQIFPDKVIVIVPILSEGIVVEKTQYVSREKYCSKTRK

SEQ ID NO: 2249 - protein, 548 aa, Unknown
  Description of Unknown: Integrase B2250 sequence
  cd03768,PTHR30461:SF3,SM00857,G3DSA:1.10.10.2600,IPR036162, PF13408,IPR025827,G3DSA:3.40.50.1390,PS51737,IPR006119, IPR038109,PF07508,IPR011109,SSF53041,PTHR30461, PS51736,Coil,PF00239
MIAAIYSRKSKFTGIGESIDNQIEMCKEYAKTHLSDKNITDFLVYEDEGFSGGNTNRPEFQRLISDAKANKFNILICYRLDRIRRNVADFSGTLETLQKHDIDFVSIKEQFDTTSPMGRAMIYISSVFAQLERETIAERIRDNMTELAKTGRWLGGVAPVGFRAEQIKCLDENMKERKLMKLVPVPEELEIVKTIYNKYLELKSLSAVETWTLQNNMTTKRGCNFNKSNLRTILTNTAYVKANEKVIHYLESLGITVCGKVNNISGLLTYNKQKTVYGDSGEIKRLFRDKTEWIAAVSKHDGIIEPDDWLKVQKIRKENKDKFPNADKSHTALFSGKLKCAKCGSKMQVTYGHVSKETGKRLYYYRCTLRYWSKNVRCDCKNASANEIDGVVKEALKDFSKNKENLLKTLSQNIKKASKDTNFEDKKTSLNNKLKENESKIDKLLDKFALDDSIQDLLLKKIKALKEENEKIKQEIDSLTADELKENEDELNLDLIRMLLNKCSMIDSLTNDEIKEISNALIEDILWNGDTGDLTINFIGSGESKKKQ

SEQ ID NO: 2250 - protein, 548 aa, Unknown
  Description of Unknown: Integrase B2251 sequence
  PTHR30461:SF3,SM00857,G3DSA:1.10.10.2600,IPR036162,PF13408, IPR025827,PS51737,G3DSA:3.40.50.1390,IPR006119,IPR038109, PF07508,IPR011109,SSF53041,PTHR30461,Coil, PS51736,cd00338,PF00239
MKFKYPAMGTTKNAVIYARYSSHSQREESIEGQLRICHEYAKVEGLAIVGEYIDRAISGTTDARPDFQRMIDDAKKKQFSYVIVYRLDRFARNRYDSVLYKHELKQCGVKVVSATEGIGTGDESILLEALIEASAEYYSMELSRKIKRGRQDSAMKGNFLGGAVPLGYKVVDSKFIIDDETAPIVRYIFERYAAGIGKKQIIDELTAKGYMRRTGKPFTYRAFDSVLRNRKYTGEFTQTGITVEGGCPAIVDTEMFEKVQARLEINRRAPAKAKAKTEYLLSGKMFCGYCGEPMIGISGTGRHEKTFYYYSCVGRRGKSGCKKQHEKKDFIEWYVCEQTVQYMQDPERLSHVAKRIIEINDAEFDGGKVKELERAVENCDNDIRKLVDALTTIPDAGRAALYDKIERIGAAKADMEIDLAKLRVLSEVRYKQEDVEAWIRSMCRGDLMDFEFRRQLIDVFINSVYLFDDRVVIVYNIKHGKQVSAIDVLNAVEELDGVELFPDSAEDSSAGGNGSFLVADAPPKQYNPNLVPIGHGFGFLVFIKDIEV

SEQ ID NO: 2251 - protein, 548 aa, Unknown
  Description of Unknown: Integrase B2252 sequence
  PTHR30461:SF3,cd00338,SM00857,G3DSA:1.10.10.2600,IPR036162, PF13408,IPR025827,G3DSA:3.40.50.1390,PS51737,IPR006119, IPR038109,PF07508,IPR011109,SSF53041,PTHR30461, PS51736,Coil,PF00239
MSATIPSLMQAPRAFGYCRKSTNEQREESLEAQQRAIVTFAATAGYELVQVYKDHGNSGRRGERPEFQRMLADAAAAGVQYIIVHKLDRFFRNADQQTVVEMQLRRQGIQVISAAEHFDATPQGQFMRNVTKAINQWYSANLAQEVAKGLRENALTARTTGGPPPLGYTVDKSTGQYAIVPREAEAVQLIFKLYQQGAGYTEIIDALNAGGYVTRRGQPFGKNSLYDILRNEKYTGLYIWNRLAPADVDGRTSRRRLKPRDEWVCVENGMPQIIPTEQWQAVQDEMDKRKHRNAQYKAKSFYLLSGLVYCGGCGGTMAGETHRYNSHGKAVEYRYYRCAAQHRQHDGGVHAHRVNADRLENAVIDYIQHIVLDPVNMDALCVAVLEALQPDGRNAERAKELKQEAGIIQQKVDRLYQAIENGLDAAGAIERINALQKQRMTLLAQANDLDISAESAAASVDELRRVWSGINLRELQPEKMRVIVRDLIYKIVVFDDGPRGSRLRIILNPARLNPSAIPKAIETMPFSELQNFSHTGGSGLPLPKAQQL

SEQ ID NO: 2252 - protein, 548 aa, Unknown
  Description of Unknown: Integrase B2253 sequence
  PTHR30461:SF3,SM00857,G3DSA:1.10.10.2600,IPR036162,PS51737, G3DSA:3.40.50.1390,IPR006119,IPR038109,PF07508,SSF53041, IPR011109,PTHR30461,Coil,cd00338,PF00239
MYKEYPKFYNYEVKEYGRKSRTDDPLLSTDEILEKHSKIVEEYAVKYLGGPIPEENKYMEVASGESLKDRPEITRLLKDIEDPAVKAIIVVEVQRLSRGDLEDAGRLIRLLRYTNTYVITPMKIYDLRDEYDRDAFERELKRGNEYLEYFKKIQARGRLASVKDGNYIGSTAPYGFDRIEKFEADGKKSYHTLIERKDQADVVRMIFNWYCEEDIGVTAICRRLEDIGAKTKTGQSTWKPSIIFSILENHHYIGCTRWNWRKTVKIIEDQEIKKLRPKAKVDEFLLFEGKHDGIISEEQFNKAREIRGKRHRTRRDLILKNPFSGIMFCKRCGHKIGYNTYTRNGVEYAPPKLVCNNQVHCKSGSVKYSEVFEYVRRVLKDCISDFEVRIENNQDDSLKLHTDLMARLTKQLADLEKKELEQWDAQYDPDPAKRLPQHIFAKLNEKVLKEKEEVNKALAKAKDSAPKHINYRDELIKTKDALRILEDVELDAKTKNQYLKTVISKMVYERDPIVQITKDNAEKYNMQSSKGTKYYNPPYKITIELKCD

SEQ ID NO: 2253 - protein, 548 aa, Unknown
  Description of Unknown: Integrase B2254 sequence
  PTHR30461:SF3,IPR036162,PS51737,IPR011109,PTHR30461, PF00239,G3DSA:1.10.10.2600,IPR006119,SSF53041,cd00338, SM00857,IPR025827,IPR038109,PS51736, mobidb-lite,PF13408,G3DSA:3.40.50.1390,PF07508,Coil
MSTGTELRAVFYARVSTEEEKQLNALEKQIQENKDVIRDHGWRLVGEYIDEGKTGTTTKRRNDYKRLLKDMTENKFDIVVCKDQDRLQRNTLDWYLFVDNLVTNNLKLFMYLDNKFFKPSEDALITGVKAIIAEEYSRNLSKKLNNSNKRRIERALNGEEVSAMGNGKSLAFKIVNGKWVKDEEEAKLGKKIFELYLEYDSIRKVRDWVNEYGYTNSVGKPFTSESISRILKNEKAKGVIVMGKYHHDFDKKKIVRRSEEELVRIPAPELAYVSEEVFDKVQERLRAKTGNGRGVNAYSDPLSGKIYCGSCGRKLWKHASNGYVNWMCASQVAKGDVECNGTRITTVAIRNIYKKITDNLEVNKEVVKQDIVKWLNELKATLSDTSVNEKIQKDLDKLERKRTKLLEAYLEDFISKDDYKAKYEAIEGQIEEKKKLLVPVEENEDIKVIESVLQNIDDEIDAYVKTLDMEESKVDFLIEHTKRITVLENRDIIIELDLVAGAIIAGKDFLLYVHDTMPQHHGRKRPHPPGPPAAPRQPVRDRLRCDQP

SEQ ID NO: 2254 - protein, 548 aa, Unknown
  Description of Unknown: Integrase B2255 sequence
  PTHR30461:SF3,SM00857,G3DSA:1.10.10.2600,IPR036162,PS51737, G3DSA:3.40.50.1390,IPR006119,IPR038109,PF07508,IPR011109, SSF53041,PF00239,PTHR30461,PS51736,Coil, cd00338
MYKEYPHFYYYDTREYGRKSRTDDPLLSTEEVLEKHSRIIEEYAIKYLGGPIPPENKYMEVGSGESLKDRPEITRLLKDIEDPAVRAIIVVDVQRLSRGDLEDAGRLIRLLRYTNTYVITPMKIYDLRDEYDRDAFERELKRGNEYLEYFKKIQARGKLLSVKEGNYVGSTAPYGFDRIEKSEADGKKSYYTLTERKDQADVVRMIFNWYCEEDIGVTAICRRLEDLGVRTKTGHKTWKPSIIFNILENHHYIGCTRWNWRKTVKVIEDQEIKKLRPKAKVDEFLLFEGKHDGIISEEQFNKAREIRGKRHRTRRDLTLKNPFSGIMFCKKCGHKIGYNTYTRNGIEYAPPKLVCNNQVHCKTGSVNFQEVFDYVCKTLRNCIEDFEVRIENDHDDSFKLHRDLVERLGRQLKDLEKKEIEQWDAQYDPDPNKRLPQHIFAKLNEKVLKEKEEVNKALDKAKDSMPRRIDYREELMKTRNALRILEDDSVDAKTKNRYLKTIISKMVYERDPNVRISKENAEQYGFDISKGLRYYTPPYKITIELKCD

SEQ ID NO: 2255 - protein, 548 aa, Unknown
  Description of Unknown: Integrase B2256 sequence
  PTHR30461:SF3,cd00338,SM00857,G3DSA:1.10.10.2600,IPR036162, PF13408,IPR025827,G3DSA:3.40.50.1390,PS51737,IPR006119, IPR038109,PF07508,IPR011109,SSF53041,PTHR30461, PS51736,Coil,PF00239
MRAKKKPAMLEPDMQDAVIYTRYSSHNQRDCSIEQQVADCEIFARQNNLRVVKVYADRHLSGTTDNRPQFQQMLKDAAHGHWAYVICWKIDRFARNRYDSATYKFRLKKAGVRVLYAKESIPDGPEGILLESVLEGSAEYYSAALAQNIRRGMKYNAEQCKVNSGSIPFGYCKGPDGRFAIHEANAEVVREIFRKAAAGMPFVDIANDLNSRGLKTSRGGRWNKGSFRLLMNEAYIGVYHFSDTRIEGGMPALIDQGTFWAANERLKANSSVRGRHQDGGDYLLTGKLKCAHCGSYMIGFSGTGKSGELHYYYGCQKRRRERACKKTNVPREWIERVVVKAALDYVLRPDVMEWIADAVMEYQEREAASAQLAALTAELEENQKATDNVMKAIEAGIITSTTKQRLLDLEAKAQDLKRAIELEKLSHVRLERDQVLFWLDRFRGGSLQSQEFRRKVIDAFVSVVYLSDDHLRIAFNYSGGSNAEADFDLVMDAEAAAGELSKKFAQGHVASTTKKHLDSLKSRCFFFVYTTLFHALCNDRASRADGER

SEQ ID NO: 2256 - protein, 548 aa, Unknown
  Description of Unknown: Integrase B2257 sequence
  PTHR30461:SF3,SM00857,G3DSA:1.10.10.2600,IPR036162,PF13408, IPR025827,PS51737,G3DSA:3.40.50.1390,IPR006119,IPR038109, PF07508,SSF53041,IPR011109,PTHR30461,Coil, PS51736,cd00338,PF00239
MKFKYPAMGTTKNAVIYARYSSHSQREESIEGQLRICHEYAKAEGLAIVGEYIDRAISGTTDARPDFQRMIDDAKKKQFSYVIVYRLDRFARNRYDSVLYKHELKQCGVKVVSATEGIGTGDESILLEALIEASAEYYSMELSRKIKRGRQDSAMKGNFLGGAVPLGYKVVDSKFIIDDETAPIVRYIFERYAAGIGKKQIIDELTAKGYMRRTGKPFTYRAFDSVLRNRKYTGEFTQTGITVEGGCPAIIDTEMFEKVQARLEINRRAPAKAKAKTEYLLSGKMFCGYCGEPMIGISGTGRHGKTFYYYSCVGRRGKSGCKKQHEKKDFIEWYVCEQTVQYMQDPERLSHVAKRIIEINDAEFDGGKVKELERAVENCDNDIRKLVDALTTIPDAGRAALYDKIERIGAAKADMEIDLAKVRVLSEVRYKQEDVEAWIRSMCRGDLMDFEFRRQLIDVFINSVYLFDDRVVIVYNIKNGKQVSAIDVLNAVEELDGVELFPDSAEDSSAGGSGSFLVTDAPPYMKNPNLFPIGNGFGFLIFIKDIID

SEQ ID NO: 2257 - protein, 548 aa, Unknown
  Description of Unknown: Integrase B2258 sequence
  SM00857,G3DSA:1.10.10.2600,IPR036162,PF13408,IPR025827, G3DSA:3.40.50.1390,PS51737,IPR006119,IPR038109,PF07508, IPR011109,SSF53041,PTHR30461,Coil,cd00338, PF00239
MAYRKITDIRDTIGMRAVFYARVSTAEEEQLNAIELQIEENRGCIKDHGWKLVGEYIDRSKSGTMVKGRDDYQRLYEDLYEDLFDIVVIKDQERLQRNTLDWYLFINRVVQTGKLLFMYMDGKFYSPDDALITGVRAIIAEEFSRNLSKKLHNYHDHRIEKARQGQEIALQGSGNVYGWDKKDGKYYINPEQAKVRRLMCEGIMARKGSTLIAKELNDAGYRNTVGKPWKPMDIPKFVYDCKNVGTMIINKERHDFESKQTIKLPKEEWVYVENALPPIVTQEEWDLICKIHEERVIATGSDRRGKKTSGYSFSGKLVCGICGAPYWRKQRVSKDEYWVCSTKQTKGRRTRKRDSTMGKAGEINPLGCDNENISYNSLMEIMGVVSERLQANTDTIKQDMINWLTKLRKQLLEANGGHTEADLQREISRKSKLLDAYLDGILNKQEYQKKAEELDERIIQLKAETEKNKANSGDIAEIDKVLANIDEEVARYVDGNEKLKVEYLLEHLEQVQIFPDKVIVIVPILSEGIVVEKTQYVSREKYCSKTRK

SEQ ID NO: 2258 - protein, 548 aa, Unknown
  Description of Unknown: Integrase B2259 sequence
  PTHR30461:SF3,SM00857,G3DSA:1.10.10.2600,IPR036162,PF13408, IPR025827,G3DSA:3.40.50.1390,PS51737,IPR006119,IPR038109, PF07508,IPR011109,SSF53041,PTHR30461,cd00338, PF00239
MPTSKNTARKYAAGGSSDNSCGVESLRAVIYARYSSSGQREESIEGQLRDCYEFAKKHGIIVIGEYIDKAMTGRVDRRPDFQRMMKDSEKGRFNCVLLWKMDRFARNRYDSAMYKYKLKKNGIRIFYAKETIPDGPEGIILESVMEGYAEYYSENLAQNVKRGNYDSALELKTLGKTCLGLKTGPDGRYMIDQAEAAIVRRIFEEYAEGERAKDIYERLNSEGYRTSRGGKFNKNSLRRILSNKKYIGVYEYEDIYVENGIPAIITDRDLFERVQKMLKINHDAPARGKAQNFLLTTKLFCGLCGSPMIGDGGTSHTGKAYAYYSCTKRKRGRSCKKESVPKDWIEDLVVGELVKIVHNDELIEQIADRVMEYQKREKDQSGLHALEIRQKENEKAISNMLAAIEAGIITPSTKTRLMELEADRADIEKGIAHELLAEPEFERDQIIYFLERFRSGDINDEAYRIMLVDTFLNSVYLYDDDHLVLVMNYSGENCKVDLKLVEGAVSGDGCKGSAFAPSSAVNECSCKSMESILQLFFYARNLLKYFLK

SEQ ID NO: 2259 - protein, 548 aa, Unknown
  Description of Unknown: Integrase B2260 sequence
  PTHR30461:SF3,cd00338,SM00857,G3DSA:1.10.10.2600,IPR036162, PF13408,PS51737,G3DSA:3.40.50.1390,IPR025827,IPR006119, IPR038109,PF07508,IPR011109,SSF53041,PTHR30461, PS51736,Coil,PF00239
MSATIPSLMQAPRAFGYCRKSTNEQREESLEAQQRAIVTFAATAGYELVQVYKDHGNSGRRGERPEFQRMLADAAAAGVQYIIVHKLDRFFRNADQQTVVEMQLRRQGIQVISAAEHFDATPQGQFMRNVTKAINQWYSANLAQEVAKGLRENALTARTTGGPPPLGYTVDKSTGQYAIVPREAEAVQLIFKLYQQGAGYTEIIDALNAGGYVTRRGQPFGKNSLYDILRNEKYTGLYIWNRLAPADVDGRTSRRRLKPRDEWVCVENGMPQIIPTEQWQAVQDEMDKRKHRNAQYKAKSFYLLSGLVYCGGCGGTMAGEMHRYNSHGKAVEYRYYRCAAQHRQHDGGAHAHRVNADRLENAVIDYIQHIVLDPVNMDALCVAVLEALQPDGRNAERAKELKQEAGIIQQKVDRLYQAIENGLDAAGAIERINALQKQRMTLLAQANDLDISAESAAASVDELRRVWSGINLRELQPEKMRVIVRDLIYKIVVFDDGPRGSRLRIILNPARLNPAAIPKAIETMPFSELQNFSHTAGSGLPLPKAQQL

SEQ ID NO: 2260 - protein, 548 aa, Unknown
  Description of Unknown: Integrase B2261 sequence
  PTHR30461:SF3,cd00338,SM00857,G3DSA:1.10.10.2600,IPR036162, PF13408,PS51737,G3DSA:3.40.50.1390,IPR025827,IPR006119, IPR038109,PF07508,IPR011109,SSF53041,PTHR30461, PS51736,Coil,PF00239
MSTGTELRAVFYARVSTEEEKQLNALEKQIQENKDVIRDHGWRLVGEYIDEGKTGTTTKRRNDYKRLLKDMTENKFDIVVCKDQDRLQRNTLDWYLFVDNLVTNNLKLFMYLDNKFFKPSEDALITGVKAIIAEEYSRNLSKKLNNSNKRRIERALNGEEVSAMGNGKSLAFKIVNGKWVKDEEEAKLGKKIFELYLEYDSIRKVRDWVNEHGYTNSVGKPFTSESISRILKNEKAKGVIVMGKYHHDFDKKKIVRRSEEELVRIPAPELAYVSEEVFDKVQERLRAKTGNGRGVNAYSDPLSGKIYCGSCGRKLWKHASNGYVNWMCASQVAKGDVECNGTRITTVAIRNIYKKITDNLEVNKGVVKQYIVKWLNELKATLSDTSVNEKIQKDLDKLERKRTKLLEAYLEDFISKDDYKAKYEAIEGQIEEKKKLLVPVEENEDIKVIESVLQNIDDEIDAYVKTLDMEESKVDFLIEHTKRITVLENRDIIIELDLVAGAIIAGKDFLLYVHDTMPQHHGPKHLHPSGPQTAPRCCFRDRFSCDQP

SEQ ID NO: 2261 - protein, 548 aa, Unknown
  Description of Unknown: Integrase B2262 sequence
  PTHR30461:SF3,SM00857,G3DSA:1.10.10.2600,IPR036162,PF13408, IPR025827,G3DSA:3.40.50.1390,PS51737,IPR006119,IPR038109, PF07508,IPR011109,SSF53041,PTHR30461,Coil, PS51736,cd00338,PF00239
MQASVKKNISVIPAKPAYDRSIRPQMRTLRVAAYCRVSTLMEQQESSYEAQVQYYTEKIKSNPNWKLAGIYADDGKSATSTRKRSDFQSMIDDCMAGKIDMVITKSISRFARNTVDSLTNIRKLKEKNIAVFFEKEGINTLEGSGELLITILSSQAQEESRNISENCHWGIVRRFEAGQVIVNHSKFLGYTKDRDGNLVIVPEEAELVRRIYRLFLEGNSSYRIKRILESEGIKTVTGNTVWQATVIDKMLTNEKYMGDALLQKTYTVDFLTKKKVANKGIVPQYYIEDDHEAIIPKELFYRVQEEKARRGNIYRAAIKKKRGEEKSKYSGKYALSDLMVCAECGQPYRRQVWSKYGKKSAVWRCDNRLKHGSERCRNSPTLKEEILHEAIMTAISKVVEDQGEFVQAFRENVIRIIGNYGSKAEPTEYDTEIQKQEKRLMTLIEESAKGNCQEADFDREYRGVTEQLKELRKKKEQFMKEQRLAEAYDQRVEEMDSYMKKTGVLRREFDNDLVWRLIQTVKVINQNKIEIQFRSGIVMVQRLDAWED

SEQ ID NO: 2262 - protein, 548 aa, Unknown
  Description of Unknown: Integrase B2263 sequence
  PTHR30461:SF3,SM00857,G3DSA:1.10.10.2600,IPR036162,PS51737, G3DSA:3.40.50.1390,IPR006119,IPR038109,PF07508,SSF53041, IPR011109,PTHR30461,Coil,PS51736,cd00338, PF00239
MYKEYPTFYYYDTREYGRKSRTDDPLLSTEEVLEKHSKIIEEYAIKYLGGPIPPENKYMEVGSGESLKDRPEITRLLKDIEDPAVKAIIVVDVQRLSRGDLEDAGRLIRLLRYTNTYIITPMKIYDLRDEYDRDAFERELKRGNEYLEYFKKIQARGKLLSVKEGNYVGSTAPYGFDRIEKFEDNGKKSYHTLTERKDQADIVRMIFNWYCEEDIGVTAICRRLEDIGAKTKTGHTTWKPSIIFSILENHHYIGCTRWNWRKTVKIIEDQEIKKLRPKAKVDEFLLFEGKHDGIISEEQFNKAREIRGKRHRTRRDLTLKNPFSGIMFCKKCGSKIGYNTYTRNGVEYAAPKLVCNNQVHCKTGSVSFQEVFDYVRRVLKDCIEDFEVRIENDHDNSFKLHKDLVERLERQLKDLEKKELDQWDAQYDPDPNKRLPQHIFAKLNEKVLKEKEEVNKALDNAKNSMPKHVDYRNELIKTTDALRVLEDVELDAKTKNQYLKTVISKMVYERDPIVQISKENAEKYGFEISKGLRYYTPPYKITIELKCD

SEQ ID NO: 2263 - protein, 548 aa, Unknown
  Description of Unknown: Integrase B2264 sequence
  PTHR30461:SF3,SM00857,G3DSA:1.10.10.2600,IPR036162,PS51737, G3DSA:3.40.50.1390,IPR006119,IPR038109,PF07508,IPR011109, SSF53041,PTHR30461,Coil,cd00338,PF00239
MYKEYPKFYYYQTKEYGRKSRMDDPLLSVEETLQKHSEIIDEYAQKYLGGSIPEENKYMEIGSGESLKDRPEVSRLLKDIEDPEVKAIIVVDVQRLSRGDLEDAGKLIRLLRYTNTYVITPMKIYDLRDEYDRDAFERELKRGNEYLEYFKKIQARGRLASVKAGNYVGSVAPYGFDRIEKYDETLKKSYFTLIERKDQADVVRMIFNWYCNDDIGVTAICRRLEELGVKTKTGCSIWKPSIIFGILENVHYIGCVRWNWRKTIKVIENQELKKLRPKAKVDEYLIFEGKHDGIISEEVFNKARIIKGNRHRTKGNLSLKNPFSGIMYCKKCGSKIGYNTYSRNGVEYAPPKLVCNNQVHCKTGSVDYNEVLDYMCNVLRDCIADFEVRIENEQDDSLKLHKDLIERLTKQLKDVEKKELDQWEAQYDPDPKKRLPQHIFEKLNEKVLAEKEEINKALDKAKDSVPKHIDYKDELVKTTDALRALEDSDLDAKIANQYLKSIIDRIEYNRPQIVRITKKNAEMFEADIKKGLQYHIAPYTIRVKLKCE

SEQ ID NO: 2264 - protein, 548 aa, Unknown
  Description of Unknown: Integrase B2265 sequence
  PTHR30461:SF3,SM00857,G3DSA:1.10.10.2600,IPR036162,PS51737, G3DSA:3.40.50.1390,IPR006119,IPR038109,PF07508,SSF53041, IPR011109,PF00239,PTHR30461,mobidb-lite, Coil,cd00338
MYKEYPKFYYYESLEYGRKSRMDDPLLSVEETLQRHSEIIDEYARKYLGGSIPEENRYMEVGSGESLKDRPEITRLLKAIENPAIKAIIVVDVQRLSRGDLEDAGKLIRLLRYTNTCVITPHKIYDLRDEYDRDAFERELKRGNEYLEYFKKIQARGRLASVKAGNYVGSVAPYGYDRVERYDEVLKKNYFTLVERKDQADVVRMIFNWYCNDDIGVTTICRRLEELGVKTKTGCSTWKPSIIFGILENVHYIGCVRWNWRKTIKVIENQEIKKLRPKAKVDEYLVFEGKHDGIISEELFYKARMIKGKRHRTKQNLSLKNPFSGIMFCTKCGSKIGYNTYNRNGVEFAPPKLVCNNQVHCKTGSVDYNEVLDYICKVLRDCIEDFKVRIENDQDDSLKLHKDLIERLTKQLKDAEQKEQDQWEAQYDPDPNKRLPQHIFEKLNKKVLAEKEEINKALDKAKGSAPKHIDYKDELIKTTEALKALEDADLDAKITNQYLKSIIDRIEYDRPQIVRINKKNAEIFETDVRKGLQYHVAPYTIRVKLKCE

SEQ ID NO: 2265 - protein, 548 aa, Unknown
  Description of Unknown: Integrase B2266 sequence
  SM00857,G3DSA:1.10.10.2600,IPR036162,PF13408,PS51737, G3DSA:3.40.50.1390,IPR025827,IPR006119,IPR038109,PF07508, IPR011109,SSF53041,PTHR30461,Coil,PS51736, cd00338,PF00239
MIHGAFILARYSTENQSEASIEVQVERCREWCGKQSLPVLDVFADRAISGMKETRPEYQRMMQALYAGGADTVVIYDQSRMFRNMVYWFQFREALQRIGVHVVSVTQPTVGGDLNDPAVFLNEGVTALFNQMWVLQTQQKVREGVRQRAKSGRHTGGIPALGYKVENERLVIDETEAETVRLIFGLYAAGQSYTEIIGELNRRCLKTKRGRPFGKNSLHDLLKNEKYVGRVLFGGKPVSYDGTRNSHAARGEHLVSACPAIVSQELFDAVQQRLLKNRRSPGRSVVNMDQPLKGKVFCGDCGSAMTICYVIAQKTHSRYAYYKCAAKKRGLSCPSKMIRKDELEDIVASSVLDMLGHPNARATLLDVLRTQRNEFAKVSAPRLDALKKEHSVLQTKIRNSVEAIMNGLSSPELIAQTNAAEARKAEVEAELKTLQDVIEHQGIPDADLPRLLDKLIKNAKSNSAALLSTVLRVEVYPETIKIWTIFDDNPPDRNDKINKKTVPDILPIDVNMDPTFMHKCGDALWRTNIYAKHEIVIAILAARPQKIR

SEQ ID NO: 2266 - protein, 548 aa, Unknown
  Description of Unknown: Integrase B2267 sequence
  SM00857,G3DSA:1.10.10.2600,IPR036162,PF13408,IPR025827, G3DSA:3.40.50.1390,PS51737,IPR006119,IPR038109,PF07508, SSF53041,IPR011109,PTHR30461,Coil,cd00338, PF00239
MAYRKITDIRDTIGMRAVFYARVSTAEEEQLNAIELQIEENRGCIKDHGWKLVGEYIDRSKSGTMVKGRDDYQRLYEDLYEDLFDIVVIKDQERLQRNTLDWYLFINRVVQTGKLLFMYMDGKFYSPDDALITGVRAIIAEEFSRNLSKKLHNYHDHRIEKARQGQEIALQGSGNVYGWDKKDGKYYINPEQAKVRRLMCEGIMARKGSTLIAKELNEAGYRNTVGKPWKPMDIPKFVYDCKNVGTMIINKERHDFESKQTIKLPKEEWVYVENALPPIVTQEEWDLICKIHEERVIATGSDKRGKKTSGYSFSGKLVCGICGAPYWRKQRVSKDEYWVCSTKQTKGRKTRKRDSTMGKAGEINPLGCDNENISYNSLMEIMGVVSERLQANTDTIKHDMINWLTKLRKQLLEANGGHTEADLQRELSRKSKLLDAYLDGILNKQEYQKKAEELDERIIQLKAETEKNKANSGDIAEIDKVLANIDEEVARYVDGNEKLKVEYLLEHLEQVQIFPDKVIVIVPILSEGIVVEKTQYVSREKCDCESSF

SEQ ID NO: 2267 - protein, 548 aa, Unknown
  Description of Unknown: Integrase B2268 sequence
  PTHR30461:SF3,cd00338,SM00857,G3DSA:1.10.10.2600,IPR036162, PF13408,IPR025827,G3DSA:3.40.50.1390,PS51737,IPR006119, IPR038109,PF07508,IPR011109,SSF53041,PTHR30461, PS51736,Coil,PF00239
MAKKKKPAGGNAIIYARYSSHNQRDVSIEQQIEACRKHAAELGLTITDTYEDRAISGRTDNRPAFQRMMRDAEDGKFQYVLAWKSNRMGRNMMQAMVNESRLMDCGVKVFYAEEDFDDSAAGRFALRSMMNVNQFYSDNLAEDVRRGLMDNASKCMANGRQPLGYKRGEDGKVVVDEPAAAIVREIYTRIASGEMFMAIARDLNRRGIKTQSGSEWNKSSFKVLCRNERYRGIYIYGDTRIEGGIPPIVDDVLWYKVQEVLKVKKSKNRHHCPSDEDYLLTGKLRCGKCGGYMIGMSGRSKTGDVHHYYACQNRRVGHTCDKKNIRRDVVEPAVAQAIKQYCLTDDAIEWITDQTIAYWEDEDRKLQIDSIENDLSAVQSSISNVMKAIEMGVITETTRDRLIELERQQTDLKSKLALAKEEIVHVDRKDLISSLLAFRHGNVHDRAYQEKLFSAFLIAVYVYDDDHLKLVFNSFGKDDTVNIALDLGENDDNSGLSDVSKSSPILSNGQPRSHPVYAGWFFCSILLYKNSVPPLRRYAHFYAVITGC

SEQ ID NO: 2268 - protein, 548 aa, Unknown
  Description of Unknown: Integrase B2269 sequence
  PTHR30461:SF3,cd00338,SM00857,G3DSA:1.10.10.2600,IPR036162, PF13408,PS51737,G3DSA:3.40.50.1390,IPR025827,IPR006119, IPR038109,PF07508,IPR011109,SSF53041,PTHR30461, PS51736,Coil,PF00239
MSTGTELRAVFYARVSTEEEKQLNALEKQIQENKDVIRDHGWRLVGEYIDEGKTGTTTKRRNDYKRLLKDMTENKFDIVVCKDQDRLQRNTLDWYLFVDNLVTNNLKLFMYLDNKFFKPSEDALITGVKAIIAEEYSRNLSKKLNNSNKRRIERALNGEEVSAMGNGKSLAFKIVNGKWVKDEEEAKLGKKIFELYLEYDSIRKVRDWVNEHGYTNSVGKPFTSESISRILKNEKAKGVIVMGKYHHDFDKKKIVRRSEEELVRIPAPELAYVSEEVFDKVQERLRAKTGNGRGVNAYSDPLSGKIYCGSCGRKLWKHASNGYVNWMCASQVAKGDVECNGTRITTVAIRNIYKKITDNLEVNKGVVKQYIVKWLNELKATLSDTSVNEKIQKDLDKLERKRTKLLEAYLEDFISKDDYKAKYEAIEGQIEEKKKLLVPVEENEDIKVIESVLQNIDDEIDAYVKTLDMEESKVDFLIEHTKRITVLENRDIIIELDLVAGAIIAGKDFLLYVHDTMPQHHGPKHLHPSGQQTAPRCCFRDRFSCDQP

SEQ ID NO: 2269 - protein, 548 aa, Unknown
  Description of Unknown: Integrase B2270 sequence
  PTHR30461:SF3,SM00857,G3DSA:1.10.10.2600,IPR036162,PF13408, PS51737,G3DSA:3.40.50.1390,IPR025827,IPR006119,IPR038109, PF07508,IPR011109,SSF53041,PF00239,PTHR30461, PS51736,Coil,cd00338
MNTVIYARYSAGPRQTDQSIEGQLRVCTDFCKQRGLTVIDTYCDRHISGRTDERPEFQRLIADAKRKKFEAVVVYKTDRFARNKYDSAVYKRELKRNGIQIFYAAEAIPDGPEGIILESLMEGLAEYYSAELAQKIKRGMHESALKCQSTGSGRPLGYRVDEQKHFQIDPESAQTVQTIFEQYIKGESNAAICELLNSRGLRTAQGKPFNKNSINRIIKNRKYIGEYRYHDIVVEGGMPAIISKDTFNLAQAEMERRRTRKAPKSPKAEYLLAGRLFCGHCKGPMQGVSGTGKSGNKWYYYYCGNTRGKNKTCDKKQVSRDRLERAVVDFTVRYILQEDVLEELARKVHAAQERQNDTASEIAFYEKKLADNKKSIANVLRAIESGAATQTLPVRLQELENEQAVILGELSFLKGKHLAFTEDQILFALMKHLEPYPGESEQDYRRRIISDFVSEVYLYDDRLLIYFNISSEDGKLKSADLSNIEGSEFDEGLVSSTIMWRQKRCLLRKARLYRAFLLPKRRFFSVPKRRCKIAVFPLWIDLNSHTTE

SEQ ID NO: 2270 - protein, 548 aa, Unknown
  Description of Unknown: Integrase B2271 sequence
  PTHR30461:SF3,SM00857,G3DSA:1.10.10.2600,IPR036162,PF13408, IPR025827,PS51737,G3DSA:3.40.50.1390,IPR006119,IPR038109, PF07508,SSF53041,IPR011109,PTHR30461,Coil, PS51736,cd00338,PF00239
MKFKYPAMGTTKNAVIYARYSSHSQREESIEGQLRICHEYAKAEGLAIVGEYIDRAISGTTDARPDFQRMIDDAKKKQFSYVIVYRLDRFARNRYDSVLYKHELKQCGVKVVSATEGIGTGDESILLEALIEASAEYYSMELSRKIKRGRQDSAMKGNFLGGAVPLGYKVVDSKFIIDDETAPIVRYIFERYAAGIGKKQIIDELTAKGYMRRTGKPFTYRAFDSVLRNRKYTGEFTQTGITVEGGCPAIVDTEMFEKVQARLEINRRAPAKAKAKTEYLLSGKMFCGYCGEPMIGISGTGRHEKTFYYYSCVGRRGKSGCKKQHEKKDFIEWYVCEQTVQYMQDPERLSHVAKRIIEINDAEFDGGKVKELERAVENCDNDIRKLVDALTTIPDAGRAALYDKIERIGAAKADMEIDLAKVRVLSEVRYKQEDVEAWIRSMCRGDLMDFEFRRQLIDVFINSVYLFDDRVVIVYNIKNGKQVSAIDVLNAVEELDGVELSSDSTEDGNAGGSGSFLVADAPPYMKNPNLFPIGNGFGFLIFIKDIID

SEQ ID NO: 2271 - protein, 548 aa, Unknown
  Description of Unknown: Integrase B2272 sequence
  PTHR30461:SF3,cd00338,SM00857,G3DSA:1.10.10.2600,IPR036162, PF13408,IPR025827,G3DSA:3.40.50.1390,PS51737,IPR006119, IPR038109,PF07508,IPR011109,SSF53041,PTHR30461, PS51736,Coil,PF00239
MSATIPSLMQAPRAFGYCRKSTNEQREESLEAQQRAIVTFAATAGYELVQVYKDHGNSGRRGERPEFQRMLADAAAAGVQYIIVHKLDRFFRNADQQTVVEMQLRRQGIQVISAAEHFDATPQGQFMRNVTKAINQWYSANLAQEVAKGLRENALTARTTGGPPPLGYTVDKSTGQYAIVPREAEAVQLIFKLYQQGAGYTEIIDALNAGGYVTRRGQPFGKNSLYDILRNEKYTGLYIWNRLAPADVDGRTSRRRLKPRDEWVCVENGMPQIIPTEQWQAVQDEMDKRKHRNAQYKAKSFYLLSGLVYCGGCGGTMAGEMHRYNSHGKAVEYRYYRCAAQHRQHDGGVHAHRVNADRLENAVIDYIQHIVLDPVNMDALCVAVLEALQPDGRNAERAKELKQEAGIIQQKVDRLYQAIENGLDAAGAIERINALQKQRMTLLAQANDLDISAESAAASVDELRRVWSGINLRELQPEKMRVIVRDLIYKIVVFDDGPRGSRLRIILNPARLNPAAIPKAIETMPFSELQNFSHTAGSGLPLPKAQQL

SEQ ID NO: 2272 - protein, 548 aa, Unknown
  Description of Unknown: Integrase B2273 sequence
  PTHR30461:SF3,SM00857,G3DSA:1.10.10.2600,IPR036162,PS51737, G3DSA:3.40.50.1390,IPR006119,IPR038109,PF07508,SSF53041, IPR011109,PF00239,PTHR30461,mobidb-lite,Coil, cd00338
MYKEYPKFYYYESLEYGRKSRMDDPLLSVEETLQRHSEIIDEYARKYLGGSIPEENRYMEVGSGESLKDRPEITRLLKAIENPAIKAIIVVDVQRLSRGDLEDAGKLIRLLRYTNTCVITPHKIYDLRDEYDRDAFERELKRGNEYLEYFKKIQARGRLASVKAGNYVGSVAPYGYDRVERYDEVLKKNYFTLVERKDQADVVRMIFNWYCNDDIGVTTICRRLEELGVKTKTGCSTWKPSIIFGILENVHYIGCVRWNWRKTIKVIENQEIKKLRPKAKVDEYLVFEGKHDGIISEELFYKARMIKGKRHRTKQNLSLKNPFSGIMFCTKCGSKIGYNTYNRNGVEFAPPKLVCNNQVHCKTGSVDYNEVLDYMCKVLRDCIEDFKVRIENDQDDSLKLHKDLIERLTKQLKDAEQKEQDQWEAQYDPDPNKRLPQHIFEKLNKKVLAEKEEINKALDKAKGSAPKHIDYKDELIKTTEALKALEDADLDAKITNQYLKSIIDRIEYDRPQIVRINKKNAEIFETDVRKGLQYHVAPYTIRVKLKCE

SEQ ID NO: 2273 - protein, 548 aa, Unknown
  Description of Unknown: Integrase B2274 sequence
  PTHR30461:SF3,cd00338,SM00857,G3DSA:1.10.10.2600,IPR036162, PF13408,PS51737,IPR025827,G3DSA:3.40.50.1390,IPR006119, IPR038109,PF07508,IPR011109,SSF53041,PTHR30461, PS51736,Coil,PF00239
MTIAWAYCRFSSDHQREESIDAQIRAIRDYCGRNRITLEKIYRDEARSATTDDRPSFQQMFSDIKEYPCDLVIVHKLDRFSRDRYDSAFYKRKLKERGIRLVSVLENIDGSPESIILESVLEGMSEYYSRNLAREVQKGKKETAYKCLHNGGVPPIGYQVDGSGKYHVDPIESKWIIKAYEMKASGRSYMEIAAYLNGIGARTRRGQGFTKNSFHDLFKNEKYKGVYVYNRAAPKTSGKRNNHLNKSAEDIIRIEGGIPRIVSDELWNEVNMQMKDRTMNARHKAKRTYLLSGIIYCGECGSPMSGNARRAGRNKTEYITYDCNRRHRERTCRAKGINKKYIEDLVISHLENEFFTQENVLQLSQRIFDLQAQRKMEVTPELAALKAELAAKQKEMNNIIDSIKKGGYKDWMGDLGDEIDARIKYLEGKIQYSESIQERQILSQKQIYDYIMKDANLMEKSLEDLKQIVQTYVEKVVVFAEKIEIHLIINNHNPGGKSHPDCGYDGGSDGNRTHVRKHFHRSFSERSFCFKVSPQTSPKSRLYHQLSR

SEQ ID NO: 2274 - protein, 548 aa, Unknown
  Description of Unknown: Integrase B2275 sequence
  PTHR30461:SF3,SM00857,G3DSA:1.10.10.2600,IPR036162,PS51737, G3DSA:3.40.50.1390,IPR006119,IPR038109,PF07508,IPR011109, SSF53041,PTHR30461,Coil,cd00338,PF00239
MYKEYPKFYNYETKEYGRKSRTDDPLLSTDEILEKHSKIVEEYAIKYLGGPIPDENKYMEVGSGESLKERPEITRLLKDIEDPAVKAIIVVDVQRLSRGDLEDAGRLIRLLRYTNTYVITPMKTYDLRDEYDRDAFERELKRGNEYLEYYKKIQARGKLLSVKEGNYVGSTAPYGFDRIEKFTDNGKKSYHTLIERKDQADVVRMIFNWYCEEDIGVTAICRRLENIGAKTKTGQSTWKPSIIFSILENHHYIGCTRWNWRKTVKIIEDQEIKKLRPKAKVDEFLLFEGKHDGIISEEQFNKAREIRGKRHRTRRDLTLKNPFSGIMFCKKCGHKIGYNTYTRNGVEYAPPKLVCNNQVHCKSGSVKYSEVFEYVCKVLRDCISDFEIRIKNSQDDSIKLHTDLMARLTKQLSDLEKKEMEQWEAQYDPDPAKRLPQHIFAKLNEKVLKEKEEVNKALEKAKDSAPKHINYRDELIKTKDALRILEDEKLDAKTKNQYLKTVIDKMVYERGPIVQITKENAEKYNMQAAKGTRYYNPPYKITIELKCE

SEQ ID NO: 2275 - protein, 548 aa, Unknown
  Description of Unknown: Integrase B2276 sequence
  PTHR30461:SF3,SM00857,G3DSA:1.10.10.2600,IPR036162,PF13408, PS51737,G3DSA:3.40.50.1390,IPR025827,IPR006119,IPR038109, PF07508,IPR011109,SSF53041,PTHR30461, Coil,PS51736,cd00338,PF00239
MKKFPIDLSCLTEEEISQFQEDPYTLYNGDQDVALYLRYSSTGQSDQSIEGQLRDCRAFCKANHYRIVAIYVDRATTARKDVEKRVHLMEMVADSAKQNWEYVIVWKLDRFARNRNDSAIMKMRLRKNGVKVLSATEHLTDSPESIILESVLEGMAEFFSAELSQKVTRGMRESALKCHSVGGHIPLGYKVENHKLVVDPDTAHIVQEAFSLYANGESVADICRKFNSAGYKTAKNTEFNRSSFKAMFRNTRYIGTYTYKDIIIENGIPAIIDKELFETVQRRLSKTATAPARGKAKVDYLLSGKLFCGHCGASMNGESGAGRHGKVYHYYSCYTKKRKLGCDKRPLKKDYIEGIVARDALNLLTDQLIDEIADMAIRQSEQDLINDTHIPQLTAQLSEVEKSITNITAAIEKGIASETLMNRLVQLEHEKKTLNKEIKAEEKFVYRIDRDQIIFWLSQFKYGNIEDEDFRRRLIDLLVNSVTVWDEPDGYKITTAYNLTSCKTKTFRVEKNPAAEEATGFDFGESECTKSPRNRLISRTFAFHKFRF

SEQ ID NO: 2276 - protein, 548 aa, Unknown
  Description of Unknown: Integrase B2277 sequence
  PTHR30461:SF3,cd00338,SM00857,G3DSA:1.10.10.2600,IPR036162, PF13408,PS51737,G3DSA:3.40.50.1390,IPR025827,IPR006119, IPR038109,PF07508,IPR011109,SSF53041,PTHR30461, PS51736,Coil,PF00239
MSTGTELRAVFYARVSTEEEKQLNALEKQIQENKDVIRDHGWRLVGEYIDEGKTGTTTKRRNDYKRLLKDMTENKFDIVVCKDQDRLQRNTLDWYLFVDNLVTNNLKLFMYLDNKFFKPSEDALITGVKAIIAEEYSRNLSKKLNNSNKRRIERALNGEEVSAMGNGKSLAFKIVNGKWVKDEEEAKLGKKIFELYLEYDSIRKVRDWVNEHGYTNSVGKPFTSESISRILKNEKAKGVIVMGKYHHDFDKKKIVRRSEEELVRIPAPELAYVSEEVFDKVQERLRAKTGKGRGVNAYSDPLSGKIYCGSCGRKLWKHASNGYVNWMCASQVAKGDVECNGTRITTVAIRNIYKKITDNLEVNKGVVKQDIVKWLNELKATLSDTSVNEKIQKDLDKLERKRTKLLEAYLEDFISKDDYKAKYEAIEGQIEEKKKLLVPVEENEDIKVIESVLQNIDDEIDAYVKTLDMEESKVDFLIEHTKRITVLENRDIIIELDLVAGAIIAGKDFLLYVHDTMPQYHGSKHLHPSGPQTAPRCCFRDRFSCDQP

SEQ ID NO: 2277 - protein, 548 aa, Unknown
  Description of Unknown: Integrase B2278 sequence
  SM00857,G3DSA:1.10.10.2600,IPR036162,PF13408,PS51737, G3DSA:3.40.50.1390,IPR025827,IPR006119,IPR038109,PF07508, IPR011109,SSF53041,PTHR30461,Coil,PS51736, cd00338,PF00239
MIHGAFILARYSTENQSEASIEVQVERCREWCEKQSLPVLDVFADRAISGMKETRPEYQRMMQQLYAGGADTVVIYDQSRMFRNMVYWFQFREALQRIGVRVVSVTQPAVGGDLSDPAVFLNEGVTALFNQMWVLQTQQKVREGVKQRAKSGKHTGGTPALGYRVENERLVIDETEAETVRLIFGLYAAGQSYTEIIGELNRRGLKTKRGRPFGKNSLHDLLKNEKYVGRVLFGGKPVSYDGTRNSHAARGEHLVSACPAIVSQELFDAVQQRLLKNRRSPGRSVVNMDQPLKGKVFCGDCGSAMTICYIISSKTHSRYAYYKCAAKKRGLSCPSKMIRKDELEDIVASSVLDMLGHPNARATLLDVLRTQRNEFAKVSAPRLDALKKEHSVLQTKIRNSVEAIMNGLSSPELIAQTNAAEARKAEVESELKTLQDAIEHQGIPDADLPRLLDKLIKNAKSNSAALLSTVLRVEVYPETIKIWTIFDDNPPDRNDKINKKTVPDILPIDVNMDQKFMHKCGDALWRTNIYAKHEIVIAILAARPQKIR

SEQ ID NO: 2278 - protein, 548 aa, Unknown
  Description of Unknown: Integrase B2279 sequence
  PTHR30461:SF3,SM00857,G3DSA:1.10.10.2600,IPR036162,PF13408, PS51737,G3DSA:3.40.50.1390,IPR025827,IPR006119,IPR038109, PF07508,SSF53041,IPR011109,PF00239,PTHR30461, PS51736,Coil,cd00338
MKKFPIDLSCLTEEEISQFQEDPYTLYNGDQDVALYLRYSSTGQSDQSIEGQLRDCRAFCKANHYRIVAIYVDRATTARKDVEKRVHLMEMVADSAKQNWEYVIVWKLDRFARNRNDSAIMKMRLRKNGVKVLSATEHLTDSPESIILESVLEGMAEFFSAELSQKVTRGMRESALKCHSVGGHIPLGYKVENHKLVVDPDTAHIVQEAFSLYANGESVADICRKFNSAGYKTAKNTEFNRSSFKAMFRNTRYIGTYTYKDIVIENGIPAIIDKELFETVQRRLSKTATAPARGKAKVDYLLSGKLFCGHCGASMNGESGAGRHGKVYHYYSCYTKKRKLGCDKRPLKKDYIEGIVARDALNLLTDQLIDEIADMAIRQSEQDLINDTHIPQLTAQLSEVEKSITNITAAIEKGIASETLMNRLVQLEHEKKTLNKEIKAEEKFVYRIDRDQIVFWLSQFKYGNIEDEDFRRRLIDLLVNSVTVWDEPDGYKITTAYNLTSCKAKTFRVEKNPAAEEATGFDFGESECTKSPRNRLISRTFAFYKFRF

SEQ ID NO: 2279 - protein, 548 aa, Unknown
  Description of Unknown: Integrase B2280 sequence
  PTHR30461:SF3,cd00338,SM00857,G3DSA:1.10.10.2600,IPR036162, PF13408,IPR025827,G3DSA:3.40.50.1390,PS51737,IPR006119, IPR038109,PF07508,IPR011109,SSF53041,PTHR30461, PS51736,Coil,PF00239
MSATIPSLMQAPRAFGYCRKSTNEQREESLEAQQRAIVTFAATAGYELVQVYKDHGNSGRRGERPEFQRMLADAAAAGVQYIIVHKLDRFFRNADQQTVVEMQLRRQGIQVISAAEHFDATPQGQFMRNVTKAINQWYSANLAQEVAKGLRENALTARTTGGPPPLGYTVDKSTGQYAIVPREAEAVQLIFKLYQQGAGYTEIIDALNAGGYVTRRGQPFGKNSLYDILRNEKYTGLYIWNRLAPADVDGRTSRRRLKPRDEWVCVENGMPQIIPTEQWQAVQDEMDKRKHRNAQYKAKAFYLLSGLVYCGGCGGVMSGEMHRYNSHGKAVEYRYYRCTAQHRQHDGGAHAHRVNADRLENAVIDYIQHIVLDPVNMDALCVAVLEALQPDGRNAERAKELKQEAGIIQQKVDRLYQAIENGLDAAGAIERINALQKQRMTLLAQANDLDISAESAAASVDELRRVWSGINLRELQPEKMRVIVRDLIYKIVVFDDGPRGSRLRIILNPARLNPSAIPKAIETMPFSELQNFSHTGGSGLPLPKAQRL

SEQ ID NO: 2280 - protein, 548 aa, Unknown
  Description of Unknown: Integrase B2281 sequence
  SM00857,G3DSA:1.10.10.2600,IPR036162,PF13408,IPR025827, G3DSA:3.40.50.1390,PS51737,IPR006119,IPR038109,PF07508, IPR011109,SSF53041,PTHR30461,Coil,PS51736, cd00338,PF00239
MIHGAFILARYSTENQSEASIEVQVERCREWCGKQSLPVLDVFADRAISGMKETRPEYQRMMQALYAGGADTVVIYDQSRMFRNMVYWFQFRETLQRIGVHVVSVTQPTVGGDLNDPAVFLNEGVTALFNQMWVLQTQQKVREGVRQRAKSGKHTGGIPALGYRVENERLVIDETEAETVRLIFGLYAAGQSYTEIIGELNRRSLKTKRGRPFGKNSLHDLLKNEKYVGRVLFGGKPVSYDGTRNSHAARGEYLESACPPIVSQELFDAVQQRLLKNRRSPGRSVVNMDQPLKGKVFCGDCGSAMTICYIIAQKTHSRYAYYKCAAKKRGLSCPSKMIRKDELEDIVASSVLDMLGHPNARATLLDVLRTQRNEFAKVSAPRLDALKKEHSVLQTKIRNSVEAIMNGLSSPELIAQTNAAEARKADVEAELKTLQDAIEHQGIPDADLPRLLDKLIKNAKSNSAALLSTVLRVEVYPETIKIWTIFDDNPPDRNDKINKKTVPDILPIDVNMDQKFMHKCGDALWRTNIYAKHEIVIAILAARPQKIR

SEQ ID NO: 2281 - protein, 548 aa, Unknown
  Description of Unknown: Integrase B2282 sequence
  PTHR30461:SF3,cd00338,SM00857,G3DSA:1.10.10.2600,IPR036162, PF13408,PS51737,G3DSA:3.40.50.1390,IPR025827,IPR006119, IPR038109,PF07508,IPR011109,SSF53041,PTHR30461, PS51736,Coil,PF00239
MSTGTELRAVFYARVSTEEEKQLNALEKQIQENKDVIRDHGWRLVGEYIDEGKTGTTTKRRNDYKRLLKDMTENKFDIVVCKDQDRLQRNTLDWYLFVDNLVTNNLKLFMYLDNKFFKPSEDALITGVKAIIAEEYSRNLSKKLNNSNKRRIERALNGEEVSAMGNGKSLAFKIVNGKWVKDEEEAKLGKKIFELYLEYDSIRKVRDWVNEHGYTNSVGKPFTSESISRILKNEKAKGVIVMGKYHHDFDKKKIVRRSEEELVRIPAPELAYVSEEVFDKVQERLRAKTGKGRGVNAYSDPLSGKIYCGSCGRKLWKHASNGYVNWMCASQVAKGDVECNGTRITTVAIRNIYKKITDNLEVNKGVVKQDIVKWLNELKATLSDTSVNEKIQKDLDKLERKRTKLLEAYLEDFISKDDYKAKYEAIEGQIEEKKKILVPVEENEDIKVIESVLQNIDDEIDAYVKTLDMEESKVDFLIEHTKRITVLENRDIIIELDLVAGAIIAGKDFLLYVHDTMPQHHGPKYLHPSGPQTAPRCCFRDRFSCDQP

SEQ ID NO: 2282 - protein, 548 aa, Unknown
  Description of Unknown: Integrase B2283 sequence
  SM00857,G3DSA:1.10.10.2600,IPR036162,PF13408,PS51737, G3DSA:3.40.50.1390,IPR025827,IPR006119,IPR038109,PF07508, IPR011109,SSF53041,PF00239,PTHR30461,PS51736, Coil,cd00338
MTHGAYILARYSTENQSEASIEVQVERCREWCEKQNLPVLDVFADRAISGMKETRPEYQRMMQQLSSGGADTVVIYDQSRMFRNMVYWFQFREALQRIGVHVVSVTQPTVGGDLNDPAVFLNEGVTALFNQMWVLQTQQKVREGVRQRAKSGKHTGGTPALGYRVENERLVIDEAEAETVRLIFELYAAGQSYIDIIAELNRRGLKTKRGNAFGKNSIHDLLKNEKYVGRSLFGGKPVSYDGTRNAHAARGEHLEIECPSIVSKELFDSVQARLAANKHQNTGKRVTAVEQPLKGKIFCGACGGAMTIHYKYPARGGDRYEYYKCATKQRGKGCSGMSIRKDELEDTVANAVLAMLGAPKSRDKLLSVLRDQRDSLLKMSAPKLKELQAEYDSLASQIDKAVDAVMAGLTSPALIERTNALESKKAQVAEEIALLKSNVEHSSLRDEQLAPLLDKLIKSAKENPSAILATVLRVEVYPDTIKIWTIFDDGPAPGDGPITKSNVASLVKSPDTGKWSLGTFMGTASGVPTNVPNIFVVAAFSVLRERKK

SEQ ID NO: 2283 - protein, 548 aa, Unknown
  Description of Unknown: Integrase B2284 sequence
  PTHR30461:SF3,cd00338,SM00857,G3DSA:1.10.10.2600,IPR036162, PF13408,PS51737,IPR025827,G3DSA:3.40.50.1390,IPR006119, IPR038109,PF07508,IPR011109,SSF53041,PTHR30461, PS51736,Coil,PF00239
MKKFPIDLSCLTEEEISQFQEDPYTLYNGDQNVAIYLRYSSTGQSDQSIEGQLRDCRTFCKANHYRIVAIYVDRATTARKDVEKRLHLMEMISDSAKQNWEYVIVWKLDRFARNRNDSAIMKMRLRKNGVKVLSATEHLTDSPESIILESVLEGMAEFFSAELSQKVTRGMRESALKCHSVGGHIPLGYKVENHKLVVDPDTAHIVQEAFSLYANGESVADICRKFNSAGYKTAKNTEFNRSSFKAMFRNTRYIGTYTYKDIVIENGIPAIIDKELFETVQRRLSKTATAPARGKAKVDYLLSGKLFCGHCGASMNGESGAGRHGKVYHYYSCYTKKRKLGCDKRPLKKDYIEGIVARDALNLLTDQLIDEIADMAIRQSEQDLINDTHIPQLTAQLSEVEKSITNITAAIEKGIASETLMNRLVQLEHEKKTLNKEIKAEEKFVYRIDRDQIVFWLSQFKYGNIEDEDFRRRLIDLLVNSVTVWDEPDGYKITTAYNLTSCKTKTFRVEKNPAAEEATGFDFGESECTKSPRNRLISRIFAFYKFRF

SEQ ID NO: 2284 - protein, 548 aa, Unknown
  Description of Unknown: Integrase B2285 sequence
  PTHR30461:SF3,SM00857,G3DSA:1.10.10.2600,IPR036162,PS51737, G3DSA:3.40.50.1390,IPR006119,IPR038109,PF07508,SSF53041, IPR011109,PF00239,PTHR30461,mobidb-lite,Coil, cd00338
MYKEYPKFYYYESLEYGRKSRMDDPLLSVEETLQRHSEIIDEYARKYLGGSIPEENRYMEVGSGESLKDRPEITRLLKAIENPAIKAIIVVDVQRLSRGDLEDAGKLIRLLRYTNTCVITPHKIYDLRDEYDRDAFERELKRGNEYLEYFKKIQARGRLASVKAGNYVGSVAPYGYDRVERYDEVLKKNYFTLVERKDQADVVRMIFNWYCNDDIGVTTICRRLEELGVKTKTGCSTWKPSIIFGILENVHYIGCVRWNWRKTIKVIENQEIKKLRPKAKVDEYLIFEGKHDGIISEELFYKARAIKGKRHRTKQNLSLKNPFSGIMFCTKCGSKIGYNTYNRNGVEFAPPKLVCNNQVHCKTGSVDYNEVLDYMCKVLRDCIEDFKVRIENDQDDSLKLHKDLIERLTKQLKDAEQKEQDQWEAQYDPDPNKRLPQHIFEKLNKKVLAEKEEINKALDKAKGSAPKHIDYKDELIKTTEALKALEDADLDAKITNQYLKSIIDRIEYDRPQIVRINKKNAEIFETDVRKGLQYHVAPYTIRVKLKCE

(The sequence listing continues in the following parts.)

1. A system for modifying DNA comprising:
a) a recombinase polypeptide comprising an amino acid sequence of any of SEQ ID NOs: 1-11,432, or an amino acid sequence having at least 90%, 95%, 96%, 97%, 98%, or 99% identity thereto, or a nucleic acid encoding the recombinase polypeptide; and
b) a double-stranded insert DNA comprising:
(i) a DNA recognition sequence that binds to the recombinase polypeptide of (a),
said DNA recognition sequence comprises a first parapalindromic sequence and a second parapalindromic sequence, wherein each parapalindromic sequence is about 15-35 or 20-30 nucleotides, and the first and second parapalindromic sequences together comprise a parapalindromic region occurring within a nucleotide sequence according to any of SEQ ID NOs: 13,001-24,432 or SEQ ID NOs: 26,001-37,432, or a nucleotide sequence having at least 80%, 85%, 90%, 95%, 96%, 97%, 98%, or 99% identity to said parapalindromic region, or having no more than 1, 2, 3, 4, 5, 6, 7, 8, 9, 10, 11, 12, 13, 14, 15 sequence alterations (e.g., substitutions, insertions, or deletions) relative thereto, and
said DNA recognition sequence further comprises a core sequence of about 2-20 nucleotides wherein the core sequence is situated between the first and second parapalindromic sequences, and
(ii) a heterologous object sequence.

2. A template nucleic acid molecule comprising, in the following order:
a first insulator;
a DNA recognition sequence that is specifically bound by a recombinase polypeptide (e.g., a tyrosine recombinase polypeptide or a serine recombinase polypeptide);
a second insulator; and
a heterologous object sequence.

3. The template nucleic acid molecule of claim 2, wherein the distance between the first insulator and the DNA recognition sequence is less than 100 nucleotides.

4. The template nucleic acid molecule of claim 2 or 3, wherein the distance between the DNA recognition sequence and the second insulator is less than 100 nucleotides.

5. The template nucleic acid molecule of any of the preceding claims, wherein when the template nucleic acid molecule is integrated into a target DNA molecule, the nucleic acid sequence between the first insulator and the second insulator is insulated from one or more of:
a) heterochromatin formation;
b) epigenetic regulation (e.g., from both of epigenetic regulation and transcriptional regulation);
c) transcriptional regulation;
d) histone deacetylation (e.g., from both of histone deacetylation and histone methylation);
e) histone methylation;
f) histone deacetylation; and
g) DNA methylation, e.g., promoter DNA methylation.

6. A method of modifying the genome of a cell (e.g., a eukaryotic cell, e.g., a mammalian cell, e.g., human cell) comprising introducing into the cell:
(i) the template nucleic acid molecule of any of the preceding claims and a recombinase polypeptide that recognizes the DNA recognition sequence;
thereby modifying the genome of the cell.
